United States Patent Application Publication US 2021/0260178 A1 - sequence listing, part 10

SEQ ID NO: 16922 - RNA, 1982 nt, Artificial Sequence
  mRNA product Design a-1 (hSL-A100) comprising derived and/or modified sequence from LASV(ISTH0009-NIG-2011;Clade II)__AIT17405__NP (opt5)
aggagagucccgcagucggcguccagcggcucugcuuguucgugugugugucguugcaggccuuauucaagcuuaccaugagcguguccaaggaggucaaaucuuuccuguggacccagagccucagacgggaacuguccggcuacugcucuaacaucaaacuucaaguugugaaggacgcccaggcucugcuccacgggcuggauuuuagcgagguguccaauguccagcgccuuaugagaaagcagaaacgggacgauucugaccugaagcgccucagagaucugaaccaagccgugaauaaccugguugaacucaagagcacacagcagaaauccauucugcgggugggaacgcuuaccagcgacgaucugcucacacuggcggcugaccuugagaagcugaaaucuaaggucauccgcaccgaaagaccccucuccagcggcguguauauggggaaucugucuacacagcaacuggagcagcggcgcgcccuccugaacaugauuggaaugguuggcggggcccagggaacccagccuggcagagauggcgugguccgggugugggacgugaaaaauccggaucuucugaacaaucaauucgggacaaugcccucccucacccuggcuugucuuacgaagcagggacaggucgaccugaacgaugccguucucgcucugaccgaccugggccucaucuacacagccaaguauccuaauagcucugaccuggaucgccuuucccaaagccaucccauucugaacaugguggacaucaaaaaguccucucucaauaucagcggguacaacuuuucccugggagcggccgugaaagcuggcgccugcaugcuugaugggggaaauaugcuggagaccauuaaggucacaccucagaccauggacggcauccucaaaagcauucugaaggugaaaagaucucugggcauguucguuuccgauacgcccggggaacggaacccuuaugagaacauccucuacaagauuugucugagcggagacggcuggccguauaucgcuucucgcacaagcauuguggggagagccugggaaaauaccacagucgaucuugaguccgacggaaagccccagaaagugggcucugcggggagcaacaagucccugcagagcgccggauuuccuaccggccucaccuacucucaacugaugacacugaaagauuccaugaugcagcuugaccccagcgcuaagacguggaucgauaucgagggccggccugaagaccccguugagauugcccucuaccagccgaugucugggugcuauauccacuucuuuagagaaccuaccgaccugaaacaguucaagcaagaugcuaaguacucccauggaauugacguggccgaucuguuucccgcccagccuggccucacaagcgcugucaucgaggcgcugccccgcaauauggugcuuaccugucagggguccgacgauauuaaacggcugcucgacucucagggaagacgcgauaucaagcugaucgacauugcccugagcaaagcugauucccggagauucgaaaacgccgucugggaccaaugcaaggaucuuugucacaugcauacaggcgugguuguggagaaaaagaagcgcgggggcaaagaggaaaucacgccccacugcgcccucauggacuguauuauguaugaugcugccgucucuggaggccugaauaucccugugcugcgggcgguucucccgagagacaugguguuucgcaccagcucccccaaggucgugcugugaggacuagucccuguucccagagcccacuuuuuuuucuuuuuuugaaauaaaauagccugucuuucagaucucaaaggcucuuuucagagccaccaaaaaaaaaaaaaaaaaaaaaaaaaaaaaaaaaaaaaaaaaaaaaaaaaaaaaaaaaaaaaaaaaaaaaaaaaaaaaaaaaaaaaaaaaaaaaaaaaaaaa

SEQ ID NO: 16923 - RNA, 1982 nt, Artificial Sequence
  mRNA product Design a-1 (hSL-A100) comprising derived and/or modified sequence from LASV(ISTH2010-NIG-2012;Clade II)__AIT17483__NP (opt5)
aggagagucccgcagucggcguccagcggcucugcuuguucgugugugugucguugcaggccuuauucaagcuuaccaugagcgccuccaaggaggugaaaucuuuccuguggacccagagccucagacgggaacuguccggcuacugcucuaacaucaaacuucaagucguuaaggacgcucaggcccugcuccacgggcuggauuuuagcgagguguccaaugugcagcgccuuaugagaaagcagaaacgggacgauucugaccugaagcgccucagagaucugaaccaagcggucaauaaccugguggaacucaagagcacacagcagaaauccauucugcggguuggaacgcuuaccagcgacgaucugcucacacuggcugccgaccuugagaagcugaaaucuaaggugauccgcaccgaaagaccccucuccagcggcgucuauauggggaaucugucuacacagcaacuggagcagcggcgcgcccuccugaaccuuauuggaauggugggcggggcucagggaacccagccuggcagagauggcguugugcgggucugggacgugaaaaauccggaucugcucaacaaucaauucgggacaaugcccucccugacccuugccugucugacgaagcagggacagguggaccucaacgaugcuguccuggcccugaccgaccucggccugaucuacacagcgaaguauccuaauagcucugaccuugaucgccugucccaaagccaucccauucucaacaugguugacaccaaaaaguccucucugaauaucagcggguuuaacuucucccuuggagccgcugugaaagccggcgcuugcaugcuggaugggggaaauaugcucgagacaaucaaggugaccccucagacgauggacggcauucugaaaagcauccugaaggucaaaaagucucucggcauguuuguguccgauacacccggggaaagaaacccuuacgagaacauucuguauaagaucugucuuagcggagacggcuggccguacauugccucucggaccagcaucguugggcgcgcgugggaaaauacaaccguggaucuggaguccgacggaaaaccccacaaggucggcaccgccgggucuaacaaaagccuccaguccgcuggauucccuacaggccugacguauagccagcugaugacccuuaaggauucuaugaugcaacucgaccccuccgccaaaacauggauugauaucgagggcagaccugaagaccccguggagaucgcucuguaccagccgaugagcgggugcuacauucacuuuuuccgggaaccuaccgaccugaagcaguuuaagcaggaugccaaauauucucauggaaucgacguugccgaucucuuccccgcucaaccuggccugacauccgcggugauugaggcccuucccagaaauaugguccugaccugucaggggagcgacgauaucaagcgccuccuggacucccagggacggagagauauuaaacugaucgacaucgcucuuucuaaggccgauagccgccgguuugaaaacgccgugugggaccagugcaaagaucucugucauaugcacacgggcgucgugguugagaagaagaaaagagggggcaaggaggaaauuacaccccacugcgcucugauggacuguaucauguacgaugccgcgguguccggaggccugaauauuccuguccuccgcgcugugcugccgcgggacaugguuuucagaaccucuagccccaaagugguccuuugaggacuagucccuguucccagagcccacuuuuuuuucuuuuuuugaaauaaaauagccugucuuucagaucucaaaggcucuuuucagagccaccaaaaaaaaaaaaaaaaaaaaaaaaaaaaaaaaaaaaaaaaaaaaaaaaaaaaaaaaaaaaaaaaaaaaaaaaaaaaaaaaaaaaaaaaaaaaaaaaaaaaa

SEQ ID NO: 16924 - RNA, 1982 nt, Artificial Sequence
  mRNA product Design a-1 (hSL-A100) comprising derived and/or modified sequence from LASV(Lassa virus/H.sapiens-wt/NGA/2015/ISTH_0543;Clade II)__AVO03640__NP (opt5)
aggagagucccgcagucggcguccagcggcucugcuuguucgugugugugucguugcaggccuuauucaagcuuaccaugagcgccuccaaggaggugaaaucuuuccuguggacccagagccucagacgggaacuguccggcuacugcucuaacaucaaacuucaagucguuaaggacgcucaggcccugcuccacgggcuggauuuuagcgagguguccaaugugcagcgccuuaugagaaagcagaaacgggacgauucugaccugaagcgccucagagaucugaaccaagcggucaauaaccugguggaacucaagagcacacagcagaaauccauucugcggguuggaacgcuuaccagcgacgaucugcucacacuggcugccgaccuugagaagcugaaaucuaaggugauccgcaccgaaagaccccucuccagcggcgucuauauggggaaucugucuacacagcaacuggagcagcggcgcgcccuccugaacaugauuggaauggugggcggggcucagggaacccagccuggcagagauggcguugugcgggucugggacgugaaaaauccggaucuucugaacaaucaauucgggacaaugcccucccucacccuggccugucuuacgaagcagggacagguggaccugaacgaugcuguccucgcccugaccgaccugggccucaucuacacagcgaaguauccuaauagcucugaccuggaucgccuuucccaaagccaucccauucugaacaugguugacaccaaaaaguccucucucaauaucagcggguacaacuuuucccugggagccgcugugaaagccggcgcuugcaugcuugaugggggaaauaugcuggagacaaucaaggugaccccucagacgauggacggcauucucaaaagcauccugaaggucaaaaagucucugggcauguucguguccgauacacccggggaaagaaacccuuaugagaacauucucuacaagaucugucugagcggagacggcuggccguauauugccucucggaccagcaucguugggcgcgcgugggaaaauacaaccguggaucuugaguccgacggaaaaccccagaaggucggcucugccgggagcaacaaaucccugcagagcgcuggauuuccuaccggccucacauacucucaacugaugacgcugaaggauuccaugaugcagcuugaccccagcgccaaaaccuggauugauaucgagggcagaccugaagaccccguggagaucgcucucuaccagccgaugucugggugcuauauucacuucuuucgggaaccuacagaccugaagcaguucaagcaagaugccaaauacucccauggaaucgacguugccgaucuguuucccgcucagccuggccucaccagcgcggugauugaggcccugcccagaaauaugguccuuacaugucagggguccgacgauaucaagcgccugcucgacucucagggacggaaagauauuaagcugaucgacaucgcucugagcaaagccgauuccagacgcuucgaaaacgccgugugggaccaaugcaaggaucuuugucacaugcauaccggcgucgugguugagaagaaaaagagagggggcaaagaggaaauuacgccccacugcgcucucauggacuguaucauguaugaugccgcggugucuggaggccugaauauuccuguccugcgggcugugcucccgcgcgacaugguuuuucggacaagcucccccaaggugguccugugaggacuagucccuguucccagagcccacuuuuuuuucuuuuuuugaaauaaaauagccugucuuucagaucucaaaggcucuuuucagagccaccaaaaaaaaaaaaaaaaaaaaaaaaaaaaaaaaaaaaaaaaaaaaaaaaaaaaaaaaaaaaaaaaaaaaaaaaaaaaaaaaaaaaaaaaaaaaaaaaaaaaa

SEQ ID NO: 16925 - RNA, 1982 nt, Artificial Sequence
  mRNA product Design a-1 (hSL-A100) comprising derived and/or modified sequence from LASV(Lassa virus/H.sapiens-wt/NGA/2016/ISTH_0009;Clade II)__AVO03572__NP (opt5)
aggagagucccgcagucggcguccagcggcucugcuuguucgugugugugucguugcaggccuuauucaagcuuaccaugagcgccuccaaggaggugaaaucuuuccuguggacccagagccucagacgggaacuguccggcuacugcucuaacaucaaacuucaagucguuaaggacgcucaggcccugcuccacgggcuggauuuuagcgagguguccaaugugcagcgccuuaugagaaagcagaaacgggacgauucugaccugaagcgccucagagaucugaaccaagcggucaauaaccugguggaacucaagagcacacagcagaaauccauucugcggguuggaacgcuuaccagcgacgaucugcucacacuggcugccgaccuugagaagcugaaaucuaaggugauccgcaccgaaagaccccucuccagcggcgucuauauggggaaucugucuacacagcaacuggagcagcggcgcgcccuccugaacaugauuggaauggugggcggggcucagggaacccagccuggcagagauggcguugugcgggucugggacgugaaaaauccggaucuucugaacaaucaauucgggacaaugcccucccucacccuggccugucuuacgaagcagggacagguggaccugaacgaugcuguccucgcccugaccgaccugggccucaucuacacagcgaaguauccuaauagcucugaccuggaucgccuuucccaaagccaucccauucugaacaugguugacaccaaaaaguccucucucaauaucagcggguacaacuuuucccugggagccgcugugaaagccggcgcuugcaugcuugaugggggaaauaugcuggagacaaucaaggugaccccucagacgauggacggcauucucaaaagcauccugaaggucaaaaagucucugggcauguucguguccgauacacccggggaaagaaacccuuaugagaacauucucuacaagaucugucugagcggagacggcuggccguauauugccucucggaccagcaucguugggcgcgcgugggaaaauacaaccguggaucuugaguccgacggaaaaccccagaaggucggcucugccgggagcaacaaaucccugcagagcgcuggauuuccuaccggccucacauacucucaacugaugacgcugaaggauuccaugaugcagcuugaccccagcgccaaaaccuggauugauaucgagggcagaccugaagaccccguggagaucgcucucuaccagccgaugucugggugcuauauucacuucuuucgggaaccuacagaccugaagcaguucaagcaagaugccaaauacucccauggaaucgacguugccgaucuguuucccgcucagccuggccucaccagcgcggugauugaggcccugcccagaaauaugguccuuacaugucagggguccgacgauaucaagcgccugcucgacucucagggacggagagauauuaaacugaucgacaucgcucugagcaaggccgauucccgccgguucgaaaacgccgugugggaccaaugcaaagaucuuugucacaugcauaccggcgucgugguugagaagaagaaaagagggggcaaggaggaaauuacgccccacugcgcucucauggacuguaucauguaugaugccgcggugucuggaggccugaauauuccuguccugcgcgcugugcucccgcgggacaugguuuuuagaacaagcucccccaaagugguccugugaggacuagucccuguucccagagcccacuuuuuuuucuuuuuuugaaauaaaauagccugucuuucagaucucaaaggcucuuuucagagccaccaaaaaaaaaaaaaaaaaaaaaaaaaaaaaaaaaaaaaaaaaaaaaaaaaaaaaaaaaaaaaaaaaaaaaaaaaaaaaaaaaaaaaaaaaaaaaaaaaaaaa

SEQ ID NO: 16926 - RNA, 1982 nt, Artificial Sequence
  mRNA product Design a-1 (hSL-A100) comprising derived and/or modified sequence from LASV(Lassa virus/H.sapiens-wt/NGA/2016/ISTH_0017;Clade II)__AVO03568__NP (opt5)
aggagagucccgcagucggcguccagcggcucugcuuguucgugugugugucguugcaggccuuauucaagcuuaccaugagcgccuccaaggaggugaaaucuuuccuguggacccagagccucagacgggaacuguccggcuacugcucuagcaucaaacuucaagucguuaaggacgcucaggcccugcuccacgggcuggauuuuuccgaggugucuaacgugcagcgccuuaugagaaagcagaaacgggacgauagcgaccugaagcgccucagagaucugaaucaagcggucaacaaucugguggaacucaaguccacacagcagaaaagcauucugcggguuggaacgcuuaccucugacgaucugcucacacuggcugccgaccuugagaagcugaaauccaaggugauccgcaccgaaagaccccucagcucuggcgucuauauggggaaccuguccacacagcaacuggagcagcggcgcgcccuccugaauaugauuggaauggcuggcggggcccagggaacccagccuggcagagauggcgugguucgggugugggacgucaaaaacccggaucuucugaauaaccaauucgggacaaugcccagccucacccuggcuugucuuacgaagcagggacagguggaccugaaugaugccgugcucgcgcugaccgaccugggccucaucuacacagccaaguauccuaacucuuccgaccuggaucgccuuagccaaucccaucccauucugaauauggucgacaccaaaaagucuagccucaacaucuccggguacaauuuuagccugggagcugccguuaaagcuggcgccugcaugcuugaugggggaaacaugcuggagacaaucaaggugaccccucagacgauggacggcauucucaaaucuauccugaaggugaaaagaucccugggcauguucgucagcgaugcgcccggggaacggaauccuuaugagaacauucucuacaagaucugucugucuggagacggcuggccguauauugccagccgcacauccaucguggggagagcuugggaaaacaccacaguugaucuugagucugacggaaagccccagaaagugggcgccaccgggagcaauaagucccugcagagcgcuggauuuccuaccggccucacauacucucaacugaugacgcugaaagauuccaugaugcagcuugaccccagcgccaagaccuggauugauaucgagggccggccugaagaccccgucgagguggcccucuaccagccgguuucugggugcuauauccacuucuuuagagaaccuacagaccugaaacaguucaagcaagaugcuaaguacucccauggaauugacguggcggaucuguuucccgcccagccuggccucaccagcgcugucaucgaggcccugccccgcaacauggugcuuacaugucagggguccgacgauauuaaaaagcugcucgacucucagggacggaaagauaucaagcugauugacaucgcccugagcaaagcugauuccagacgcuucgaaaaugccgucugggaccaaugcaaggaucuuugucacaugcauaccggcgugguuguggagaagaaaaagagagggggcaaagaggaaaucacgccccacugcgcgcucauggacuguauuauguaugaugcugccgucucuggaggccugaacaucccugugcugcgggccguucucccgcgcgacaugguguuucggacaagcucccccaaggucgugcugugaggacuagucccuguucccagagcccacuuuuuuuucuuuuuuugaaauaaaauagccugucuuucagaucucaaaggcucuuuucagagccaccaaaaaaaaaaaaaaaaaaaaaaaaaaaaaaaaaaaaaaaaaaaaaaaaaaaaaaaaaaaaaaaaaaaaaaaaaaaaaaaaaaaaaaaaaaaaaaaaaaaaa

SEQ ID NO: 16927 - RNA, 1982 nt, Artificial Sequence
  mRNA product Design a-1 (hSL-A100) comprising derived and/or modified sequence from LASV(Lassa virus/H.sapiens-wt/NGA/2018/ISTH_0959;Clade II)__AVV65100__NP (opt5)
aggagagucccgcagucggcguccagcggcucugcuuguucgugugugugucguugcaggccuuauucaagcuuaccaugagcgccuccaaggaggugaaaucuuuccuguggacccagagccucagacgggaacuguccggcuacugcucuaacaucaaacuucaagucguuaaggacgcucaggcccugcuccacgggcuggauuuuagcgagguguccaaugugcagcgccuuaugagaaagcagaaacgggacgauucugaccugaagcgccucagagaucugaaccaagcggucaauaaccugguggaacucaagagcacccagcagaaauccauucugcggguuggaacgcuuaccagcgacgaucugcucacacuggcugccgaccuugagaagcugaaaucuaaggugauccgcaccgaaagaccccucuccagcggcgucuauauggggaaucugucuacacagcaacuggagcagcggcgcgcccuccugaaccuuauuggaauggugggcggggcucagggaacccagccuggcagagauggcguugugcgggucugggacgugaaaaauccggaucugcucaacaaucaauucgggacaaugcccucccugacccuugccugucugacgaagcagggacagguggaccucaacgaugucguucuggcucugaccgaccucggccugaucuacacagccaaguauccuaauagcucugaccuugaucgccugucccaaagccaucccauucucaacaugguggacaccaaaaaguccucucugaauaucagcggguuuaacuucucccuuggagcggccgugaaagcuggcgccugcaugcuggaugggggaaauaugcucgagacaaucaaggucaccccucagacgauggacggcauucugaaaagcauccugaaggugaaaaagucucucggcauguuuguuuccgauacacccggggaaagaaacccuuacgagaacauucuguauaagaucugucuuagcggagacggcuggccguacauugcuucucggaccagcaucguggggcgcgccugggaaaauacaaccgucgaucuggaguccgacggaaaaccccacaaggugggcaccgcggggucuaacaaaagccuccaguccgccggauucccuacaggccugacguauagccagcugaugacccuuaaggauucuaugaugcaacucgaccccuccgcuaaaacauggauugauaucgagggcagaccugaagaccccguugagaucgcccuguaccagccgaugagcgggugcuacauucacuuuuuccgggaaccuaccgaccugaagcaguuuaagcaggaugcuaaauauucucauggaaucgacguggccgaucucuuccccgcccaaccuggccugacauccgcugucauugaggcgcuucccagaaauauggugcugaccugucaggggagcgacgauaucaagcgccuccuggacucccagggacggaaagauauuaagcugaucgacaucgcccuuucuaaaacggauagcagacgcuuugaaaacgcugucugggaccagugcaaggaucucugucauaugcacacaggcgugguuguggagaagaaaaagagagggggcaaagaggaaauuacaccccacugcgcccugauggacuguaucauguacgaugccgcugucuccggaggccugaauauuccugugcuccgggccguucugccgcgcgacaugguguuccggaccucuagccccaaggucgugcuuugaggacuagucccuguucccagagcccacuuuuuuuucuuuuuuugaaauaaaauagccugucuuucagaucucaaaggcucuuuucagagccaccaaaaaaaaaaaaaaaaaaaaaaaaaaaaaaaaaaaaaaaaaaaaaaaaaaaaaaaaaaaaaaaaaaaaaaaaaaaaaaaaaaaaaaaaaaaaaaaaaaaaa

SEQ ID NO: 16928 - RNA, 1982 nt, Artificial Sequence
  mRNA product Design a-1 (hSL-A100) comprising derived and/or modified sequence from LASV(LASV003-NIG-2008;Clade II)__AIT17581__NP (opt5)
aggagagucccgcagucggcguccagcggcucugcuuguucgugugugugucguugcaggccuuauucaagcuuaccaugagcgccuccaaggaggugaaaucuuuccuguggacccagagccucagacgggaacuguccggcuacugcucuagcaucaaacuucaagucguuaaggacgcucaggcccugcuccacgggcuggauuuuuccgaggugucuaacgugcagcgccuuaugagaaagcagaaacgggacgauagcgaccugaagcgccucagagaucugaaucaagcggucaacaaucugguggaacucaaguccacccagcagaaaagcguucugcgggugggaacgcuuaccucugacgaucugcucacacuggcugccgaccuugagaagcugaaauccaaggucauucgcaccgaaagaccccucagcucuggcguguauauggggaaccuguccgcccagcaacuggagcagcggcgcacacuccugaauaugaucggaaugguuggcggggcucagggaacccagccuggcagagauggcgugguccgggugugggacgugaaaaacccggaucuucugaauaaccaauucgggacaaugcccagccucacccuggccugucuuacgaagcagggacaggucgaccugaaugauguugugcucgcucugaccgaccugggccucauuuacacagccaaguauccuaacucuuccgaccuggaucgccuuagccaaucccaucccauccugucuaugguggacaccaaaaagagcucccucaauauuagcggguacaacuuuucucugggagcggccgucaaagcuggcgccugcaugcuugaugggggaaauaugcuggagacaaucaaggugaccccucagacgauggacggcauccucaaauccauucugaagguuaaaaagagccugggcauguucgugucugauacacccggggaaagaaacccuuaugagaauauccucuacaagauuugucugagcggagacggcuggccguauaucgcuucccggaccucuauugucgggcgcgccugggaaaacacaaccguggaucuugagagcgacggaaaaccccagaagguuggcaccgcgggguccaacaaaagccugcagucugccggauuuccuacaggccucacguacucccaacugaugacccugaaggauagcaugaugcagcuugaccccucugcuaaaacauggaucgauauugagggcagaccugaagaccccguggagaucgcccucuaccagccgauguccgggugcuauauccacuucuuucgggaaccuaccgaccugaagcaguucaagcaagaugcuaaauacagccauggaauugacgucacagaucuguuucccgcccagccuggccucaccuccgccgugaucgaggcucugcccagaaauaugguccuuacgugucaggggucugacgauauuaagcgccugcucgacagccagggacggagagauaucaaacugauugacaucgcgcuguccaaggccgauucucgccgguucgaaaacgcugugugggaccaaugcaaagaucuuugucacaugcauacaggcguuguggucgagaagaagaaaagagggggcaaggaggaaaucacaccccacugcgcccucauggacuguauuauguaugaugccgcugugagcggaggccugaauaucccuguucugcgcgccgugcucccgcgggacauggucuuuagaaccuccagccccaaaguggugcugugaggacuagucccuguucccagagcccacuuuuuuuucuuuuuuugaaauaaaauagccugucuuucagaucucaaaggcucuuuucagagccaccaaaaaaaaaaaaaaaaaaaaaaaaaaaaaaaaaaaaaaaaaaaaaaaaaaaaaaaaaaaaaaaaaaaaaaaaaaaaaaaaaaaaaaaaaaaaaaaaaaaaa

SEQ ID NO: 16929 - RNA, 1982 nt, Artificial Sequence
  mRNA product Design a-1 (hSL-A100) comprising derived and/or modified sequence from LASV(LASV035-NIG-2009;Clade II)__AIT17589__NP (opt5)
aggagagucccgcagucggcguccagcggcucugcuuguucgugugugugucguugcaggccuuauucaagcuuaccaugagcgccuccaaggaggugaaaucuuuccuguggacccagagccucagacgggaacuguccggcuacugcucuagcaucaaacuucaagucguuaaagacgcucaggcccugcuccacgggcuggauuuuuccgaggugucuaacgugcagcgccuuaugagaaagcagaaacgggacgauagcgaccugaagcgccucagagaucugaaucaagcggucaacaaucugguggaacucaaguccacacagcagaaaagcauucugcggguuggaacgcuuaccucugacgaucugcucacacuggcugccgaccuugagaagcugaaauccaaggugauccgcaccgaaagaccccucagcucuggcgucuauauggggaaccuguccgcccagcaacuggagcagcggcgcgcucuccugaauaugauuggaauggugggcggggcccagggaacacagccuggcagagauggcguugugcgggucugggacgugaaaaacccggaucuucugaauaaccaauucgggaccaugcccagccucacacuggcuugucuuaccaagcagggacagguggaccugaaugaugccguccucgcgcugacggaccugggccucaucuacaccgccaaguauccuaacucuuccgaccuggaucgccuuagccaaucccaucccauucugaauaugguugacacaaagaagucuagccucaacaucuccggguacaauuuuagccugggagcugccgugaaagcuggcgccugcaugcuugaugggggaaacaugcuggagaccaucaaggugacaccucagaccauggacggcauucucaaaucuauccugaaggucaaaagaucccugggcauguucgugagcgauacgcccggggaacggaauccuuaugagaacauucucuacaagaucugucugucuggagacggcuggccguauauugcgagccgcacauccaucguugggagagccugggaaaacaccacaguggaucuugagucugacggaaagccccagaaagucggcaccaccgggagcaauaagucccugcagagcgcuggauuuccuacaggccucacguacucucaacugaugacccugaaagauuccaugaugcagcuugaccccagcgccaagacauggauugauaucgagggccggccugaagaccccguggagaucgcucucuaccagccgaugucugggugcuauauucacuucuuuagagaaccuaccgaccugaaacaguucaagcaagaugccaaguacucccauggaaucgacguugccgaucuguuucccgcucagccuggccucacaagcgcggugauugaggcccugccccgcaacaugguccuuaccugucagggguccgacgauaucaaaaagcugcucgacucucagggacggagagauauuaaacugaucgacaucgcucugagcaaggccgauucccgcaaauucgaaaaugccgugugggaccaaugcaaggaucuuugucacaugcauacgggcgucgugguugagaagaaaaagagagggggcaaagaggaaauuacaccccacugcgcucucauggacuguaucauguaugaugccgcggugucuggaggccugaacauuccuguccugcgggcugugcucccgcgcgacaugguuuuucggaccagcucccccaaggugguccugugaggacuagucccuguucccagagcccacuuuuuuuucuuuuuuugaaauaaaauagccugucuuucagaucucaaaggcucuuuucagagccaccaaaaaaaaaaaaaaaaaaaaaaaaaaaaaaaaaaaaaaaaaaaaaaaaaaaaaaaaaaaaaaaaaaaaaaaaaaaaaaaaaaaaaaaaaaaaaaaaaaaaa

SEQ ID NO: 16930 - RNA, 1982 nt, Artificial Sequence
  mRNA product Design a-1 (hSL-A100) comprising derived and/or modified sequence from LASV(LASV1000-NIG-2009;Clade II)__AIT17783__NP (opt5)
aggagagucccgcagucggcguccagcggcucugcuuguucgugugugugucguugcaggccuuauucaagcuuaccaugagcgccuccaaggaggugaaaucuuuccuguggacccagagccucagacgggaacuguccggcuacugcucuaacaucaaacuucaagucguuaaggacgcucaggcccugcuccacgggcuggauuuuagcgagguguccaaugugcagcgccuuaugagaaagcagaaacgggacgauucugaccugaagcgccucagagaucugaaccaagcggucaauaaccugguggaacucaagagcacacagcagaaauccauucugcggguuggaacgcuuaccagcgacgaucugcucacacuggcugccgaccuugagaagcugaaaucuaaggugauccgcaccgaaagaccccucuccagcggcgucuauauggggaaucugucuacacagcaacuggagcagcggcgcgcccuccugaacaugauuggaauggugggcggggcucagggaacccagccuggcagagauggcguugugcgggucugggacgugaaaaauccggaucuucugaacaaucaauucgggacaaugcccucccucacccuggccugucuuacgaagcagggacagguggaccugaacgaugucguucucgcucugaccgaccugggccucaucuacacagccaaguauccuaauagcucugaccuggaucgccuuucccaaagccaucccauucugaacaugguggacaccaaaaaguccucucucaauaucagcggguacaacuuuucccugggagcggccgugaaagcuggcgccugcaugcuugaugggggaaauaugcuggagacaaucaaggucaccccucagacgauggacggcauucucaaaagcauccugaaggugaaaaagucucugggcauguucguuuccgauacacccggggaaagaaacccuuaugagaacauucucuacaagaucugucugagcggagacggcuggccguauauugcuucucggaccagcaucguggggcgcgccugggaaaauacaaccgucgaucuugaguccgacggaaaaccccagaaggugggcaccgcggggucuaacaaaagccugcaguccgccggauuuccuacaggccucacguacagccaacugaugacccugaaggauucuaugaugcagcuugaccccuccgcuaaaacauggauugauaucgagggcagaccugaagaccccguugagaucgcccucuaccagccggugagcgggugcuauauucacuucuuucgggaaccuaccgaccugaagcaguucaagcaagaugcuaaauacucucauggaaucgacgucgccgaucuguuucccgcccagccuggccucacauccgcugugauugaggcgcugcccagaaauaugguccuuaccugucaggggagcgacgauaucaagcgccugcucgacucccagggacggagagauauuaaacugaucgacaucgcccugucuaaggcugauagccgccgguucgaaaacgccgugugggaccaaugcaaagaucuuugucacaugcauacgggcguuguggucgagaagaagaaaagagggggcaaggaggaaauuacaccccacugcgcccucauggacuguaucauguaugaugcugccguguccggaggccugaauauuccuguucugcgcgcggugcucccgcgggacauggucuuuagaaccucuagccccaaaguggugcugugaggacuagucccuguucccagagcccacuuuuuuuucuuuuuuugaaauaaaauagccugucuuucagaucucaaaggcucuuuucagagccaccaaaaaaaaaaaaaaaaaaaaaaaaaaaaaaaaaaaaaaaaaaaaaaaaaaaaaaaaaaaaaaaaaaaaaaaaaaaaaaaaaaaaaaaaaaaaaaaaaaaaa

SEQ ID NO: 16931 - RNA, 1982 nt, Artificial Sequence
  mRNA product Design a-1 (hSL-A100) comprising derived and/or modified sequence from LASV(LASV221-NIG-2010;Clade II)__AIT17625__NP (opt5)
aggagagucccgcagucggcguccagcggcucugcuuguucgugugugugucguugcaggccuuauucaagcuuaccaugagcgccuccaaggaggugaaaucuuuccuguggacccagagccucagacgggaacuguccggcuacugcucuagcaucaaacuucaagucguuaaggacgcucaggcccugcuccacgggcuggauuuuuccgaggugucuaacgugcagcgccuuaugagaaagcagcggcgcgacgauagcgaccugaaaagacuccgggaucugaaucaagcggucaacaaucugguggaacucaaguccacacagcaaaagagcauucugcgcguuggaacgcuuaccucugacgaucugcucacacuggcugccgaccuugagaaacugaaguccaaagugaucagaaccgaacggccccucagcucuggcgucuauauggggaaccuguccacacagcagcuggagcagcgcagagcccuccugaauaugauuggaauggugggcggggcucagggaacccagccuggccgggauggcguugugcgcgucugggacgugaagaacccggaucuucugaauaaccaauucgggacaaugcccagccucacccuggccugucuuacgaaacagggacagguggaccugaaugaugcuguccucgcccugaccgaccugggccucaucuacacagcgaaguauccuaacucuuccgaccuggauagacuuagccaaucccaucccauucugaauaugguugacaccaagaaaucuagccucaacaucuccggguacaauuuuagccugggagccgcugugaaggccggcgcuugcaugcuugaugggggaaacaugcuggagacaaucaaagugaccccucagacggucgacggcauucucaagucuauccugaaagugaagcggucccugggcauguucguuagcgauacacccggggaacgcaauccuuaugagaacauucucuacaaaaucugucugucuggagacggcuggccguauauugccagcagaaccuccaucguggggcgggcgugggaaaacacaaccgucgaucuugagucugacggaaagccccagaaggugggcaccgccgggagcaauaaaucccugcagagcgcuggauuuccuacaggccucacguacucucaacugaugacccugaaggauuccaugaugcagcuugaccccagcgccaaaacauggauugauaucgagggcagaccugaagaccccguugagaucgcucucuaccagccgaugucugggugcuauauucacuucuuucgcgaaccuaccgaccugaagcaguucaaacaagaugccaaguacucccauggaaucgacguggccgaucuguuucccgcucagccuggccucacaagcgcggucauugaggcccugccccggaacauggugcuuaccugucagggguccgacgauaucaagagacugcucgacucucagggacgccgggauauuaaacugaucgacaucgcucugagcaaggccgauuccagaaaauucgaaaaugccgucugggaccaaugcaaggaucuuugucacaugcauacgggcgugguuguggagaaaaagaagcgcgggggcaaagaggaaauuacaccccacugcgcucucauggacuguaucauguaugaugccgcggucucuggaggccugaacauuccugugcugcgggcuguucucccgagagacaugguguuucgcaccagcucccccaaggucgugcugugaggacuagucccuguucccagagcccacuuuuuuuucuuuuuuugaaauaaaauagccugucuuucagaucucaaaggcucuuuucagagccaccaaaaaaaaaaaaaaaaaaaaaaaaaaaaaaaaaaaaaaaaaaaaaaaaaaaaaaaaaaaaaaaaaaaaaaaaaaaaaaaaaaaaaaaaaaaaaaaaaaaaa

SEQ ID NO: 16932 - RNA, 1982 nt, Artificial Sequence
  mRNA product Design a-1 (hSL-A100) comprising derived and/or modified sequence from LASV(LASV237-NIG-2010;Clade II)__AIT17639__NP (opt5)
aggagagucccgcagucggcguccagcggcucugcuuguucgugugugugucguugcaggccuuauucaagcuuaccaugagcgccuccaaggaggugaaaucuuuccuguggacccagagccucagacgggaacuguccggcuacugcucuaacaucaaacuucaagucguuaaggacgcucaggcccugcuccacgggcuggauuuuagcgagguguccaaugugcagcgccuuaugagaaagcagaaacgggacgauucugaccugaagcgccucagagaucugaaccaagcggucaauaaccugguggaacucaagagcacacagcagaaauccauucugcggguuggaacgcuuaccagcgacgaucugcucacacuggcugccgaccuugagaagcugaaaucuaaggugauccgcaccgaaagaccccucuccagcggcgucuauauggggaaucugucuacacagcaacuggagcagcggcgcgcccuccugaacaugauuggaauggugggcggggcucagggaacccagccuggcagagauggcguugugcgggucugggacgugaaaaauccggaucuucugaacaaucaauucgggacaaugcccucccucacccuggccugucuuacgaagcagggacagguggaccugaacgaugcuguccucgcccugaccgaccugggccucaucuacacagcgaaguauccuaauagcucugaccuggaucgccuuucccaaagccaucccauucugaacaugguugacaucaaaaaguccucucucaauaucagcggguacaacuuuucccugggagccgcugugaaagccggcgcuugcaugcuugaugggggaaauaugcuggagaccauuaaggugacaccucagaccauggacggcauccucaaaagcauucugaaggucaaaagaucucugggcauguucguguccgauacgcccggggaacggaacccuuaugagaacauccucuacaagauuugucugagcggagacggcuggccguauaucgccucucgcacaagcauuguugggagagcgugggaaaauaccacaguggaucuugaguccgacggaaagccccagaaagucggcucugccgggagcaacaagucccugcagagcgcuggauuuccuaccggccucaccuacucucaacugaugacacugaaagauuccaugaugcagcuugaccccagcgccaagacguggaucgauaucgagggccggccugaagaccccguggagauugcucucuaccagccgaugucugggugcuauauccacuucuuuagagaaccuaccgaccugaaacaguucaagcaagaugccaaguacucccauggaauugacguugccgaucuguuucccgcucagccuggccucacaagcgcggugaucgaggcccugccccgcaauaugguccuuaccugucagggguccgacgauauuaaacggcugcucgacucucagggaagacgcgauaucaagcugaucgacauugcucugagcaaagccgauucccggagauucgaaaacgccgugugggaccaaugcaaggaucuuugucacaugcauacaggcgucgugguugagaaaaagaagcgcgggggcaaagaggaaaucacgccccacugcgcucucauggacuguauuauguaugaugccgcggugucuggaggccugaauaucccuguccugcgggcugugcucccgagagacaugguuuuucgcaccagcucccccaaggugguccugugaggacuagucccuguucccagagcccacuuuuuuuucuuuuuuugaaauaaaauagccugucuuucagaucucaaaggcucuuuucagagccaccaaaaaaaaaaaaaaaaaaaaaaaaaaaaaaaaaaaaaaaaaaaaaaaaaaaaaaaaaaaaaaaaaaaaaaaaaaaaaaaaaaaaaaaaaaaaaaaaaaaaa

SEQ ID NO: 16933 - RNA, 1982 nt, Artificial Sequence
  mRNA product Design a-1 (hSL-A100) comprising derived and/or modified sequence from LASV(LASV253-NIG-2011;Clade II)__AIT17671__NP (opt5)
aggagagucccgcagucggcguccagcggcucugcuuguucgugugugugucguugcaggccuuauucaagcuuaccaugagcgccuccaaggaggugaaaucuuuccuguggacccagagccucagacgggaacuguccggcuacugcucuagcaucaaacuucaagucguuaaggacgcucaggcccugcuccacgggcuggauuuuuccgaggugucuaacgugcagcgccuuaugagaaagcagaaacgggacgauagcgaccugaagcgccucagagaucugaaucaagcggucaacaaucugguggaacucaaguccacccagcagaaaagcguucugcgggugggaacgcuuaccucugacgaucugcucacacuggcugccgaccuugagaagcugaaauccaaggucauucgcaccgaaagaccccucagcucuggcguguauauggggaaccuguccacacagcaacuggagcagcggcgcgcccuccugaauaugaucggaaugguuggcggggcucagggaacccagccuggcagagauggcgugguccgggugugggacgugaaaaacccggaucuucugaauaaccaauucgggacaaugcccagccucacccuggccugucuuacgaagcagggacaggucgaccugaaugauguugugcucgcucugaccgaccugggccucauuuacacagccaaguauccuaacucuuccgaccuggaucgccuuagccaaucccaucccauccugaauaugguggacaccaaaaagucuagccucaacauuuccggguacaauuuuagccugggagcggccgucaaagcuggcgccugcaugcuugaugggggaaacaugcuggagacaaucaaggugaccccucagacgauggacggcauccucaaaucuauucugaagguuaaaaagucccugggcauguucgugagcgauacacccggggaaagaaauccuuaugagaacauccucuacaagauuugucugucuggagacggcuggccguauaucgcuagccggaccuccauugucgggcgcgccugggaaaacacaaccguggaucuugagucugacggaaaaccccagaagguuggcaccgcggggagcaauaaaucccugcagagcgccggauuuccuacaggccucacguacucucaacugaugacccugaaggauuccaugaugcagcuugaccccagcgcuaaaacauggaucgauauugagggcagaccugaagaccccguggagaucgcccucuaccagccgaugucugggugcuauauccacuucuuucgggaaccuaccgaccugaagcaguucaagcaagaugcuaaauacucccauggaauugacgucacagaucuguuucccgcccagccuggccucaccagcgccgugaucgaggcucugcccagaaacaugguccuuacgugucagggguccgacgauauuaagcgccugcucgacucucagggacggagagauaucaaacugauugacaucgcgcugagcaaggccgauucccgccgguucgaaaaugcugugugggaccaaugcaaagaucuuugucacaugcauacaggcguuguggucgagaagaagaaaagagggggcaaggaggaaaucacaccccacugcgcccucauggacuguauuauguaugaugccgcugugucuggaggccugaacaucccuguucugcgcgccgugcucccgcgggacauggucuuuagaaccagcucccccaaaguggugcugugaggacuagucccuguucccagagcccacuuuuuuuucuuuuuuugaaauaaaauagccugucuuucagaucucaaaggcucuuuucagagccaccaaaaaaaaaaaaaaaaaaaaaaaaaaaaaaaaaaaaaaaaaaaaaaaaaaaaaaaaaaaaaaaaaaaaaaaaaaaaaaaaaaaaaaaaaaaaaaaaaaaaa

SEQ ID NO: 16934 - RNA, 1982 nt, Artificial Sequence
  mRNA product Design a-1 (hSL-A100) comprising derived and/or modified sequence from LASV(LASV254-NIG-2011;Clade II)__AIT17675__NP (opt5)
aggagagucccgcagucggcguccagcggcucugcuuguucgugugugugucguugcaggccuuauucaagcuuaccaugagcgccuccaaggaggugaaaucuuuccuguggacccagagccucagacgggaacuguccggcuacugcucuagcaucaaacuucaagucguuaaggacgcucaggcccugcuccacgggcuggauuuuuccgaggugucuaacgugcagcgccuuaugagaaagcagaaacgggacgauagcgaccugaagcgccucagagaucugaaucaagcggucaacaaucugguggaacucaaguccacacagcagaaaagcguucugcgggugggaacgcuuaccucugacgaucugcucacacuggcugccgaccuugagaagcugaaauccaaggucauucgcaccgaaagaccccucagcucuggcguguauauggggaaccuguccacacagcaacuggagcagcggcgcgcccuccugaauaugaucggaaugguuggcggggcucagggaacccagccuggcagagauggcgugguccgggugugggacgugaaaaacccggaucuucugaauaaccaauucgggacaaugcccagccucacccuggccugucuuacgaagcagggacaggucgaccugaaugaugcuguucucgcccugaccgaccugggccucauuuacacagcgaaguauccuaacucuuccgaccuggaucgccuuagccaaucccaucccauccugaauaugguggacaccaaaaagucuagccucaacauuuccggguacaauuuuagccugggagccgcugugaaagccggcgcuugcaugcuugaugggggaaacaugcuggagacaaucaaggucaccccucagacgauggacggcauccucaaaucuauucugaaggugaaaaagucccugggcauguucguuagcgauacacccggggaaagaaauccuuaugagaacauccucuacaagauuugucugucuggagacggcuggccguauaucgccagccggaccuccauuguggggcgcgcgugggaaaacacaaucgucgaucuugagucugacggaaaaccccagaaggugggcaccgccgggagcaauaaaucccugcagagcgcuggauuuccuaccggccucacauacucucaacugaugacgcugaaggauuccaugaugcagcuugaccccagcgccaaaaccuggauugauaucgagggcagaccugaagaccccguugagaucgcucucuaccagccgaugucugggugcuauauucacuucuuucgggaaccuacagaccugaagcaguucaagcaagaugccaaauacucccauggaaucgacguggccgaucuguuucccgcucagccuggccucaccagcgcggucauugaggcccugcccagaaacauggugcuuacaugucagggguccgacgauaucaagcgccugcucgacucucagggacggagagauauuaaacugaucgacaucgcucugagcaaggccgauucccgccgguucgaaaaugccgucugggaccaaugcaaagaucuuugucacaugcauaccggcgugguuguggagaagaagaaaagagggggcaaggaggaaauuacgccccacugcgcucucauggacuguaucauguaugaugccgcggucucuggaggccugaacauuccugugcugcgcgcuguucucccgcgggacaugguguuuagaacaagcucccccaaagucgugcugugaggacuagucccuguucccagagcccacuuuuuuuucuuuuuuugaaauaaaauagccugucuuucagaucucaaaggcucuuuucagagccaccaaaaaaaaaaaaaaaaaaaaaaaaaaaaaaaaaaaaaaaaaaaaaaaaaaaaaaaaaaaaaaaaaaaaaaaaaaaaaaaaaaaaaaaaaaaaaaaaaaaaa

SEQ ID NO: 16935 - RNA, 1982 nt, Artificial Sequence
  mRNA product Design a-1 (hSL-A100) comprising derived and/or modified sequence from LASV(Nig08-04;Clade II)__ADU56611__NP (opt5)
aggagagucccgcagucggcguccagcggcucugcuuguucgugugugugucguugcaggccuuauucaagcuuaccaugagcgccuccaaggaggugaaaucuuuccuguggacccagagccucagacgggaacuguccggcuacugcucuaacaucaaacuucaagucguuaaggacgcucaggcccugcuccacgggcuggauuuuagcgagguguccaaugugcagcgccuuaugagaaagcagaaacgggacgauggagaccugaagcgccucagagaucugaaccaagcggucaauaaccugguggaacucaagucuacccagcagaaaagcguucugcgggugggcacgcuuaccuccgacgaucugcucacacuggcugccgaccuugagaagcugaaaagcaaggucauucgcaccgaaagaccccucucuuccgggguguauaugggaaaucugagcacacagcaacuggagcagcggaaagcccuccugucuaugaucggcaugguugggggagcucagggcacccagccuggccgcgaugggguggucagagugugggacgugaagaacccggaucuucugaauaaccaauucggaacaaugcccucccucacccuggccugucuuacgaagcagggccaggucgaccugaaugaugcuguucucgcccugaccgaccuggggcucauuuacacagcgaaauauccuaacagcucugaccuggaucggcuuucccaaagccaucccauccugaauaugguggacaccaagaaauccucucucaacauuagcggauacaauuuuucccugggcgccgcugugaaggccggggcuugcaugcuugauggaggcaacaugcuggagacaaucaaagucaccccucagacgauggacggcauccucaagagcauucugaaagugaagcgcucucuggggauguucguuuccgauacacccggagaaagaaauccuuaugagaacauccucuacaagauuugucugagcggcgacggguggccguauaucgccucucggaccagcauugugggacgcgcgugggaaaacacaaccgucgaucuugaguccgacggcaaaccccagaagguggggaccgccggaucuaauaaaagccugcaguccgcuggcuuuccuacaggccucacguacagccaacugaugacccugaaggauucuaugaugcagcuugaccccuccgccaaaacauggaucgauauugaggggagaccugaagaccccguugagaucgcucucuaccagccgaugagcggaugcuauauccacuucuuucgggaaccuaccgaccugaagcaguucaagcaagaugccaaauacucucauggcauugacgugacagaucuguuuuccgcccagcccgggcucaccagcgcugucaucgaggcgcugccuagaaacauggugcuuacgugucagggauccgacgauauuaagaaacugcucgacucucagggccgccgggauaucaagcugauugacaucagccugaauaaagccgauuccagacgcuucgaaaacgcugucugggaccaaugcaaggaucuuugucacaugcauacaggggugguuguggagaagaaaaagcggggcggaaaagaggaaaucacaccccacugcgcccucauggacuguauuauguuugaugccgcugucucuggcgggcugaauauccccauucugagagccgugcucccucgcgacaugguuuuccggaccagcuccccgaaggugguccugugaggacuagucccuguucccagagcccacuuuuuuuucuuuuuuugaaauaaaauagccugucuuucagaucucaaaggcucuuuucagagccaccaaaaaaaaaaaaaaaaaaaaaaaaaaaaaaaaaaaaaaaaaaaaaaaaaaaaaaaaaaaaaaaaaaaaaaaaaaaaaaaaaaaaaaaaaaaaaaaaaaaaa

SEQ ID NO: 16936 - RNA, 1985 nt, Artificial Sequence
  mRNA product Design a-1 (hSL-A100) comprising derived and/or modified sequence from LASV(GA391;Clade III)__AAA46284__NP (opt5)
aggagagucccgcagucggcguccagcggcucugcuuguucgugugugugucguugcaggccuuauucaagcuuaccaugagcgccuccaaggaggugagaucuugccuguggacccagagccuccggcgcgaacuguccggcuacuguucuaacaucaaacuucaagucguuaaggacgcucaggcccugcuccacgggcuggauuucagcgagguguccaaugugcagagacuuaugcggaaacagaagcgcgacgauggagaccugaaaagacuccgggaucugaaccaagcggucaauaaccugguggaacucaagucuacacagcagaaaagcguucugcgcgugggcacgcuuuccagcgacgaucugcucauucuggcugccgaccuugagaaacugaagucuaaagucaccagaacagaacggccccucuccagcgggguguauaugggaaaucugucuucccagcaacuggaucagcgcagagcccuccugaacaugaucggcaugaccgggguuagcggaggcggcaagggggcuucuaauggaauugugcgggucugggacgugaaaaacgccgagcuucugaauaaccaguuuggcacaaugccuucccucacccuggcuugccuuacaaagcaggggcaaguggaucugaaugacgccguccaggcgcucaccgaucugggacugaucuacacggccaaguauccgaacagcuccgaccucgaccgccugucucagagccaucccauucuuaauaugaucgauaccaaaaaguccagccugaacaucucuggcuacaauuucucccucggggcugccguuaaagcuggagccuguaugcuggacggcggcaacaugcuugagacaauuaaggugagcccucaaaccauggaugggauccugaaaucuauucucaaggugaaaaagagccugggaauguuugucuccgacacacccggcgaaagaaacccuuaugagaauauccuguacaagauuugccucucuggggauggauggagcuauaucgcgucccggaccagcauugugggccgcgccugggaaaacacgguuguggaccuggagcaggauaauaaaccccagaagaucgggaacggaggcucuaauaaaucccuucagagcgcuggcuucgccgcugggcugaucuacucucaacucaugacacugaaggacuuuaaauguuucaaccugauuccuaaugccaagaccuggauggauaucgagggaagaccggaagaccccgucgagauugcccuuuaccagccuuccagcggcugcuaugugcacuuuuuccgggaacccacagaucucaagcaguuuaaacaggacgcuaaguacucccaugggagagacguuaccgaucuguucgcggcccaaccuggacugaccucugcugugaucgaggcccucccccgcaacauggucauuacaugucagggcagcgaagacauccggaaacugcuugagucccaggggagacgcgauaucaagcugauugacaucacgcucucuaaagccgauagccggaaguuugagaaugcugugugggaccaguucaaggaucugugccacaugcauaccggcgucgugguugaaaagaagaaaagaggaggcaaggaggaaauuacaccgcacugugcccugauggacugcaucauguuugaugcggcuguguccgggggacuugacgccaaaguccuccgcgugguucugccucgggauaugguguucagaaccagcacacccaaggucgugcugugaggacuagucccuguucccagagcccacuuuuuuuucuuuuuuugaaauaaaauagccugucuuucagaucucaaaggcucuuuucagagccaccaaaaaaaaaaaaaaaaaaaaaaaaaaaaaaaaaaaaaaaaaaaaaaaaaaaaaaaaaaaaaaaaaaaaaaaaaaaaaaaaaaaaaaaaaaaaaaaaaaaaa

SEQ ID NO: 16937 - RNA, 1982 nt, Artificial Sequence
  mRNA product Design a-1 (hSL-A100) comprising derived and/or modified sequence from LASV(Nig08-A19;Clade III)__ADU56619__NP (opt5)
aggagagucccgcagucggcguccagcggcucugcuuguucgugugugugucguugcaggccuuauucaagcuuaccaugagcgccuccaaggaggugaaaucuuuccuguggacccagagccucagacgggaacuguccggcuacugcucuaacaucaaacuucaagucguuaaggacgcucaggcccugcuccacgggcuggauuuuagcgagguguccaaugugcagcgccuuaugagaaagcagaaacgggacgauggagaccugaagcgccucagagaucugaaccaagcggucaauaaccugguggaacucaagucuacacagcagaaaagcguucugcgggugggcacgcuuuccagcgacgaucugcucguccuggcugccgaccuugagaagcugaaaucuaaggugguucgcaccgaaagaccccucuccagcgggauuuauaugggaaaucugucuucccagcaacuggaucagcggaaagcccuccugaacaugaucggcaugacagggggaaauggcggccgcaacaccacaagcgacgggauugugagagucugggaugugaagaaugcugagcuucugaacaaucaguucggaaccaugccuucucucacacuggccugucuuaccaagcagggccaaguggaccugaacgaugcuguccaggcccucacggaccuggggcugaucuacaccgcgaaauaucccaauuccagcgaccucgaucggcuggcccagucccauccgauucuuaacaugaucgacacaaagaaaucuagccugaauaucuccggauacaacuuuagccucggcgcugccguuaaggcuggggccugcaugcuggauggaggcaacaugcuugagaccauuaaagugucuccucaaacaauggacggcauccugaaguccauucucaaagugaagcgcagccuggggauguucaucucugauacccccggagaaagaaauccuuaugagaacauucuguacaagaucugucucagcggcgacggguggcccuauauugcgucccggacgucuaucgucggacgcgccugggaaaauacagugguugaucuggagagcgacaacaaaccucagaagaccggcaaugggggauccaacaaaagccuucagucugcuggcuuugccgcuggccugacauacucccagcucaugacccugaaggauagcaugcugcaacuugacccgaaugccaaaaccuggauggauaucgaggggagacccgaagacccuguggagauugcccucuaccagcccucuuccggaugcuauauccacuucuuucgggaaccuacagaccugaagcaguucaagcaggaugcuaaauacagccauggcauugacgucacggaucuguuugcggcccaacccgggcucaccuccgcugugaucgaggcccugccgagaaacaugguuauuacaugucagggaucugaagacauccgcaaacuucuggagagccagggccggagagauaucaagcucauugacaucucccugucuaagguggauagccgcaaauucgagaaugccgucugggaccaguuuaaggaucugugccacaugcauaccgggauuguggucgaaaagaaaaagcggggcggaaaagaggaaaucacaccucacugugcucuuauggacugcauuauguucgaugccgcgguguccggcgggguugacgcuaaggugcucagagccguccugccccgcgauaugguguuucggaccagcacgccuaaaguugugcugugaggacuagucccuguucccagagcccacuuuuuuuucuuuuuuugaaauaaaauagccugucuuucagaucucaaaggcucuuuucagagccaccaaaaaaaaaaaaaaaaaaaaaaaaaaaaaaaaaaaaaaaaaaaaaaaaaaaaaaaaaaaaaaaaaaaaaaaaaaaaaaaaaaaaaaaaaaaaaaaaaaaaa

SEQ ID NO: 16938 - RNA, 1982 nt, Artificial Sequence
  mRNA product Design a-1 (hSL-A100) comprising derived and/or modified sequence from LASV(G1180-SLE-2010;Clade IV)__AIT17169__NP (opt5)
aggagagucccgcagucggcguccagcggcucugcuuguucgugugugugucguugcaggccuuauucaagcuuaccaugagcgccuccaaggagaucaaaucuuuccuguggacccagagccucagacgggaacuguccggcuacugcucuaacauuaagcugcaaguggucaaagacgcucaggcccugcuccacgggcuggauuuuagcgagguuuccaaugugcagcgccuuaugagaaaggaacggcgcgacgauaacgaccugaaaagacuccgggaucugaaucaggcggugaacaaucuggucgagcucaagucuacacaacaaaagagcauccugcgcgugggaacgcuuaccuccgacgaucugcucauucuggcugccgaccuugaaaaacuuaagagcaaaguuaucagaacagagcggccccucucugccggcguguauauggggaaccuguccagccagcagcuggaucagcgcagagcucuccugucuaugauuggaauguccagcggcaaucagcgggcccaggcugggcgcgacggagucgugagaguuugggaugugaagaacgucgagcuucugaauaaccaguucggcaccaugccuucucucacacuggccugucuuaccaaacaaggccagguggaccugaaugaugcggugcaggcccucacagaccuggggcugaucuacaccgcuaaguauccgaacacguccgaccucgaucggcugacccaaagccaucccauccuuaauaugauugacacaaagaaauccucucugaacaucagcggauacaauuuuucccucggcgccgcugucaaggccggggcgugcaugcuggauggaggcaacaugcuugaaaccauuaaaguuagcccucagacaauggacgggauccugaagucuauucucaaagugaagaaagcccugggaauguucaucuccgauacccccggcgagcgcaacccuuaugaaaauauucuguacaagaucugucucagcggcgacggguggcccuauaucgcuucuagaacgagcauuacaggacgggccugggagaacaccguggucgaucuggaguccgacggcaagccucagaaagcugggucuaauaacagcaauaagucccuucagagcgugggauuuacagccggccugaccuacucucaacucaugacccugaaagaugccaugcugcagcuugacccgaacgcuaagacauggauggauaucgaagggagacccgaggacccuguugaaauugcgcucuaccagcccuccagcggaugcuauauccacuucuuucgcgagccuacggaccugaaacaguucaagcaagaugccaaguacucucauggcauugacgugaccgaucuguuugcugcccagcccggccucacauccgccgucaucgacgcucugccgcggaauauggugaucaccugucaggggagcgaugacauuagaaaacuucuggaaucccagggacgcaaggauaucaaacucauugacaucgcccugucuaagacagauagccggaaauaugagaacgcgguuugggaccaauacaaggaucugugccacaugcauaccggcguggucguggagaagaaaaagagagggggaaaagaagagauuacgccucacugugcucuuauggacugcaucauguucgaugccgccgucuccggcgggcucaauacaucugugcugcgcgcuguucugccccgggacaugguguuuagaaccagcaccccucgcgucgugcucugaggacuagucccuguucccagagcccacuuuuuuuucuuuuuuugaaauaaaauagccugucuuucagaucucaaaggcucuuuucagagccaccaaaaaaaaaaaaaaaaaaaaaaaaaaaaaaaaaaaaaaaaaaaaaaaaaaaaaaaaaaaaaaaaaaaaaaaaaaaaaaaaaaaaaaaaaaaaaaaaaaaaa

SEQ ID NO: 16939 - RNA, 1982 nt, Artificial Sequence
  mRNA product Design a-1 (hSL-A100) comprising derived and/or modified sequence from LASV(G1442-SLE-2011;Clade IV)__AIT17181__NP (opt5)
aggagagucccgcagucggcguccagcggcucugcuuguucgugugugugucguugcaggccuuauucaagcuuaccaugagcgccuccaaggaggugaaaucuuuccuguggacccagagccucagacgggaacuguccggcuacugcucuaacaucaaacuucaagucguuaaggacgcucaggcccugcuccacgggcuggauuuuagcgagguguccaaugugcagcgccuuaugagaaagcagcggcgcgacgauaacgaccugaaaagacuccgggaucugaaucaagcggucaacaaucugguggaacucaagucuacacagcaaaagagcguucugcgcgugggaacgcuuaccuccgacgaucugcucguccuggcugccgaccuugagaaacuuaagagcaaagugauuagaacagaacggccccucucugccggcguuuauauggggaaccuguccagccagcagcuggaucagcgcagagcucuccugaauaugaucggaaugucuggcgggauucagggaacccggacaggccgcgacggcguggucagagugugggaugugaagaacgccgaccuucugaauaaccaguucgggaccaugccuucccucacacuggcuugucuuaccaaacaaggacaggucgaucugaaugacguugugcaggcccucacggaccugggccugaucuacaccgcgaaguauccgaacgccagcgaucucgaccggcugacacaaucucaucccauucuuaauaugaucgauaccaagaaauccagccugaacaucuccggguacaauuuuucucucggagcugccgugaaggcuggcgccugcaugcuggacgggggaaacaugcuugagacaauuaaagucagcccucagaccauggauggcauccugaaguccauucucaaagugaagaaaacgcugggcauguucaucagcgacacacccggggagcgcaacccuuaugaaaauauucuguacaagaucugucucucuggagauggcuggcccuauauugcguccagaaccagcaucacagggcgggccugggagaacaccguuguggaccuggaaucugauggaaagccucagaaagcuggcagcaauaacuccaauaagucucuucagagcgccggguuugcugccggacugaccuacucccaacucaugacacugaaagacgccaugcugcagcuugauccgaacgcuaagacguggauggacaucgagggcagacccgaggacccugucgaaauugcgcucuaccagcccagcucuggcugcuauauccacuucuuucgcgagccuaccgaucugaaacaguucaagcaagacgccaaguacucccaugggauugaugugacagaccuguuugcugcccagcccggacucaccagcgccguuaucgaagcucugccgcggaauauggugauuacaugucagggcucugaugacaucaaaaagcugcuggagucccaggggagaaaagauaucaagcucauugacaucgcccugagcaaaaccgauucccgcaaguaugaaaacgcggucugggaccaauacaaggaucugugccacaugcauacgggaguggucguggagaaaaagaaacggggcgggaaggaggaaauuacaccucacugugcucuuauggacugcaucauguucgaugccgccguuucuggcggacucaauacccuggugcugagagcuguccucccccgcgacaugguguuucggaccagcacaccuagaguugugcugugaggacuagucccuguucccagagcccacuuuuuuuucuuuuuuugaaauaaaauagccugucuuucagaucucaaaggcucuuuucagagccaccaaaaaaaaaaaaaaaaaaaaaaaaaaaaaaaaaaaaaaaaaaaaaaaaaaaaaaaaaaaaaaaaaaaaaaaaaaaaaaaaaaaaaaaaaaaaaaaaaaaaa

SEQ ID NO: 16940 - RNA, 1982 nt, Artificial Sequence
  mRNA product Design a-1 (hSL-A100) comprising derived and/or modified sequence from LASV(G3010-SLE-2013;Clade IV)__AIT17345__NP (opt5)
aggagagucccgcagucggcguccagcggcucugcuuguucgugugugugucguugcaggccuuauucaagcuuaccaugagcgccuccaaggagaucaaaucuuuccuguggacccagagccucagacgggaacuguccggcuacugcucuaacauuaaacuucaaguggucaaagacgcucaggcccugcuccacgggcuggauuuuagcgagguuuccaaugugcagcgccuuaugagaaaggaacggcgcgacgauaacgaccugaaaagacuccgggaucugaaucaggcggugaacaaucuggucgagcucaagucuacacaacaaaagagcauccugcgcgugggaacgcuuaccuccgacgaucugcucauucuggcugccgaccuugaaaaacuuaagagcaaaguuacaagaaccgagcggccccucucugccggcguguauauggggaaccuguccagccagcagcuggaucagcgcagagcucuccugucuaugaucggaauguccagcggcguccagggggcccgggcuggacgcgacggcgugguuagagugugggaugucaagaaugccgagcuucugaacaaucaguucggcacaaugccuucucucacccuggcgugucuuacaaaacaggggcaaguggaccugaacgaugugguccaggcccucaccgaccugggacugauuuacacggcuaaguauccgaauaccuccgaccucgaucggcugacacagagccaucccauccuuaacaugaucgacaccaagaaauccucucugaauauuagcggcuacaacuuuucccucggggccgcuguuaaggccggagcgugcaugcuggauggcgggaauaugcuugaaacaaucaaagugagcccucaaaccauggacggcauucugaagucuauccucaaagugaagaaagcccugggaauguucauuuccgagacgcccggcgaacgcaacccuuaugagaacauccuguacaagauuugucucagcggggauggauggcccuauaucgcuucuagaacaagcaucaccggccgggccugggagaauacagucguggaccuggaauccgaugggaagccucagaaagcuggaucuaacaauagcaacaagucccuucagagcgccggcuuuaccgccgggcugaccuacucucagcucaugacacugaaagacgcuaugcugcaacuugauccgaaugcgaagacguggauggacauugagggaagacccgaagauccuguugagguggcccucuaccagcccuccagcggcugcuauauccacuucuuucgcgaaccuaccgaccugaaacaguucaagcaggacgcuaaguacucucauggcauugaugucacagaccuguuugccgcccaacccgggcucaccuccgcugugaucgaugcccugccgcggaacaugguuauuacaugucagggaagcgacgauaucaaaaagcugcuggagucccagggcagaaaagacaucaagcucauugauaucgcgcugucuaaaaccgacagccgcaaguaugagaaugcugugugggaucaguacaaggaccugugccacaugcauacgggggucguggucgaaaagaagaaacggggaggcaaggaggaaauuacaccucacugugcccuuauggauugcaucauguucgacgccgcuguguccgggggccucaacaccucuguucugagagccgugcugccccgcgauauggucuuucggaccagcacaccuagagugguucucugaggacuagucccuguucccagagcccacuuuuuuuucuuuuuuugaaauaaaauagccugucuuucagaucucaaaggcucuuuucagagccaccaaaaaaaaaaaaaaaaaaaaaaaaaaaaaaaaaaaaaaaaaaaaaaaaaaaaaaaaaaaaaaaaaaaaaaaaaaaaaaaaaaaaaaaaaaaaaaaaaaaaa

SEQ ID NO: 16941 - RNA, 1982 nt, Artificial Sequence
  mRNA product Design a-1 (hSL-A100) comprising derived and/or modified sequence from LASV(G502-SLE-2009;Clade IV)__AIT17127__NP (opt5)
aggagagucccgcagucggcguccagcggcucugcuuguucgugugugugucguugcaggccuuauucaagcuuaccaugagcgccuccaaggagaucaaaucuuuccuguggacccagagccucagacgggaacuguccggcuacugcucuaacauuaagcugcaaguggucaaagacgcucaggcccugcuccacgggcuggauuuuagcgagguuuccaaugugcagcgccuuaugagaaaggaacggcgcgacgauaacgaccugaaaagacuccgggaucugaaucaggcggugaacaaucuggucgagcucaagucuacacaacaaaagagcauccugcgcgugggaacgcuuaccuccgacgaucugcucauucuggcugccgaccuugaaaaacuuaagagcaaaguuaucagaacagagcggccccucucugccggcguguauauggggaaccuguccagccagcagcuggaucagcgcagagcucuccugucuaugauuggaauguccggcgggaaucagggaguccgggccggcaaggacggcgugguucgcgugugggaugucaaaaacgcugagcuucugaauaaccaguucgggaccaugccuagccucacacuggccugucuuaccaagcagggacaaguggaccugaaugaugcggugcaggcccucacagaccugggccugaucuacaccgcuaaguauccgaacacgucugaccucgauagacugacccagucccaucccauccuuaauaugauugacaccaaaaagagcucccugaacaucucuggguacaauuuuagccucggagccgcugucaaagccggcgcgugcaugcuggaugggggaaacaugcuugaaacaauuaagguuuccccucaaacaauggacggcauccugaaaagcauucucaaggugaaaaaggcccugggcauguucaucucugauacccccggggagcggaacccuuaugaaaauauucuguacaagaucugucucuccggagacggcuggcccuauaucgcuagccgcacgucuauuacagggagagccugggagaacaccguggucgaucuggagagcgacggaaaaccucagaaggcuggcuccaauaacucuaauaaaagccuucaguccgccggguuuacagccggacugaccuacagccagcucaugacccugaaggaugcuaugcugcaacuugacccgaacacaaaaacguggauggauaucgaaggccggcccgaggacccuguggaaauugcgcucuaccagcccucuuccggcugcuauauccacuucuuuagagagccuaccgaccugaagcaguucaagcaggaugccaaauacagccaugggauugacguuacagaucuguuugcugcccaacccggacucaccucugccgugaucgacgcucugccgcgcaauauggucaucacaugucagggcuccgaugacauucggaaacuucuggaaagccaggggagaaaggauaucaagcucauugacaucgcccugaacaaaaccgauucccgcaaguaugagaaugcggugugggaccaguacaaggaucugugccacaugcauacgggaguuguggucgagaaaaagaaacggggcgggaaggaagagauuacaccucacugugcucuuauggacugcaucauguucgaugccgccgugucuggcggacucaacaccagcguccugagagcugugcugccccgcgacaugguuuuucggaccuccacaccuagagugguccucugaggacuagucccuguucccagagcccacuuuuuuuucuuuuuuugaaauaaaauagccugucuuucagaucucaaaggcucuuuucagagccaccaaaaaaaaaaaaaaaaaaaaaaaaaaaaaaaaaaaaaaaaaaaaaaaaaaaaaaaaaaaaaaaaaaaaaaaaaaaaaaaaaaaaaaaaaaaaaaaaaaaaa

SEQ ID NO: 16942 - RNA, 1982 nt, Artificial Sequence
  mRNA product Design a-1 (hSL-A100) comprising derived and/or modified sequence from LASV(G733-SLE-2010;Clade IV)__AIT17155__NP (opt5)
aggagagucccgcagucggcguccagcggcucugcuuguucgugugugugucguugcaggccuuauucaagcuuaccaugagcgccuccaaggagaucaaaucuuuccuguggacccagagccucagacgggaacuguccggcuacugcucuaacauuaagcugcaaguggucaaagacgcucaggcccugcuccacgggcuggauuuuagcgagguuuccaaugugcagcgccuuaugagaaaggaacggcgcgacgauaacgaccugaaaagacuccgggaucugaaucaggcggugaacaaucuggucgagcucaagucuacacaacaaaagagcgugcugcgcguuggaacgcuuaccuccgacgaacugcucgugcuggcugccgaucuugagaaacuuaagagcaaagucaucagaacagagcggccccucucugccggcguguauauggggaaccuguccagccagcagcuggaccagcgcagagcucuccugucuaugauuggaauguccggcgggaaucagggagcccggaccggccgcgauggcguugugagagucugggacgugaagaacgcugaacuucugaauaaccaguucgggacaaugccuagccucacccuggccugucuuacaaaacagggacaaguggaucugaaugacgcgguccaggcccucaccgaucugggccugaucuacacggcuaaguauccgaacaccucugaccucgaccggcugacacagucccaucccauucuuaauaugaucgauaccaagaaaagcucccugaacaucucuggguacaauuuuagccucggagccgcuguuaaggccggcgcgugcaugcuggacgggggaaacaugcuugagacaauuaaaguguccccucaaaccauggauggcauccucaagagcauucugaaagugaagaaagcccugggcauguucaucucugacacgcccggggaacgcaacccuuaugagaauauucuguacaagaucugucucuccggagauggcuggcccuauauugcuagcagaacaucuaucaccgggcgggccugggagaacacagucguggaccuggaaagcgauggaaagccucagaaagcuggcuccaauaacucuaauaagagccuucaguccgccggguuuaccgccggacugaccuacagccagcucaugacacugaaagacgcuaugcugcaacuugauccgaacgcgaagacguggauggacaucgagggcagacccgaagauccuguugagauugcccucuaccagcccucuuccggcugcuauauccacuucuuucgcgaaccuaccgaccugaaacaguucaagcaggacgcuaaguacagccaugggauugaugugacagaccuguuugccgcccaacccggacucaccucugcugucaucgaugcccugccgcggaauauggugauuacaugucagggcuccgacgauaucagaaaacuucuggagagccaggggcgcaaggacaucaaacucauugauaucgcgcuguccaagauugacucucggaaauaugagaacgcuguuugggaucaguacaaggaccugugccacaugcauaccggaguggucguggaaaagaaaaagagaggcgggaaagaggaaaucacgccucacugugcccuuauggauugcauuauguucgacgccgcugucagcggcggacucaauucccuggugcugcgcgccguucucccccgggauaugguguuuagaacaucuaccccucgcgucgugcugugaggacuagucccuguucccagagcccacuuuuuuuucuuuuuuugaaauaaaauagccugucuuucagaucucaaaggcucuuuucagagccaccaaaaaaaaaaaaaaaaaaaaaaaaaaaaaaaaaaaaaaaaaaaaaaaaaaaaaaaaaaaaaaaaaaaaaaaaaaaaaaaaaaaaaaaaaaaaaaaaaaaaa

SEQ ID NO: 16943 - RNA, 1982 nt, Artificial Sequence
  mRNA product Design a-1 (hSL-A100) comprising derived and/or modified sequence from MOPV/LASV reassortant(IGS-1;Clade IV)__AFY05578__NP (opt5)
aggagagucccgcagucggcguccagcggcucugcuuguucgugugugugucguugcaggccuuauucaagcuuaccaugagcgccuccaaggagaucaaaucuuuccuguggacccagagccucagacgggaacuguccggcuacugcucuaacauuaaacuucaaguggucaaggacgcucaggcccugcuccacgggcuggauuuuagcgagguuuccaaugugcagcgccuuaugagaaaggaacggcgcgacgauaacgaccugaaaagacuccgggaucugaaucaggcggugaacaaucuggucgagcucaagucuacacaacaaaagagcauccugcgcgugggaacgcuuaccuccgacgaucugcucauucuggcugccgaccuugaaaaacugagaagcaagguuauccggacagagcgcccccucucugccggcguguauauggggaaccuguccagccagcagcuggaucagagacgggcucuccugaauaugauuggaaugucuggcgggaaccagggagcccgcgcuggcagagacggcgucgugcggguuugggaugugaaaaaugccgagcuucuguccaaccaguucgggaccaugccuagccucacacuggcgugucuuaccaagcagggacaagucgaccugaaugaugccgugcaggcucucacagaccugggccugaucuacaccgccaaauauccgaacacgucugaccucgaucgccugacccagucccaucccauccuuaauaugauugacacaaagaaaagcucccugaacaucucuggguacaauuuuagccucggagcugccgugaaggcgggcgccugcaugcuggaugggggaaacaugcuugaaaccauuaaggucuccccucaaacaauggacggcauccugaaaagcauucucaagguuaaaaaggcucugggcauguucaucucugauacccccggggagagaaacccuuaugaaaauauucuguacaaaaucugucucuccggagacggcuggcccuauaucgccagccggacgucuauuacagggagagcuugggagaacaccgugguggaucuggagagcgacggaaagccucagaaggccgauuccaauaacucuagcaaaucccuucagagcgccggcuuuacagcugggcugaccuacucucagcucaugacccugaaggacgcgaugcugcaacuugauccgaaugccaaaacauggauggacaucgaaggacgccccgaggacccugucgaaauugcucucuaccagcccuccagcggcugcuauauccacuucuuucgggagccuacggaucugaagcaguucaaacaggacgccaaguacucucauggcauugaugugaccgaccuguuugccacacaacccgggcucaccuccgcuguuaucgaugcccugccgagaaacauggugaucacaugucagggaagcgacgauauucgcaaacuucuggaaucccagggccggaaggacaucaagcucauugauaucgaccugucuaaaaccgauagcagaaaguaugagaaugcggucugggaccaguacaaagaucugugccacaugcauacgggggugguuguggagaagaagaaacgcggaggcaaggaagagauuacaccucacugugcucuuauggacugcaucauguucgacgccgccgucuccgggggccucaacaccucugugcugcgggcuguccugcccagagauaugguguuucgcaccagcacaccucggguugugcucugaggacuagucccuguucccagagcccacuuuuuuuucuuuuuuugaaauaaaauagccugucuuucagaucucaaaggcucuuuucagagccaccaaaaaaaaaaaaaaaaaaaaaaaaaaaaaaaaaaaaaaaaaaaaaaaaaaaaaaaaaaaaaaaaaaaaaaaaaaaaaaaaaaaaaaaaaaaaaaaaaaaaa

SEQ ID NO: 16944 - RNA, 1982 nt, Artificial Sequence
  mRNA product Design a-1 (hSL-A100) comprising derived and/or modified sequence from LASV(LM765-SLE-2012;Clade IV)__AIT17815__NP (opt5)
aggagagucccgcagucggcguccagcggcucugcuuguucgugugugugucguugcaggccuuauucaagcuuaccaugagcgccuccaaggagaucaaaucuuuccuguggacccagagccucagacgggaacuguccggcuacugcucuaacauuaagcugcaaguggucaaagacgcucaggcccugcuccacgggcuggauuuuagcgagguuuccaaugugcagcgccuuaugagaaaggaacggcgcgacgauaacgaccugaaaagacuccgggaucugaaucaggcggugaacaaucuggucgagcucaagucuacacaacaaaagagcauccugcgcgugggaacgcuuaccuccgacgaucugcucauucuggcugccgaccuugaaaaacuuaagagcaaaguuacaagaaccgagcggccccucucugccggcguguauauggggaaccuguccagccagcagcuggaucagcgcagagcucuccuggacaugaucggaaugucuggcuccaaucagggggcccgggcuggacgcgauggcgucgugagaguuugggacgugaagaacgccgagcuucugaauaaccaguucggcacaaugccuagccucacccuggcgugucuuacaaaacaggggcaagucgaucugaaugacgccgugcaggcucucaccgaccugggacugauuuacacggccaaguauccgaacaccucugaucucgaccggcugacacagucccaucccauccuuaauaugaucgauaccaagaaaagcucccugaacauuucuggcuacaauuuuagccucggggcugccgugaaggcgggagccugcaugcuggacggcgggaacaugcuugaaacaaucaaagucuccccucaaaccauggauggcauucucaagagcauccugaaaguuaagaaagcucugggaauguucauuucugacgcccccggcgagcgcaacccuuaugaaaauauccuguacaagauuugucucuccggggauggauggcccuauaucgcuagcagaacgucuaucacaggccgggccugggagaacaccgugguggaccuggagagcgaugggaagccucagaaagccggauccaauggcucuaacaagagccuucaguccgcuggguuuacagcgggacugaccuacagccagcucaugacccugaaagacgccaugcugcaacuugauccgaaugcuaagacauggauggacauugaaggcagacccgaggacccugucgaaaucgcccucuaccagcccucuuccggcugcuauauucacuucuuucgcgagccuacggaucugaaacaguucaagcaggacgccaaguacagccaugggaucgaugugaccgaccuguuugcugcccaacccggacucacaucugcgguuauugaugcucugccgcggaacauggugaucaccugucagggcuccgacgauaucagaaaacuuuucgaaagccaggggcgcaaggacauuaaacugaucgauauugcccucuccaagacagacucucggaaauaugagaaugccgucugggaucaguacaaggaccugugccacaugcauaccggaaucgugguugagaagaaaaagagaggcgggaaagaagagauuacgccucacugugcucugauggauugcaucauguuugacgccgcugugagcggcggacuuaacacauccguccuccgcgccgugcugccccgggacauggucuucagaaccucuaccccucgcgugguucugugaggacuagucccuguucccagagcccacuuuuuuuucuuuuuuugaaauaaaauagccugucuuucagaucucaaaggcucuuuucagagccaccaaaaaaaaaaaaaaaaaaaaaaaaaaaaaaaaaaaaaaaaaaaaaaaaaaaaaaaaaaaaaaaaaaaaaaaaaaaaaaaaaaaaaaaaaaaaaaaaaaaaa

SEQ ID NO: 16945 - RNA, 1982 nt, Artificial Sequence
  mRNA product Design a-1 (hSL-A100) comprising derived and/or modified sequence from LASV(LM776-SLE-2012;Clade IV)__AIT17825__NP (opt5)
aggagagucccgcagucggcguccagcggcucugcuuguucgugugugugucguugcaggccuuauucaagcuuaccaugagcgccuccaaggagaucaaaucuuuccuguggacccagagccucagacgggaacuguccucuuacugcagcaacauuaaacuucaaguggucaaggacgcucaggcccugcuccacggccuggauuuuuccgagguuucuaaugugcagcgccuuaugagaaaggaacggcgcgacgauaacgaccugaaaagacuccgggaucugaaucaggcggugaacaaucuggucgagcucaagagcacacaacagaaguccauccugcgcguggggacgcuuaccagcgacgaucugcucauucuggcugccgaccuugaaaaacugaagucuaaaguuacaagaaccgagcggccccucuccgccggaguguauaugggcaaccugagcucucagcagcuggaucaacgcagagcucuccuguccaugaucgggaugagcggaucuaaucagggcgcccgggcugggcgcgacggagucgugagaguuugggaugugaagaacgccgagcuucugaauaaccaguucggcacaaugccuucccucacccuggcgugucuuacaaaacagggccaagucgaccugaaugaugccgugcaggcucucaccgaccuggggcugauuuacacggccaaguauccgaacaccagcgaccucgaucggcugacacagucccaucccauccuuaauaugaucgacaccaagaaaucuagccugaacauuuccggauacaauuuuagccucggcgcugccgugaaggcgggggccugcaugcuggauggaggcaacaugcuugaaacaaucaaagucucuccucaaaccauggacgggauucugaaguccauccucaaaguuaagaaagcucugggaauguucauuagcgauacgcccggcgagcgcaacccuuaugaaaauauccuguacaagauuugucucucuggcgacggguggcccuauaucgccagcagaacauccaucaccggacgggcuugggagaacacagugguggaucuggagucugacggcaagccucagaaagccgggagcaauaacuccaauaagagccuucagucugccggauuuaccgcuggccugaccuacucccagcucaugacacugaaagaugcgaugcugcaacuugacccgaacgccaagacguggauggauauugaagggagacccgaggacccugucgaaguggcucucuaccagcccagcucuggaugcuauauccacuucuuucgcgagccuaccgaccugaaacaguucaagcaggaugccaaguacucccauggcauugacguuacagaucuguuugccgcucaacccggccucaccagcgccgugaucgacgcgcugccgcggaauauggucauuacaugucagggguccgaugacaucagaaaacuucuggaaucucagggacgcaaggauaucaaacucauugacaucgcucugagcaagaccgauucccggaaauaugagaacgccgugugggaccaguacaaggaucugugccacaugcauacgggcguuguggucgagaagaaaaagagagggggaaaagaagagauuacaccucacugugcccuuauggacugcaucauguucgaugcugccgugucuggcgggcucaauaccagcguccugcgcgcugugcugccccgggacaugguuuuuagaaccuccacaccucgcgugguccucugaggacuagucccuguucccagagcccacuuuuuuuucuuuuuuugaaauaaaauagccugucuuucagaucucaaaggcucuuuucagagccaccaaaaaaaaaaaaaaaaaaaaaaaaaaaaaaaaaaaaaaaaaaaaaaaaaaaaaaaaaaaaaaaaaaaaaaaaaaaaaaaaaaaaaaaaaaaaaaaaaaaaa

SEQ ID NO: 16946 - RNA, 1982 nt, Artificial Sequence
  mRNA product Design a-1 (hSL-A100) comprising derived and/or modified sequence from LASV(Mad39;Clade IV)__ANH09723__NP (opt5)
aggagagucccgcagucggcguccagcggcucugcuuguucgugugugugucguugcaggccuuauucaagcuuaccaugagcgccuccaaggagaucaaaucuuuccuguggacccagagccucagacgggaacuguccggcuacugcucuaacauuaagcugcaaguggucaaagacgcucaggcccugcuccacgggcuggauuuuagcgagguuuccaaugugcagcgccuuaugagaaagcagcggcgcgacgauaacgaccugaaaagacuccgggaucugaaucaagcggugaacaaucuggucgaacucaagucuacacagcaaaagagcgugcugcgcguuggaacgcuuaccuccgacgaucugcucacacuggcugccgaccuugagaaacuuaagagcaaagugaccagaacagaacggccccucaccgccggcgucuauauggggaaccugucuucccagcagcuggaucagcgcagagcucuccugaauaugaucggaaugagcggcgggaaccagggagcccggacaggccgcgacggcgugguuagagugugggaugucaagaaugcugagcuucugaacaaucaguucgggaccaugccuucucucacgcuggccugucuuaccaaacaaggacagguggaccugaacgaugugguccaggcgcucacagaccugggccugauuuacaccgccaaguauccgaauacauccgaccucgaucggcugacccaaagccaucccauccuuaacaugauugacacgaauaagucuucccugaacaucagcggguacaacuuuucccucggagcugccguuaaagcuggcgccugcaugcuggaugggggaaauaugcuugagacaaucaaggugucuccucagaccauggacggcauucugaaaagcauccucaaggugaaaaagucccugggcauguucauuagcgauacacccggggaacgcaacccuuaugagaauauccuguacaaaauuugucucucuggagacggcuggcccuauaucgcguccagaaccagcauuaccgggcgggccugggaaaacacagucguggaucuggagucuggaggcaagccucagaaggcugggagcaauaacuccaauaaaucucuucagagcgccggauuugcugccggccugacguacucccaacucaugacccugaaggacgccaugcugcagcuugauccgaacgcuaaaacauggauggacaucgagggcagacccgaagauccuguugagaucgcgcucuaccagcccauuagcgggugcuauauccacuucuuucgcgaaccuaccgaccugaagcaguucaaacaagacgccaaguacucucauggaauugaugugacagaccuguuugcugcccagcccggccucaccuccgccgucaucgaggcucugccgcggaauauggugauuacgugucaggggagcgaugacaucagaaaacuuuucgaaucucagggacgcaaggauaucaagcugauugacaucgcccucuccaaaacagauagccggaaguaugagaacgcgguuugggaccaauacaaagaucugugccacaugcauaccggcguggucguggagaagaagaaaaagggcgggaaagaagagauuaccccucacugugcucugauggacugcaucauguuugaugccgccgucuccggaggccuuaauacacucgugcugagagcuguucugccccgcgacaugguguuccggaccucuacaccuaaggucgugcucugaggacuagucccuguucccagagcccacuuuuuuuucuuuuuuugaaauaaaauagccugucuuucagaucucaaaggcucuuuucagagccaccaaaaaaaaaaaaaaaaaaaaaaaaaaaaaaaaaaaaaaaaaaaaaaaaaaaaaaaaaaaaaaaaaaaaaaaaaaaaaaaaaaaaaaaaaaaaaaaaaaaaa

SEQ ID NO: 16947 - RNA, 1982 nt, Artificial Sequence
  mRNA product Design a-1 (hSL-A100) comprising derived and/or modified sequence from LASV(Z0947-SLE-2011;Clade IV)__AIT17841__NP (opt5)
aggagagucccgcagucggcguccagcggcucugcuuguucgugugugugucguugcaggccuuauucaagcuuaccaugagcgccuccaaggagaucaaaucuuuccuguggacccagagccucagacgggaacuguccggcuacugcucuaacauuaagcugcaaguggucaaagacgcucaggcccugcuccacgggcuggauuuuagcgagguuuccaaugugcagcgccuuaugagaaaggaacggcgcgacgauaacgaccugaaaagacuccgggaucugaaucaggcggugaacaaucuggucgagcucaagucuacacaacaaaagagcauccugcgcgugggaacgcuuaccuccgacgaucugcucauucuggcugccgaccuugaaaaacuuaagagcaaaguuacaagaaccgagcggccccucucugccggcguguauauggggaaccuguccagccagcagcuggaucagcgcagagcucuccugaauaugaucggaaugucuggcuccaaccagggggcccggacaggacgcgacggcgucgugagaguuugggaugugaagaaugcugagcuucugaacaaucaguucggcaccaugccuagccucacacuggccugucuuaccaaacaggggcaagucgaccugaacgaugcggugcaggcccucacggaccugggacugauuuacaccgcuaaguauccgaauacaucugaccucgaucggcugacccagucccaucccauccuuaacaugaucgacacaaagaaaagcucccugaauauuucuggcuacaacuuuagccucggggccgcugugaaggccggagcgugcaugcuggauggcgggaacaugcuugaaaccaucaaagucuccccucaaacgauggacggcauucucaagagcauccugaaaguuaagaaagcccugggaauguucauuucugaugcucccggcgagcgcaauccuuaugaaaacauccuguacaagauuugucucuccggggacggauggcccuauaucgccagcagaacaucuaucaccggccgggcuugggagaauacagugguggaucuggagagcgacgggaagccucagaaagccggauccaacggcucuaauaagagccuucaguccgccggguuuaccgcuggacugaccuacagccagcucaugacacugaaagaugcgaugcugcaacuugacccgaacgccaagacguggauggauauugaaggcagacccgaggacccugucgaaaucgcucucuaccagcccucuuccggcugcuauauucacuucuuucgcgagccuaccgaccugaaacaguucaagcaggaugccaaguacagccaugggaucgacgugacagaucuguuugccgcucaacccggacucaccucugccguuauugacgcgcugccgcggaauauggugaucacaugucagggcuccgaugacaucagaaaacuuuucgaaagccaggggcgcaaggauauuaaacugaucgacauugcucucuccaagaccgauucucggaaauaugagaacgccgucugggaccaguacaaggaucugugccacaugcauacgggaaucgugguugagaagaaaaagagaggcgggaaagaagagauuacaccucacugugcccugauggacugcaucauguuugaugcugccgugagcggcggacuuaauaccuccguccuccgcgcugugcugccccgggacauggucuucagaaccucuacaccucgcgugguucugugaggacuagucccuguucccagagcccacuuuuuuuucuuuuuuugaaauaaaauagccugucuuucagaucucaaaggcucuuuucagagccaccaaaaaaaaaaaaaaaaaaaaaaaaaaaaaaaaaaaaaaaaaaaaaaaaaaaaaaaaaaaaaaaaaaaaaaaaaaaaaaaaaaaaaaaaaaaaaaaaaaaaa

SEQ ID NO: 16948 - RNA, 1958 nt, Artificial Sequence
  mRNA product Design a-1 (A100) comprising derived and/or modified sequence from LASV(Josiah;Clade IV)__NP_694869__NP (opt1)
aggagagucccgcagucggcguccagcggcucugcuuguucgugugugugucguugcaggccuuauucaagcuuaccaugagcgccuccaaggagaucaagagcuuccuguggacccagucccuccgccgggagcugagcggcuacugcuccaacaucaagcuccagguggucaaggacgcccaggcgcugcugcacgggcuggacuucagcgagguguccaacgugcagcgccucaugcggaaggagcgccgggacgacaacgaccugaagcgccugcgggaccucaaccaggccgucaacaaccugguggagcucaagagcacccagcagaaguccauccugcgcgugggcacccugaccagcgacgaccugcucauccuggccgccgaccuggagaagcucaaguccaaggucauccggaccgagcgcccccugagcgccgggguguacaugggcaaccuguccagccagcagcucgaccagcggcgcgcgcugcugaacaugaucgggauguccggcggcaaccagggggcccgggccggccgcgacggggugguccgggugugggacgugaagaacgccgagcuccugaacaaccaguucggcaccaugccgagccugacgcucgcgugccugaccaagcaggggcaggucgaccugaacgacgccgugcaggcccucaccgaccugggccugaucuacaccgccaaguaccccaacacguccgaccucgaccgccugacccagagccaccccauccugaacaugaucgacaccaagaaguccagccucaacaucagcggcuacaacuucucccugggggccgcggugaaggccggcgccugcaugcuggacgggggcaacaugcucgagaccaucaaggucagcccccagacgauggacggcauccugaaguccauccugaaggugaagaaggcccucgggauguucaucagcgacaccccgggcgagcggaaccccuacgagaacauccuguacaagaucugccuguccggggacggcuggcccuacaucgccagccgcaccuccaucaccgggcgggcgugggagaacacgguggucgaccucgagagcgacggcaagccccagaaggccgacuccaacaacagcuccaagagccugcaguccgccggcuucaccgccgggcugaccuacagccagcucaugacccugaaggacgccaugcugcagcuggacccgaacgcgaagacguggauggacaucgagggccgccccgaggaccccguggagaucgcccucuaccagcccuccagcgggugcuacauccacuucuuccgggagccgaccgaccugaagcaguucaagcaggacgccaaguacucccacggcaucgacgugaccgaccuguucgccacccagcccgggcucacgagcgccgucaucgacgcgcugccccgcaacauggugaucacgugccagggcuccgacgacauccgcaagcugcucgagagccagggccggaaggacaucaagcugaucgacaucgcccugagcaagaccgacucccgcaaguacgagaacgccgugugggaccaguacaaggaccucugccacaugcacaccggggucguggucgagaagaagaagcggggcgggaaggaggagaucaccccgcacugcgcccugauggacugcaucauguucgacgcggccgugagcggcgggcugaacaccuccgugcuccgcgccguccugccccgggacaugguguuccgcaccagcacgccccgggugguccugugaggacuagucccuguucccagagcccacuuuuuuuucuuuuuuugaaauaaaauagccugucuuucagaucuaaaaaaaaaaaaaaaaaaaaaaaaaaaaaaaaaaaaaaaaaaaaaaaaaaaaaaaaaaaaaaaaaaaaaaaaaaaaaaaaaaaaaaaaaaaaaaaaaaaa

SEQ ID NO: 16949 - RNA, 1958 nt, Artificial Sequence
  mRNA product Design a-1 (A100) comprising derived and/or modified sequence from LASV(LP;Clade I)__AAF86702__NP (opt1)
aggagagucccgcagucggcguccagcggcucugcuuguucgugugugugucguugcaggccuuauucaagcuuaccaugagcaacuccaaggagaucaagagcuuccuguggacccagucccuccgccgggagcugagcggcuacugcuccaacaucaagcuccagguggucaaggacgcccaggcccugcugcacgggcuggacuucagcgagguguccaacgugcagcgccucaugcggaagcagaagcgcgacgacgcggaccugaagcggcugcgcgaccucaaccaggccgucaacaaccugguggagcucaagagcacccagcagaagaacgugcugcgggucggcacgcuguccagcgacgaccugaucacccucgccgccgaccuggagaagcugaaguccaaggugauccgcaccgagcggccccucagcuccgggguguacaugggcaaccugagcucccagcagcuggaccagcgccgggcccuccugagcaugaucgggauguccggcggcccgcaggggaaccgcaccggcggggacggcgucgugcgggugugggacgucaagaacgcggagcugcucaacaaccaguucgggacgaugcccagccugacccuggccugccucaccaagcagggccagguggaccugaacgacgccgugcaggcccugaccgaccucggccugaucuacacggcgaaguaccccaacuccagcgaccuggacaugcucacccagagccaccccauccuggggauggucgacaccaagaaguccagccugaacaucuccggcuacaacuucagccucggggccgccgugaaggccggcgccugcaugcuggacggcgggaacaugcuggagaccaucaagguguccccgcagacgauggacggcauccucaagagcauccugaaggucaagcgcucccuggggauguucaucagcgacacccccggcgagcggaaccccuacgagaacauccucuacaagaucugccuguccggggagggcuggcccuacaucgcgagccgcaccuccaucaccggccgggccugggagaacacgcugguggaccucgagagcgacaacaagccgcccaagcugaacuccgccgggagcaacaagucccugcaggccgccggccucaacgcggggcugaccuacagccagcugaugacccugaaggacugcaugcuccagcuggaccccuccagcaagaccuggaucgacaucgagggccgccccgaggacccgguggagaucgcccuguuccagcccuccagcgggugcuacauccacuucuuccgggagcccacggaccucaagcaguucaagcaggacgccaaguacagccacggcaucgacgucaccgaccuguucuccacccagcccggccugaccagcgccgugaucgaggcccucccgcgcaacauggugcugacgugccagggguccgacgacaucaagaagcugcucgagagccagggccggcgcgacaucaagcugaucgacaucucccugagcaaggcggacucccgcaaguucgagaacgccgucugggaccaguacaaggaccucugccacaugcacaccgggguggucguggagaagaagaagcggggcgggaaggaggagaucacgccccacugcgcccugcuggacugcaucauguucgacgccgccaccaccggcagccucaacaucaccacccugcgcgcggugcugccccgggacauggucuuccgcaccuccacgcccaagguggugcucugaggacuagucccuguucccagagcccacuuuuuuuucuuuuuuugaaauaaaauagccugucuuucagaucuaaaaaaaaaaaaaaaaaaaaaaaaaaaaaaaaaaaaaaaaaaaaaaaaaaaaaaaaaaaaaaaaaaaaaaaaaaaaaaaaaaaaaaaaaaaaaaaaaaaa

SEQ ID NO: 16950 - RNA, 1958 nt, Artificial Sequence
  mRNA product Design a-1 (A100) comprising derived and/or modified sequence from LASV(803213;Clade II)__AAF86704__NP (opt1)
aggagagucccgcagucggcguccagcggcucugcuuguucgugugugugucguugcaggccuuauucaagcuuaccaugagcgccuccaaggaggugaaguccuuccuguggacccagagccuccgccgggagcugagcggcuacugcuccaacaucaagcugcaggucgugaaggacgcccaggcgcuccugcacgggcuggacuucagcgaggugaacaacguccagcgccucaugcggaagcagaagcgcgacgacggcgaccugaagcggcugcgcgaccucaaccaggccgugaacaaccugguggagcugaaguccacccagcagaaguccauccuccgggucgggacgcugaccagcgacgaccugcucacccuggccgccgaccuggagaagcucaagagcaaggugauccgcaccgagcggccccuguccagcggcguguacauggggaaccuguccacgcagcagcucgagcagcgccgggcccugcugaacaugaucggcauggucggcggggcgcagggcacccagccggggcgcgacggcguggugcgggucugggacgugaagaaccccgaccuccugaacaaccaguucgggaccaugcccagccugacccucgccugccugacgaagcagggccagguggaccugaacgacgccguccucgcccugaccgaccugggccucaucuacaccgcgaaguaccccaacuccagcgaccuggaccgccugucccagagccacccgauccucaacaugguggacaccaagaaguccagccugaacaucagcggguacaacuucucccugggcgccgccgugaaggccggggccugcaugcucgacggcggcaacaugcuggagacgaucaaggucacgccccagaccauggacgggauccucaagagcauccugaaggugaagcggucccugggcauguucgugagcgacacccccggggagcgcaaccccuacgagaacauccuguacaagaucugccucuccggcgacggguggccguacaucgcgagccggaccuccaucgucggccgcgccugggagaacaccaccguggaccuggagagcgacggcaagccccagaagguggggaccgccggcuccaacaagagccugcaguccgccggguuccccacgggccucaccuacagccagcugaugacccugaaggacuccaugaugcagcuggaccccagcgccaagaccuggaucgacaucgaggggcggccggaggaccccgucgagaucgcgcucuaccagcccauguccggcugcuacauccacuucuuccgcgagcccacggaccugaagcaguucaagcaggacgccaaguacagccacggcaucgacguggccgaccuguucccggcccagcccgggcucaccuccgccgucaucgaggcgcugccccggaacauggugcugaccugccagggcagcgacgacaucaagaagcuccuggacucccaggggcgccgcgacaucaagcugaucgacaucagccucagcaagguggacucccggaaguucgagaacgccgucugggaccagugcaaggaccugugccacaugcacaccggcgugguggucgagaagaagaagcgcgggggcaaggaggagaucacgccccacugcgcccugauggacugcaucauguucgacgccgccgugagcggcgggcucaacaucccggugcugcgggcgguccugccccgcgacaugguguuccggaccuccagccccaaggugguccucugaggacuagucccuguucccagagcccacuuuuuuuucuuuuuuugaaauaaaauagccugucuuucagaucuaaaaaaaaaaaaaaaaaaaaaaaaaaaaaaaaaaaaaaaaaaaaaaaaaaaaaaaaaaaaaaaaaaaaaaaaaaaaaaaaaaaaaaaaaaaaaaaaaaaa

SEQ ID NO: 16951 - RNA, 1961 nt, Artificial Sequence
  mRNA product Design a-1 (A100) comprising derived and/or modified sequence from LASV(GA391;Clade III)__CAA36646__NP (opt1)
aggagagucccgcagucggcguccagcggcucugcuuguucgugugugugucguugcaggccuuauucaagcuuaccaugagcgccuccaaggaggugcgcagcuuccuguggacccagucccuccggcgcgagcugagcggcuacugcuccaacaucaagcugcaggucgugaaggacgcccaggcgcuccugcacgggcuggacuucagcgagguguccaacguccagcggcucaugcgcaagcagaagcgggacgacggcgaccugaagcgccugcgggaccucaaccaggccgugaacaaccugguggagcucaagagcacccagcagaaguccguccugcgcguggggacccugagcuccgacgaccugcucauccuggccgccgaccuggagaagcucaagagcaaggugacccggaccgagcgcccccuguccagcggcgucuacauggggaaccuguccagccagcagcucgaccagcggcgcgcccugcugaacaugaucggcaugaccggcguguccgggggcgggaagggcgcgagcgacgggaucgugcgggucugggacgugaagaacgccgagcuccugaacaaccaguucggcacgaugccgucccugacccucgccugccugaccaagcagggccagguggaccugaacgacgccguccaggcgcucaccgaccuggggcugaucuacacggccaaguaccccaacagcagcgaccucgaccgccugucccagagccaccccauccugaacaugaucgacaccaagaaguccagccucaacaucuccggcuacaacuucagccugggggccgccgugaaggccggcgcgugcaugcuggacggcgggaacaugcucgagaccaucaaggugagcccccagaccauggacggcauccucaaguccauccugaaggucaagaagucccuggggauguucgugagcgacacgccgggcgagcggaaccccuacgagaacauccuguacaagaucugccuguccggggacggcuggcccuacaucgccagccgcaccuccaucgugggccgggccugggagaacaccgucguggaccucgagcaggacaacaagccccagaagaucgggaacggcgggagcaacaagucccugcagagcgccggcuucgccgcggggcugaccuacucccagcucaugacgcugaaggacuucaagugcuucaaccugaucccgaacgccaagaccuggauggacaucgagggccgccccgaggaccccguggagaucgcccuguaccagcccagcuccggcugcuacguccacuucuuccgggagccgaccgaccucaagcaguucaagcaggacgccaaguacagccacgggaucgacgugaccgaccuguucgccgcgcagcccggccugacgagcgccgucaucgaggcccucccccgcaacauggugaucacgugccagggguccgaggacauccggaagcugcuggagagccagggccgccgcgacaucaagcucaucgacaucacccuguccaaggccgacagccggaaguucgagaacgccgugugggaccaguucaaggaccugugccacaugcacaccggggucgugguggagaagaagaagcgcggcggcaaggaggagaucacgccccacugcgcgcucauggacugcaucauguucgacgccgccgucuccgggggccuggacgccaaggugcugcgggugguccucccgcgcgacaugguguuccggaccagcacccccaaggugguccugugaggacuagucccuguucccagagcccacuuuuuuuucuuuuuuugaaauaaaauagccugucuuucagaucuaaaaaaaaaaaaaaaaaaaaaaaaaaaaaaaaaaaaaaaaaaaaaaaaaaaaaaaaaaaaaaaaaaaaaaaaaaaaaaaaaaaaaaaaaaaaaaaaaaaa

SEQ ID NO: 16952 - RNA, 1958 nt, Artificial Sequence
  mRNA product Design a-1 (A100) comprising derived and/or modified sequence from LASV(AV;Clade V)__CCA30315__NP (opt1)
aggagagucccgcagucggcguccagcggcucugcuuguucgugugugugucguugcaggccuuauucaagcuuaccaugagcgccuccaaggaggugaaguccuuccuguggacccagagccuccgccgggagcugagcggcuacugcuccaacaucaagcugcaggucgugaaggacgcccaggcgcuccugcacgggcuggacuucagcgagguguccaacguccagcgccucaugcggaagcagcgccgggacgacagcgaccugaagcgccugcgggaccucaaccaggccgugaacaaccugguggagcugaaguccacccagcagaaguccguccuccgcgugggcacgcugagcagcgacgaccugcucacccuggccgccgaccuggagaagcucaaguccaaggugacccggaccgagcgcccccugagcuccggggucuacaugggcaaccugagcucccagcagcucgaccagcggcgcgcccugcugaaccucaucgggaugacgaacggcagccagggcucccaggcggggcgggacggcguggugcgcgucugggacgugaagaacgccgagcugcugaacaaccaguucgggaccaugccgagccucacccuggccugccugaccaagcagggccagguggaccucaacgacgucgugcaggcccugacggaccuggggcucaucuacaccgcgaaguaccccaacaccagcgaccuggaccggcugacccagucccaccccauccucaacaugaucgacacgaagaaguccagccugaacaucagcggcuacaacuucucccugggcgccgccgugaaggccggggccugcaugcucgacggcgggaacaugcuggagaccaucaaggucagcccccaguccauggacggcauccucaagagcauccugaaggugaagcgcgcgcugggcauguucguguccgacaccccgggggagcggaaccccuacgagaacauccuguacaagaucugccucagcggcgacggguggcccuacaucgccucccgcaccagcaucgucggccgggccugggagaacacggugguggaccuggagaccgacgggaagccccagaagaucggcuccggcaacagcaacaagucccugcagagcgccggguucuccgccggccucaccuacagccagcugaugacccugaaggacgcgaugcugcagcucgacccgaacgccaagacguggauggacaucgaggggcgccccgaggaccccgucgagguggcccuguaccagcccaucuccggcugcuacauccacuucuuccgggagccgaccgaccugaagcaguucaagcaggacgccaaguacagccacgggaucgacaucgccgaccucuucgcggcccagcccggccugaccagcgccgucaucgaggcccugccccgcaacauggugaucacgugccagggcuccgaggacaucaagaagcuccuggagagccaggggcgcaaggacaucaagcugaucgacaucgcccucuccaagaucgacagccggaaguucgagaacgcggugugggaccaguacaaggaccugugccacaugcacaccggcgucgugguggagaagaagaagcgcgggggcaaggaggagaucaccccgcacugcgcccugauggacugcaucauguucgacgccgccgucuccgggggccucaacacccuggugcugcgggcggugcucccccgcgacauggucuuccggaccagcacgccccgcguggugcugugaggacuagucccuguucccagagcccacuuuuuuuucuuuuuuugaaauaaaauagccugucuuucagaucuaaaaaaaaaaaaaaaaaaaaaaaaaaaaaaaaaaaaaaaaaaaaaaaaaaaaaaaaaaaaaaaaaaaaaaaaaaaaaaaaaaaaaaaaaaaaaaaaaaaa

SEQ ID NO: 16953 - RNA, 1958 nt, Artificial Sequence
  mRNA product Design a-1 (A100) comprising derived and/or modified sequence from LASV(Togo/2016/7082;Clade VI)__AMR44578__NP (opt1)
aggagagucccgcagucggcguccagcggcucugcuuguucgugugugugucguugcaggccuuauucaagcuuaccaugagcaacuccaaggaggugaaguccuuccuguggacccagagccuccgccgggagcugagcggcuacugcuccaacaucaagcugcaggucgugaaggacgcccaggcccuccugcacgggcuggacuucagcgagguguccaacguccagcgccucaugcggaagcagaagcgcgacgacggcgaccugaagcggcugcgcgaccucaaccaggcggugaacaaccugguggagcucaagagcguccagcagaaguccauccugcggguggggacccugaccagcgacgaccugcucacccuggccgccgaccuggagaagcucaaguccaaggugacccgcaccgagcggccccugagcuccggcgucuacauggggaaccugagcucccagcagcucgaccagcgccgggcccugcugagcaugaucggcauguccggcgggaaccagaacagccagccgaagggcgacgggguggugcgcgucugggacgugaagaacgccgaccuccugaacaaccaguucggcacgaugcccucccugacccucgcgugccugaccaagcagggccagguggaccugaacgacgccguccaggcccucaccgaccuggggcugaucuacacggccaaguaccccaacagcagcgaccucgaccggcugucccagagccaccccauccugaacaugaucgacaccaagaaguccagccucaacaucuccggcuacaacuucagccugggggcggccaucaagaccggcgccugcaugcuggacgggggcaacaugcucgagaccaucaaggugacgccgcagaccauggacggcauccugaaguccauccugaaggugaagcgcagccucgggauguucaucuccgacacccccggcgagcggaaccccuacgagaacauccuguacaagaucugccugagcggggacggcuggcccuacaucgccucccgcaccgccaucaucgggcgggcgugggagaacacggucguggaccucgagagcgacuccaagccgcagaagaucggcagcaacggcuccaacaagagccugcaguccgccggguucgcccccggccugaccuacagccagcucaugacccugaaggacuccaugcugcagcuggaccccaacgccaagaccuggaucgacaucgaggggcgccccgaggacccgguggaggucgcccucuuccagcccaucagcggcugcuacauccacuucuuccgggagcccacggaccugaagcaguucaagcaggacgcgaaguacagccacgggaucgacgugaccgaccuguucgccgcccagcccggccucaccuccgccgugaucgaggcccugccgcgcaacaugguccugaccugccagggcagcgacgacaucaagaagcuccuggacucccaggggcggcgcgacaucaagcugaucgacgugagccucaacaagaucgacucccgcaaguucgagaacgcggucugggaccaguacaaggaccugugccacaugcacacgggcgugguggucgagaagaagaagaagggcgggaaggaggagaucacgccccacugcgcccugcucgacugcaucauguucgacgccgccgugagcgggggccugaacgccaccgugcugcgggcgguccucccccgcgacaugguguuccggaccuccagccccaaggugguccugugaggacuagucccuguucccagagcccacuuuuuuuucuuuuuuugaaauaaaauagccugucuuucagaucuaaaaaaaaaaaaaaaaaaaaaaaaaaaaaaaaaaaaaaaaaaaaaaaaaaaaaaaaaaaaaaaaaaaaaaaaaaaaaaaaaaaaaaaaaaaaaaaaaaaa

SEQ ID NO: 16954 - RNA, 1958 nt, Artificial Sequence
  mRNA product Design a-1 (A100) comprising derived and/or modified sequence from LASV(KAK-428;Clade n.d. (VII))__ANH09741__NP (opt1)
aggagagucccgcagucggcguccagcggcucugcuuguucgugugugugucguugcaggccuuauucaagcuuaccaugagcaacuccaaggaggugaaguccuuccuguggacccagagccuccgccgggagcugagcggcuacugcaccaacaucaagcugcaggucgugaaggacgcccaggcccuccugcacgggcuggacuucuccgaggugagcaacguccagcgccucaugcggaagcagaagcgcgacgacaacgaccugaagcggcugcgcgaccucaaccaggcggugaacaaccugguggagcugaaguccguccagcagaaguccgugcucaaggugggcacgcugaacagcgacgaccugcucacccuggccgccgaccuggagaagcucaagagcaaggucgugcggaccgagcgcccccuguccagcgggguguacaugggcaaccuguccagccagcagcucgaccagcggcgcgcccugcugaacaugaucgggauggccggcggcucccaggggaaccagccgagccgggacggcgucgugcgcgugugggacgucaagaacgcggaccuccugaacaaccaguucgggaccaugcccucccugacgcucgccugccugaccaagcagggccagguggaccugaacgacgugguccucgcccugaccgaccuggggcucaucuacaccgccaaguaccccaacagcuccgaccuggaccggcugagccagaaccaccccgugcucaacaugaucgacgugaacaagagcucccugaacaucagcggcuacaacuucucccugggcgcggccgucaaggccggggccugcaugcucgacggcgggaacaugcuggagacgaucaagaucagcccgcagaccguggacggcauccugaaguccauccucaaggugaagcgcgcccugggcauguucgucagcgacacccccggggagcggaaccccuacgagaacauccuguacaaggugugccucuccggcaacggguggcccuacaucgcgagccgcaccuccaucgucggccgggccugggagaacacggugguggaccuggagagcaacaagaaccagccgaaggucgggaacaacggcuccaacaagaugcugcagagcuccggcuucgccaccgggcucaccuacagccagcugaugacccugcgcgacuccaugcugcagcucgaccccacggccaagaccuggaucgacaucgagggccggcccgaggaccccguggagcuggcccuguuccagccgagcuccgggugcuacauccacuucuuccgcgagcccaccgaccucaagcaguucaagcaggacgcgaaguacagccacggcaucgacgugaacgaccuguucuccgcccagcccgggcugaccagcgccguccucgaggcccugccccggaacauggugcugacgugccagggcagcgacgacauccgcaagcuccuggacucccaggaccgcaaggacaucaagcugaucgacaucagccucuccaaggccgacgcgcggaaguucgagaacgacgugugggaccaguucaaggaccugugccacaugcacaccggcaucgucguggagaagaagaagaagggcgggaagcaggagaugaccccgcacugcgcccugcucgacugcaucauguucgacgccgccgugagcgggggccugaacguccccacccugcgcgccgugcuccccacggacaugguguuccggaccaucaccaccaaggucgugcugugaggacuagucccuguucccagagcccacuuuuuuuucuuuuuuugaaauaaaauagccugucuuucagaucuaaaaaaaaaaaaaaaaaaaaaaaaaaaaaaaaaaaaaaaaaaaaaaaaaaaaaaaaaaaaaaaaaaaaaaaaaaaaaaaaaaaaaaaaaaaaaaaaaaaa

SEQ ID NO: 16955 - RNA, 1958 nt, Artificial Sequence; identical to SEQ ID NO: 16949
  mRNA product Design a-1 (A100) comprising derived and/or modified sequence from LASV(Pinneo-NIG-1969;Clade I)__AIT17837__NP (opt1)

SEQ ID NO: 16956 - RNA, 1958 nt, Artificial Sequence
  mRNA product Design a-1 (A100) comprising derived and/or modified sequence from LASV(ISTH0009-NIG-2011;Clade II)__AIT17405__NP (opt1)
aggagagucccgcagucggcguccagcggcucugcuuguucgugugugugucguugcaggccuuauucaagcuuaccaugagcguguccaaggaggucaagagcuuccuguggacccagucccuccgccgggagcugagcggcuacugcuccaacaucaagcuccagguggugaaggacgcccaggcccugcugcacgggcuggacuucagcgaggucuccaacgugcagcgccucaugcggaagcagaagcgcgacgacagcgaccugaagcggcugcgcgaccucaaccaggcggugaacaaccuggucgagcugaaguccacccagcagaaguccauccuccgggugggcacccugaccagcgacgaccugcucacccuggccgccgaccuggagaagcucaagagcaaggugauccgcaccgagcggccccuguccagcggggucuacaugggcaaccuguccacgcagcagcucgagcagcgccgggcccugcugaacaugaucgggauggugggcggcgcccaggggacccagccgggccgcgacggggugguccgggugugggacgugaagaaccccgaccuccugaacaaccaguucggcaccaugcccagccugacccucgcgugccugacgaagcaggggcaggucgaccugaacgacgccgugcucgcccugaccgaccugggccucaucuacaccgccaaguaccccaacuccagcgaccuggaccgccugucccagagccacccgauccucaacaugguggacaucaagaaguccagccugaacaucagcggcuacaacuucucccugggggcggccgucaaggccggcgccugcaugcucgacgggggcaacaugcuggagaccaucaaggugacgccccagaccauggacggcauccucaagagcauccugaaggugaagcggucccuggggauguucgucagcgacacccccggcgagcgcaaccccuacgagaacauccuguacaagaucugccucuccggggacggcuggccguacaucgccagccggaccuccaucguggggcgcgcgugggagaacacgaccguggaccuggagagcgacggcaagccccagaaggucggcuccgccgggagcaacaagucccugcagagcgccggcuuccccaccgggcucaccuacucccagcugaugacgcugaaggacagcaugaugcagcuggaccccuccgccaagaccuggaucgacaucgagggccggccggaggaccccguggagaucgcccucuaccagcccaugagcgggugcuacauccacuucuuccgcgagcccaccgaccugaagcaguucaagcaggacgcgaaguacucccacggcaucgacgucgccgaccuguucccggcccagcccggccucaccagcgccgugaucgaggcccugccccggaacauggugcugacgugccaggggagcgacgacaucaagcgccuccuggacucccagggccgccgggacaucaagcugaucgacaucgcgcucagcaaggccgacucccgccgguucgagaacgccgucugggaccagugcaaggaccugugccacaugcacaccggggugguggucgagaagaagaagcgcggcgggaaggaggagaucacgccccacugcgcccugauggacugcaucauguacgacgccgcggugagcggcggccucaacaucccggugcugcgggccguccugccccgcgacaugguguuccggaccuccagccccaaggugguccucugaggacuagucccuguucccagagcccacuuuuuuuucuuuuuuugaaauaaaauagccugucuuucagaucuaaaaaaaaaaaaaaaaaaaaaaaaaaaaaaaaaaaaaaaaaaaaaaaaaaaaaaaaaaaaaaaaaaaaaaaaaaaaaaaaaaaaaaaaaaaaaaaaaaaa

SEQ ID NO: 16957 - RNA, 1958 nt, Artificial Sequence
  mRNA product Design a-1 (A100) comprising derived and/or modified sequence from LASV(ISTH2010-NIG-2012;Clade II)__AIT17483__NP (opt1)
aggagagucccgcagucggcguccagcggcucugcuuguucgugugugugucguugcaggccuuauucaagcuuaccaugagcgccuccaaggaggugaaguccuuccuguggacccagagccuccgccgggagcugagcggcuacugcuccaacaucaagcugcaggucgugaaggacgcccaggcgcuccugcacgggcuggacuucagcgagguguccaacguccagcgccucaugcggaagcagaagcgcgacgacagcgaccugaagcggcugcgcgaccucaaccaggccgugaacaaccugguggagcugaaguccacccagcagaaguccauccuccgggucggcacgcugaccagcgacgaccugcucacccuggccgccgaccuggagaagcucaagagcaaggugauccgcaccgagcggccccuguccagcgggguguacaugggcaaccuguccacgcagcagcucgagcagcgccgggcccugcugaaccucaucgggauggucggcggcgcgcaggggacccagccgggccgcgacgggguggugcgggucugggacgugaagaaccccgaccugcugaacaaccaguucggcaccaugcccagccucacccuggccugccugacgaagcagggccagguggaccucaacgacgccguccuggcccugaccgaccucgggcugaucuacaccgcgaaguaccccaacuccagcgaccuggaccgccucucccagagccacccgauccugaacaugguggacaccaagaaguccagccugaacaucagcggcuucaacuucucccucggggccgccgugaaggccggcgccugcaugcuggacgggggcaacaugcuggagacgaucaaggucacgccccagaccauggacggcauccucaagagcauccugaaggugaagaagucccuggggauguucgugagcgacacccccggcgagcggaaccccuacgagaacauccucuacaagaucugccuguccggggacggcuggccguacaucgcgagccgcaccuccaucgucgggcgggccugggagaacaccaccguggaccuggagagcgacggcaagccccacaaggugggcaccgccggguccaacaagagccuccaguccgccggcuuccccacggggcugaccuacagccagcugaugacccugaaggacuccaugaugcagcucgaccccagcgccaagaccuggaucgacaucgagggccgcccggaggaccccgucgagaucgcgcuguaccagcccauguccgggugcuacauccacuucuuccgggagcccacggaccugaagcaguucaagcaggacgccaaguacagccacggcaucgacguggccgaccucuucccggcccagcccggccugaccuccgccgucaucgaggcgcugccccgcaacauggugcugaccugccaggggagcgacgacaucaagcggcuccuggacagccagggccgccgcgacaucaagcucaucgacaucgcccuguccaaggccgacagccggcgcuucgagaacgccgugugggaccagugcaaggaccugugccacaugcacaccggggucgugguggagaagaagaagcggggcgggaaggaggagaucacgccccacugcgcccucauggacugcaucauguacgacgcggccgucuccggcggccugaacaucccggugcugcgcgccgugcucccccgggacauggucuuccgcaccagcucccccaagguggugcugugaggacuagucccuguucccagagcccacuuuuuuuucuuuuuuugaaauaaaauagccugucuuucagaucuaaaaaaaaaaaaaaaaaaaaaaaaaaaaaaaaaaaaaaaaaaaaaaaaaaaaaaaaaaaaaaaaaaaaaaaaaaaaaaaaaaaaaaaaaaaaaaaaaaaa

SEQ ID NO: 16958 - RNA, 1958 nt, Artificial Sequence
  mRNA product Design a-1 (A100) comprising derived and/or modified sequence from LASV(Lassa virus/H.sapiens-wt/NGA/2015/ISTH_0543;Clade II)__AVO03640__NP (opt1)
aggagagucccgcagucggcguccagcggcucugcuuguucgugugugugucguugcaggccuuauucaagcuuaccaugagcgccuccaaggaggugaaguccuuccuguggacccagagccuccgccgggagcugagcggcuacugcuccaacaucaagcugcaggucgugaaggacgcccaggcgcuccugcacgggcuggacuucagcgagguguccaacguccagcgccucaugcggaagcagaagcgcgacgacagcgaccugaagcggcugcgcgaccucaaccaggccgugaacaaccugguggagcugaaguccacccagcagaaguccauccuccgggucggcacgcugaccagcgacgaccugcucacccuggccgccgaccuggagaagcucaagagcaaggugauccgcaccgagcggccccuguccagcgggguguacaugggcaaccuguccacgcagcagcucgagcagcgccgggcccugcugaacaugaucgggauggucggcggcgcgcaggggacccagccgggccgcgacgggguggugcgggucugggacgugaagaaccccgaccuccugaacaaccaguucggcaccaugcccagccugacccucgccugccugacgaagcagggccagguggaccugaacgacgccguccucgcccugaccgaccuggggcucaucuacaccgcgaaguaccccaacuccagcgaccuggaccgccugucccagagccacccgauccucaacaugguggacaccaagaaguccagccugaacaucagcggcuacaacuucucccugggggccgccgugaaggccggcgccugcaugcucgacgggggcaacaugcuggagacgaucaaggucacgccccagaccauggacggcauccucaagagcauccugaaggugaagaagucccuggggauguucgugagcgacacccccggcgagcggaaccccuacgagaacauccuguacaagaucugccucuccggggacggcuggccguacaucgcgagccgcaccuccaucgucgggcgggccugggagaacaccaccguggaccuggagagcgacggcaagccccagaaggugggcuccgccgggagcaacaagucccugcagagcgccggcuuccccaccgggcucacguacucccagcugaugacccugaaggacagcaugaugcagcuggaccccuccgccaagaccuggaucgacaucgagggccgcccggaggaccccgucgagaucgcgcucuaccagcccaugagcgggugcuacauccacuucuuccgggagcccaccgaccugaagcaguucaagcaggacgccaaguacucccacggcaucgacguggccgaccuguucccggcccagcccggccucacgagcgccgucaucgaggcgcugccccgcaacauggugcugaccugccaggggagcgacgacaucaagcggcuccuggacucccagggccgcaaggacaucaagcugaucgacaucgcccucagcaaggccgacucccgccgguucgagaacgccgugugggaccagugcaaggaccugugccacaugcacaccggggucgugguggagaagaagaagcgcggcgggaaggaggagaucacgccccacugcgcccugauggacugcaucauguacgacgcggccgucagcggcggccucaacaucccggugcugcgggccgugcugccccgcgacauggucuuccggaccuccagccccaagguggugcucugaggacuagucccuguucccagagcccacuuuuuuuucuuuuuuugaaauaaaauagccugucuuucagaucuaaaaaaaaaaaaaaaaaaaaaaaaaaaaaaaaaaaaaaaaaaaaaaaaaaaaaaaaaaaaaaaaaaaaaaaaaaaaaaaaaaaaaaaaaaaaaaaaaaaa

SEQ ID NO: 16959 - RNA, 1958 nt, Artificial Sequence
  mRNA product Design a-1 (A100) comprising derived and/or modified sequence from LASV(Lassa virus/H.sapiens-wt/NGA/2016/ISTH_0009;Clade II)__AVO03572__NP (opt1)
aggagagucccgcagucggcguccagcggcucugcuuguucgugugugugucguugcaggccuuauucaagcuuaccaugagcgccuccaaggaggugaaguccuuccuguggacccagagccuccgccgggagcugagcggcuacugcuccaacaucaagcugcaggucgugaaggacgcccaggcgcuccugcacgggcuggacuucagcgagguguccaacguccagcgccucaugcggaagcagaagcgcgacgacagcgaccugaagcggcugcgcgaccucaaccaggccgugaacaaccugguggagcugaaguccacccagcagaaguccauccuccgggucggcacgcugaccagcgacgaccugcucacccuggccgccgaccuggagaagcucaagagcaaggugauccgcaccgagcggccccuguccagcgggguguacaugggcaaccuguccacgcagcagcucgagcagcgccgggcccugcugaacaugaucgggauggucggcggcgcgcaggggacccagccgggccgcgacgggguggugcgggucugggacgugaagaaccccgaccuccugaacaaccaguucggcaccaugcccagccugacccucgccugccugacgaagcagggccagguggaccugaacgacgccguccucgcccugaccgaccuggggcucaucuacaccgcgaaguaccccaacuccagcgaccuggaccgccugucccagagccacccgauccucaacaugguggacaccaagaaguccagccugaacaucagcggcuacaacuucucccugggggccgccgugaaggccggcgccugcaugcucgacgggggcaacaugcuggagacgaucaaggucacgccccagaccauggacggcauccucaagagcauccugaaggugaagaagucccuggggauguucgugagcgacacccccggcgagcggaaccccuacgagaacauccuguacaagaucugccucuccggggacggcuggccguacaucgcgagccgcaccuccaucgucgggcgggccugggagaacaccaccguggaccuggagagcgacggcaagccccagaaggugggcuccgccgggagcaacaagucccugcagagcgccggcuuccccaccgggcucacguacucccagcugaugacccugaaggacagcaugaugcagcuggaccccuccgccaagaccuggaucgacaucgagggccgcccggaggaccccgucgagaucgcgcucuaccagcccaugagcgggugcuacauccacuucuuccgggagcccaccgaccugaagcaguucaagcaggacgccaaguacucccacggcaucgacguggccgaccuguucccggcccagcccggccucacgagcgccgucaucgaggcgcugccccgcaacauggugcugaccugccaggggagcgacgacaucaagcggcuccuggacucccagggccgccgcgacaucaagcugaucgacaucgcccucagcaaggccgacucccggcgcuucgagaacgccgugugggaccagugcaaggaccugugccacaugcacaccggggucgugguggagaagaagaagcggggcgggaaggaggagaucacgccccacugcgcccugauggacugcaucauguacgacgcggccgucagcggcggccucaacaucccggugcugcgcgccgugcugccccgggacauggucuuccgcaccuccagccccaagguggugcucugaggacuagucccuguucccagagcccacuuuuuuuucuuuuuuugaaauaaaauagccugucuuucagaucuaaaaaaaaaaaaaaaaaaaaaaaaaaaaaaaaaaaaaaaaaaaaaaaaaaaaaaaaaaaaaaaaaaaaaaaaaaaaaaaaaaaaaaaaaaaaaaaaaaaa

SEQ ID NO: 16960 - RNA, 1958 nt, Artificial Sequence
  mRNA product Design a-1 (A100) comprising derived and/or modified sequence from LASV(Lassa virus/H.sapiens-wt/NGA/2016/ISTH_0017;Clade II)__AVO03568__NP (opt1)
aggagagucccgcagucggcguccagcggcucugcuuguucgugugugugucguugcaggccuuauucaagcuuaccaugagcgccuccaaggaggugaaguccuuccuguggacccagagccuccgccgggagcugagcggcuacugcuccagcaucaagcugcaggucgugaaggacgcccaggcgcuccugcacgggcuggacuucuccgaggugagcaacguccagcgccucaugcggaagcagaagcgcgacgacuccgaccugaagcggcugcgcgaccucaaccaggccgugaacaaccugguggagcucaagagcacccagcagaaguccauccugcgggucggcacgcugaccagcgacgaccugcucacccuggccgccgaccuggagaagcucaaguccaaggugauccgcaccgagcggccccugagcuccgggguguacaugggcaaccugagcacgcagcagcucgagcagcgccgggcccugcugaacaugaucgggauggcgggcggcgcccaggggacccagccgggccgcgacggggucgugcgggugugggacgucaagaaccccgaccuccugaacaaccaguucggcaccaugcccucccugacccucgccugccugacgaagcagggccagguggaccugaacgacgccgugcucgcgcugaccgaccuggggcucaucuacaccgccaaguaccccaacagcuccgaccuggaccgccugagccagagccacccgauccucaacauggucgacaccaagaaguccagccugaacaucuccggcuacaacuucagccugggggccgccgugaaggccggcgcgugcaugcucgacgggggcaacaugcuggagacgaucaaggugacgccccagaccauggacggcauccugaaguccauccucaaggucaagcggagccuggggauguucguguccgacgcccccggcgagcgcaaccccuacgagaacauccuguacaagaucugccucagcggggacggcuggccguacaucgccucccggaccagcaucguggggcgcgccugggagaacaccaccgucgaccuggaguccgacggcaagccccagaaggugggcgccaccgggagcaacaagucccugcagagcgcgggcuuccccaccgggcucacguacucccagcugaugacccugaaggacagcaugaugcagcuggaccccuccgccaagaccuggaucgacaucgagggccggccggaggaccccguggaggucgcccucuaccagcccgugagcgggugcuacauccacuucuuccgcgagcccaccgaccugaagcaguucaagcaggacgccaaguacucccacggcaucgacgucgccgaccuguucccggcgcagcccggccucacgagcgccgugaucgaggcccugccccggaacauggugcugaccugccaggggagcgacgacaucaagaagcuccuggacucccagggccgcaaggacaucaagcugaucgacaucgcccucagcaaggccgacucccgccgguucgagaacgcggucugggaccagugcaaggaccugugccacaugcacaccggggugguggucgagaagaagaagcgcggcgggaaggaggagaucacgccccacugcgcccugauggacugcaucauguacgacgccgccgugagcggcggccucaacaucccggugcugcgggcgguccugccccgcgacaugguguuccggaccuccagccccaaggugguccucugaggacuagucccuguucccagagcccacuuuuuuuucuuuuuuugaaauaaaauagccugucuuucagaucuaaaaaaaaaaaaaaaaaaaaaaaaaaaaaaaaaaaaaaaaaaaaaaaaaaaaaaaaaaaaaaaaaaaaaaaaaaaaaaaaaaaaaaaaaaaaaaaaaaaa

SEQ ID NO: 16961 - RNA, 1958 nt, Artificial Sequence
  mRNA product Design a-1 (A100) comprising derived and/or modified sequence from LASV(Lassa virus/H.sapiens-wt/NGA/2018/ISTH_0959;Clade II)__AVV65100__NP (opt1)
aggagagucccgcagucggcguccagcggcucugcuuguucgugugugugucguugcaggccuuauucaagcuuaccaugagcgccuccaaggaggugaaguccuuccuguggacccagagccuccgccgggagcugagcggcuacugcuccaacaucaagcugcaggucgugaaggacgcccaggcgcuccugcacgggcuggacuucagcgagguguccaacguccagcgccucaugcggaagcagaagcgcgacgacagcgaccugaagcggcugcgcgaccucaaccaggccgugaacaaccugguggagcugaaguccacccagcagaaguccauccuccgggucggcacccugaccagcgacgaccugcucacccuggccgccgaccuggagaagcucaagagcaaggugauccgcaccgagcggccccuguccagcgggguguacaugggcaaccuguccacgcagcagcucgagcagcgccgggcccugcugaaccucaucgggauggucggcggcgcgcaggggacccagccgggccgcgacgggguggugcgggucugggacgugaagaaccccgaccugcugaacaaccaguucggcaccaugcccagccucacccuggccugccugacgaagcagggccagguggaccucaacgacgucgugcuggcccugaccgaccucgggcugaucuacaccgccaaguaccccaacuccagcgaccuggaccgccucucccagagccacccgauccugaacaugguggacaccaagaaguccagccugaacaucagcggcuucaacuucucccucggggcggccgucaaggccggcgccugcaugcuggacgggggcaacaugcuggagacgaucaaggugacgccccagaccauggacggcauccucaagagcauccugaaggugaagaagucccuggggauguucgucagcgacacccccggcgagcggaaccccuacgagaacauccucuacaagaucugccuguccggggacggcuggccguacaucgccagccgcaccuccaucguggggcgggcgugggagaacaccaccguggaccuggagagcgacggcaagccccacaaggucggcaccgccggguccaacaagagccuccaguccgccggcuuccccacggggcugaccuacagccagcugaugacccugaaggacuccaugaugcagcucgaccccagcgccaagaccuggaucgacaucgagggccgcccggaggaccccguggagaucgcccuguaccagcccauguccgggugcuacauccacuucuuccgggagcccacggaccugaagcaguucaagcaggacgcgaaguacagccacggcaucgacgucgccgaccucuucccggcccagcccggccugaccuccgccgugaucgaggcccugccccgcaacauggugcugaccugccaggggagcgacgacaucaagcggcuccuggacagccagggccgcaaggacaucaagcucaucgacaucgcgcuguccaagaccgacagccgccgguucgagaacgccgucugggaccagugcaaggaccugugccacaugcacacgggggugguggucgagaagaagaagcgcggcgggaaggaggagaucacgccccacugcgcccucauggacugcaucauguacgacgccgccguguccggcggccugaacaucccggugcugcgggcgguccucccccgcgacaugguguuccggaccagcucccccaaggugguccugugaggacuagucccuguucccagagcccacuuuuuuuucuuuuuuugaaauaaaauagccugucuuucagaucuaaaaaaaaaaaaaaaaaaaaaaaaaaaaaaaaaaaaaaaaaaaaaaaaaaaaaaaaaaaaaaaaaaaaaaaaaaaaaaaaaaaaaaaaaaaaaaaaaaaa

SEQ ID NO: 16962 - RNA, 1958 nt, Artificial Sequence
  mRNA product Design a-1 (A100) comprising derived and/or modified sequence from LASV(LASV003-NIG-2008;Clade II)__AIT17581__NP (opt1)
aggagagucccgcagucggcguccagcggcucugcuuguucgugugugugucguugcaggccuuauucaagcuuaccaugagcgccuccaaggaggugaaguccuuccuguggacccagagccuccgccgggagcugagcggcuacugcuccagcaucaagcugcaggucgugaaggacgcccaggcgcuccugcacgggcuggacuucuccgaggugagcaacguccagcgccucaugcggaagcagaagcgcgacgacuccgaccugaagcggcugcgcgaccucaaccaggccgugaacaaccugguggagcucaagagcacccagcagaaguccguccugcgggugggcacccugaccagcgacgaccugcucacccuggccgccgaccuggagaagcucaaguccaaggugauccgcaccgagcggccccugagcuccggggucuacaugggcaaccugagcgcccagcagcucgagcagcgccggacgcugcugaacaugaucgggauggugggcggcgcgcaggggacccagccgggccgcgacggggugguccgggugugggacgugaagaaccccgaccuccugaacaaccaguucggcaccaugcccucccugacccucgccugccugacgaagcaggggcaggucgaccugaacgacguggugcucgcccugaccgaccugggccucaucuacaccgccaaguaccccaacagcuccgaccuggaccgccugagccagagccacccgauccucuccauggucgacaccaagaaguccagccugaacaucagcggcuacaacuucucccugggggcggccgugaaggccggcgccugcaugcucgacgggggcaacaugcuggagacgaucaaggugacgccccagaccauggacggcauccucaagagcauccugaaggucaagaagucccuggggauguucgugagcgacacccccggcgagcggaaccccuacgagaacauccuguacaagaucugccucuccggggacggcuggccguacaucgccagccgcaccuccaucguggggcgggcgugggagaacaccaccgucgaccuggagagcgacggcaagccccagaaggugggcaccgccggguccaacaagagccugcaguccgccggcuuccccacggggcucaccuacagccagcugaugacccugaaggacuccaugaugcagcuggaccccagcgccaagaccuggaucgacaucgagggccgcccggaggaccccgucgagaucgcccucuaccagcccauguccgggugcuacauccacuucuuccgggagcccacggaccugaagcaguucaagcaggacgcgaaguacagccacggcaucgacgugaccgaccuguucccggcccagcccggccucaccagcgccgugaucgaggcccugccccgcaacaugguccugaccugccagggguccgacgacaucaagcggcuccuggacagccagggccgccgcgacaucaagcugaucgacaucgcccucuccaaggcggacagccggcgcuucgagaacgccgugugggaccagugcaaggaccugugccacaugcacacggggguggucguggagaagaagaagcggggcgggaaggaggagaucacgccccacugcgcccugauggacugcaucauguacgacgccgccguguccggcggccucaacaucccgguccugcgcgcggugcugccccgggacaugguguuccgcaccagcucccccaaggucgugcucugaggacuagucccuguucccagagcccacuuuuuuuucuuuuuuugaaauaaaauagccugucuuucagaucuaaaaaaaaaaaaaaaaaaaaaaaaaaaaaaaaaaaaaaaaaaaaaaaaaaaaaaaaaaaaaaaaaaaaaaaaaaaaaaaaaaaaaaaaaaaaaaaaaaaa

SEQ ID NO: 16963 - RNA, 1958 nt, Artificial Sequence
  mRNA product Design a-1 (A100) comprising derived and/or modified sequence from LASV(LASV035-NIG-2009;Clade II)__AIT17589__NP (opt1)
aggagagucccgcagucggcguccagcggcucugcuuguucgugugugugucguugcaggccuuauucaagcuuaccaugagcgccuccaaggaggugaaguccuuccuguggacccagagccuccgccgggagcugagcggcuacugcuccagcaucaagcugcaggucgugaaggacgcccaggcgcuccugcacgggcuggacuucuccgaggugagcaacguccagcgccucaugcggaagcagaagcgcgacgacuccgaccugaagcggcugcgcgaccucaaccaggccgugaacaaccugguggagcucaagagcacccagcagaaguccauccugcgggucggcacgcugaccagcgacgaccugcucacccuggccgccgaccuggagaagcucaaguccaaggugauccgcaccgagcggccccugagcuccgggguguacaugggcaaccugagcgcccagcagcucgagcagcgccgggcgcugcugaacaugaucgggauggucggcggcgcccaggggacgcagccgggccgcgacgggguggugcgggucugggacgugaagaaccccgaccuccugaacaaccaguucggcaccaugcccucccugacccucgccugccugaccaagcagggccagguggaccugaacgacgccguccucgcgcugacggaccuggggcucaucuacaccgccaaguaccccaacagcuccgaccuggaccgccugagccagagccacccgauccucaacaugguggacaccaagaaguccagccugaacaucuccggcuacaacuucagccugggggccgccgugaaggccggcgcgugcaugcucgacgggggcaacaugcuggagaccaucaaggucacgccccagaccauggacggcauccugaaguccauccucaaggugaagcggagccuggggauguucguguccgacacccccggcgagcgcaaccccuacgagaacauccuguacaagaucugccucagcggggacggcuggccguacaucgccucccggaccagcaucgucgggcgcgccugggagaacacgaccguggaccuggaguccgacggcaagccccagaaggugggcaccaccgggagcaacaagucccugcagagcgccggcuuccccacggggcucaccuacucccagcugaugacccugaaggacagcaugaugcagcuggaccccuccgccaagaccuggaucgacaucgagggccggccggaggaccccgucgagaucgcgcucuaccagcccaugagcgggugcuacauccacuucuuccgcgagcccacggaccugaagcaguucaagcaggacgccaaguacucccacggcaucgacguggccgaccuguucccggcccagcccggccucaccagcgccgucaucgaggcgcugccccggaacauggugcugaccugccaggggagcgacgacaucaagaagcuccuggacucccagggccgccgcgacaucaagcugaucgacaucgcccucagcaaggccgacucccggaaguucgagaacgccgugugggaccagugcaaggaccugugccacaugcacaccggggucgugguggagaagaagaagcgcggcgggaaggaggagaucacgccccacugcgcccugauggacugcaucauguacgacgcggccgucagcggcggccucaacaucccggugcugcgggccgugcugccccgcgacauggucuuccggaccuccagccccaagguggugcucugaggacuagucccuguucccagagcccacuuuuuuuucuuuuuuugaaauaaaauagccugucuuucagaucuaaaaaaaaaaaaaaaaaaaaaaaaaaaaaaaaaaaaaaaaaaaaaaaaaaaaaaaaaaaaaaaaaaaaaaaaaaaaaaaaaaaaaaaaaaaaaaaaaaaa

SEQ ID NO: 16964 - RNA, 1958 nt, Artificial Sequence
  mRNA product Design a-1 (A100) comprising derived and/or modified sequence from LASV(LASV1000-NIG-2009;Clade II)__AIT17783__NP (opt1)
aggagagucccgcagucggcguccagcggcucugcuuguucgugugugugucguugcaggccuuauucaagcuuaccaugagcgccuccaaggaggugaaguccuuccuguggacccagagccuccgccgggagcugagcggcuacugcuccaacaucaagcugcaggucgugaaggacgcccaggcgcuccugcacgggcuggacuucagcgagguguccaacguccagcgccucaugcggaagcagaagcgcgacgacagcgaccugaagcggcugcgcgaccucaaccaggccgugaacaaccugguggagcugaaguccacccagcagaaguccauccuccgggucggcacgcugaccagcgacgaccugcucacccuggccgccgaccuggagaagcucaagagcaaggugauccgcaccgagcggccccuguccagcgggguguacaugggcaaccuguccacgcagcagcucgagcagcgccgggcccugcugaacaugaucgggauggucggcggcgcgcaggggacccagccgggccgcgacgggguggugcgggucugggacgugaagaaccccgaccuccugaacaaccaguucggcaccaugcccagccugacccucgccugccugacgaagcagggccagguggaccugaacgacgucgugcucgcccugaccgaccuggggcucaucuacaccgccaaguaccccaacuccagcgaccuggaccgccugucccagagccacccgauccucaacaugguggacaccaagaaguccagccugaacaucagcggcuacaacuucucccugggggcggccgucaaggccggcgccugcaugcucgacgggggcaacaugcuggagacgaucaaggugacgccccagaccauggacggcauccucaagagcauccugaaggugaagaagucccuggggauguucgucagcgacacccccggcgagcggaaccccuacgagaacauccuguacaagaucugccucuccggggacggcuggccguacaucgccagccgcaccuccaucguggggcgggcgugggagaacaccaccguggaccuggagagcgacggcaagccccagaaggucggcaccgccggguccaacaagagccugcaguccgccggcuuccccacggggcucaccuacagccagcugaugacccugaaggacuccaugaugcagcuggaccccagcgccaagaccuggaucgacaucgagggccgcccggaggaccccguggagaucgcccucuaccagcccgucuccgggugcuacauccacuucuuccgggagcccacggaccugaagcaguucaagcaggacgcgaaguacagccacggcaucgacguggccgaccuguucccggcccagcccggccucaccuccgccgugaucgaggcccugccccgcaacaugguccugaccugccaggggagcgacgacaucaagcggcuccuggacagccagggccgccgcgacaucaagcugaucgacaucgcgcucuccaaggccgacagccggcgcuucgagaacgccgugugggaccagugcaaggaccugugccacaugcacaccgggguggucguggagaagaagaagcggggcgggaaggaggagaucacgccccacugcgcccugauggacugcaucauguacgacgccgcgguguccggcggccucaacaucccgguccugcgcgccgugcugccccgggacaugguguuccgcaccagcucccccaaggucgugcucugaggacuagucccuguucccagagcccacuuuuuuuucuuuuuuugaaauaaaauagccugucuuucagaucuaaaaaaaaaaaaaaaaaaaaaaaaaaaaaaaaaaaaaaaaaaaaaaaaaaaaaaaaaaaaaaaaaaaaaaaaaaaaaaaaaaaaaaaaaaaaaaaaaaaa

SEQ ID NO: 16965 - RNA, 1958 nt, Artificial Sequence
  mRNA product Design a-1 (A100) comprising derived and/or modified sequence from LASV(LASV221-NIG-2010;Clade II)__AIT17625__NP (opt1)
aggagagucccgcagucggcguccagcggcucugcuuguucgugugugugucguugcaggccuuauucaagcuuaccaugagcgccuccaaggaggugaaguccuuccuguggacccagagccuccgccgggagcugagcggcuacugcuccagcaucaagcugcaggucgugaaggacgcccaggcgcuccugcacgggcuggacuucuccgaggugagcaacguccagcgccucaugcggaagcagcgccgggacgacuccgaccugaagcgccugcgggaccucaaccaggccgugaacaaccugguggagcucaagagcacccagcagaaguccauccugcgcgucggcacgcugaccagcgacgaccugcucacccuggccgccgaccuggagaagcucaaguccaaggugauccggaccgagcgcccccugagcuccgggguguacaugggcaaccugagcacgcagcagcucgagcagcggcgcgcccugcugaacaugaucgggauggucggcggcgcgcaggggacccagccgggccgggacgggguggugcgcgucugggacgugaagaaccccgaccuccugaacaaccaguucggcaccaugcccucccugacccucgccugccugacgaagcagggccagguggaccugaacgacgccguccucgcccugaccgaccuggggcucaucuacaccgcgaaguaccccaacagcuccgaccuggaccggcugagccagagccacccgauccucaacaugguggacaccaagaaguccagccugaacaucuccggcuacaacuucagccugggggccgccgugaaggccggcgccugcaugcucgacgggggcaacaugcuggagacgaucaaggucacgccccagaccguggacggcauccugaaguccauccucaaggugaagcgcagccuggggauguucgucuccgacacccccggcgagcggaaccccuacgagaacauccuguacaagaucugccucagcggggacggcuggccguacaucgcgucccgcaccagcaucguggggcgggccugggagaacaccaccguggaccuggaguccgacggcaagccccagaaggucggcaccgccgggagcaacaagucccugcagagcgccggcuuccccacggggcucaccuacucccagcugaugacccugaaggacagcaugaugcagcuggaccccuccgccaagaccuggaucgacaucgagggccgcccggaggaccccguggagaucgcgcucuaccagcccaugagcgggugcuacauccacuucuuccgggagcccacggaccugaagcaguucaagcaggacgccaaguacucccacggcaucgacgucgccgaccuguucccggcccagcccggccucaccagcgccgugaucgaggcgcugccccgcaacauggugcugaccugccaggggagcgacgacaucaagcgccuccuggacucccagggccggcgcgacaucaagcugaucgacaucgcccucagcaaggccgacucccggaaguucgagaacgccgucugggaccagugcaaggaccugugccacaugcacaccggggugguggucgagaagaagaagcgcggcgggaaggaggagaucacgccccacugcgcccugauggacugcaucauguacgacgcggccgugagcggcggccucaacaucccggugcugcgggccguccugccccgcgacaugguguuccggaccuccagccccaaggugguccucugaggacuagucccuguucccagagcccacuuuuuuuucuuuuuuugaaauaaaauagccugucuuucagaucuaaaaaaaaaaaaaaaaaaaaaaaaaaaaaaaaaaaaaaaaaaaaaaaaaaaaaaaaaaaaaaaaaaaaaaaaaaaaaaaaaaaaaaaaaaaaaaaaaaaa

SEQ ID NO: 16966 - RNA, 1958 nt, Artificial Sequence
  mRNA product Design a-1 (A100) comprising derived and/or modified sequence from LASV(LASV237-NIG-2010;Clade II)__AIT17639__NP (opt1)
aggagagucccgcagucggcguccagcggcucugcuuguucgugugugugucguugcaggccuuauucaagcuuaccaugagcgccuccaaggaggugaaguccuuccuguggacccagagccuccgccgggagcugagcggcuacugcuccaacaucaagcugcaggucgugaaggacgcccaggcgcuccugcacgggcuggacuucagcgagguguccaacguccagcgccucaugcggaagcagaagcgcgacgacagcgaccugaagcggcugcgcgaccucaaccaggccgugaacaaccugguggagcugaaguccacccagcagaaguccauccuccgggucggcacccugaccagcgacgaccugcucacccuggccgccgaccuggagaagcucaagagcaaggugauccgcaccgagcggccccuguccagcgggguguacaugggcaaccuguccacgcagcagcucgagcagcgccgggcccugcugaacaugaucgggauggucggcggcgcgcaggggacccagccgggccgcgacgggguggugcgggucugggacgugaagaaccccgaccuccugaacaaccaguucggcaccaugcccagccugacccucgccugccugacgaagcagggccagguggaccugaacgacgccguccucgcccugaccgaccuggggcucaucuacaccgcgaaguaccccaacuccagcgaccuggaccgccugucccagagccacccgauccucaacaugguggacaucaagaaguccagccugaacaucagcggcuacaacuucucccugggggccgccgugaaggccggcgccugcaugcucgacgggggcaacaugcuggagaccaucaaggucacgccccagaccauggacggcauccucaagagcauccugaaggugaagcggucccuggggauguucgugagcgacacccccggcgagcgcaaccccuacgagaacauccuguacaagaucugccucuccggggacggcuggccguacaucgcgagccggaccuccaucgucgggcgcgccugggagaacacgaccguggaccuggagagcgacggcaagccccagaaggugggcuccgccgggagcaacaagucccugcagagcgccggcuuccccaccgggcucaccuacucccagcugaugacgcugaaggacagcaugaugcagcuggaccccuccgccaagaccuggaucgacaucgagggccggccggaggaccccgucgagaucgcgcucuaccagcccaugagcgggugcuacauccacuucuuccgcgagcccaccgaccugaagcaguucaagcaggacgccaaguacucccacggcaucgacguggccgaccuguucccggcccagcccggccucaccagcgccgucaucgaggcgcugccccggaacauggugcugacgugccaggggagcgacgacaucaagcgccuccuggacucccagggccgccgggacaucaagcugaucgacaucgcccucagcaaggccgacucccgccgguucgagaacgccgugugggaccagugcaaggaccugugccacaugcacaccggggucgugguggagaagaagaagcgcggcgggaaggaggagaucacgccccacugcgcccugauggacugcaucauguacgacgcggccgucagcggcggccucaacaucccggugcugcgggccgugcugccccgcgacauggucuuccggaccuccagccccaagguggugcucugaggacuagucccuguucccagagcccacuuuuuuuucuuuuuuugaaauaaaauagccugucuuucagaucuaaaaaaaaaaaaaaaaaaaaaaaaaaaaaaaaaaaaaaaaaaaaaaaaaaaaaaaaaaaaaaaaaaaaaaaaaaaaaaaaaaaaaaaaaaaaaaaaaaaa

SEQ ID NO: 16967 - RNA, 1958 nt, Artificial Sequence
  mRNA product Design a-1 (A100) comprising derived and/or modified sequence from LASV(LASV253-NIG-2011;Clade II)__AIT17671__NP (opt1)
aggagagucccgcagucggcguccagcggcucugcuuguucgugugugugucguugcaggccuuauucaagcuuaccaugagcgccuccaaggaggugaaguccuuccuguggacccagagccuccgccgggagcugagcggcuacugcuccagcaucaagcugcaggucgugaaggacgcccaggcgcuccugcacgggcuggacuucuccgaggugagcaacguccagcgccucaugcggaagcagaagcgcgacgacuccgaccugaagcggcugcgcgaccucaaccaggccgugaacaaccugguggagcucaagagcacccagcagaaguccguccugcgggugggcacccugaccagcgacgaccugcucacccuggccgccgaccuggagaagcucaaguccaaggugauccgcaccgagcggccccugagcuccggggucuacaugggcaaccugagcacgcagcagcucgagcagcgccgggcccugcugaacaugaucgggauggugggcggcgcgcaggggacccagccgggccgcgacggggugguccgggugugggacgugaagaaccccgaccuccugaacaaccaguucggcaccaugcccucccugacccucgccugccugacgaagcaggggcaggucgaccugaacgacguggugcucgcccugaccgaccugggccucaucuacaccgccaaguaccccaacagcuccgaccuggaccgccugagccagagccacccgauccucaacauggucgacaccaagaaguccagccugaacaucuccggcuacaacuucagccugggggcggccgugaaggccggcgccugcaugcucgacgggggcaacaugcuggagacgaucaaggugacgccccagaccauggacggcauccugaaguccauccucaaggucaagaagucccuggggauguucgugagcgacacccccggcgagcggaaccccuacgagaacauccuguacaagaucugccucagcggggacggcuggccguacaucgccucccgcaccagcaucguggggcgggcgugggagaacaccaccgucgaccuggaguccgacggcaagccccagaaggugggcaccgccgggagcaacaagucccugcagagcgccggcuuccccacggggcucaccuacucccagcugaugacccugaaggacagcaugaugcagcuggaccccuccgccaagaccuggaucgacaucgagggccgcccggaggaccccgucgagaucgcccucuaccagcccaugagcgggugcuacauccacuucuuccgggagcccacggaccugaagcaguucaagcaggacgcgaaguacucccacggcaucgacgugaccgaccuguucccggcccagcccggccucaccagcgccgugaucgaggcccugccccgcaacaugguccugaccugccaggggagcgacgacaucaagcggcuccuggacucccagggccgccgcgacaucaagcugaucgacaucgcccucagcaaggcggacucccggcgcuucgagaacgccgugugggaccagugcaaggaccugugccacaugcacacggggguggucguggagaagaagaagcggggcgggaaggaggagaucacgccccacugcgcccugauggacugcaucauguacgacgccgccgugagcggcggccucaacaucccgguccugcgcgcggugcugccccgggacaugguguuccgcaccuccagccccaaggucgugcucugaggacuagucccuguucccagagcccacuuuuuuuucuuuuuuugaaauaaaauagccugucuuucagaucuaaaaaaaaaaaaaaaaaaaaaaaaaaaaaaaaaaaaaaaaaaaaaaaaaaaaaaaaaaaaaaaaaaaaaaaaaaaaaaaaaaaaaaaaaaaaaaaaaaaa

SEQ ID NO: 16968 - RNA, 1958 nt, Artificial Sequence
  mRNA product Design a-1 (A100) comprising derived and/or modified sequence from LASV(LASV254-NIG-2011;Clade II)__AIT17675__NP (opt1)
aggagagucccgcagucggcguccagcggcucugcuuguucgugugugugucguugcaggccuuauucaagcuuaccaugagcgccuccaaggaggugaaguccuuccuguggacccagagccuccgccgggagcugagcggcuacugcuccagcaucaagcugcaggucgugaaggacgcccaggcgcuccugcacgggcuggacuucuccgaggugagcaacguccagcgccucaugcggaagcagaagcgcgacgacuccgaccugaagcggcugcgcgaccucaaccaggccgugaacaaccugguggagcucaagagcacccagcagaaguccguccugcgggugggcacgcugaccagcgacgaccugcucacccuggccgccgaccuggagaagcucaaguccaaggugauccgcaccgagcggccccugagcuccggggucuacaugggcaaccugagcacgcagcagcucgagcagcgccgggcccugcugaacaugaucgggauggugggcggcgcgcaggggacccagccgggccgcgacggggugguccgggugugggacgugaagaaccccgaccuccugaacaaccaguucggcaccaugcccucccugacccucgccugccugacgaagcaggggcaggucgaccugaacgacgccgugcucgcccugaccgaccugggccucaucuacaccgcgaaguaccccaacagcuccgaccuggaccgccugagccagagccacccgauccucaacaugguggacaccaagaaguccagccugaacaucuccggcuacaacuucagccugggggccgccgucaaggccggcgccugcaugcucgacgggggcaacaugcuggagacgaucaaggugacgccccagaccauggacggcauccugaaguccauccucaaggugaagaagucccuggggauguucgucagcgacacccccggcgagcggaaccccuacgagaacauccuguacaagaucugccucagcggggacggcuggccguacaucgcgucccgcaccagcaucguggggcgggccugggagaacaccaucguggaccuggaguccgacggcaagccccagaaggucggcaccgccgggagcaacaagucccugcagagcgccggcuuccccaccgggcucacguacucccagcugaugacccugaaggacagcaugaugcagcuggaccccuccgccaagaccuggaucgacaucgagggccgcccggaggaccccguggagaucgcgcucuaccagcccaugagcgggugcuacauccacuucuuccgggagcccaccgaccugaagcaguucaagcaggacgccaaguacucccacggcaucgacgucgccgaccuguucccggcccagcccggccucacgagcgccgugaucgaggcgcugccccgcaacauggugcugaccugccaggggagcgacgacaucaagcggcuccuggacucccagggccgccgcgacaucaagcugaucgacaucgcccucagcaaggccgacucccggcgcuucgagaacgccgucugggaccagugcaaggaccugugccacaugcacaccggggugguggucgagaagaagaagcggggcgggaaggaggagaucacgccccacugcgcccugauggacugcaucauguacgacgcggccgugagcggcggccucaacaucccggugcugcgcgccguccugccccgggacaugguguuccgcaccuccagccccaaggugguccucugaggacuagucccuguucccagagcccacuuuuuuuucuuuuuuugaaauaaaauagccugucuuucagaucuaaaaaaaaaaaaaaaaaaaaaaaaaaaaaaaaaaaaaaaaaaaaaaaaaaaaaaaaaaaaaaaaaaaaaaaaaaaaaaaaaaaaaaaaaaaaaaaaaaaa

SEQ ID NO: 16969 - RNA, 1958 nt, Artificial Sequence
  mRNA product Design a-1 (A100) comprising derived and/or modified sequence from LASV(Nig08-04;Clade II)__ADU56611__NP (opt1)
aggagagucccgcagucggcguccagcggcucugcuuguucgugugugugucguugcaggccuuauucaagcuuaccaugagcgccuccaaggaggugaaguccuuccuguggacccagagccuccgccgggagcugagcggcuacugcuccaacaucaagcugcaggucgugaaggacgcccaggcgcuccugcacgggcuggacuucagcgagguguccaacguccagcgccucaugcggaagcagaagcgcgacgacggcgaccugaagcggcugcgcgaccucaaccaggccgugaacaaccugguggagcucaagagcacccagcagaaguccguccugcggguggggacccugaccagcgacgaccugcucacccuggccgccgaccuggagaagcucaaguccaaggugauccgcaccgagcggccccugagcuccggcgucuacauggggaaccugagcacgcagcagcucgagcagcgcaaggcccugcuguccaugaucggcauggugggcggggcgcagggcacccagccggggcgggacggcgugguccgcgugugggacgugaagaaccccgaccuccugaacaaccaguucgggaccaugcccagccugacccucgccugccugacgaagcagggccaggucgaccugaacgacgccgugcucgcccugaccgaccugggccucaucuacaccgcgaaguaccccaacuccagcgaccuggaccggcugucccagagccacccgauccucaacaugguggacaccaagaaguccagccugaacaucagcggguacaacuucucccugggcgccgccgucaaggccggggccugcaugcucgacggcggcaacaugcuggagacgaucaaggugacgccccagaccauggacgggauccucaagagcauccugaaggugaagcgcucccugggcauguucgucagcgacacccccggggagcggaaccccuacgagaacauccuguacaagaucugccucuccggcgacggguggccguacaucgcgagccgcaccuccaucgugggccgggccugggagaacaccaccguggaccuggagagcgacggcaagccccagaaggucgggaccgccggcuccaacaagagccugcaguccgccggguuccccacgggccucaccuacagccagcugaugacccugaaggacuccaugaugcagcuggaccccagcgccaagaccuggaucgacaucgaggggcgcccggaggaccccguggagaucgcgcucuaccagcccauguccggcugcuacauccacuucuuccgggagcccacggaccugaagcaguucaagcaggacgccaaguacagccacggcaucgacgucaccgaccuguucuccgcccagccggggcucaccagcgccgugaucgaggcccugccccgcaacauggugcugaccugccagggcagcgacgacaucaagaagcuccuggacucccaggggcggcgcgacaucaagcugaucgacaucagccucaacaaggcggacucccgccgguucgagaacgccgucugggaccagugcaaggaccugugccacaugcacacgggcgugguggucgagaagaagaagcgcgggggcaaggaggagaucacgccccacugcgcccugauggacugcaucauguucgacgccgccgugagcggcgggcucaacauccccauccugcgggcggugcugccgcgcgacauggucuuccggaccuccagccccaagguggugcucugaggacuagucccuguucccagagcccacuuuuuuuucuuuuuuugaaauaaaauagccugucuuucagaucuaaaaaaaaaaaaaaaaaaaaaaaaaaaaaaaaaaaaaaaaaaaaaaaaaaaaaaaaaaaaaaaaaaaaaaaaaaaaaaaaaaaaaaaaaaaaaaaaaaaa

SEQ ID NO: 16970 - RNA, 1961 nt, Artificial Sequence
  mRNA product Design a-1 (A100) comprising derived and/or modified sequence from LASV(GA391;Clade III)__AAA46284__NP (opt1)
aggagagucccgcagucggcguccagcggcucugcuuguucgugugugugucguugcaggccuuauucaagcuuaccaugagcgccuccaaggaggugcgcagcugccuguggacccagucccuccggcgcgagcugagcggcuacugcuccaacaucaagcugcaggucgugaaggacgcccaggcgcuccugcacgggcuggacuucagcgagguguccaacguccagcggcucaugcgcaagcagaagcgggacgacggcgaccugaagcgccugcgggaccucaaccaggccgugaacaaccugguggagcugaaguccacccagcagaaguccguccuccgcguggggacgcugagcuccgacgaccugcucauccuggccgccgaccuggagaagcucaagagcaaggugacccggaccgagcgcccccuguccagcggcgucuacauggggaaccuguccagccagcagcucgaccagcggcgcgcccugcugaacaugaucggcaugaccggcguguccgggggcgggaagggcgcgagcaacgggaucgugcgggucugggacgugaagaacgccgagcuccugaacaaccaguucggcacgaugccgucccugacccucgccugccugaccaagcagggccagguggaccugaacgacgccguccaggcgcucaccgaccuggggcugaucuacacggccaaguaccccaacagcagcgaccucgaccgccugucccagagccaccccauccugaacaugaucgacaccaagaaguccagccucaacaucuccggcuacaacuucagccugggggccgccgugaaggccggcgcgugcaugcuggacggcgggaacaugcucgagaccaucaaggugagcccccagaccauggacggcauccucaagagcauccugaaggucaagaagucccuggggauguucgugagcgacacgccgggcgagcggaaccccuacgagaacauccuguacaagaucugccuguccggggacggcuggagcuacaucgccucccgcaccagcaucgugggccgggccugggagaacaccgucguggaccucgagcaggacaacaagccccagaagaucgggaacggcggguccaacaagagccugcaguccgccggcuucgccgcggggcugaucuacagccagcucaugacccugaaggacuucaagugcuucaaccugauccccaacgccaagacguggauggacaucgagggccgcccggaggaccccguggagaucgcccuguaccagcccuccagcggcugcuacguccacuucuuccgggagcccaccgaccucaagcaguucaagcaggacgccaaguacagccacgggcgcgacgugaccgaccuguucgccgcgcagccgggccugaccuccgccgucaucgaggcccucccccggaacauggugaucacgugccaggggagcgaggacauccgcaagcugcuggagucccagggccgccgggacaucaagcucaucgacaucacccugagcaaggccgacucccgcaaguucgagaacgccgugugggaccaguucaaggaccugugccacaugcacaccggggucgugguggagaagaagaagcggggcggcaaggaggagaucacgccccacugcgcgcucauggacugcaucauguucgacgccgccgucagcgggggccuggacgccaaggugcugcgcgugguccucccccgggacaugguguuccgcaccuccaccccgaaggugguccugugaggacuagucccuguucccagagcccacuuuuuuuucuuuuuuugaaauaaaauagccugucuuucagaucuaaaaaaaaaaaaaaaaaaaaaaaaaaaaaaaaaaaaaaaaaaaaaaaaaaaaaaaaaaaaaaaaaaaaaaaaaaaaaaaaaaaaaaaaaaaaaaaaaaaa

SEQ ID NO: 16971 - RNA, 1958 nt, Artificial Sequence
  mRNA product Design a-1 (A100) comprising derived and/or modified sequence from LASV(Nig08-A19;Clade III)__ADU56619__NP (opt1)
aggagagucccgcagucggcguccagcggcucugcuuguucgugugugugucguugcaggccuuauucaagcuuaccaugagcgccuccaaggaggugaaguccuuccuguggacccagucccuccgccgggagcugagcggcuacugcuccaacaucaagcugcaggucgugaaggacgcccaggcgcuccugcacgggcuggacuucagcgagguguccaacguccagcgccucaugcggaagcagaagcgcgacgacggcgaccugaagcggcugcgcgaccucaaccaggccgugaacaaccugguggagcucaagagcacccagcagaaguccguccugcggguggggacccugagcuccgacgaccugcucgugcuggccgccgaccuggagaagcucaagagcaaggucgugcgcaccgagcggccccuguccagcggcaucuacauggggaaccuguccagccagcagcucgaccagcgcaaggcccugcugaacaugaucggcaugaccggcgggaacggcgggcggaacaccacguccgacggcaucgugcgcgucugggacgugaagaacgcggagcuccugaacaaccaguucgggaccaugccgagccugacccucgccugccugaccaagcagggccagguggaccugaacgacgccguccaggcccucacggaccugggccugaucuacaccgcgaaguaccccaacuccagcgaccucgaccggcuggcccagagccaccccauccugaacaugaucgacaccaagaaguccagccucaacaucuccggguacaacuucagccugggcgccgccgugaaggccggggcgugcaugcuggacggcggcaacaugcucgagaccaucaaggugagcccccagacgauggacgggauccucaagagcauccugaaggucaagcgcucccugggcauguucaucagcgacaccccgggggagcggaaccccuacgagaacauccuguacaagaucugccuguccggcgacggguggcccuacaucgccagccgcaccuccaucgugggccgggccugggagaacaccguggucgaccucgagagcgacaacaagccccagaagacgggcaacgggggcuccaacaagagccugcaguccgccggguucgccgcgggccugaccuacagccagcucaugacccugaaggacuccaugcugcagcuggacccgaacgccaagaccuggauggacaucgaggggcgccccgaggaccccguggagaucgcccucuaccagcccagcuccggcugcuacauccacuucuuccgggagccgacggaccugaagcaguucaagcaggacgccaaguacagccacggcaucgacgugaccgaccuguucgccgcgcagcccgggcucaccagcgccgucaucgaggcccugccccgcaacauggugaucacgugccagggcuccgaggacauccggaagcugcucgagagccaggggcgccgcgacaucaagcugaucgacaucucccugagcaaggucgacucccggaaguucgagaacgccgugugggaccaguucaaggaccucugccacaugcacaccggcaucguggucgagaagaagaagcgcgggggcaaggaggagaucacgccccacugcgcccugauggacugcaucauguucgacgcggccgugagcggcgggguggacgccaagguccugcgggccgugcucccgcgcgacaugguguuccggaccuccacccccaaggucgugcugugaggacuagucccuguucccagagcccacuuuuuuuucuuuuuuugaaauaaaauagccugucuuucagaucuaaaaaaaaaaaaaaaaaaaaaaaaaaaaaaaaaaaaaaaaaaaaaaaaaaaaaaaaaaaaaaaaaaaaaaaaaaaaaaaaaaaaaaaaaaaaaaaaaaaa

SEQ ID NO: 16972 - RNA, 1958 nt, Artificial Sequence
  mRNA product Design a-1 (A100) comprising derived and/or modified sequence from LASV(G1180-SLE-2010;Clade IV)__AIT17169__NP (opt1)
aggagagucccgcagucggcguccagcggcucugcuuguucgugugugugucguugcaggccuuauucaagcuuaccaugagcgccuccaaggagaucaagagcuuccuguggacccagucccuccgccgggagcugagcggcuacugcuccaacaucaagcuccagguggucaaggacgcccaggcgcugcugcacgggcuggacuucagcgagguguccaacgugcagcgccucaugcggaaggagcgccgggacgacaacgaccugaagcgccugcgggaccucaaccaggccgucaacaaccugguggagcucaagagcacccagcagaaguccauccugcgcgugggcacccugaccagcgacgaccugcucauccuggccgccgaccuggagaagcucaaguccaaggucauccggaccgagcgcccccugagcgccgggguguacaugggcaaccuguccagccagcagcucgaccagcggcgcgcgcugcuguccaugaucgggaugagcuccggcaaccagcgggcccaggccggccgcgacggggugguccgggugugggacgugaagaacgucgagcuccugaacaaccaguucggcaccaugccgagccugacgcucgccugccugaccaagcagggccagguggaccugaacgacgcggugcaggcccucaccgaccuggggcugaucuacaccgccaaguaccccaacacguccgaccucgaccgccugacccagagccaccccauccugaacaugaucgacaccaagaaguccagccucaacaucagcggguacaacuucucccugggcgccgccgucaaggcgggcgccugcaugcuggacgggggcaacaugcucgagaccaucaaggugagcccccagacgauggacgggauccugaaguccauccugaaggugaagaaggcccucggcauguucaucagcgacaccccgggcgagcggaaccccuacgagaacauccuguacaagaucugccuguccggggacggcuggcccuacaucgccagccgcaccuccaucaccgggcgggccugggagaacacggucguggaccucgagagcgacggcaagccccagaaggcgggguccaacaacagcaacaagucccugcagagcgugggcuucaccgccggccugaccuacucccagcucaugacccugaaggacgccaugcugcagcuggacccgaacgccaagacguggauggacaucgaggggcgccccgaggaccccgucgagaucgcccucuaccagcccagcuccggcugcuacauccacuucuuccgggagccgaccgaccugaagcaguucaagcaggacgcgaaguacagccacgggaucgacgugaccgaccuguucgccgcccagcccggccucaccuccgccgugaucgacgcccugccccgcaacauggucaucacgugccaggggagcgacgacauccgcaagcugcucgagagccagggccggaaggacaucaagcugaucgacaucgcgcuguccaagaccgacagccgcaaguacgagaacgccgugugggaccaguacaaggaccucugccacaugcacaccggcgucgugguggagaagaagaagcgcgggggcaaggaggagaucacgccccacugcgcccugauggacugcaucauguucgacgccgcggucuccgggggccugaacaccagcgugcuccgggccgugcugccgcgggacauggucuuccgcaccuccacgccccggguggugcugugaggacuagucccuguucccagagcccacuuuuuuuucuuuuuuugaaauaaaauagccugucuuucagaucuaaaaaaaaaaaaaaaaaaaaaaaaaaaaaaaaaaaaaaaaaaaaaaaaaaaaaaaaaaaaaaaaaaaaaaaaaaaaaaaaaaaaaaaaaaaaaaaaaaaa

SEQ ID NO: 16973 - RNA, 1958 nt, Artificial Sequence
  mRNA product Design a-1 (A100) comprising derived and/or modified sequence from LASV(G1442-SLE-2011;Clade IV)__AIT17181__NP (opt1)
aggagagucccgcagucggcguccagcggcucugcuuguucgugugugugucguugcaggccuuauucaagcuuaccaugagcgccuccaaggaggugaaguccuuccuguggacccagagccuccgccgggagcugagcggcuacugcuccaacaucaagcugcaggucgugaaggacgcccaggcgcuccugcacgggcuggacuucagcgagguguccaacguccagcgccucaugcggaagcagcgccgggacgacaacgaccugaagcgccugcgggaccucaaccaggccgugaacaaccugguggagcucaagagcacccagcagaaguccguccugcgcgugggcacccugaccagcgacgaccugcucgugcuggccgccgaccuggagaagcucaaguccaaggucauccggaccgagcgcccccugagcgccgggguguacaugggcaaccuguccagccagcagcucgaccagcggcgcgcgcugcugaacaugaucgggauguccggcggcauccaggggacccggacgggccgcgacggggugguccgggugugggacgugaagaacgccgaccuccugaacaaccaguucggcaccaugccgagccugacccucgccugccugaccaagcaggggcaggucgaccugaacgacguggugcaggcccucacggaccugggccugaucuacaccgcgaaguaccccaacgccuccgaccucgaccgccugacccagagccaccccauccugaacaugaucgacaccaagaaguccagccucaacaucagcggcuacaacuucucccugggggccgccgucaaggccggcgcgugcaugcuggacgggggcaacaugcucgagacgaucaaggugagcccccagaccauggacggcauccugaaguccauccugaaggugaagaagacccucgggauguucaucagcgacaccccgggcgagcggaaccccuacgagaacauccuguacaagaucugccuguccggggacggcuggcccuacaucgccagccgcacguccaucaccgggcgggccugggagaacaccgucguggaccucgagagcgacggcaagccccagaaggccggcuccaacaacagcaacaagucccugcagagcgccggguucgcggccggccugaccuacucccagcucaugacgcugaaggacgccaugcugcagcuggacccgaacgccaagaccuggauggacaucgaggggcgccccgaggaccccguggagaucgcccucuaccagcccagcuccggcugcuacauccacuucuuccgggagccgaccgaccugaagcaguucaagcaggacgcgaaguacagccacgggaucgacgucaccgaccuguucgccgcccagcccggccucacguccgccgugaucgaggcccugccccgcaacauggucaucacgugccagggcagcgacgacaucaagaagcugcucgagucccaggggcgcaaggacaucaagcugaucgacaucgcgcugagcaagaccgacagccggaaguacgagaacgccgugugggaccaguacaaggaccucugccacaugcacaccggcguggucguggagaagaagaagcgcgggggcaaggaggagaucaccccgcacugcgcccugauggacugcaucauguucgacgccgcgguguccgggggccugaacacccucguccugcgggccgugcugccccgcgacaugguguuccggaccagcacgccccgcgucgugcucugaggacuagucccuguucccagagcccacuuuuuuuucuuuuuuugaaauaaaauagccugucuuucagaucuaaaaaaaaaaaaaaaaaaaaaaaaaaaaaaaaaaaaaaaaaaaaaaaaaaaaaaaaaaaaaaaaaaaaaaaaaaaaaaaaaaaaaaaaaaaaaaaaaaaa

SEQ ID NO: 16974 - RNA, 1958 nt, Artificial Sequence
  mRNA product Design a-1 (A100) comprising derived and/or modified sequence from LASV(G3010-SLE-2013;Clade IV)__AIT17345__NP (opt1)
aggagagucccgcagucggcguccagcggcucugcuuguucgugugugugucguugcaggccuuauucaagcuuaccaugagcgccuccaaggagaucaagagcuuccuguggacccagucccuccgccgggagcugagcggcuacugcuccaacaucaagcuccagguggucaaggacgcccaggcgcugcugcacgggcuggacuucagcgagguguccaacgugcagcgccucaugcggaaggagcgccgggacgacaacgaccugaagcgccugcgggaccucaaccaggccgucaacaaccugguggagcucaagagcacccagcagaaguccauccugcgcgugggcacccugaccagcgacgaccugcucauccuggccgccgaccuggagaagcucaaguccaaggucacccggaccgagcgcccccugagcgccgggguguacaugggcaaccuguccagccagcagcucgaccagcggcgcgcgcugcuguccaugaucgggaugagcuccggcgugcagggcgcccgggccgggcgcgacggcgucgugcgggugugggacgucaagaacgccgagcuccugaacaaccaguucgggacgaugccgagccugacccucgcgugccugaccaagcagggccagguggaccugaacgacgugguccaggcccucaccgaccuggggcugaucuacacggccaaguaccccaacaccuccgaccucgaccgccugacccagagccaccccauccugaacaugaucgacaccaagaaguccagccucaacaucagcggcuacaacuucucccugggcgccgccgugaaggcgggggccugcaugcuggacggcgggaacaugcucgagacgaucaaggugagcccccagaccauggacggcauccugaaguccauccugaaggucaagaaggcccucggcauguucaucagcgagaccccgggggagcggaaccccuacgagaacauccuguacaagaucugccuguccggcgacggguggcccuacaucgccagccgcaccuccaucacgggccgggccugggagaacaccgugguggaccucgagagcgacgggaagccccagaaggcgggcuccaacaacagcaacaagucccugcagagcgccggcuucaccgccgggcugaccuacucccagcucaugacgcugaaggacgccaugcugcagcuggacccgaacgccaagaccuggauggacaucgagggccgccccgaggaccccgucgagguggcgcucuaccagcccagcuccgggugcuacauccacuucuuccgggagccgaccgaccugaagcaguucaagcaggacgccaaguacagccacggcaucgacgugaccgaccuguucgccgcccagcccgggcucacguccgccgucaucgacgcgcugccccgcaacauggugaucacgugccagggcagcgacgacaucaagaagcugcucgagagccagggccgcaaggacaucaagcugaucgacaucgcccuguccaagaccgacagccggaaguacgagaacgccgucugggaccaguacaaggaccucugccacaugcacaccggggugguggucgagaagaagaagcgcggcgggaaggaggagaucaccccgcacugcgcccugauggacugcaucauguucgacgcggccguguccggcgggcugaacaccagcgugcuccgggccguccugccccgcgacaugguguuccggaccuccacgccccgcgugguccugugaggacuagucccuguucccagagcccacuuuuuuuucuuuuuuugaaauaaaauagccugucuuucagaucuaaaaaaaaaaaaaaaaaaaaaaaaaaaaaaaaaaaaaaaaaaaaaaaaaaaaaaaaaaaaaaaaaaaaaaaaaaaaaaaaaaaaaaaaaaaaaaaaaaaa

SEQ ID NO: 16975 - RNA, 1958 nt, Artificial Sequence
  mRNA product Design a-1 (A100) comprising derived and/or modified sequence from LASV(G502-SLE-2009;Clade IV)__AIT17127__NP (opt1)
aggagagucccgcagucggcguccagcggcucugcuuguucgugugugugucguugcaggccuuauucaagcuuaccaugagcgccuccaaggagaucaagagcuuccuguggacccagucccuccgccgggagcugagcggcuacugcuccaacaucaagcuccagguggucaaggacgcccaggcgcugcugcacgggcuggacuucagcgagguguccaacgugcagcgccucaugcggaaggagcgccgggacgacaacgaccugaagcgccugcgggaccucaaccaggccgucaacaaccugguggagcucaagagcacccagcagaaguccauccugcgcgugggcacccugaccagcgacgaccugcucauccuggccgccgaccuggagaagcucaaguccaaggucauccggaccgagcgcccccugagcgccgggguguacaugggcaaccuguccagccagcagcucgaccagcggcgcgcgcugcuguccaugaucgggaugagcggcggcaaccagggggugcgggccggcaaggacggggucgugcgcgugugggacgucaagaacgccgagcuccugaacaaccaguucggcaccaugccgucccugacgcucgccugccugaccaagcagggccagguggaccugaacgacgcggugcaggcccucaccgaccuggggcugaucuacaccgccaaguaccccaacacgagcgaccucgaccggcugacccagucccaccccauccugaacaugaucgacaccaagaaguccagccucaacaucuccggcuacaacuucagccugggggccgccgucaaggcgggcgccugcaugcuggacgggggcaacaugcucgagaccaucaaggugagcccccagacgauggacggcauccucaagagcauccugaaggugaagaaggcccuggggauguucaucuccgacaccccgggcgagcgcaaccccuacgagaacauccuguacaagaucugccugagcggggacggcuggcccuacaucgccucccggaccagcaucaccgggcgcgccugggagaacacggucguggaccucgaguccgacggcaagccccagaaggcgggcagcaacaacuccaacaagagccugcaguccgccggguucaccgccggccugaccuacagccagcucaugacccugaaggacgccaugcugcagcuggacccgaacacgaagaccuggauggacaucgaggggcggcccgaggaccccguggagaucgcccucuaccagcccuccagcggcugcuacauccacuucuuccgcgagccgaccgaccugaagcaguucaagcaggacgcgaaguacucccacgggaucgacgucaccgaccuguucgccgcccagcccggccucacgagcgccgugaucgacgcccugccccggaacauggugaucacgugccagggcuccgacgacauccgcaagcugcucgagagccaggggcgcaaggacaucaagcugaucgacaucgcgcugaacaagaccgacagccggaaguacgagaacgccgucugggaccaguacaaggaccucugccacaugcacaccggcguggucguggagaagaagaagcgcgggggcaaggaggagaucaccccgcacugcgcccugauggacugcaucauguucgacgccgcgguguccgggggccugaacaccagcguccuccgggccgugcugccccgcgacaugguguuccggaccuccacgccccgcgucgugcugugaggacuagucccuguucccagagcccacuuuuuuuucuuuuuuugaaauaaaauagccugucuuucagaucuaaaaaaaaaaaaaaaaaaaaaaaaaaaaaaaaaaaaaaaaaaaaaaaaaaaaaaaaaaaaaaaaaaaaaaaaaaaaaaaaaaaaaaaaaaaaaaaaaaaa

SEQ ID NO: 16976 - RNA, 1958 nt, Artificial Sequence
  mRNA product Design a-1 (A100) comprising derived and/or modified sequence from LASV(G733-SLE-2010;Clade IV)__AIT17155__NP (opt1)
aggagagucccgcagucggcguccagcggcucugcuuguucgugugugugucguugcaggccuuauucaagcuuaccaugagcgccuccaaggagaucaagagcuuccuguggacccagucccuccgccgggagcugagcggcuacugcuccaacaucaagcuccagguggucaaggacgcccaggcgcugcugcacgggcuggacuucagcgagguguccaacgugcagcgccucaugcggaaggagcgccgggacgacaacgaccugaagcgccugcgggaccucaaccaggccgucaacaaccugguggagcucaagagcacccagcagaaguccgugcugcgcgucggcacccugaccagcgacgagcugcucgugcuggccgccgaccuggagaagcucaaguccaaggugauccggaccgagcgcccccugagcgccggggucuacaugggcaaccuguccagccagcagcucgaccagcggcgcgcgcugcuguccaugaucgggaugagcggcggcaaccagggggcccggaccggccgcgacgggguggugcgggucugggacgugaagaacgccgagcuccugaacaaccaguucggcaccaugccgucccugacccucgccugccugaccaagcagggccagguggaccugaacgacgcgguccaggcccucaccgaccuggggcugaucuacacggccaaguaccccaacaccagcgaccucgaccgccugacccagucccaccccauccugaacaugaucgacaccaagaaguccagccucaacaucuccggcuacaacuucagccugggggccgccgugaaggcgggcgccugcaugcuggacgggggcaacaugcucgagacgaucaaggugagcccccagaccauggacggcauccucaagagcauccugaaggucaagaaggcccuggggauguucaucuccgacaccccgggcgagcggaaccccuacgagaacauccuguacaagaucugccugagcggggacggcuggcccuacaucgccucccgcaccagcaucacggggcgggccugggagaacaccgugguggaccucgaguccgacggcaagccccagaaggcgggcagcaacaacuccaacaagagccugcaguccgccggguucaccgccggccugaccuacagccagcucaugacgcugaaggacgccaugcugcagcuggacccgaacgccaagaccuggauggacaucgaggggcgccccgaggaccccgucgagaucgcgcucuaccagcccuccagcggcugcuacauccacuucuuccgggagccgaccgaccugaagcaguucaagcaggacgccaaguacucccacgggaucgacgugaccgaccuguucgccgcccagcccggccucacgagcgccgugaucgacgcgcugccccgcaacauggucaucacgugccagggcuccgacgacauccgcaagcugcucgagagccaggggcggaaggacaucaagcugaucgacaucgcccugagcaagaucgacucccgcaaguacgagaacgccgugugggaccaguacaaggaccucugccacaugcacaccggcgucgugguggagaagaagaagcgcgggggcaaggaggagaucacgccccacugcgcccugauggacugcaucauguucgacgcggccgucagcgggggccugaacucccucgugcugcgggccgugcugccgcgggacauggucuuccgcaccagcacgccccggguggugcucugaggacuagucccuguucccagagcccacuuuuuuuucuuuuuuugaaauaaaauagccugucuuucagaucuaaaaaaaaaaaaaaaaaaaaaaaaaaaaaaaaaaaaaaaaaaaaaaaaaaaaaaaaaaaaaaaaaaaaaaaaaaaaaaaaaaaaaaaaaaaaaaaaaaaa

SEQ ID NO: 16977 - RNA, 1958 nt, Artificial Sequence
  mRNA product Design a-1 (A100) comprising derived and/or modified sequence from MOPV/LASV reassortant(IGS-1;Clade IV)__AFY05578__NP (opt1)
aggagagucccgcagucggcguccagcggcucugcuuguucgugugugugucguugcaggccuuauucaagcuuaccaugagcgccuccaaggagaucaagagcuuccuguggacccagucccuccgccgggagcugagcggcuacugcuccaacaucaagcuccagguggucaaggacgcccaggcgcugcugcacgggcuggacuucagcgagguguccaacgugcagcgccucaugcggaaggagcgccgggacgacaacgaccugaagcgccugcgggaccucaaccaggccgucaacaaccugguggagcucaagagcacccagcagaaguccauccugcgcgugggcacccugaccagcgacgaccugcucauccuggccgccgaccuggagaagcuccgguccaaggucauccgcaccgagcggccccugagcgccgggguguacaugggcaaccuguccagccagcagcucgaccagcgccgggcgcugcugaacaugaucgggauguccggcggcaaccagggggcccgcgccggccgggacggggugguccgcgugugggacgugaagaacgccgagcuccugagcaaccaguucggcaccaugccgucccugacgcucgcgugccugaccaagcaggggcaggucgaccugaacgacgccgugcaggcccucaccgaccugggccugaucuacaccgccaaguaccccaacacgagcgaccucgaccggcugacccagucccaccccauccugaacaugaucgacaccaagaaguccagccucaacaucuccggcuacaacuucagccugggggccgcggugaaggccggcgccugcaugcuggacgggggcaacaugcucgagaccaucaaggucagcccccagacgauggacggcauccucaagagcauccugaaggugaagaaggcccuggggauguucaucuccgacaccccgggcgagcgcaaccccuacgagaacauccuguacaagaucugccugagcggggacggcuggcccuacaucgccucccggaccagcaucaccgggcgcgcgugggagaacacgguggucgaccucgaguccgacggcaagccccagaaggccgacagcaacaacuccagcaagucccugcagagcgccggcuucaccgccgggcugaccuacucccagcucaugacccugaaggacgccaugcugcagcuggacccgaacgcgaagacguggauggacaucgagggccggcccgaggaccccguggagaucgcccucuaccagcccagcuccgggugcuacauccacuucuuccgcgagccgaccgaccugaagcaguucaagcaggacgccaaguacagccacggcaucgacgugaccgaccuguucgccacccagcccgggcucacguccgccgucaucgacgcgcugccccgcaacauggugaucacgugccagggcagcgacgacauccggaagcugcucgagagccagggccgcaaggacaucaagcugaucgacaucgaccuguccaagaccgacagccggaaguacgagaacgccgugugggaccaguacaaggaccucugccacaugcacaccggggucguggucgagaagaagaagcgcggcgggaaggaggagaucaccccgcacugcgcccugauggacugcaucauguucgacgccgcgguguccggcgggcugaacaccagcgugcuccgggccguccugccccgcgacaugguguuccggaccuccacgccccgcgugguccugugaggacuagucccuguucccagagcccacuuuuuuuucuuuuuuugaaauaaaauagccugucuuucagaucuaaaaaaaaaaaaaaaaaaaaaaaaaaaaaaaaaaaaaaaaaaaaaaaaaaaaaaaaaaaaaaaaaaaaaaaaaaaaaaaaaaaaaaaaaaaaaaaaaaaa

SEQ ID NO: 16978 - RNA, 1958 nt, Artificial Sequence
  mRNA product Design a-1 (A100) comprising derived and/or modified sequence from LASV(LM765-SLE-2012;Clade IV)__AIT17815__NP (opt1)
aggagagucccgcagucggcguccagcggcucugcuuguucgugugugugucguugcaggccuuauucaagcuuaccaugagcgccuccaaggagaucaagagcuuccuguggacccagucccuccgccgggagcugagcggcuacugcuccaacaucaagcuccagguggucaaggacgcccaggcgcugcugcacgggcuggacuucagcgagguguccaacgugcagcgccucaugcggaaggagcgccgggacgacaacgaccugaagcgccugcgggaccucaaccaggccgucaacaaccugguggagcucaagagcacccagcagaaguccauccugcgcgugggcacccugaccagcgacgaccugcucauccuggccgccgaccuggagaagcucaaguccaaggucacccggaccgagcgcccccugagcgccgggguguacaugggcaaccuguccagccagcagcucgaccagcggcgcgcgcugcuggacaugaucgggauguccggcagcaaccagggcgcccgggccgggcgcgacggcgugguccgggugugggacgugaagaacgccgagcuccugaacaaccaguucgggacgaugccgucccugacccucgcgugccugaccaagcagggccaggucgaccugaacgacgccgugcaggcccucaccgaccuggggcugaucuacacggccaaguaccccaacaccagcgaccucgaccgccugacccagucccaccccauccugaacaugaucgacaccaagaaguccagccucaacaucuccggcuacaacuucagccugggcgccgcggugaaggccggggccugcaugcuggacggcgggaacaugcucgagacgaucaaggucagcccccagaccauggacggcauccucaagagcauccugaaggugaagaaggcccugggcauguucaucuccgacgccccgggggagcggaaccccuacgagaacauccuguacaagaucugccugagcggcgacggguggcccuacaucgcgucccgcaccagcaucaccggccgggccugggagaacacgguggucgaccucgaguccgacgggaagccccagaaggccggcagcaacggcuccaacaagagccugcaguccgccggguucaccgccggccugaccuacagccagcucaugacccugaaggacgcgaugcugcagcuggacccgaacgccaagacguggauggacaucgaggggcgccccgaggaccccguggagaucgcccucuaccagcccuccagcggcugcuacauccacuucuuccgggagccgaccgaccugaagcaguucaagcaggacgccaaguacucccacgggaucgacgugaccgaccuguucgccgcgcagcccggccucaccagcgccgucaucgacgcccugccccgcaacauggugaucacgugccagggcuccgacgacauccgcaagcuguucgagagccaggggcggaaggacaucaagcucaucgacaucgcccugagcaagaccgacucccgcaaguacgagaacgcggugugggaccaguacaaggaccugugccacaugcacaccggcaucgucguggagaagaagaagcgcgggggcaaggaggagaucacgccccacugcgcccucauggacugcaucauguucgacgccgccgucagcgggggccugaacaccuccgugcugcgggccgugcucccgcgggacauggucuuccgcaccagcacgccccggguggugcugugaggacuagucccuguucccagagcccacuuuuuuuucuuuuuuugaaauaaaauagccugucuuucagaucuaaaaaaaaaaaaaaaaaaaaaaaaaaaaaaaaaaaaaaaaaaaaaaaaaaaaaaaaaaaaaaaaaaaaaaaaaaaaaaaaaaaaaaaaaaaaaaaaaaaa

SEQ ID NO: 16979 - RNA, 1958 nt, Artificial Sequence
  mRNA product Design a-1 (A100) comprising derived and/or modified sequence from LASV(LM776-SLE-2012;Clade IV)__AIT17825__NP (opt1)
aggagagucccgcagucggcguccagcggcucugcuuguucgugugugugucguugcaggccuuauucaagcuuaccaugagcgccuccaaggagaucaagagcuuccuguggacccagucccuccgccgggagcugagcuccuacugcagcaacaucaagcuccagguggucaaggacgcccaggcgcugcugcacggccuggacuucuccgaggugagcaacgugcagcgccucaugcggaaggagcgccgggacgacaacgaccugaagcgccugcgggaccucaaccaggccgucaacaaccugguggagcugaaguccacccagcagaaguccauccuccgcguggggacccugaccuccgacgaccugcucauccuggccgccgaccuggagaagcucaagagcaaggucacccggaccgagcgcccccuguccgccggcguguacauggggaaccugagcucccagcagcucgaccagcggcgcgcgcugcugagcaugaucggcauguccgggagcaaccagggcgcccgggccggccgcgacggggugguccgggugugggacgugaagaacgccgagcuccugaacaaccaguucggcacgaugccgucccugacccucgcgugccugaccaagcaggggcaggucgaccugaacgacgccgugcaggcccucaccgaccugggccugaucuacacggccaaguaccccaacaccagcgaccucgaccgccugacccagagccaccccauccugaacaugaucgacaccaagaaguccagccucaacaucuccggguacaacuucagccugggcgccgcggugaaggccggcgccugcaugcuggacgggggcaacaugcucgagacgaucaaggucagcccccagaccauggacgggauccucaagagcauccugaaggugaagaaggcccugggcauguucaucuccgacaccccgggcgagcggaaccccuacgagaacauccuguacaagaucugccugagcggggacggcuggcccuacaucgccucccgcaccagcaucacggggcgggcgugggagaacaccguggucgaccucgaguccgacggcaagccccagaaggccgggagcaacaacuccaacaagagccugcaguccgccggcuucaccgccggccugaccuacagccagcucaugacgcugaaggacgccaugcugcagcuggacccgaacgcgaagaccuggauggacaucgaggggcgccccgaggaccccguggagguggcccucuaccagcccuccagcggcugcuacauccacuucuuccgggagccgaccgaccugaagcaguucaagcaggacgccaaguacucccacgggaucgacgucaccgaccuguucgccgcccagcccggccucacgagcgcggugaucgacgcccugccccgcaacauggugaucacgugccaggggagcgacgacauccgcaagcugcucgagucccagggccggaaggacaucaagcugaucgacaucgcccugagcaagaccgacucccgcaaguacgagaacgccgucugggaccaguacaaggaccucugccacaugcacaccggcguggucguggagaagaagaagcgcgggggcaaggaggagaucaccccgcacugcgcgcugauggacugcaucauguucgacgccgccgugagcgggggccugaacaccuccguccuccgggccgugcugccccgggacaugguguuccgcaccagcacgccccgggucgugcugugaggacuagucccuguucccagagcccacuuuuuuuucuuuuuuugaaauaaaauagccugucuuucagaucuaaaaaaaaaaaaaaaaaaaaaaaaaaaaaaaaaaaaaaaaaaaaaaaaaaaaaaaaaaaaaaaaaaaaaaaaaaaaaaaaaaaaaaaaaaaaaaaaaaaa

SEQ ID NO: 16980 - RNA, 1958 nt, Artificial Sequence
  mRNA product Design a-1 (A100) comprising derived and/or modified sequence from LASV(Mad39;Clade IV)__ANH09723__NP (opt1)
aggagagucccgcagucggcguccagcggcucugcuuguucgugugugugucguugcaggccuuauucaagcuuaccaugagcgccuccaaggagaucaagagcuuccuguggacccagucccuccgccgggagcugagcggcuacugcuccaacaucaagcuccagguggucaaggacgcccaggcgcugcugcacgggcuggacuucagcgagguguccaacgugcagcgccucaugcggaagcagcgccgggacgacaacgaccugaagcgccugcgggaccucaaccaggccgucaacaaccugguggagcugaaguccacccagcagaaguccgugcuccgcgucggcacgcugaccagcgacgaccugcucacccuggccgccgaccuggagaagcucaaguccaaggugacccggacggagcgcccccugaccgccgggguguacaugggcaaccugagcucccagcagcucgaccagcggcgcgcgcugcugaacaugaucgggaugagcggcggcaaccagggggcccggaccggccgcgacggggucgugcgggugugggacgucaagaacgccgagcuccugaacaaccaguucggcaccaugccgucccugacgcucgccugccugaccaagcagggccagguggaccugaacgacgugguccaggcgcucaccgaccuggggcugaucuacaccgccaaguaccccaacacgagcgaccucgaccgccugacccagucccaccccauccugaacaugaucgacaccaacaagagcucccucaacaucagcggcuacaacuucagccugggggccgccgugaaggccggcgcgugcaugcuggacgggggcaacaugcucgagaccaucaaggugagcccccagacgauggacggcauccucaagagcauccugaaggucaagaagucccuggggauguucaucagcgacaccccgggcgagcggaaccccuacgagaacauccuguacaagaucugccuguccggggacggcuggcccuacaucgccagccgcaccuccaucaccgggcgggccugggagaacacggugguggaccucgagagcggcggcaagccccagaaggccggguccaacaacagcaacaagucccugcagagcgccggcuucgcggccgggcugaccuacucccagcucaugacccugaaggacgccaugcugcagcuggacccgaacgccaagaccuggauggacaucgagggccgccccgaggaccccgucgagaucgcccucuaccagcccaucagcgggugcuacauccacuucuuccgggagccgacggaccugaagcaguucaagcaggacgcgaaguacucccacggcaucgacgugaccgaccuguucgccgcccagcccggccucaccagcgccgugaucgaggcccugccccgcaacauggucaucacgugccagggguccgacgacauccgcaagcuguucgagagccagggccggaaggacaucaagcucaucgacaucgcgcuguccaagaccgacagccgcaaguacgagaacgccgugugggaccaguacaaggaccugugccacaugcacaccggggucgugguggagaagaagaagaagggcgggaaggaggagaucacgccccacugcgcccucauggacugcaucauguucgacgccgcggucagcggcggccugaacacccuggugcuccgggccgugcugccgcgcgacauggucuuccggaccuccacccccaagguggugcugugaggacuagucccuguucccagagcccacuuuuuuuucuuuuuuugaaauaaaauagccugucuuucagaucuaaaaaaaaaaaaaaaaaaaaaaaaaaaaaaaaaaaaaaaaaaaaaaaaaaaaaaaaaaaaaaaaaaaaaaaaaaaaaaaaaaaaaaaaaaaaaaaaaaaa

SEQ ID NO: 16981 - RNA, 1958 nt, Artificial Sequence
  mRNA product Design a-1 (A100) comprising derived and/or modified sequence from LASV(Z0947-SLE-2011;Clade IV)__AIT17841__NP (opt1)
aggagagucccgcagucggcguccagcggcucugcuuguucgugugugugucguugcaggccuuauucaagcuuaccaugagcgccuccaaggagaucaagagcuuccuguggacccagucccuccgccgggagcugagcggcuacugcuccaacaucaagcuccagguggucaaggacgcccaggcgcugcugcacgggcuggacuucagcgagguguccaacgugcagcgccucaugcggaaggagcgccgggacgacaacgaccugaagcgccugcgggaccucaaccaggccgucaacaaccugguggagcucaagagcacccagcagaaguccauccugcgcgugggcacccugaccagcgacgaccugcucauccuggccgccgaccuggagaagcucaaguccaaggucacccggaccgagcgcccccugagcgccgggguguacaugggcaaccuguccagccagcagcucgaccagcggcgcgcgcugcugaacaugaucgggauguccggcagcaaccagggcgcccggacggggcgcgacggcgugguccgggugugggacgugaagaacgccgagcuccugaacaaccaguucgggaccaugccgucccugacccucgccugccugaccaagcagggccaggucgaccugaacgacgcggugcaggcccucacggaccuggggcugaucuacaccgccaaguaccccaacaccagcgaccucgaccgccugacccagucccaccccauccugaacaugaucgacacgaagaaguccagccucaacaucuccggcuacaacuucagccugggcgccgccgugaaggcgggggccugcaugcuggacggcgggaacaugcucgagaccaucaaggucagcccccagaccauggacggcauccucaagagcauccugaaggugaagaaggcccugggcauguucaucuccgacgccccgggggagcggaaccccuacgagaacauccuguacaagaucugccugagcggcgacggguggcccuacaucgccucccgcaccagcaucacgggccgggcgugggagaacaccguggucgaccucgaguccgacgggaagccccagaaggccggcagcaacggcuccaacaagagccugcaguccgccggguucaccgccggccugaccuacagccagcucaugacgcugaaggacgccaugcugcagcuggacccgaacgcgaagaccuggauggacaucgaggggcgccccgaggaccccguggagaucgcccucuaccagcccuccagcggcugcuacauccacuucuuccgggagccgaccgaccugaagcaguucaagcaggacgccaaguacucccacgggaucgacgugaccgaccuguucgccgcccagcccggccucacgagcgcggucaucgacgcccugccccgcaacauggugaucacgugccagggcuccgacgacauccgcaagcuguucgagagccaggggcggaaggacaucaagcucaucgacaucgcccugagcaagaccgacucccgcaaguacgagaacgccgugugggaccaguacaaggaccugugccacaugcacaccggcaucgucguggagaagaagaagcgcgggggcaaggaggagaucaccccgcacugcgcgcucauggacugcaucauguucgacgccgccgucagcgggggccugaacaccuccgugcugcgggccgugcucccccgggacauggucuuccgcaccagcacgccccggguggugcugugaggacuagucccuguucccagagcccacuuuuuuuucuuuuuuugaaauaaaauagccugucuuucagaucuaaaaaaaaaaaaaaaaaaaaaaaaaaaaaaaaaaaaaaaaaaaaaaaaaaaaaaaaaaaaaaaaaaaaaaaaaaaaaaaaaaaaaaaaaaaaaaaaaaaa

SEQ ID NO: 16982 - RNA, 1958 nt, Artificial Sequence
  mRNA product Design a-1 (A100) comprising derived and/or modified sequence from LASV(Josiah;Clade IV)__NP_694869__NP (opt4)
aggagagucccgcagucggcguccagcggcucugcuuguucgugugugugucguugcaggccuuauucaagcuuaccaugagcgccagcaaggagaucaagagcuuccuguggacccagagccugagaagagagcugagcggcuacugcagcaacaucaagcugcagguggugaaggacgcccaggcccugcugcacggccuggacuucagcgaggugagcaacgugcagagacugaugagaaaggagagaagagacgacaacgaccugaagagacugagagaccugaaccaggccgugaacaaccugguggagcugaagagcacccagcagaagagcauccugagagugggcacccugaccagcgacgaccugcugauccuggccgccgaccuggagaagcugaagagcaaggugaucagaaccgagagaccccugagcgccggcguguacaugggcaaccugagcagccagcagcuggaccagagaagagcccugcugaacaugaucggcaugagcggcggcaaccagggcgccagagccggcagagacggcguggugagagugugggacgugaagaacgccgagcugcugaacaaccaguucggcaccaugcccagccugacccuggccugccugaccaagcagggccagguggaccugaacgacgccgugcaggcccugaccgaccugggccugaucuacaccgccaaguaccccaacaccagcgaccuggacagacugacccagagccaccccauccugaacaugaucgacaccaagaagagcagccugaacaucagcggcuacaacuucagccugggcgccgccgugaaggccggcgccugcaugcuggacggcggcaacaugcuggagaccaucaaggugagcccccagaccauggacggcauccugaagagcauccugaaggugaagaaggcccugggcauguucaucagcgacacccccggcgagagaaaccccuacgagaacauccuguacaagaucugccugagcggcgacggcuggcccuacaucgccagcagaaccagcaucaccggcagagccugggagaacaccgugguggaccuggagagcgacggcaagccccagaaggccgacagcaacaacagcagcaagagccugcagagcgccggcuucaccgccggccugaccuacagccagcugaugacccugaaggacgccaugcugcagcuggaccccaacgccaagaccuggauggacaucgagggcagacccgaggaccccguggagaucgcccuguaccagcccagcagcggcugcuacauccacuucuucagagagcccaccgaccugaagcaguucaagcaggacgccaaguacagccacggcaucgacgugaccgaccuguucgccacccagcccggccugaccagcgccgugaucgacgcccugcccagaaacauggugaucaccugccagggcagcgacgacaucagaaagcugcuggagagccagggcagaaaggacaucaagcugaucgacaucgcccugagcaagaccgacagcagaaaguacgagaacgccgugugggaccaguacaaggaccugugccacaugcacaccggcguggugguggagaagaagaagagaggcggcaaggaggagaucaccccccacugcgcccugauggacugcaucauguucgacgccgccgugagcggcggccugaacaccagcgugcugagagccgugcugcccagagacaugguguucagaaccagcacccccagaguggugcugugaggacuagucccuguucccagagcccacuuuuuuuucuuuuuuugaaauaaaauagccugucuuucagaucuaaaaaaaaaaaaaaaaaaaaaaaaaaaaaaaaaaaaaaaaaaaaaaaaaaaaaaaaaaaaaaaaaaaaaaaaaaaaaaaaaaaaaaaaaaaaaaaaaaaa

SEQ ID NO: 16983 - RNA, 1958 nt, Artificial Sequence
  mRNA product Design a-1 (A100) comprising derived and/or modified sequence from LASV(LP;Clade I)__AAF86702__NP (opt4)
aggagagucccgcagucggcguccagcggcucugcuuguucgugugugugucguugcaggccuuauucaagcuuaccaugagcaacagcaaggagaucaagagcuuccuguggacccagagccugagaagagagcugagcggcuacugcagcaacaucaagcugcagguggugaaggacgcccaggcccugcugcacggccuggacuucagcgaggugagcaacgugcagagacugaugagaaagcagaagagagacgacgccgaccugaagagacugagagaccugaaccaggccgugaacaaccugguggagcugaagagcacccagcagaagaacgugcugagagugggcacccugagcagcgacgaccugaucacccuggccgccgaccuggagaagcugaagagcaaggugaucagaaccgagagaccccugagcagcggcguguacaugggcaaccugagcagccagcagcuggaccagagaagagcccugcugagcaugaucggcaugagcggcggcccccagggcaacagaaccggcggcgacggcguggugagagugugggacgugaagaacgccgagcugcugaacaaccaguucggcaccaugcccagccugacccuggccugccugaccaagcagggccagguggaccugaacgacgccgugcaggcccugaccgaccugggccugaucuacaccgccaaguaccccaacagcagcgaccuggacaugcugacccagagccaccccauccugggcaugguggacaccaagaagagcagccugaacaucagcggcuacaacuucagccugggcgccgccgugaaggccggcgccugcaugcuggacggcggcaacaugcuggagaccaucaaggugagcccccagaccauggacggcauccugaagagcauccugaaggugaagagaagccugggcauguucaucagcgacacccccggcgagagaaaccccuacgagaacauccuguacaagaucugccugagcggcgagggcuggcccuacaucgccagcagaaccagcaucaccggcagagccugggagaacacccugguggaccuggagagcgacaacaagccccccaagcugaacagcgccggcagcaacaagagccugcaggccgccggccugaacgccggccugaccuacagccagcugaugacccugaaggacugcaugcugcagcuggaccccagcagcaagaccuggaucgacaucgagggcagacccgaggaccccguggagaucgcccuguuccagcccagcagcggcugcuacauccacuucuucagagagcccaccgaccugaagcaguucaagcaggacgccaaguacagccacggcaucgacgugaccgaccuguucagcacccagcccggccugaccagcgccgugaucgaggcccugcccagaaacauggugcugaccugccagggcagcgacgacaucaagaagcugcuggagagccagggcagaagagacaucaagcugaucgacaucagccugagcaaggccgacagcagaaaguucgagaacgccgugugggaccaguacaaggaccugugccacaugcacaccggcguggugguggagaagaagaagagaggcggcaaggaggagaucaccccccacugcgcccugcuggacugcaucauguucgacgccgccaccaccggcagccugaacaucaccacccugagagccgugcugcccagagacaugguguucagaaccagcacccccaagguggugcugugaggacuagucccuguucccagagcccacuuuuuuuucuuuuuuugaaauaaaauagccugucuuucagaucuaaaaaaaaaaaaaaaaaaaaaaaaaaaaaaaaaaaaaaaaaaaaaaaaaaaaaaaaaaaaaaaaaaaaaaaaaaaaaaaaaaaaaaaaaaaaaaaaaaaa

SEQ ID NO: 16984 - RNA, 1958 nt, Artificial Sequence
  mRNA product Design a-1 (A100) comprising derived and/or modified sequence from LASV(803213;Clade II)__AAF86704__NP (opt4)
aggagagucccgcagucggcguccagcggcucugcuuguucgugugugugucguugcaggccuuauucaagcuuaccaugagcgccagcaaggaggugaagagcuuccuguggacccagagccugagaagagagcugagcggcuacugcagcaacaucaagcugcagguggugaaggacgcccaggcccugcugcacggccuggacuucagcgaggugaacaacgugcagagacugaugagaaagcagaagagagacgacggcgaccugaagagacugagagaccugaaccaggccgugaacaaccugguggagcugaagagcacccagcagaagagcauccugagagugggcacccugaccagcgacgaccugcugacccuggccgccgaccuggagaagcugaagagcaaggugaucagaaccgagagaccccugagcagcggcguguacaugggcaaccugagcacccagcagcuggagcagagaagagcccugcugaacaugaucggcauggugggcggcgcccagggcacccagcccggcagagacggcguggugagagugugggacgugaagaaccccgaccugcugaacaaccaguucggcaccaugcccagccugacccuggccugccugaccaagcagggccagguggaccugaacgacgccgugcuggcccugaccgaccugggccugaucuacaccgccaaguaccccaacagcagcgaccuggacagacugagccagagccaccccauccugaacaugguggacaccaagaagagcagccugaacaucagcggcuacaacuucagccugggcgccgccgugaaggccggcgccugcaugcuggacggcggcaacaugcuggagaccaucaaggugaccccccagaccauggacggcauccugaagagcauccugaaggugaagagaagccugggcauguucgugagcgacacccccggcgagagaaaccccuacgagaacauccuguacaagaucugccugagcggcgacggcuggcccuacaucgccagcagaaccagcaucgugggcagagccugggagaacaccaccguggaccuggagagcgacggcaagccccagaaggugggcaccgccggcagcaacaagagccugcagagcgccggcuuccccaccggccugaccuacagccagcugaugacccugaaggacagcaugaugcagcuggaccccagcgccaagaccuggaucgacaucgagggcagacccgaggaccccguggagaucgcccuguaccagcccaugagcggcugcuacauccacuucuucagagagcccaccgaccugaagcaguucaagcaggacgccaaguacagccacggcaucgacguggccgaccuguuccccgcccagcccggccugaccagcgccgugaucgaggcccugcccagaaacauggugcugaccugccagggcagcgacgacaucaagaagcugcuggacagccagggcagaagagacaucaagcugaucgacaucagccugagcaagguggacagcagaaaguucgagaacgccgugugggaccagugcaaggaccugugccacaugcacaccggcguggugguggagaagaagaagagaggcggcaaggaggagaucaccccccacugcgcccugauggacugcaucauguucgacgccgccgugagcggcggccugaacauccccgugcugagagccgugcugcccagagacaugguguucagaaccagcagccccaagguggugcugugaggacuagucccuguucccagagcccacuuuuuuuucuuuuuuugaaauaaaauagccugucuuucagaucuaaaaaaaaaaaaaaaaaaaaaaaaaaaaaaaaaaaaaaaaaaaaaaaaaaaaaaaaaaaaaaaaaaaaaaaaaaaaaaaaaaaaaaaaaaaaaaaaaaaa

SEQ ID NO: 16985 - RNA, 1961 nt, Artificial Sequence
  mRNA product Design a-1 (A100) comprising derived and/or modified sequence from LASV(GA391;Clade III)__CAA36646__NP (opt4)
aggagagucccgcagucggcguccagcggcucugcuuguucgugugugugucguugcaggccuuauucaagcuuaccaugagcgccagcaaggaggugagaagcuuccuguggacccagagccugagaagagagcugagcggcuacugcagcaacaucaagcugcagguggugaaggacgcccaggcccugcugcacggccuggacuucagcgaggugagcaacgugcagagacugaugagaaagcagaagagagacgacggcgaccugaagagacugagagaccugaaccaggccgugaacaaccugguggagcugaagagcacccagcagaagagcgugcugagagugggcacccugagcagcgacgaccugcugauccuggccgccgaccuggagaagcugaagagcaaggugaccagaaccgagagaccccugagcagcggcguguacaugggcaaccugagcagccagcagcuggaccagagaagagcccugcugaacaugaucggcaugaccggcgugagcggcggcggcaagggcgccagcgacggcaucgugagagugugggacgugaagaacgccgagcugcugaacaaccaguucggcaccaugcccagccugacccuggccugccugaccaagcagggccagguggaccugaacgacgccgugcaggcccugaccgaccugggccugaucuacaccgccaaguaccccaacagcagcgaccuggacagacugagccagagccaccccauccugaacaugaucgacaccaagaagagcagccugaacaucagcggcuacaacuucagccugggcgccgccgugaaggccggcgccugcaugcuggacggcggcaacaugcuggagaccaucaaggugagcccccagaccauggacggcauccugaagagcauccugaaggugaagaagagccugggcauguucgugagcgacacccccggcgagagaaaccccuacgagaacauccuguacaagaucugccugagcggcgacggcuggcccuacaucgccagcagaaccagcaucgugggcagagccugggagaacaccgugguggaccuggagcaggacaacaagccccagaagaucggcaacggcggcagcaacaagagccugcagagcgccggcuucgccgccggccugaccuacagccagcugaugacccugaaggacuucaagugcuucaaccugauccccaacgccaagaccuggauggacaucgagggcagacccgaggaccccguggagaucgcccuguaccagcccagcagcggcugcuacgugcacuucuucagagagcccaccgaccugaagcaguucaagcaggacgccaaguacagccacggcaucgacgugaccgaccuguucgccgcccagcccggccugaccagcgccgugaucgaggcccugcccagaaacauggugaucaccugccagggcagcgaggacaucagaaagcugcuggagagccagggcagaagagacaucaagcugaucgacaucacccugagcaaggccgacagcagaaaguucgagaacgccgugugggaccaguucaaggaccugugccacaugcacaccggcguggugguggagaagaagaagagaggcggcaaggaggagaucaccccccacugcgcccugauggacugcaucauguucgacgccgccgugagcggcggccuggacgccaaggugcugagaguggugcugcccagagacaugguguucagaaccagcacccccaagguggugcugugaggacuagucccuguucccagagcccacuuuuuuuucuuuuuuugaaauaaaauagccugucuuucagaucuaaaaaaaaaaaaaaaaaaaaaaaaaaaaaaaaaaaaaaaaaaaaaaaaaaaaaaaaaaaaaaaaaaaaaaaaaaaaaaaaaaaaaaaaaaaaaaaaaaaa

SEQ ID NO: 16986 - RNA, 1958 nt, Artificial Sequence
  mRNA product Design a-1 (A100) comprising derived and/or modified sequence from LASV(AV;Clade V)__CCA30315__NP (opt4)
aggagagucccgcagucggcguccagcggcucugcuuguucgugugugugucguugcaggccuuauucaagcuuaccaugagcgccagcaaggaggugaagagcuuccuguggacccagagccugagaagagagcugagcggcuacugcagcaacaucaagcugcagguggugaaggacgcccaggcccugcugcacggccuggacuucagcgaggugagcaacgugcagagacugaugagaaagcagagaagagacgacagcgaccugaagagacugagagaccugaaccaggccgugaacaaccugguggagcugaagagcacccagcagaagagcgugcugagagugggcacccugagcagcgacgaccugcugacccuggccgccgaccuggagaagcugaagagcaaggugaccagaaccgagagaccccugagcagcggcguguacaugggcaaccugagcagccagcagcuggaccagagaagagcccugcugaaccugaucggcaugaccaacggcagccagggcagccaggccggcagagacggcguggugagagugugggacgugaagaacgccgagcugcugaacaaccaguucggcaccaugcccagccugacccuggccugccugaccaagcagggccagguggaccugaacgacguggugcaggcccugaccgaccugggccugaucuacaccgccaaguaccccaacaccagcgaccuggacagacugacccagagccaccccauccugaacaugaucgacaccaagaagagcagccugaacaucagcggcuacaacuucagccugggcgccgccgugaaggccggcgccugcaugcuggacggcggcaacaugcuggagaccaucaaggugagcccccagagcauggacggcauccugaagagcauccugaaggugaagagagcccugggcauguucgugagcgacacccccggcgagagaaaccccuacgagaacauccuguacaagaucugccugagcggcgacggcuggcccuacaucgccagcagaaccagcaucgugggcagagccugggagaacaccgugguggaccuggagaccgacggcaagccccagaagaucggcagcggcaacagcaacaagagccugcagagcgccggcuucagcgccggccugaccuacagccagcugaugacccugaaggacgccaugcugcagcuggaccccaacgccaagaccuggauggacaucgagggcagacccgaggaccccguggagguggcccuguaccagcccaucagcggcugcuacauccacuucuucagagagcccaccgaccugaagcaguucaagcaggacgccaaguacagccacggcaucgacaucgccgaccuguucgccgcccagcccggccugaccagcgccgugaucgaggcccugcccagaaacauggugaucaccugccagggcagcgaggacaucaagaagcugcuggagagccagggcagaaaggacaucaagcugaucgacaucgcccugagcaagaucgacagcagaaaguucgagaacgccgugugggaccaguacaaggaccugugccacaugcacaccggcguggugguggagaagaagaagagaggcggcaaggaggagaucaccccccacugcgcccugauggacugcaucauguucgacgccgccgugagcggcggccugaacacccuggugcugagagccgugcugcccagagacaugguguucagaaccagcacccccagaguggugcugugaggacuagucccuguucccagagcccacuuuuuuuucuuuuuuugaaauaaaauagccugucuuucagaucuaaaaaaaaaaaaaaaaaaaaaaaaaaaaaaaaaaaaaaaaaaaaaaaaaaaaaaaaaaaaaaaaaaaaaaaaaaaaaaaaaaaaaaaaaaaaaaaaaaaa

SEQ ID NO: 16987 - RNA, 1958 nt, Artificial Sequence
  mRNA product Design a-1 (A100) comprising derived and/or modified sequence from LASV(Togo/2016/7082;Clade VI)__AMR44578__NP (opt4)
aggagagucccgcagucggcguccagcggcucugcuuguucgugugugugucguugcaggccuuauucaagcuuaccaugagcaacagcaaggaggugaagagcuuccuguggacccagagccugagaagagagcugagcggcuacugcagcaacaucaagcugcagguggugaaggacgcccaggcccugcugcacggccuggacuucagcgaggugagcaacgugcagagacugaugagaaagcagaagagagacgacggcgaccugaagagacugagagaccugaaccaggccgugaacaaccugguggagcugaagagcgugcagcagaagagcauccugagagugggcacccugaccagcgacgaccugcugacccuggccgccgaccuggagaagcugaagagcaaggugaccagaaccgagagaccccugagcagcggcguguacaugggcaaccugagcagccagcagcuggaccagagaagagcccugcugagcaugaucggcaugagcggcggcaaccagaacagccagcccaagggcgacggcguggugagagugugggacgugaagaacgccgaccugcugaacaaccaguucggcaccaugcccagccugacccuggccugccugaccaagcagggccagguggaccugaacgacgccgugcaggcccugaccgaccugggccugaucuacaccgccaaguaccccaacagcagcgaccuggacagacugagccagagccaccccauccugaacaugaucgacaccaagaagagcagccugaacaucagcggcuacaacuucagccugggcgccgccaucaagaccggcgccugcaugcuggacggcggcaacaugcuggagaccaucaaggugaccccccagaccauggacggcauccugaagagcauccugaaggugaagagaagccugggcauguucaucagcgacacccccggcgagagaaaccccuacgagaacauccuguacaagaucugccugagcggcgacggcuggcccuacaucgccagcagaaccgccaucaucggcagagccugggagaacaccgugguggaccuggagagcgacagcaagccccagaagaucggcagcaacggcagcaacaagagccugcagagcgccggcuucgcccccggccugaccuacagccagcugaugacccugaaggacagcaugcugcagcuggaccccaacgccaagaccuggaucgacaucgagggcagacccgaggaccccguggagguggcccuguuccagcccaucagcggcugcuacauccacuucuucagagagcccaccgaccugaagcaguucaagcaggacgccaaguacagccacggcaucgacgugaccgaccuguucgccgcccagcccggccugaccagcgccgugaucgaggcccugcccagaaacauggugcugaccugccagggcagcgacgacaucaagaagcugcuggacagccagggcagaagagacaucaagcugaucgacgugagccugaacaagaucgacagcagaaaguucgagaacgccgugugggaccaguacaaggaccugugccacaugcacaccggcguggugguggagaagaagaagaagggcggcaaggaggagaucaccccccacugcgcccugcuggacugcaucauguucgacgccgccgugagcggcggccugaacgccaccgugcugagagccgugcugcccagagacaugguguucagaaccagcagccccaagguggugcugugaggacuagucccuguucccagagcccacuuuuuuuucuuuuuuugaaauaaaauagccugucuuucagaucuaaaaaaaaaaaaaaaaaaaaaaaaaaaaaaaaaaaaaaaaaaaaaaaaaaaaaaaaaaaaaaaaaaaaaaaaaaaaaaaaaaaaaaaaaaaaaaaaaaaa

SEQ ID NO: 16988 - RNA, 1958 nt, Artificial Sequence
  mRNA product Design a-1 (A100) comprising derived and/or modified sequence from LASV(KAK-428;Clade n.d. (VII))__ANH09741__NP (opt4)
aggagagucccgcagucggcguccagcggcucugcuuguucgugugugugucguugcaggccuuauucaagcuuaccaugagcaacagcaaggaggugaagagcuuccuguggacccagagccugagaagagagcugagcggcuacugcaccaacaucaagcugcagguggugaaggacgcccaggcccugcugcacggccuggacuucagcgaggugagcaacgugcagagacugaugagaaagcagaagagagacgacaacgaccugaagagacugagagaccugaaccaggccgugaacaaccugguggagcugaagagcgugcagcagaagagcgugcugaaggugggcacccugaacagcgacgaccugcugacccuggccgccgaccuggagaagcugaagagcaagguggugagaaccgagagaccccugagcagcggcguguacaugggcaaccugagcagccagcagcuggaccagagaagagcccugcugaacaugaucggcauggccggcggcagccagggcaaccagcccagcagagacggcguggugagagugugggacgugaagaacgccgaccugcugaacaaccaguucggcaccaugcccagccugacccuggccugccugaccaagcagggccagguggaccugaacgacguggugcuggcccugaccgaccugggccugaucuacaccgccaaguaccccaacagcagcgaccuggacagacugagccagaaccaccccgugcugaacaugaucgacgugaacaagagcagccugaacaucagcggcuacaacuucagccugggcgccgccgugaaggccggcgccugcaugcuggacggcggcaacaugcuggagaccaucaagaucagcccccagaccguggacggcauccugaagagcauccugaaggugaagagagcccugggcauguucgugagcgacacccccggcgagagaaaccccuacgagaacauccuguacaaggugugccugagcggcaacggcuggcccuacaucgccagcagaaccagcaucgugggcagagccugggagaacaccgugguggaccuggagagcaacaagaaccagcccaaggugggcaacaacggcagcaacaagaugcugcagagcagcggcuucgccaccggccugaccuacagccagcugaugacccugagagacagcaugcugcagcuggaccccaccgccaagaccuggaucgacaucgagggcagacccgaggaccccguggagcuggcccuguuccagcccagcagcggcugcuacauccacuucuucagagagcccaccgaccugaagcaguucaagcaggacgccaaguacagccacggcaucgacgugaacgaccuguucagcgcccagcccggccugaccagcgccgugcuggaggcccugcccagaaacauggugcugaccugccagggcagcgacgacaucagaaagcugcuggacagccaggacagaaaggacaucaagcugaucgacaucagccugagcaaggccgacgccagaaaguucgagaacgacgugugggaccaguucaaggaccugugccacaugcacaccggcaucgugguggagaagaagaagaagggcggcaagcaggagaugaccccccacugcgcccugcuggacugcaucauguucgacgccgccgugagcggcggccugaacgugcccacccugagagccgugcugcccaccgacaugguguucagaaccaucaccaccaagguggugcugugaggacuagucccuguucccagagcccacuuuuuuuucuuuuuuugaaauaaaauagccugucuuucagaucuaaaaaaaaaaaaaaaaaaaaaaaaaaaaaaaaaaaaaaaaaaaaaaaaaaaaaaaaaaaaaaaaaaaaaaaaaaaaaaaaaaaaaaaaaaaaaaaaaaaa

SEQ ID NO: 16989 - RNA, 1958 nt, Artificial Sequence; identical to SEQ ID NO: 16983
  mRNA product Design a-1 (A100) comprising derived and/or modified sequence from LASV(Pinneo-NIG-1969;Clade I)__AIT17837__NP (opt4)

SEQ ID NO: 16990 - RNA, 1958 nt, Artificial Sequence
  mRNA product Design a-1 (A100) comprising derived and/or modified sequence from LASV(ISTH0009-NIG-2011;Clade II)__AIT17405__NP (opt4)
aggagagucccgcagucggcguccagcggcucugcuuguucgugugugugucguugcaggccuuauucaagcuuaccaugagcgugagcaaggaggugaagagcuuccuguggacccagagccugagaagagagcugagcggcuacugcagcaacaucaagcugcagguggugaaggacgcccaggcccugcugcacggccuggacuucagcgaggugagcaacgugcagagacugaugagaaagcagaagagagacgacagcgaccugaagagacugagagaccugaaccaggccgugaacaaccugguggagcugaagagcacccagcagaagagcauccugagagugggcacccugaccagcgacgaccugcugacccuggccgccgaccuggagaagcugaagagcaaggugaucagaaccgagagaccccugagcagcggcguguacaugggcaaccugagcacccagcagcuggagcagagaagagcccugcugaacaugaucggcauggugggcggcgcccagggcacccagcccggcagagacggcguggugagagugugggacgugaagaaccccgaccugcugaacaaccaguucggcaccaugcccagccugacccuggccugccugaccaagcagggccagguggaccugaacgacgccgugcuggcccugaccgaccugggccugaucuacaccgccaaguaccccaacagcagcgaccuggacagacugagccagagccaccccauccugaacaugguggacaucaagaagagcagccugaacaucagcggcuacaacuucagccugggcgccgccgugaaggccggcgccugcaugcuggacggcggcaacaugcuggagaccaucaaggugaccccccagaccauggacggcauccugaagagcauccugaaggugaagagaagccugggcauguucgugagcgacacccccggcgagagaaaccccuacgagaacauccuguacaagaucugccugagcggcgacggcuggcccuacaucgccagcagaaccagcaucgugggcagagccugggagaacaccaccguggaccuggagagcgacggcaagccccagaaggugggcagcgccggcagcaacaagagccugcagagcgccggcuuccccaccggccugaccuacagccagcugaugacccugaaggacagcaugaugcagcuggaccccagcgccaagaccuggaucgacaucgagggcagacccgaggaccccguggagaucgcccuguaccagcccaugagcggcugcuacauccacuucuucagagagcccaccgaccugaagcaguucaagcaggacgccaaguacagccacggcaucgacguggccgaccuguuccccgcccagcccggccugaccagcgccgugaucgaggcccugcccagaaacauggugcugaccugccagggcagcgacgacaucaagagacugcuggacagccagggcagaagagacaucaagcugaucgacaucgcccugagcaaggccgacagcagaagauucgagaacgccgugugggaccagugcaaggaccugugccacaugcacaccggcguggugguggagaagaagaagagaggcggcaaggaggagaucaccccccacugcgcccugauggacugcaucauguacgacgccgccgugagcggcggccugaacauccccgugcugagagccgugcugcccagagacaugguguucagaaccagcagccccaagguggugcugugaggacuagucccuguucccagagcccacuuuuuuuucuuuuuuugaaauaaaauagccugucuuucagaucuaaaaaaaaaaaaaaaaaaaaaaaaaaaaaaaaaaaaaaaaaaaaaaaaaaaaaaaaaaaaaaaaaaaaaaaaaaaaaaaaaaaaaaaaaaaaaaaaaaaa

SEQ ID NO: 16991 - RNA, 1958 nt, Artificial Sequence
  mRNA product Design a-1 (A100) comprising derived and/or modified sequence from LASV(ISTH2010-NIG-2012;Clade II)__AIT17483__NP (opt4)
aggagagucccgcagucggcguccagcggcucugcuuguucgugugugugucguugcaggccuuauucaagcuuaccaugagcgccagcaaggaggugaagagcuuccuguggacccagagccugagaagagagcugagcggcuacugcagcaacaucaagcugcagguggugaaggacgcccaggcccugcugcacggccuggacuucagcgaggugagcaacgugcagagacugaugagaaagcagaagagagacgacagcgaccugaagagacugagagaccugaaccaggccgugaacaaccugguggagcugaagagcacccagcagaagagcauccugagagugggcacccugaccagcgacgaccugcugacccuggccgccgaccuggagaagcugaagagcaaggugaucagaaccgagagaccccugagcagcggcguguacaugggcaaccugagcacccagcagcuggagcagagaagagcccugcugaaccugaucggcauggugggcggcgcccagggcacccagcccggcagagacggcguggugagagugugggacgugaagaaccccgaccugcugaacaaccaguucggcaccaugcccagccugacccuggccugccugaccaagcagggccagguggaccugaacgacgccgugcuggcccugaccgaccugggccugaucuacaccgccaaguaccccaacagcagcgaccuggacagacugagccagagccaccccauccugaacaugguggacaccaagaagagcagccugaacaucagcggcuucaacuucagccugggcgccgccgugaaggccggcgccugcaugcuggacggcggcaacaugcuggagaccaucaaggugaccccccagaccauggacggcauccugaagagcauccugaaggugaagaagagccugggcauguucgugagcgacacccccggcgagagaaaccccuacgagaacauccuguacaagaucugccugagcggcgacggcuggcccuacaucgccagcagaaccagcaucgugggcagagccugggagaacaccaccguggaccuggagagcgacggcaagccccacaaggugggcaccgccggcagcaacaagagccugcagagcgccggcuuccccaccggccugaccuacagccagcugaugacccugaaggacagcaugaugcagcuggaccccagcgccaagaccuggaucgacaucgagggcagacccgaggaccccguggagaucgcccuguaccagcccaugagcggcugcuacauccacuucuucagagagcccaccgaccugaagcaguucaagcaggacgccaaguacagccacggcaucgacguggccgaccuguuccccgcccagcccggccugaccagcgccgugaucgaggcccugcccagaaacauggugcugaccugccagggcagcgacgacaucaagagacugcuggacagccagggcagaagagacaucaagcugaucgacaucgcccugagcaaggccgacagcagaagauucgagaacgccgugugggaccagugcaaggaccugugccacaugcacaccggcguggugguggagaagaagaagagaggcggcaaggaggagaucaccccccacugcgcccugauggacugcaucauguacgacgccgccgugagcggcggccugaacauccccgugcugagagccgugcugcccagagacaugguguucagaaccagcagccccaagguggugcugugaggacuagucccuguucccagagcccacuuuuuuuucuuuuuuugaaauaaaauagccugucuuucagaucuaaaaaaaaaaaaaaaaaaaaaaaaaaaaaaaaaaaaaaaaaaaaaaaaaaaaaaaaaaaaaaaaaaaaaaaaaaaaaaaaaaaaaaaaaaaaaaaaaaaa

SEQ ID NO: 16992 - RNA, 1958 nt, Artificial Sequence
  mRNA product Design a-1 (A100) comprising derived and/or modified sequence from LASV(Lassa virus/H.sapiens-wt/NGA/2015/ISTH_0543;Clade II)__AVO03640__NP (opt4)
aggagagucccgcagucggcguccagcggcucugcuuguucgugugugugucguugcaggccuuauucaagcuuaccaugagcgccagcaaggaggugaagagcuuccuguggacccagagccugagaagagagcugagcggcuacugcagcaacaucaagcugcagguggugaaggacgcccaggcccugcugcacggccuggacuucagcgaggugagcaacgugcagagacugaugagaaagcagaagagagacgacagcgaccugaagagacugagagaccugaaccaggccgugaacaaccugguggagcugaagagcacccagcagaagagcauccugagagugggcacccugaccagcgacgaccugcugacccuggccgccgaccuggagaagcugaagagcaaggugaucagaaccgagagaccccugagcagcggcguguacaugggcaaccugagcacccagcagcuggagcagagaagagcccugcugaacaugaucggcauggugggcggcgcccagggcacccagcccggcagagacggcguggugagagugugggacgugaagaaccccgaccugcugaacaaccaguucggcaccaugcccagccugacccuggccugccugaccaagcagggccagguggaccugaacgacgccgugcuggcccugaccgaccugggccugaucuacaccgccaaguaccccaacagcagcgaccuggacagacugagccagagccaccccauccugaacaugguggacaccaagaagagcagccugaacaucagcggcuacaacuucagccugggcgccgccgugaaggccggcgccugcaugcuggacggcggcaacaugcuggagaccaucaaggugaccccccagaccauggacggcauccugaagagcauccugaaggugaagaagagccugggcauguucgugagcgacacccccggcgagagaaaccccuacgagaacauccuguacaagaucugccugagcggcgacggcuggcccuacaucgccagcagaaccagcaucgugggcagagccugggagaacaccaccguggaccuggagagcgacggcaagccccagaaggugggcagcgccggcagcaacaagagccugcagagcgccggcuuccccaccggccugaccuacagccagcugaugacccugaaggacagcaugaugcagcuggaccccagcgccaagaccuggaucgacaucgagggcagacccgaggaccccguggagaucgcccuguaccagcccaugagcggcugcuacauccacuucuucagagagcccaccgaccugaagcaguucaagcaggacgccaaguacagccacggcaucgacguggccgaccuguuccccgcccagcccggccugaccagcgccgugaucgaggcccugcccagaaacauggugcugaccugccagggcagcgacgacaucaagagacugcuggacagccagggcagaaaggacaucaagcugaucgacaucgcccugagcaaggccgacagcagaagauucgagaacgccgugugggaccagugcaaggaccugugccacaugcacaccggcguggugguggagaagaagaagagaggcggcaaggaggagaucaccccccacugcgcccugauggacugcaucauguacgacgccgccgugagcggcggccugaacauccccgugcugagagccgugcugcccagagacaugguguucagaaccagcagccccaagguggugcugugaggacuagucccuguucccagagcccacuuuuuuuucuuuuuuugaaauaaaauagccugucuuucagaucuaaaaaaaaaaaaaaaaaaaaaaaaaaaaaaaaaaaaaaaaaaaaaaaaaaaaaaaaaaaaaaaaaaaaaaaaaaaaaaaaaaaaaaaaaaaaaaaaaaaa

SEQ ID NO: 16993 - RNA, 1958 nt, Artificial Sequence
  mRNA product Design a-1 (A100) comprising derived and/or modified sequence from LASV(Lassa virus/H.sapiens-wt/NGA/2016/ISTH_0009;Clade II)__AVO03572__NP (opt4)
aggagagucccgcagucggcguccagcggcucugcuuguucgugugugugucguugcaggccuuauucaagcuuaccaugagcgccagcaaggaggugaagagcuuccuguggacccagagccugagaagagagcugagcggcuacugcagcaacaucaagcugcagguggugaaggacgcccaggcccugcugcacggccuggacuucagcgaggugagcaacgugcagagacugaugagaaagcagaagagagacgacagcgaccugaagagacugagagaccugaaccaggccgugaacaaccugguggagcugaagagcacccagcagaagagcauccugagagugggcacccugaccagcgacgaccugcugacccuggccgccgaccuggagaagcugaagagcaaggugaucagaaccgagagaccccugagcagcggcguguacaugggcaaccugagcacccagcagcuggagcagagaagagcccugcugaacaugaucggcauggugggcggcgcccagggcacccagcccggcagagacggcguggugagagugugggacgugaagaaccccgaccugcugaacaaccaguucggcaccaugcccagccugacccuggccugccugaccaagcagggccagguggaccugaacgacgccgugcuggcccugaccgaccugggccugaucuacaccgccaaguaccccaacagcagcgaccuggacagacugagccagagccaccccauccugaacaugguggacaccaagaagagcagccugaacaucagcggcuacaacuucagccugggcgccgccgugaaggccggcgccugcaugcuggacggcggcaacaugcuggagaccaucaaggugaccccccagaccauggacggcauccugaagagcauccugaaggugaagaagagccugggcauguucgugagcgacacccccggcgagagaaaccccuacgagaacauccuguacaagaucugccugagcggcgacggcuggcccuacaucgccagcagaaccagcaucgugggcagagccugggagaacaccaccguggaccuggagagcgacggcaagccccagaaggugggcagcgccggcagcaacaagagccugcagagcgccggcuuccccaccggccugaccuacagccagcugaugacccugaaggacagcaugaugcagcuggaccccagcgccaagaccuggaucgacaucgagggcagacccgaggaccccguggagaucgcccuguaccagcccaugagcggcugcuacauccacuucuucagagagcccaccgaccugaagcaguucaagcaggacgccaaguacagccacggcaucgacguggccgaccuguuccccgcccagcccggccugaccagcgccgugaucgaggcccugcccagaaacauggugcugaccugccagggcagcgacgacaucaagagacugcuggacagccagggcagaagagacaucaagcugaucgacaucgcccugagcaaggccgacagcagaagauucgagaacgccgugugggaccagugcaaggaccugugccacaugcacaccggcguggugguggagaagaagaagagaggcggcaaggaggagaucaccccccacugcgcccugauggacugcaucauguacgacgccgccgugagcggcggccugaacauccccgugcugagagccgugcugcccagagacaugguguucagaaccagcagccccaagguggugcugugaggacuagucccuguucccagagcccacuuuuuuuucuuuuuuugaaauaaaauagccugucuuucagaucuaaaaaaaaaaaaaaaaaaaaaaaaaaaaaaaaaaaaaaaaaaaaaaaaaaaaaaaaaaaaaaaaaaaaaaaaaaaaaaaaaaaaaaaaaaaaaaaaaaaa

SEQ ID NO: 16994 - RNA, 1958 nt, Artificial Sequence
  mRNA product Design a-1 (A100) comprising derived and/or modified sequence from LASV(Lassa virus/H.sapiens-wt/NGA/2016/ISTH_0017;Clade II)__AVO03568__NP (opt4)
aggagagucccgcagucggcguccagcggcucugcuuguucgugugugugucguugcaggccuuauucaagcuuaccaugagcgccagcaaggaggugaagagcuuccuguggacccagagccugagaagagagcugagcggcuacugcagcagcaucaagcugcagguggugaaggacgcccaggcccugcugcacggccuggacuucagcgaggugagcaacgugcagagacugaugagaaagcagaagagagacgacagcgaccugaagagacugagagaccugaaccaggccgugaacaaccugguggagcugaagagcacccagcagaagagcauccugagagugggcacccugaccagcgacgaccugcugacccuggccgccgaccuggagaagcugaagagcaaggugaucagaaccgagagaccccugagcagcggcguguacaugggcaaccugagcacccagcagcuggagcagagaagagcccugcugaacaugaucggcauggccggcggcgcccagggcacccagcccggcagagacggcguggugagagugugggacgugaagaaccccgaccugcugaacaaccaguucggcaccaugcccagccugacccuggccugccugaccaagcagggccagguggaccugaacgacgccgugcuggcccugaccgaccugggccugaucuacaccgccaaguaccccaacagcagcgaccuggacagacugagccagagccaccccauccugaacaugguggacaccaagaagagcagccugaacaucagcggcuacaacuucagccugggcgccgccgugaaggccggcgccugcaugcuggacggcggcaacaugcuggagaccaucaaggugaccccccagaccauggacggcauccugaagagcauccugaaggugaagagaagccugggcauguucgugagcgacgcccccggcgagagaaaccccuacgagaacauccuguacaagaucugccugagcggcgacggcuggcccuacaucgccagcagaaccagcaucgugggcagagccugggagaacaccaccguggaccuggagagcgacggcaagccccagaaggugggcgccaccggcagcaacaagagccugcagagcgccggcuuccccaccggccugaccuacagccagcugaugacccugaaggacagcaugaugcagcuggaccccagcgccaagaccuggaucgacaucgagggcagacccgaggaccccguggagguggcccuguaccagcccgugagcggcugcuacauccacuucuucagagagcccaccgaccugaagcaguucaagcaggacgccaaguacagccacggcaucgacguggccgaccuguuccccgcccagcccggccugaccagcgccgugaucgaggcccugcccagaaacauggugcugaccugccagggcagcgacgacaucaagaagcugcuggacagccagggcagaaaggacaucaagcugaucgacaucgcccugagcaaggccgacagcagaagauucgagaacgccgugugggaccagugcaaggaccugugccacaugcacaccggcguggugguggagaagaagaagagaggcggcaaggaggagaucaccccccacugcgcccugauggacugcaucauguacgacgccgccgugagcggcggccugaacauccccgugcugagagccgugcugcccagagacaugguguucagaaccagcagccccaagguggugcugugaggacuagucccuguucccagagcccacuuuuuuuucuuuuuuugaaauaaaauagccugucuuucagaucuaaaaaaaaaaaaaaaaaaaaaaaaaaaaaaaaaaaaaaaaaaaaaaaaaaaaaaaaaaaaaaaaaaaaaaaaaaaaaaaaaaaaaaaaaaaaaaaaaaaa

SEQ ID NO: 16995 - RNA, 1958 nt, Artificial Sequence
  mRNA product Design a-1 (A100) comprising derived and/or modified sequence from LASV(Lassa virus/H.sapiens-wt/NGA/2018/ISTH_0959;Clade II)__AVV65100__NP (opt4)
aggagagucccgcagucggcguccagcggcucugcuuguucgugugugugucguugcaggccuuauucaagcuuaccaugagcgccagcaaggaggugaagagcuuccuguggacccagagccugagaagagagcugagcggcuacugcagcaacaucaagcugcagguggugaaggacgcccaggcccugcugcacggccuggacuucagcgaggugagcaacgugcagagacugaugagaaagcagaagagagacgacagcgaccugaagagacugagagaccugaaccaggccgugaacaaccugguggagcugaagagcacccagcagaagagcauccugagagugggcacccugaccagcgacgaccugcugacccuggccgccgaccuggagaagcugaagagcaaggugaucagaaccgagagaccccugagcagcggcguguacaugggcaaccugagcacccagcagcuggagcagagaagagcccugcugaaccugaucggcauggugggcggcgcccagggcacccagcccggcagagacggcguggugagagugugggacgugaagaaccccgaccugcugaacaaccaguucggcaccaugcccagccugacccuggccugccugaccaagcagggccagguggaccugaacgacguggugcuggcccugaccgaccugggccugaucuacaccgccaaguaccccaacagcagcgaccuggacagacugagccagagccaccccauccugaacaugguggacaccaagaagagcagccugaacaucagcggcuucaacuucagccugggcgccgccgugaaggccggcgccugcaugcuggacggcggcaacaugcuggagaccaucaaggugaccccccagaccauggacggcauccugaagagcauccugaaggugaagaagagccugggcauguucgugagcgacacccccggcgagagaaaccccuacgagaacauccuguacaagaucugccugagcggcgacggcuggcccuacaucgccagcagaaccagcaucgugggcagagccugggagaacaccaccguggaccuggagagcgacggcaagccccacaaggugggcaccgccggcagcaacaagagccugcagagcgccggcuuccccaccggccugaccuacagccagcugaugacccugaaggacagcaugaugcagcuggaccccagcgccaagaccuggaucgacaucgagggcagacccgaggaccccguggagaucgcccuguaccagcccaugagcggcugcuacauccacuucuucagagagcccaccgaccugaagcaguucaagcaggacgccaaguacagccacggcaucgacguggccgaccuguuccccgcccagcccggccugaccagcgccgugaucgaggcccugcccagaaacauggugcugaccugccagggcagcgacgacaucaagagacugcuggacagccagggcagaaaggacaucaagcugaucgacaucgcccugagcaagaccgacagcagaagauucgagaacgccgugugggaccagugcaaggaccugugccacaugcacaccggcguggugguggagaagaagaagagaggcggcaaggaggagaucaccccccacugcgcccugauggacugcaucauguacgacgccgccgugagcggcggccugaacauccccgugcugagagccgugcugcccagagacaugguguucagaaccagcagccccaagguggugcugugaggacuagucccuguucccagagcccacuuuuuuuucuuuuuuugaaauaaaauagccugucuuucagaucuaaaaaaaaaaaaaaaaaaaaaaaaaaaaaaaaaaaaaaaaaaaaaaaaaaaaaaaaaaaaaaaaaaaaaaaaaaaaaaaaaaaaaaaaaaaaaaaaaaaa

SEQ ID NO: 16996 - RNA, 1958 nt, Artificial Sequence
  mRNA product Design a-1 (A100) comprising derived and/or modified sequence from LASV(LASV003-NIG-2008;Clade II)__AIT17581__NP (opt4)
aggagagucccgcagucggcguccagcggcucugcuuguucgugugugugucguugcaggccuuauucaagcuuaccaugagcgccagcaaggaggugaagagcuuccuguggacccagagccugagaagagagcugagcggcuacugcagcagcaucaagcugcagguggugaaggacgcccaggcccugcugcacggccuggacuucagcgaggugagcaacgugcagagacugaugagaaagcagaagagagacgacagcgaccugaagagacugagagaccugaaccaggccgugaacaaccugguggagcugaagagcacccagcagaagagcgugcugagagugggcacccugaccagcgacgaccugcugacccuggccgccgaccuggagaagcugaagagcaaggugaucagaaccgagagaccccugagcagcggcguguacaugggcaaccugagcgcccagcagcuggagcagagaagaacccugcugaacaugaucggcauggugggcggcgcccagggcacccagcccggcagagacggcguggugagagugugggacgugaagaaccccgaccugcugaacaaccaguucggcaccaugcccagccugacccuggccugccugaccaagcagggccagguggaccugaacgacguggugcuggcccugaccgaccugggccugaucuacaccgccaaguaccccaacagcagcgaccuggacagacugagccagagccaccccauccugagcaugguggacaccaagaagagcagccugaacaucagcggcuacaacuucagccugggcgccgccgugaaggccggcgccugcaugcuggacggcggcaacaugcuggagaccaucaaggugaccccccagaccauggacggcauccugaagagcauccugaaggugaagaagagccugggcauguucgugagcgacacccccggcgagagaaaccccuacgagaacauccuguacaagaucugccugagcggcgacggcuggcccuacaucgccagcagaaccagcaucgugggcagagccugggagaacaccaccguggaccuggagagcgacggcaagccccagaaggugggcaccgccggcagcaacaagagccugcagagcgccggcuuccccaccggccugaccuacagccagcugaugacccugaaggacagcaugaugcagcuggaccccagcgccaagaccuggaucgacaucgagggcagacccgaggaccccguggagaucgcccuguaccagcccaugagcggcugcuacauccacuucuucagagagcccaccgaccugaagcaguucaagcaggacgccaaguacagccacggcaucgacgugaccgaccuguuccccgcccagcccggccugaccagcgccgugaucgaggcccugcccagaaacauggugcugaccugccagggcagcgacgacaucaagagacugcuggacagccagggcagaagagacaucaagcugaucgacaucgcccugagcaaggccgacagcagaagauucgagaacgccgugugggaccagugcaaggaccugugccacaugcacaccggcguggugguggagaagaagaagagaggcggcaaggaggagaucaccccccacugcgcccugauggacugcaucauguacgacgccgccgugagcggcggccugaacauccccgugcugagagccgugcugcccagagacaugguguucagaaccagcagccccaagguggugcugugaggacuagucccuguucccagagcccacuuuuuuuucuuuuuuugaaauaaaauagccugucuuucagaucuaaaaaaaaaaaaaaaaaaaaaaaaaaaaaaaaaaaaaaaaaaaaaaaaaaaaaaaaaaaaaaaaaaaaaaaaaaaaaaaaaaaaaaaaaaaaaaaaaaaa

SEQ ID NO: 16997 - RNA, 1958 nt, Artificial Sequence
  mRNA product Design a-1 (A100) comprising derived and/or modified sequence from LASV(LASV035-NIG-2009;Clade II)__AIT17589__NP (opt4)
aggagagucccgcagucggcguccagcggcucugcuuguucgugugugugucguugcaggccuuauucaagcuuaccaugagcgccagcaaggaggugaagagcuuccuguggacccagagccugagaagagagcugagcggcuacugcagcagcaucaagcugcagguggugaaggacgcccaggcccugcugcacggccuggacuucagcgaggugagcaacgugcagagacugaugagaaagcagaagagagacgacagcgaccugaagagacugagagaccugaaccaggccgugaacaaccugguggagcugaagagcacccagcagaagagcauccugagagugggcacccugaccagcgacgaccugcugacccuggccgccgaccuggagaagcugaagagcaaggugaucagaaccgagagaccccugagcagcggcguguacaugggcaaccugagcgcccagcagcuggagcagagaagagcccugcugaacaugaucggcauggugggcggcgcccagggcacccagcccggcagagacggcguggugagagugugggacgugaagaaccccgaccugcugaacaaccaguucggcaccaugcccagccugacccuggccugccugaccaagcagggccagguggaccugaacgacgccgugcuggcccugaccgaccugggccugaucuacaccgccaaguaccccaacagcagcgaccuggacagacugagccagagccaccccauccugaacaugguggacaccaagaagagcagccugaacaucagcggcuacaacuucagccugggcgccgccgugaaggccggcgccugcaugcuggacggcggcaacaugcuggagaccaucaaggugaccccccagaccauggacggcauccugaagagcauccugaaggugaagagaagccugggcauguucgugagcgacacccccggcgagagaaaccccuacgagaacauccuguacaagaucugccugagcggcgacggcuggcccuacaucgccagcagaaccagcaucgugggcagagccugggagaacaccaccguggaccuggagagcgacggcaagccccagaaggugggcaccaccggcagcaacaagagccugcagagcgccggcuuccccaccggccugaccuacagccagcugaugacccugaaggacagcaugaugcagcuggaccccagcgccaagaccuggaucgacaucgagggcagacccgaggaccccguggagaucgcccuguaccagcccaugagcggcugcuacauccacuucuucagagagcccaccgaccugaagcaguucaagcaggacgccaaguacagccacggcaucgacguggccgaccuguuccccgcccagcccggccugaccagcgccgugaucgaggcccugcccagaaacauggugcugaccugccagggcagcgacgacaucaagaagcugcuggacagccagggcagaagagacaucaagcugaucgacaucgcccugagcaaggccgacagcagaaaguucgagaacgccgugugggaccagugcaaggaccugugccacaugcacaccggcguggugguggagaagaagaagagaggcggcaaggaggagaucaccccccacugcgcccugauggacugcaucauguacgacgccgccgugagcggcggccugaacauccccgugcugagagccgugcugcccagagacaugguguucagaaccagcagccccaagguggugcugugaggacuagucccuguucccagagcccacuuuuuuuucuuuuuuugaaauaaaauagccugucuuucagaucuaaaaaaaaaaaaaaaaaaaaaaaaaaaaaaaaaaaaaaaaaaaaaaaaaaaaaaaaaaaaaaaaaaaaaaaaaaaaaaaaaaaaaaaaaaaaaaaaaaaa

SEQ ID NO: 16998 - RNA, 1958 nt, Artificial Sequence
  mRNA product Design a-1 (A100) comprising derived and/or modified sequence from LASV(LASV1000-NIG-2009;Clade II)__AIT17783__NP (opt4)
aggagagucccgcagucggcguccagcggcucugcuuguucgugugugugucguugcaggccuuauucaagcuuaccaugagcgccagcaaggaggugaagagcuuccuguggacccagagccugagaagagagcugagcggcuacugcagcaacaucaagcugcagguggugaaggacgcccaggcccugcugcacggccuggacuucagcgaggugagcaacgugcagagacugaugagaaagcagaagagagacgacagcgaccugaagagacugagagaccugaaccaggccgugaacaaccugguggagcugaagagcacccagcagaagagcauccugagagugggcacccugaccagcgacgaccugcugacccuggccgccgaccuggagaagcugaagagcaaggugaucagaaccgagagaccccugagcagcggcguguacaugggcaaccugagcacccagcagcuggagcagagaagagcccugcugaacaugaucggcauggugggcggcgcccagggcacccagcccggcagagacggcguggugagagugugggacgugaagaaccccgaccugcugaacaaccaguucggcaccaugcccagccugacccuggccugccugaccaagcagggccagguggaccugaacgacguggugcuggcccugaccgaccugggccugaucuacaccgccaaguaccccaacagcagcgaccuggacagacugagccagagccaccccauccugaacaugguggacaccaagaagagcagccugaacaucagcggcuacaacuucagccugggcgccgccgugaaggccggcgccugcaugcuggacggcggcaacaugcuggagaccaucaaggugaccccccagaccauggacggcauccugaagagcauccugaaggugaagaagagccugggcauguucgugagcgacacccccggcgagagaaaccccuacgagaacauccuguacaagaucugccugagcggcgacggcuggcccuacaucgccagcagaaccagcaucgugggcagagccugggagaacaccaccguggaccuggagagcgacggcaagccccagaaggugggcaccgccggcagcaacaagagccugcagagcgccggcuuccccaccggccugaccuacagccagcugaugacccugaaggacagcaugaugcagcuggaccccagcgccaagaccuggaucgacaucgagggcagacccgaggaccccguggagaucgcccuguaccagcccgugagcggcugcuacauccacuucuucagagagcccaccgaccugaagcaguucaagcaggacgccaaguacagccacggcaucgacguggccgaccuguuccccgcccagcccggccugaccagcgccgugaucgaggcccugcccagaaacauggugcugaccugccagggcagcgacgacaucaagagacugcuggacagccagggcagaagagacaucaagcugaucgacaucgcccugagcaaggccgacagcagaagauucgagaacgccgugugggaccagugcaaggaccugugccacaugcacaccggcguggugguggagaagaagaagagaggcggcaaggaggagaucaccccccacugcgcccugauggacugcaucauguacgacgccgccgugagcggcggccugaacauccccgugcugagagccgugcugcccagagacaugguguucagaaccagcagccccaagguggugcugugaggacuagucccuguucccagagcccacuuuuuuuucuuuuuuugaaauaaaauagccugucuuucagaucuaaaaaaaaaaaaaaaaaaaaaaaaaaaaaaaaaaaaaaaaaaaaaaaaaaaaaaaaaaaaaaaaaaaaaaaaaaaaaaaaaaaaaaaaaaaaaaaaaaaa

SEQ ID NO: 16999 - RNA, 1958 nt, Artificial Sequence
  mRNA product Design a-1 (A100) comprising derived and/or modified sequence from LASV(LASV221-NIG-2010;Clade II)__AIT17625__NP (opt4)
aggagagucccgcagucggcguccagcggcucugcuuguucgugugugugucguugcaggccuuauucaagcuuaccaugagcgccagcaaggaggugaagagcuuccuguggacccagagccugagaagagagcugagcggcuacugcagcagcaucaagcugcagguggugaaggacgcccaggcccugcugcacggccuggacuucagcgaggugagcaacgugcagagacugaugagaaagcagagaagagacgacagcgaccugaagagacugagagaccugaaccaggccgugaacaaccugguggagcugaagagcacccagcagaagagcauccugagagugggcacccugaccagcgacgaccugcugacccuggccgccgaccuggagaagcugaagagcaaggugaucagaaccgagagaccccugagcagcggcguguacaugggcaaccugagcacccagcagcuggagcagagaagagcccugcugaacaugaucggcauggugggcggcgcccagggcacccagcccggcagagacggcguggugagagugugggacgugaagaaccccgaccugcugaacaaccaguucggcaccaugcccagccugacccuggccugccugaccaagcagggccagguggaccugaacgacgccgugcuggcccugaccgaccugggccugaucuacaccgccaaguaccccaacagcagcgaccuggacagacugagccagagccaccccauccugaacaugguggacaccaagaagagcagccugaacaucagcggcuacaacuucagccugggcgccgccgugaaggccggcgccugcaugcuggacggcggcaacaugcuggagaccaucaaggugaccccccagaccguggacggcauccugaagagcauccugaaggugaagagaagccugggcauguucgugagcgacacccccggcgagagaaaccccuacgagaacauccuguacaagaucugccugagcggcgacggcuggcccuacaucgccagcagaaccagcaucgugggcagagccugggagaacaccaccguggaccuggagagcgacggcaagccccagaaggugggcaccgccggcagcaacaagagccugcagagcgccggcuuccccaccggccugaccuacagccagcugaugacccugaaggacagcaugaugcagcuggaccccagcgccaagaccuggaucgacaucgagggcagacccgaggaccccguggagaucgcccuguaccagcccaugagcggcugcuacauccacuucuucagagagcccaccgaccugaagcaguucaagcaggacgccaaguacagccacggcaucgacguggccgaccuguuccccgcccagcccggccugaccagcgccgugaucgaggcccugcccagaaacauggugcugaccugccagggcagcgacgacaucaagagacugcuggacagccagggcagaagagacaucaagcugaucgacaucgcccugagcaaggccgacagcagaaaguucgagaacgccgugugggaccagugcaaggaccugugccacaugcacaccggcguggugguggagaagaagaagagaggcggcaaggaggagaucaccccccacugcgcccugauggacugcaucauguacgacgccgccgugagcggcggccugaacauccccgugcugagagccgugcugcccagagacaugguguucagaaccagcagccccaagguggugcugugaggacuagucccuguucccagagcccacuuuuuuuucuuuuuuugaaauaaaauagccugucuuucagaucuaaaaaaaaaaaaaaaaaaaaaaaaaaaaaaaaaaaaaaaaaaaaaaaaaaaaaaaaaaaaaaaaaaaaaaaaaaaaaaaaaaaaaaaaaaaaaaaaaaaa

SEQ ID NO: 17000 - RNA, 1958 nt, Artificial Sequence
  mRNA product Design a-1 (A100) comprising derived and/or modified sequence from LASV(LASV237-NIG-2010;Clade II)__AIT17639__NP (opt4)
aggagagucccgcagucggcguccagcggcucugcuuguucgugugugugucguugcaggccuuauucaagcuuaccaugagcgccagcaaggaggugaagagcuuccuguggacccagagccugagaagagagcugagcggcuacugcagcaacaucaagcugcagguggugaaggacgcccaggcccugcugcacggccuggacuucagcgaggugagcaacgugcagagacugaugagaaagcagaagagagacgacagcgaccugaagagacugagagaccugaaccaggccgugaacaaccugguggagcugaagagcacccagcagaagagcauccugagagugggcacccugaccagcgacgaccugcugacccuggccgccgaccuggagaagcugaagagcaaggugaucagaaccgagagaccccugagcagcggcguguacaugggcaaccugagcacccagcagcuggagcagagaagagcccugcugaacaugaucggcauggugggcggcgcccagggcacccagcccggcagagacggcguggugagagugugggacgugaagaaccccgaccugcugaacaaccaguucggcaccaugcccagccugacccuggccugccugaccaagcagggccagguggaccugaacgacgccgugcuggcccugaccgaccugggccugaucuacaccgccaaguaccccaacagcagcgaccuggacagacugagccagagccaccccauccugaacaugguggacaucaagaagagcagccugaacaucagcggcuacaacuucagccugggcgccgccgugaaggccggcgccugcaugcuggacggcggcaacaugcuggagaccaucaaggugaccccccagaccauggacggcauccugaagagcauccugaaggugaagagaagccugggcauguucgugagcgacacccccggcgagagaaaccccuacgagaacauccuguacaagaucugccugagcggcgacggcuggcccuacaucgccagcagaaccagcaucgugggcagagccugggagaacaccaccguggaccuggagagcgacggcaagccccagaaggugggcagcgccggcagcaacaagagccugcagagcgccggcuuccccaccggccugaccuacagccagcugaugacccugaaggacagcaugaugcagcuggaccccagcgccaagaccuggaucgacaucgagggcagacccgaggaccccguggagaucgcccuguaccagcccaugagcggcugcuacauccacuucuucagagagcccaccgaccugaagcaguucaagcaggacgccaaguacagccacggcaucgacguggccgaccuguuccccgcccagcccggccugaccagcgccgugaucgaggcccugcccagaaacauggugcugaccugccagggcagcgacgacaucaagagacugcuggacagccagggcagaagagacaucaagcugaucgacaucgcccugagcaaggccgacagcagaagauucgagaacgccgugugggaccagugcaaggaccugugccacaugcacaccggcguggugguggagaagaagaagagaggcggcaaggaggagaucaccccccacugcgcccugauggacugcaucauguacgacgccgccgugagcggcggccugaacauccccgugcugagagccgugcugcccagagacaugguguucagaaccagcagccccaagguggugcugugaggacuagucccuguucccagagcccacuuuuuuuucuuuuuuugaaauaaaauagccugucuuucagaucuaaaaaaaaaaaaaaaaaaaaaaaaaaaaaaaaaaaaaaaaaaaaaaaaaaaaaaaaaaaaaaaaaaaaaaaaaaaaaaaaaaaaaaaaaaaaaaaaaaaa

SEQ ID NO: 17001 - RNA, 1958 nt, Artificial Sequence
  mRNA product Design a-1 (A100) comprising derived and/or modified sequence from LASV(LASV253-NIG-2011;Clade II)__AIT17671__NP (opt4)
aggagagucccgcagucggcguccagcggcucugcuuguucgugugugugucguugcaggccuuauucaagcuuaccaugagcgccagcaaggaggugaagagcuuccuguggacccagagccugagaagagagcugagcggcuacugcagcagcaucaagcugcagguggugaaggacgcccaggcccugcugcacggccuggacuucagcgaggugagcaacgugcagagacugaugagaaagcagaagagagacgacagcgaccugaagagacugagagaccugaaccaggccgugaacaaccugguggagcugaagagcacccagcagaagagcgugcugagagugggcacccugaccagcgacgaccugcugacccuggccgccgaccuggagaagcugaagagcaaggugaucagaaccgagagaccccugagcagcggcguguacaugggcaaccugagcacccagcagcuggagcagagaagagcccugcugaacaugaucggcauggugggcggcgcccagggcacccagcccggcagagacggcguggugagagugugggacgugaagaaccccgaccugcugaacaaccaguucggcaccaugcccagccugacccuggccugccugaccaagcagggccagguggaccugaacgacguggugcuggcccugaccgaccugggccugaucuacaccgccaaguaccccaacagcagcgaccuggacagacugagccagagccaccccauccugaacaugguggacaccaagaagagcagccugaacaucagcggcuacaacuucagccugggcgccgccgugaaggccggcgccugcaugcuggacggcggcaacaugcuggagaccaucaaggugaccccccagaccauggacggcauccugaagagcauccugaaggugaagaagagccugggcauguucgugagcgacacccccggcgagagaaaccccuacgagaacauccuguacaagaucugccugagcggcgacggcuggcccuacaucgccagcagaaccagcaucgugggcagagccugggagaacaccaccguggaccuggagagcgacggcaagccccagaaggugggcaccgccggcagcaacaagagccugcagagcgccggcuuccccaccggccugaccuacagccagcugaugacccugaaggacagcaugaugcagcuggaccccagcgccaagaccuggaucgacaucgagggcagacccgaggaccccguggagaucgcccuguaccagcccaugagcggcugcuacauccacuucuucagagagcccaccgaccugaagcaguucaagcaggacgccaaguacagccacggcaucgacgugaccgaccuguuccccgcccagcccggccugaccagcgccgugaucgaggcccugcccagaaacauggugcugaccugccagggcagcgacgacaucaagagacugcuggacagccagggcagaagagacaucaagcugaucgacaucgcccugagcaaggccgacagcagaagauucgagaacgccgugugggaccagugcaaggaccugugccacaugcacaccggcguggugguggagaagaagaagagaggcggcaaggaggagaucaccccccacugcgcccugauggacugcaucauguacgacgccgccgugagcggcggccugaacauccccgugcugagagccgugcugcccagagacaugguguucagaaccagcagccccaagguggugcugugaggacuagucccuguucccagagcccacuuuuuuuucuuuuuuugaaauaaaauagccugucuuucagaucuaaaaaaaaaaaaaaaaaaaaaaaaaaaaaaaaaaaaaaaaaaaaaaaaaaaaaaaaaaaaaaaaaaaaaaaaaaaaaaaaaaaaaaaaaaaaaaaaaaaa

SEQ ID NO: 17002 - RNA, 1958 nt, Artificial Sequence
  mRNA product Design a-1 (A100) comprising derived and/or modified sequence from LASV(LASV254-NIG-2011;Clade II)__AIT17675__NP (opt4)
aggagagucccgcagucggcguccagcggcucugcuuguucgugugugugucguugcaggccuuauucaagcuuaccaugagcgccagcaaggaggugaagagcuuccuguggacccagagccugagaagagagcugagcggcuacugcagcagcaucaagcugcagguggugaaggacgcccaggcccugcugcacggccuggacuucagcgaggugagcaacgugcagagacugaugagaaagcagaagagagacgacagcgaccugaagagacugagagaccugaaccaggccgugaacaaccugguggagcugaagagcacccagcagaagagcgugcugagagugggcacccugaccagcgacgaccugcugacccuggccgccgaccuggagaagcugaagagcaaggugaucagaaccgagagaccccugagcagcggcguguacaugggcaaccugagcacccagcagcuggagcagagaagagcccugcugaacaugaucggcauggugggcggcgcccagggcacccagcccggcagagacggcguggugagagugugggacgugaagaaccccgaccugcugaacaaccaguucggcaccaugcccagccugacccuggccugccugaccaagcagggccagguggaccugaacgacgccgugcuggcccugaccgaccugggccugaucuacaccgccaaguaccccaacagcagcgaccuggacagacugagccagagccaccccauccugaacaugguggacaccaagaagagcagccugaacaucagcggcuacaacuucagccugggcgccgccgugaaggccggcgccugcaugcuggacggcggcaacaugcuggagaccaucaaggugaccccccagaccauggacggcauccugaagagcauccugaaggugaagaagagccugggcauguucgugagcgacacccccggcgagagaaaccccuacgagaacauccuguacaagaucugccugagcggcgacggcuggcccuacaucgccagcagaaccagcaucgugggcagagccugggagaacaccaucguggaccuggagagcgacggcaagccccagaaggugggcaccgccggcagcaacaagagccugcagagcgccggcuuccccaccggccugaccuacagccagcugaugacccugaaggacagcaugaugcagcuggaccccagcgccaagaccuggaucgacaucgagggcagacccgaggaccccguggagaucgcccuguaccagcccaugagcggcugcuacauccacuucuucagagagcccaccgaccugaagcaguucaagcaggacgccaaguacagccacggcaucgacguggccgaccuguuccccgcccagcccggccugaccagcgccgugaucgaggcccugcccagaaacauggugcugaccugccagggcagcgacgacaucaagagacugcuggacagccagggcagaagagacaucaagcugaucgacaucgcccugagcaaggccgacagcagaagauucgagaacgccgugugggaccagugcaaggaccugugccacaugcacaccggcguggugguggagaagaagaagagaggcggcaaggaggagaucaccccccacugcgcccugauggacugcaucauguacgacgccgccgugagcggcggccugaacauccccgugcugagagccgugcugcccagagacaugguguucagaaccagcagccccaagguggugcugugaggacuagucccuguucccagagcccacuuuuuuuucuuuuuuugaaauaaaauagccugucuuucagaucuaaaaaaaaaaaaaaaaaaaaaaaaaaaaaaaaaaaaaaaaaaaaaaaaaaaaaaaaaaaaaaaaaaaaaaaaaaaaaaaaaaaaaaaaaaaaaaaaaaaa

SEQ ID NO: 17003 - RNA, 1958 nt, Artificial Sequence
  mRNA product Design a-1 (A100) comprising derived and/or modified sequence from LASV(Nig08-04;Clade II)__ADU56611__NP (opt4)
aggagagucccgcagucggcguccagcggcucugcuuguucgugugugugucguugcaggccuuauucaagcuuaccaugagcgccagcaaggaggugaagagcuuccuguggacccagagccugagaagagagcugagcggcuacugcagcaacaucaagcugcagguggugaaggacgcccaggcccugcugcacggccuggacuucagcgaggugagcaacgugcagagacugaugagaaagcagaagagagacgacggcgaccugaagagacugagagaccugaaccaggccgugaacaaccugguggagcugaagagcacccagcagaagagcgugcugagagugggcacccugaccagcgacgaccugcugacccuggccgccgaccuggagaagcugaagagcaaggugaucagaaccgagagaccccugagcagcggcguguacaugggcaaccugagcacccagcagcuggagcagagaaaggcccugcugagcaugaucggcauggugggcggcgcccagggcacccagcccggcagagacggcguggugagagugugggacgugaagaaccccgaccugcugaacaaccaguucggcaccaugcccagccugacccuggccugccugaccaagcagggccagguggaccugaacgacgccgugcuggcccugaccgaccugggccugaucuacaccgccaaguaccccaacagcagcgaccuggacagacugagccagagccaccccauccugaacaugguggacaccaagaagagcagccugaacaucagcggcuacaacuucagccugggcgccgccgugaaggccggcgccugcaugcuggacggcggcaacaugcuggagaccaucaaggugaccccccagaccauggacggcauccugaagagcauccugaaggugaagagaagccugggcauguucgugagcgacacccccggcgagagaaaccccuacgagaacauccuguacaagaucugccugagcggcgacggcuggcccuacaucgccagcagaaccagcaucgugggcagagccugggagaacaccaccguggaccuggagagcgacggcaagccccagaaggugggcaccgccggcagcaacaagagccugcagagcgccggcuuccccaccggccugaccuacagccagcugaugacccugaaggacagcaugaugcagcuggaccccagcgccaagaccuggaucgacaucgagggcagacccgaggaccccguggagaucgcccuguaccagcccaugagcggcugcuacauccacuucuucagagagcccaccgaccugaagcaguucaagcaggacgccaaguacagccacggcaucgacgugaccgaccuguucagcgcccagcccggccugaccagcgccgugaucgaggcccugcccagaaacauggugcugaccugccagggcagcgacgacaucaagaagcugcuggacagccagggcagaagagacaucaagcugaucgacaucagccugaacaaggccgacagcagaagauucgagaacgccgugugggaccagugcaaggaccugugccacaugcacaccggcguggugguggagaagaagaagagaggcggcaaggaggagaucaccccccacugcgcccugauggacugcaucauguucgacgccgccgugagcggcggccugaacauccccauccugagagccgugcugcccagagacaugguguucagaaccagcagccccaagguggugcugugaggacuagucccuguucccagagcccacuuuuuuuucuuuuuuugaaauaaaauagccugucuuucagaucuaaaaaaaaaaaaaaaaaaaaaaaaaaaaaaaaaaaaaaaaaaaaaaaaaaaaaaaaaaaaaaaaaaaaaaaaaaaaaaaaaaaaaaaaaaaaaaaaaaaa

SEQ ID NO: 17004 - RNA, 1961 nt, Artificial Sequence
  mRNA product Design a-1 (A100) comprising derived and/or modified sequence from LASV(GA391;Clade III)__AAA46284__NP (opt4)
aggagagucccgcagucggcguccagcggcucugcuuguucgugugugugucguugcaggccuuauucaagcuuaccaugagcgccagcaaggaggugagaagcugccuguggacccagagccugagaagagagcugagcggcuacugcagcaacaucaagcugcagguggugaaggacgcccaggcccugcugcacggccuggacuucagcgaggugagcaacgugcagagacugaugagaaagcagaagagagacgacggcgaccugaagagacugagagaccugaaccaggccgugaacaaccugguggagcugaagagcacccagcagaagagcgugcugagagugggcacccugagcagcgacgaccugcugauccuggccgccgaccuggagaagcugaagagcaaggugaccagaaccgagagaccccugagcagcggcguguacaugggcaaccugagcagccagcagcuggaccagagaagagcccugcugaacaugaucggcaugaccggcgugagcggcggcggcaagggcgccagcaacggcaucgugagagugugggacgugaagaacgccgagcugcugaacaaccaguucggcaccaugcccagccugacccuggccugccugaccaagcagggccagguggaccugaacgacgccgugcaggcccugaccgaccugggccugaucuacaccgccaaguaccccaacagcagcgaccuggacagacugagccagagccaccccauccugaacaugaucgacaccaagaagagcagccugaacaucagcggcuacaacuucagccugggcgccgccgugaaggccggcgccugcaugcuggacggcggcaacaugcuggagaccaucaaggugagcccccagaccauggacggcauccugaagagcauccugaaggugaagaagagccugggcauguucgugagcgacacccccggcgagagaaaccccuacgagaacauccuguacaagaucugccugagcggcgacggcuggagcuacaucgccagcagaaccagcaucgugggcagagccugggagaacaccgugguggaccuggagcaggacaacaagccccagaagaucggcaacggcggcagcaacaagagccugcagagcgccggcuucgccgccggccugaucuacagccagcugaugacccugaaggacuucaagugcuucaaccugauccccaacgccaagaccuggauggacaucgagggcagacccgaggaccccguggagaucgcccuguaccagcccagcagcggcugcuacgugcacuucuucagagagcccaccgaccugaagcaguucaagcaggacgccaaguacagccacggcagagacgugaccgaccuguucgccgcccagcccggccugaccagcgccgugaucgaggcccugcccagaaacauggugaucaccugccagggcagcgaggacaucagaaagcugcuggagagccagggcagaagagacaucaagcugaucgacaucacccugagcaaggccgacagcagaaaguucgagaacgccgugugggaccaguucaaggaccugugccacaugcacaccggcguggugguggagaagaagaagagaggcggcaaggaggagaucaccccccacugcgcccugauggacugcaucauguucgacgccgccgugagcggcggccuggacgccaaggugcugagaguggugcugcccagagacaugguguucagaaccagcacccccaagguggugcugugaggacuagucccuguucccagagcccacuuuuuuuucuuuuuuugaaauaaaauagccugucuuucagaucuaaaaaaaaaaaaaaaaaaaaaaaaaaaaaaaaaaaaaaaaaaaaaaaaaaaaaaaaaaaaaaaaaaaaaaaaaaaaaaaaaaaaaaaaaaaaaaaaaaaa

SEQ ID NO: 17005 - RNA, 1958 nt, Artificial Sequence
  mRNA product Design a-1 (A100) comprising derived and/or modified sequence from LASV(Nig08-A19;Clade III)__ADU56619__NP (opt4)
aggagagucccgcagucggcguccagcggcucugcuuguucgugugugugucguugcaggccuuauucaagcuuaccaugagcgccagcaaggaggugaagagcuuccuguggacccagagccugagaagagagcugagcggcuacugcagcaacaucaagcugcagguggugaaggacgcccaggcccugcugcacggccuggacuucagcgaggugagcaacgugcagagacugaugagaaagcagaagagagacgacggcgaccugaagagacugagagaccugaaccaggccgugaacaaccugguggagcugaagagcacccagcagaagagcgugcugagagugggcacccugagcagcgacgaccugcuggugcuggccgccgaccuggagaagcugaagagcaagguggugagaaccgagagaccccugagcagcggcaucuacaugggcaaccugagcagccagcagcuggaccagagaaaggcccugcugaacaugaucggcaugaccggcggcaacggcggcagaaacaccaccagcgacggcaucgugagagugugggacgugaagaacgccgagcugcugaacaaccaguucggcaccaugcccagccugacccuggccugccugaccaagcagggccagguggaccugaacgacgccgugcaggcccugaccgaccugggccugaucuacaccgccaaguaccccaacagcagcgaccuggacagacuggcccagagccaccccauccugaacaugaucgacaccaagaagagcagccugaacaucagcggcuacaacuucagccugggcgccgccgugaaggccggcgccugcaugcuggacggcggcaacaugcuggagaccaucaaggugagcccccagaccauggacggcauccugaagagcauccugaaggugaagagaagccugggcauguucaucagcgacacccccggcgagagaaaccccuacgagaacauccuguacaagaucugccugagcggcgacggcuggcccuacaucgccagcagaaccagcaucgugggcagagccugggagaacaccgugguggaccuggagagcgacaacaagccccagaagaccggcaacggcggcagcaacaagagccugcagagcgccggcuucgccgccggccugaccuacagccagcugaugacccugaaggacagcaugcugcagcuggaccccaacgccaagaccuggauggacaucgagggcagacccgaggaccccguggagaucgcccuguaccagcccagcagcggcugcuacauccacuucuucagagagcccaccgaccugaagcaguucaagcaggacgccaaguacagccacggcaucgacgugaccgaccuguucgccgcccagcccggccugaccagcgccgugaucgaggcccugcccagaaacauggugaucaccugccagggcagcgaggacaucagaaagcugcuggagagccagggcagaagagacaucaagcugaucgacaucagccugagcaagguggacagcagaaaguucgagaacgccgugugggaccaguucaaggaccugugccacaugcacaccggcaucgugguggagaagaagaagagaggcggcaaggaggagaucaccccccacugcgcccugauggacugcaucauguucgacgccgccgugagcggcggcguggacgccaaggugcugagagccgugcugcccagagacaugguguucagaaccagcacccccaagguggugcugugaggacuagucccuguucccagagcccacuuuuuuuucuuuuuuugaaauaaaauagccugucuuucagaucuaaaaaaaaaaaaaaaaaaaaaaaaaaaaaaaaaaaaaaaaaaaaaaaaaaaaaaaaaaaaaaaaaaaaaaaaaaaaaaaaaaaaaaaaaaaaaaaaaaaa

SEQ ID NO: 17006 - RNA, 1958 nt, Artificial Sequence
  mRNA product Design a-1 (A100) comprising derived and/or modified sequence from LASV(G1180-SLE-2010;Clade IV)__AIT17169__NP (opt4)
aggagagucccgcagucggcguccagcggcucugcuuguucgugugugugucguugcaggccuuauucaagcuuaccaugagcgccagcaaggagaucaagagcuuccuguggacccagagccugagaagagagcugagcggcuacugcagcaacaucaagcugcagguggugaaggacgcccaggcccugcugcacggccuggacuucagcgaggugagcaacgugcagagacugaugagaaaggagagaagagacgacaacgaccugaagagacugagagaccugaaccaggccgugaacaaccugguggagcugaagagcacccagcagaagagcauccugagagugggcacccugaccagcgacgaccugcugauccuggccgccgaccuggagaagcugaagagcaaggugaucagaaccgagagaccccugagcgccggcguguacaugggcaaccugagcagccagcagcuggaccagagaagagcccugcugagcaugaucggcaugagcagcggcaaccagagagcccaggccggcagagacggcguggugagagugugggacgugaagaacguggagcugcugaacaaccaguucggcaccaugcccagccugacccuggccugccugaccaagcagggccagguggaccugaacgacgccgugcaggcccugaccgaccugggccugaucuacaccgccaaguaccccaacaccagcgaccuggacagacugacccagagccaccccauccugaacaugaucgacaccaagaagagcagccugaacaucagcggcuacaacuucagccugggcgccgccgugaaggccggcgccugcaugcuggacggcggcaacaugcuggagaccaucaaggugagcccccagaccauggacggcauccugaagagcauccugaaggugaagaaggcccugggcauguucaucagcgacacccccggcgagagaaaccccuacgagaacauccuguacaagaucugccugagcggcgacggcuggcccuacaucgccagcagaaccagcaucaccggcagagccugggagaacaccgugguggaccuggagagcgacggcaagccccagaaggccggcagcaacaacagcaacaagagccugcagagcgugggcuucaccgccggccugaccuacagccagcugaugacccugaaggacgccaugcugcagcuggaccccaacgccaagaccuggauggacaucgagggcagacccgaggaccccguggagaucgcccuguaccagcccagcagcggcugcuacauccacuucuucagagagcccaccgaccugaagcaguucaagcaggacgccaaguacagccacggcaucgacgugaccgaccuguucgccgcccagcccggccugaccagcgccgugaucgacgcccugcccagaaacauggugaucaccugccagggcagcgacgacaucagaaagcugcuggagagccagggcagaaaggacaucaagcugaucgacaucgcccugagcaagaccgacagcagaaaguacgagaacgccgugugggaccaguacaaggaccugugccacaugcacaccggcguggugguggagaagaagaagagaggcggcaaggaggagaucaccccccacugcgcccugauggacugcaucauguucgacgccgccgugagcggcggccugaacaccagcgugcugagagccgugcugcccagagacaugguguucagaaccagcacccccagaguggugcugugaggacuagucccuguucccagagcccacuuuuuuuucuuuuuuugaaauaaaauagccugucuuucagaucuaaaaaaaaaaaaaaaaaaaaaaaaaaaaaaaaaaaaaaaaaaaaaaaaaaaaaaaaaaaaaaaaaaaaaaaaaaaaaaaaaaaaaaaaaaaaaaaaaaaa

SEQ ID NO: 17007 - RNA, 1958 nt, Artificial Sequence
  mRNA product Design a-1 (A100) comprising derived and/or modified sequence from LASV(G1442-SLE-2011;Clade IV)__AIT17181__NP (opt4)
aggagagucccgcagucggcguccagcggcucugcuuguucgugugugugucguugcaggccuuauucaagcuuaccaugagcgccagcaaggaggugaagagcuuccuguggacccagagccugagaagagagcugagcggcuacugcagcaacaucaagcugcagguggugaaggacgcccaggcccugcugcacggccuggacuucagcgaggugagcaacgugcagagacugaugagaaagcagagaagagacgacaacgaccugaagagacugagagaccugaaccaggccgugaacaaccugguggagcugaagagcacccagcagaagagcgugcugagagugggcacccugaccagcgacgaccugcuggugcuggccgccgaccuggagaagcugaagagcaaggugaucagaaccgagagaccccugagcgccggcguguacaugggcaaccugagcagccagcagcuggaccagagaagagcccugcugaacaugaucggcaugagcggcggcauccagggcaccagaaccggcagagacggcguggugagagugugggacgugaagaacgccgaccugcugaacaaccaguucggcaccaugcccagccugacccuggccugccugaccaagcagggccagguggaccugaacgacguggugcaggcccugaccgaccugggccugaucuacaccgccaaguaccccaacgccagcgaccuggacagacugacccagagccaccccauccugaacaugaucgacaccaagaagagcagccugaacaucagcggcuacaacuucagccugggcgccgccgugaaggccggcgccugcaugcuggacggcggcaacaugcuggagaccaucaaggugagcccccagaccauggacggcauccugaagagcauccugaaggugaagaagacccugggcauguucaucagcgacacccccggcgagagaaaccccuacgagaacauccuguacaagaucugccugagcggcgacggcuggcccuacaucgccagcagaaccagcaucaccggcagagccugggagaacaccgugguggaccuggagagcgacggcaagccccagaaggccggcagcaacaacagcaacaagagccugcagagcgccggcuucgccgccggccugaccuacagccagcugaugacccugaaggacgccaugcugcagcuggaccccaacgccaagaccuggauggacaucgagggcagacccgaggaccccguggagaucgcccuguaccagcccagcagcggcugcuacauccacuucuucagagagcccaccgaccugaagcaguucaagcaggacgccaaguacagccacggcaucgacgugaccgaccuguucgccgcccagcccggccugaccagcgccgugaucgaggcccugcccagaaacauggugaucaccugccagggcagcgacgacaucaagaagcugcuggagagccagggcagaaaggacaucaagcugaucgacaucgcccugagcaagaccgacagcagaaaguacgagaacgccgugugggaccaguacaaggaccugugccacaugcacaccggcguggugguggagaagaagaagagaggcggcaaggaggagaucaccccccacugcgcccugauggacugcaucauguucgacgccgccgugagcggcggccugaacacccuggugcugagagccgugcugcccagagacaugguguucagaaccagcacccccagaguggugcugugaggacuagucccuguucccagagcccacuuuuuuuucuuuuuuugaaauaaaauagccugucuuucagaucuaaaaaaaaaaaaaaaaaaaaaaaaaaaaaaaaaaaaaaaaaaaaaaaaaaaaaaaaaaaaaaaaaaaaaaaaaaaaaaaaaaaaaaaaaaaaaaaaaaaa

SEQ ID NO: 17008 - RNA, 1958 nt, Artificial Sequence
  mRNA product Design a-1 (A100) comprising derived and/or modified sequence from LASV(G3010-SLE-2013;Clade IV)__AIT17345__NP (opt4)
aggagagucccgcagucggcguccagcggcucugcuuguucgugugugugucguugcaggccuuauucaagcuuaccaugagcgccagcaaggagaucaagagcuuccuguggacccagagccugagaagagagcugagcggcuacugcagcaacaucaagcugcagguggugaaggacgcccaggcccugcugcacggccuggacuucagcgaggugagcaacgugcagagacugaugagaaaggagagaagagacgacaacgaccugaagagacugagagaccugaaccaggccgugaacaaccugguggagcugaagagcacccagcagaagagcauccugagagugggcacccugaccagcgacgaccugcugauccuggccgccgaccuggagaagcugaagagcaaggugaccagaaccgagagaccccugagcgccggcguguacaugggcaaccugagcagccagcagcuggaccagagaagagcccugcugagcaugaucggcaugagcagcggcgugcagggcgccagagccggcagagacggcguggugagagugugggacgugaagaacgccgagcugcugaacaaccaguucggcaccaugcccagccugacccuggccugccugaccaagcagggccagguggaccugaacgacguggugcaggcccugaccgaccugggccugaucuacaccgccaaguaccccaacaccagcgaccuggacagacugacccagagccaccccauccugaacaugaucgacaccaagaagagcagccugaacaucagcggcuacaacuucagccugggcgccgccgugaaggccggcgccugcaugcuggacggcggcaacaugcuggagaccaucaaggugagcccccagaccauggacggcauccugaagagcauccugaaggugaagaaggcccugggcauguucaucagcgagacccccggcgagagaaaccccuacgagaacauccuguacaagaucugccugagcggcgacggcuggcccuacaucgccagcagaaccagcaucaccggcagagccugggagaacaccgugguggaccuggagagcgacggcaagccccagaaggccggcagcaacaacagcaacaagagccugcagagcgccggcuucaccgccggccugaccuacagccagcugaugacccugaaggacgccaugcugcagcuggaccccaacgccaagaccuggauggacaucgagggcagacccgaggaccccguggagguggcccuguaccagcccagcagcggcugcuacauccacuucuucagagagcccaccgaccugaagcaguucaagcaggacgccaaguacagccacggcaucgacgugaccgaccuguucgccgcccagcccggccugaccagcgccgugaucgacgcccugcccagaaacauggugaucaccugccagggcagcgacgacaucaagaagcugcuggagagccagggcagaaaggacaucaagcugaucgacaucgcccugagcaagaccgacagcagaaaguacgagaacgccgugugggaccaguacaaggaccugugccacaugcacaccggcguggugguggagaagaagaagagaggcggcaaggaggagaucaccccccacugcgcccugauggacugcaucauguucgacgccgccgugagcggcggccugaacaccagcgugcugagagccgugcugcccagagacaugguguucagaaccagcacccccagaguggugcugugaggacuagucccuguucccagagcccacuuuuuuuucuuuuuuugaaauaaaauagccugucuuucagaucuaaaaaaaaaaaaaaaaaaaaaaaaaaaaaaaaaaaaaaaaaaaaaaaaaaaaaaaaaaaaaaaaaaaaaaaaaaaaaaaaaaaaaaaaaaaaaaaaaaaa

SEQ ID NO: 17009 - RNA, 1958 nt, Artificial Sequence
  mRNA product Design a-1 (A100) comprising derived and/or modified sequence from LASV(G502-SLE-2009;Clade IV)__AIT17127__NP (opt4)
aggagagucccgcagucggcguccagcggcucugcuuguucgugugugugucguugcaggccuuauucaagcuuaccaugagcgccagcaaggagaucaagagcuuccuguggacccagagccugagaagagagcugagcggcuacugcagcaacaucaagcugcagguggugaaggacgcccaggcccugcugcacggccuggacuucagcgaggugagcaacgugcagagacugaugagaaaggagagaagagacgacaacgaccugaagagacugagagaccugaaccaggccgugaacaaccugguggagcugaagagcacccagcagaagagcauccugagagugggcacccugaccagcgacgaccugcugauccuggccgccgaccuggagaagcugaagagcaaggugaucagaaccgagagaccccugagcgccggcguguacaugggcaaccugagcagccagcagcuggaccagagaagagcccugcugagcaugaucggcaugagcggcggcaaccagggcgugagagccggcaaggacggcguggugagagugugggacgugaagaacgccgagcugcugaacaaccaguucggcaccaugcccagccugacccuggccugccugaccaagcagggccagguggaccugaacgacgccgugcaggcccugaccgaccugggccugaucuacaccgccaaguaccccaacaccagcgaccuggacagacugacccagagccaccccauccugaacaugaucgacaccaagaagagcagccugaacaucagcggcuacaacuucagccugggcgccgccgugaaggccggcgccugcaugcuggacggcggcaacaugcuggagaccaucaaggugagcccccagaccauggacggcauccugaagagcauccugaaggugaagaaggcccugggcauguucaucagcgacacccccggcgagagaaaccccuacgagaacauccuguacaagaucugccugagcggcgacggcuggcccuacaucgccagcagaaccagcaucaccggcagagccugggagaacaccgugguggaccuggagagcgacggcaagccccagaaggccggcagcaacaacagcaacaagagccugcagagcgccggcuucaccgccggccugaccuacagccagcugaugacccugaaggacgccaugcugcagcuggaccccaacaccaagaccuggauggacaucgagggcagacccgaggaccccguggagaucgcccuguaccagcccagcagcggcugcuacauccacuucuucagagagcccaccgaccugaagcaguucaagcaggacgccaaguacagccacggcaucgacgugaccgaccuguucgccgcccagcccggccugaccagcgccgugaucgacgcccugcccagaaacauggugaucaccugccagggcagcgacgacaucagaaagcugcuggagagccagggcagaaaggacaucaagcugaucgacaucgcccugaacaagaccgacagcagaaaguacgagaacgccgugugggaccaguacaaggaccugugccacaugcacaccggcguggugguggagaagaagaagagaggcggcaaggaggagaucaccccccacugcgcccugauggacugcaucauguucgacgccgccgugagcggcggccugaacaccagcgugcugagagccgugcugcccagagacaugguguucagaaccagcacccccagaguggugcugugaggacuagucccuguucccagagcccacuuuuuuuucuuuuuuugaaauaaaauagccugucuuucagaucuaaaaaaaaaaaaaaaaaaaaaaaaaaaaaaaaaaaaaaaaaaaaaaaaaaaaaaaaaaaaaaaaaaaaaaaaaaaaaaaaaaaaaaaaaaaaaaaaaaaa

SEQ ID NO: 17010 - RNA, 1958 nt, Artificial Sequence
  mRNA product Design a-1 (A100) comprising derived and/or modified sequence from LASV(G733-SLE-2010;Clade IV)__AIT17155__NP (opt4)
aggagagucccgcagucggcguccagcggcucugcuuguucgugugugugucguugcaggccuuauucaagcuuaccaugagcgccagcaaggagaucaagagcuuccuguggacccagagccugagaagagagcugagcggcuacugcagcaacaucaagcugcagguggugaaggacgcccaggcccugcugcacggccuggacuucagcgaggugagcaacgugcagagacugaugagaaaggagagaagagacgacaacgaccugaagagacugagagaccugaaccaggccgugaacaaccugguggagcugaagagcacccagcagaagagcgugcugagagugggcacccugaccagcgacgagcugcuggugcuggccgccgaccuggagaagcugaagagcaaggugaucagaaccgagagaccccugagcgccggcguguacaugggcaaccugagcagccagcagcuggaccagagaagagcccugcugagcaugaucggcaugagcggcggcaaccagggcgccagaaccggcagagacggcguggugagagugugggacgugaagaacgccgagcugcugaacaaccaguucggcaccaugcccagccugacccuggccugccugaccaagcagggccagguggaccugaacgacgccgugcaggcccugaccgaccugggccugaucuacaccgccaaguaccccaacaccagcgaccuggacagacugacccagagccaccccauccugaacaugaucgacaccaagaagagcagccugaacaucagcggcuacaacuucagccugggcgccgccgugaaggccggcgccugcaugcuggacggcggcaacaugcuggagaccaucaaggugagcccccagaccauggacggcauccugaagagcauccugaaggugaagaaggcccugggcauguucaucagcgacacccccggcgagagaaaccccuacgagaacauccuguacaagaucugccugagcggcgacggcuggcccuacaucgccagcagaaccagcaucaccggcagagccugggagaacaccgugguggaccuggagagcgacggcaagccccagaaggccggcagcaacaacagcaacaagagccugcagagcgccggcuucaccgccggccugaccuacagccagcugaugacccugaaggacgccaugcugcagcuggaccccaacgccaagaccuggauggacaucgagggcagacccgaggaccccguggagaucgcccuguaccagcccagcagcggcugcuacauccacuucuucagagagcccaccgaccugaagcaguucaagcaggacgccaaguacagccacggcaucgacgugaccgaccuguucgccgcccagcccggccugaccagcgccgugaucgacgcccugcccagaaacauggugaucaccugccagggcagcgacgacaucagaaagcugcuggagagccagggcagaaaggacaucaagcugaucgacaucgcccugagcaagaucgacagcagaaaguacgagaacgccgugugggaccaguacaaggaccugugccacaugcacaccggcguggugguggagaagaagaagagaggcggcaaggaggagaucaccccccacugcgcccugauggacugcaucauguucgacgccgccgugagcggcggccugaacagccuggugcugagagccgugcugcccagagacaugguguucagaaccagcacccccagaguggugcugugaggacuagucccuguucccagagcccacuuuuuuuucuuuuuuugaaauaaaauagccugucuuucagaucuaaaaaaaaaaaaaaaaaaaaaaaaaaaaaaaaaaaaaaaaaaaaaaaaaaaaaaaaaaaaaaaaaaaaaaaaaaaaaaaaaaaaaaaaaaaaaaaaaaaa

SEQ ID NO: 17011 - RNA, 1958 nt, Artificial Sequence
  mRNA product Design a-1 (A100) comprising derived and/or modified sequence from MOPV/LASV reassortant(IGS-1;Clade IV)__AFY05578__NP (opt4)
aggagagucccgcagucggcguccagcggcucugcuuguucgugugugugucguugcaggccuuauucaagcuuaccaugagcgccagcaaggagaucaagagcuuccuguggacccagagccugagaagagagcugagcggcuacugcagcaacaucaagcugcagguggugaaggacgcccaggcccugcugcacggccuggacuucagcgaggugagcaacgugcagagacugaugagaaaggagagaagagacgacaacgaccugaagagacugagagaccugaaccaggccgugaacaaccugguggagcugaagagcacccagcagaagagcauccugagagugggcacccugaccagcgacgaccugcugauccuggccgccgaccuggagaagcugagaagcaaggugaucagaaccgagagaccccugagcgccggcguguacaugggcaaccugagcagccagcagcuggaccagagaagagcccugcugaacaugaucggcaugagcggcggcaaccagggcgccagagccggcagagacggcguggugagagugugggacgugaagaacgccgagcugcugagcaaccaguucggcaccaugcccagccugacccuggccugccugaccaagcagggccagguggaccugaacgacgccgugcaggcccugaccgaccugggccugaucuacaccgccaaguaccccaacaccagcgaccuggacagacugacccagagccaccccauccugaacaugaucgacaccaagaagagcagccugaacaucagcggcuacaacuucagccugggcgccgccgugaaggccggcgccugcaugcuggacggcggcaacaugcuggagaccaucaaggugagcccccagaccauggacggcauccugaagagcauccugaaggugaagaaggcccugggcauguucaucagcgacacccccggcgagagaaaccccuacgagaacauccuguacaagaucugccugagcggcgacggcuggcccuacaucgccagcagaaccagcaucaccggcagagccugggagaacaccgugguggaccuggagagcgacggcaagccccagaaggccgacagcaacaacagcagcaagagccugcagagcgccggcuucaccgccggccugaccuacagccagcugaugacccugaaggacgccaugcugcagcuggaccccaacgccaagaccuggauggacaucgagggcagacccgaggaccccguggagaucgcccuguaccagcccagcagcggcugcuacauccacuucuucagagagcccaccgaccugaagcaguucaagcaggacgccaaguacagccacggcaucgacgugaccgaccuguucgccacccagcccggccugaccagcgccgugaucgacgcccugcccagaaacauggugaucaccugccagggcagcgacgacaucagaaagcugcuggagagccagggcagaaaggacaucaagcugaucgacaucgaccugagcaagaccgacagcagaaaguacgagaacgccgugugggaccaguacaaggaccugugccacaugcacaccggcguggugguggagaagaagaagagaggcggcaaggaggagaucaccccccacugcgcccugauggacugcaucauguucgacgccgccgugagcggcggccugaacaccagcgugcugagagccgugcugcccagagacaugguguucagaaccagcacccccagaguggugcugugaggacuagucccuguucccagagcccacuuuuuuuucuuuuuuugaaauaaaauagccugucuuucagaucuaaaaaaaaaaaaaaaaaaaaaaaaaaaaaaaaaaaaaaaaaaaaaaaaaaaaaaaaaaaaaaaaaaaaaaaaaaaaaaaaaaaaaaaaaaaaaaaaaaaa

SEQ ID NO: 17012 - RNA, 1958 nt, Artificial Sequence
  mRNA product Design a-1 (A100) comprising derived and/or modified sequence from LASV(LM765-SLE-2012;Clade IV)__AIT17815__NP (opt4)
aggagagucccgcagucggcguccagcggcucugcuuguucgugugugugucguugcaggccuuauucaagcuuaccaugagcgccagcaaggagaucaagagcuuccuguggacccagagccugagaagagagcugagcggcuacugcagcaacaucaagcugcagguggugaaggacgcccaggcccugcugcacggccuggacuucagcgaggugagcaacgugcagagacugaugagaaaggagagaagagacgacaacgaccugaagagacugagagaccugaaccaggccgugaacaaccugguggagcugaagagcacccagcagaagagcauccugagagugggcacccugaccagcgacgaccugcugauccuggccgccgaccuggagaagcugaagagcaaggugaccagaaccgagagaccccugagcgccggcguguacaugggcaaccugagcagccagcagcuggaccagagaagagcccugcuggacaugaucggcaugagcggcagcaaccagggcgccagagccggcagagacggcguggugagagugugggacgugaagaacgccgagcugcugaacaaccaguucggcaccaugcccagccugacccuggccugccugaccaagcagggccagguggaccugaacgacgccgugcaggcccugaccgaccugggccugaucuacaccgccaaguaccccaacaccagcgaccuggacagacugacccagagccaccccauccugaacaugaucgacaccaagaagagcagccugaacaucagcggcuacaacuucagccugggcgccgccgugaaggccggcgccugcaugcuggacggcggcaacaugcuggagaccaucaaggugagcccccagaccauggacggcauccugaagagcauccugaaggugaagaaggcccugggcauguucaucagcgacgcccccggcgagagaaaccccuacgagaacauccuguacaagaucugccugagcggcgacggcuggcccuacaucgccagcagaaccagcaucaccggcagagccugggagaacaccgugguggaccuggagagcgacggcaagccccagaaggccggcagcaacggcagcaacaagagccugcagagcgccggcuucaccgccggccugaccuacagccagcugaugacccugaaggacgccaugcugcagcuggaccccaacgccaagaccuggauggacaucgagggcagacccgaggaccccguggagaucgcccuguaccagcccagcagcggcugcuacauccacuucuucagagagcccaccgaccugaagcaguucaagcaggacgccaaguacagccacggcaucgacgugaccgaccuguucgccgcccagcccggccugaccagcgccgugaucgacgcccugcccagaaacauggugaucaccugccagggcagcgacgacaucagaaagcuguucgagagccagggcagaaaggacaucaagcugaucgacaucgcccugagcaagaccgacagcagaaaguacgagaacgccgugugggaccaguacaaggaccugugccacaugcacaccggcaucgugguggagaagaagaagagaggcggcaaggaggagaucaccccccacugcgcccugauggacugcaucauguucgacgccgccgugagcggcggccugaacaccagcgugcugagagccgugcugcccagagacaugguguucagaaccagcacccccagaguggugcugugaggacuagucccuguucccagagcccacuuuuuuuucuuuuuuugaaauaaaauagccugucuuucagaucuaaaaaaaaaaaaaaaaaaaaaaaaaaaaaaaaaaaaaaaaaaaaaaaaaaaaaaaaaaaaaaaaaaaaaaaaaaaaaaaaaaaaaaaaaaaaaaaaaaaa

SEQ ID NO: 17013 - RNA, 1958 nt, Artificial Sequence
  mRNA product Design a-1 (A100) comprising derived and/or modified sequence from LASV(LM776-SLE-2012;Clade IV)__AIT17825__NP (opt4)
aggagagucccgcagucggcguccagcggcucugcuuguucgugugugugucguugcaggccuuauucaagcuuaccaugagcgccagcaaggagaucaagagcuuccuguggacccagagccugagaagagagcugagcagcuacugcagcaacaucaagcugcagguggugaaggacgcccaggcccugcugcacggccuggacuucagcgaggugagcaacgugcagagacugaugagaaaggagagaagagacgacaacgaccugaagagacugagagaccugaaccaggccgugaacaaccugguggagcugaagagcacccagcagaagagcauccugagagugggcacccugaccagcgacgaccugcugauccuggccgccgaccuggagaagcugaagagcaaggugaccagaaccgagagaccccugagcgccggcguguacaugggcaaccugagcagccagcagcuggaccagagaagagcccugcugagcaugaucggcaugagcggcagcaaccagggcgccagagccggcagagacggcguggugagagugugggacgugaagaacgccgagcugcugaacaaccaguucggcaccaugcccagccugacccuggccugccugaccaagcagggccagguggaccugaacgacgccgugcaggcccugaccgaccugggccugaucuacaccgccaaguaccccaacaccagcgaccuggacagacugacccagagccaccccauccugaacaugaucgacaccaagaagagcagccugaacaucagcggcuacaacuucagccugggcgccgccgugaaggccggcgccugcaugcuggacggcggcaacaugcuggagaccaucaaggugagcccccagaccauggacggcauccugaagagcauccugaaggugaagaaggcccugggcauguucaucagcgacacccccggcgagagaaaccccuacgagaacauccuguacaagaucugccugagcggcgacggcuggcccuacaucgccagcagaaccagcaucaccggcagagccugggagaacaccgugguggaccuggagagcgacggcaagccccagaaggccggcagcaacaacagcaacaagagccugcagagcgccggcuucaccgccggccugaccuacagccagcugaugacccugaaggacgccaugcugcagcuggaccccaacgccaagaccuggauggacaucgagggcagacccgaggaccccguggagguggcccuguaccagcccagcagcggcugcuacauccacuucuucagagagcccaccgaccugaagcaguucaagcaggacgccaaguacagccacggcaucgacgugaccgaccuguucgccgcccagcccggccugaccagcgccgugaucgacgcccugcccagaaacauggugaucaccugccagggcagcgacgacaucagaaagcugcuggagagccagggcagaaaggacaucaagcugaucgacaucgcccugagcaagaccgacagcagaaaguacgagaacgccgugugggaccaguacaaggaccugugccacaugcacaccggcguggugguggagaagaagaagagaggcggcaaggaggagaucaccccccacugcgcccugauggacugcaucauguucgacgccgccgugagcggcggccugaacaccagcgugcugagagccgugcugcccagagacaugguguucagaaccagcacccccagaguggugcugugaggacuagucccuguucccagagcccacuuuuuuuucuuuuuuugaaauaaaauagccugucuuucagaucuaaaaaaaaaaaaaaaaaaaaaaaaaaaaaaaaaaaaaaaaaaaaaaaaaaaaaaaaaaaaaaaaaaaaaaaaaaaaaaaaaaaaaaaaaaaaaaaaaaaa

SEQ ID NO: 17014 - RNA, 1958 nt, Artificial Sequence
  mRNA product Design a-1 (A100) comprising derived and/or modified sequence from LASV(Mad39;Clade IV)__ANH09723__NP (opt4)
aggagagucccgcagucggcguccagcggcucugcuuguucgugugugugucguugcaggccuuauucaagcuuaccaugagcgccagcaaggagaucaagagcuuccuguggacccagagccugagaagagagcugagcggcuacugcagcaacaucaagcugcagguggugaaggacgcccaggcccugcugcacggccuggacuucagcgaggugagcaacgugcagagacugaugagaaagcagagaagagacgacaacgaccugaagagacugagagaccugaaccaggccgugaacaaccugguggagcugaagagcacccagcagaagagcgugcugagagugggcacccugaccagcgacgaccugcugacccuggccgccgaccuggagaagcugaagagcaaggugaccagaaccgagagaccccugaccgccggcguguacaugggcaaccugagcagccagcagcuggaccagagaagagcccugcugaacaugaucggcaugagcggcggcaaccagggcgccagaaccggcagagacggcguggugagagugugggacgugaagaacgccgagcugcugaacaaccaguucggcaccaugcccagccugacccuggccugccugaccaagcagggccagguggaccugaacgacguggugcaggcccugaccgaccugggccugaucuacaccgccaaguaccccaacaccagcgaccuggacagacugacccagagccaccccauccugaacaugaucgacaccaacaagagcagccugaacaucagcggcuacaacuucagccugggcgccgccgugaaggccggcgccugcaugcuggacggcggcaacaugcuggagaccaucaaggugagcccccagaccauggacggcauccugaagagcauccugaaggugaagaagagccugggcauguucaucagcgacacccccggcgagagaaaccccuacgagaacauccuguacaagaucugccugagcggcgacggcuggcccuacaucgccagcagaaccagcaucaccggcagagccugggagaacaccgugguggaccuggagagcggcggcaagccccagaaggccggcagcaacaacagcaacaagagccugcagagcgccggcuucgccgccggccugaccuacagccagcugaugacccugaaggacgccaugcugcagcuggaccccaacgccaagaccuggauggacaucgagggcagacccgaggaccccguggagaucgcccuguaccagcccaucagcggcugcuacauccacuucuucagagagcccaccgaccugaagcaguucaagcaggacgccaaguacagccacggcaucgacgugaccgaccuguucgccgcccagcccggccugaccagcgccgugaucgaggcccugcccagaaacauggugaucaccugccagggcagcgacgacaucagaaagcuguucgagagccagggcagaaaggacaucaagcugaucgacaucgcccugagcaagaccgacagcagaaaguacgagaacgccgugugggaccaguacaaggaccugugccacaugcacaccggcguggugguggagaagaagaagaagggcggcaaggaggagaucaccccccacugcgcccugauggacugcaucauguucgacgccgccgugagcggcggccugaacacccuggugcugagagccgugcugcccagagacaugguguucagaaccagcacccccaagguggugcugugaggacuagucccuguucccagagcccacuuuuuuuucuuuuuuugaaauaaaauagccugucuuucagaucuaaaaaaaaaaaaaaaaaaaaaaaaaaaaaaaaaaaaaaaaaaaaaaaaaaaaaaaaaaaaaaaaaaaaaaaaaaaaaaaaaaaaaaaaaaaaaaaaaaaa

SEQ ID NO: 17015 - RNA, 1958 nt, Artificial Sequence
  mRNA product Design a-1 (A100) comprising derived and/or modified sequence from LASV(Z0947-SLE-2011;Clade IV)__AIT17841__NP (opt4)
aggagagucccgcagucggcguccagcggcucugcuuguucgugugugugucguugcaggccuuauucaagcuuaccaugagcgccagcaaggagaucaagagcuuccuguggacccagagccugagaagagagcugagcggcuacugcagcaacaucaagcugcagguggugaaggacgcccaggcccugcugcacggccuggacuucagcgaggugagcaacgugcagagacugaugagaaaggagagaagagacgacaacgaccugaagagacugagagaccugaaccaggccgugaacaaccugguggagcugaagagcacccagcagaagagcauccugagagugggcacccugaccagcgacgaccugcugauccuggccgccgaccuggagaagcugaagagcaaggugaccagaaccgagagaccccugagcgccggcguguacaugggcaaccugagcagccagcagcuggaccagagaagagcccugcugaacaugaucggcaugagcggcagcaaccagggcgccagaaccggcagagacggcguggugagagugugggacgugaagaacgccgagcugcugaacaaccaguucggcaccaugcccagccugacccuggccugccugaccaagcagggccagguggaccugaacgacgccgugcaggcccugaccgaccugggccugaucuacaccgccaaguaccccaacaccagcgaccuggacagacugacccagagccaccccauccugaacaugaucgacaccaagaagagcagccugaacaucagcggcuacaacuucagccugggcgccgccgugaaggccggcgccugcaugcuggacggcggcaacaugcuggagaccaucaaggugagcccccagaccauggacggcauccugaagagcauccugaaggugaagaaggcccugggcauguucaucagcgacgcccccggcgagagaaaccccuacgagaacauccuguacaagaucugccugagcggcgacggcuggcccuacaucgccagcagaaccagcaucaccggcagagccugggagaacaccgugguggaccuggagagcgacggcaagccccagaaggccggcagcaacggcagcaacaagagccugcagagcgccggcuucaccgccggccugaccuacagccagcugaugacccugaaggacgccaugcugcagcuggaccccaacgccaagaccuggauggacaucgagggcagacccgaggaccccguggagaucgcccuguaccagcccagcagcggcugcuacauccacuucuucagagagcccaccgaccugaagcaguucaagcaggacgccaaguacagccacggcaucgacgugaccgaccuguucgccgcccagcccggccugaccagcgccgugaucgacgcccugcccagaaacauggugaucaccugccagggcagcgacgacaucagaaagcuguucgagagccagggcagaaaggacaucaagcugaucgacaucgcccugagcaagaccgacagcagaaaguacgagaacgccgugugggaccaguacaaggaccugugccacaugcacaccggcaucgugguggagaagaagaagagaggcggcaaggaggagaucaccccccacugcgcccugauggacugcaucauguucgacgccgccgugagcggcggccugaacaccagcgugcugagagccgugcugcccagagacaugguguucagaaccagcacccccagaguggugcugugaggacuagucccuguucccagagcccacuuuuuuuucuuuuuuugaaauaaaauagccugucuuucagaucuaaaaaaaaaaaaaaaaaaaaaaaaaaaaaaaaaaaaaaaaaaaaaaaaaaaaaaaaaaaaaaaaaaaaaaaaaaaaaaaaaaaaaaaaaaaaaaaaaaaa

SEQ ID NO: 17016 - RNA, 1958 nt, Artificial Sequence
  mRNA product Design a-1 (A100) comprising derived and/or modified sequence from LASV(Josiah;Clade IV)__NP_694869__NP (opt5)
aggagagucccgcagucggcguccagcggcucugcuuguucgugugugugucguugcaggccuuauucaagcuuaccaugagcgccuccaaggagaucaaaucuuuccuguggacccagagccucagacgggaacuguccggcuacugcucuaacauuaagcugcaaguggucaaagacgcucaggcccugcuccacgggcuggauuuuagcgagguuuccaaugugcagcgccuuaugagaaaggaacggcgcgacgauaacgaccugaaaagacuccgggaucugaaucaggcggugaacaaucuggucgagcucaagucuacacaacaaaagagcauccugcgcgugggaacgcuuaccuccgacgaucugcucauucuggcugccgaccuugaaaaacuuaagagcaaaguuaucagaacagagcggccccucucugccggcguguauauggggaaccuguccagccagcagcuggaucagcgcagagcucuccugaauaugauuggaaugucuggcgggaaccagggagcccgggcuggccgcgacggcgucgugagaguuugggaugugaagaaugccgagcuucugaacaaucaguucgggaccaugccuucccucacacuggcgugucuuaccaaacagggacaagucgaccugaacgaugccgugcaggcucucacagaccugggccugaucuacaccgccaaguauccgaauacgagcgaccucgaucggcugacccagucucaucccauccuuaacaugauugacacaaagaaauccagccugaauaucuccggguacaacuuuucucucggagcugccgugaaggcgggcgccugcaugcuggaugggggaaacaugcuugaaaccauuaaagucagcccucaaacaauggacggcauccugaaguccauucucaaaguuaagaaagcucugggcauguucaucagcgauacccccggggagcgcaauccuuaugaaaacauucuguacaagaucugucucucuggagacggcuggcccuauaucgccuccagaacgagcauuacagggcgggcuugggagaauaccgugguggaucuggagucugacggaaagccucagaaagccgauagcaacaauuccucuaagagccuucaguccgccggcuuuacagcugggcugaccuacagccagcucaugacccugaaagacgcgaugcugcaacuugauccgaacgccaagacauggauggacaucgaaggaagacccgaggacccugucgaaauugcucucuaccagcccucuuccggcugcuauauccacuucuuucgcgagccuacggaucugaaacaguucaagcaggacgccaaguacagccauggcauugaugugaccgaccuguuugccacacaacccgggcucaccucugcuguuaucgaugcccugccgcggaauauggugaucacaugucagggauccgacgauauuagaaaacuucuggaaagccagggccgcaaggacaucaaacucauugauaucgcgcuguccaagaccgacucucggaaauaugagaacgcugucugggaucaguacaaggaccugugccacaugcauacgggggugguuguggagaagaaaaagagaggaggcaaagaagagauuacaccucacugugcccuuauggauugcaucauguucgacgccgcugucagcgggggccucaauaccuccgugcugcgcgccguccugccccgggacaugguguuuagaaccucuacaccucgcguugugcucugaggacuagucccuguucccagagcccacuuuuuuuucuuuuuuugaaauaaaauagccugucuuucagaucuaaaaaaaaaaaaaaaaaaaaaaaaaaaaaaaaaaaaaaaaaaaaaaaaaaaaaaaaaaaaaaaaaaaaaaaaaaaaaaaaaaaaaaaaaaaaaaaaaaaa

SEQ ID NO: 17017 - RNA, 1958 nt, Artificial Sequence
  mRNA product Design a-1 (A100) comprising derived and/or modified sequence from LASV(LP;Clade I)__AAF86702__NP (opt5)
aggagagucccgcagucggcguccagcggcucugcuuguucgugugugugucguugcaggccuuauucaagcuuaccaugagcaacuccaaggagaucaaaucuuuccuguggacccagagccucagacgggaacuguccggcuacugcucuaauauuaagcuccaaguggucaaagacgcccaggcucugcuccacgggcuggauuuuagcgagguuuccaacgugcagcgccuuaugagaaagcagaaacgggacgaugccgaccugaagcgccucagagaucugaaucaagcggugaacaaucuggucgaacucaagucuacacagcagaaaaacgugcugcggguuggaacgcuuagcuccgacgaucugaucacccucgcugccgaccuggagaaacuuaaaagcaaggugauucgcacagaaagaccccugucuuccggcgucuauauggggaaucucagcucucagcaacuggaucagcggcgcgcccugcucuccaugaucggaaugagcggcgggccucagggaaacagaaccggcggcgacggggugguucgggugugggaugucaaaaaugcugagcugcuuaacaaucaguucggaacaaugccgucucugacccucgccugucugacaaagcaaggccagguggaccuuaacgaugcugugcaggcccugaccgaccucgggcugauuuacacggcgaaguaucccaauuccagcgaccuggauaugcucacccaaucccauccuauccugggaauggucgacacaaagaagucuagccuuaacaucuccggcuacaauuuuagccugggggccgcuguuaaagccggagcuugcaugcucgauggcggcaacaugcuggagaccauuaaggugucuccccagacaauggacgggauccuuaaauccauucugaaggugaaacgcagccucggaauguucaucucugauaccccuggcgaaagaaaccccuaugagaauauucuguacaagaucugucugagcggggaaggauggccuuauauugccucccggacgucuaucacaggccgcgcgugggagaacacccucgucgaccuggagagcgauaauaagccgcccaaacuuaacuccgccgggagcaauaagucucugcaggcugccggacucaacgcuggccugacauacucccagcugaugacccuuaaagacugcaugcuccaacuggauccuagcucuaagaccuggaucgacauugaaggcagacccgaggauccuguggaaaucgcccuguuucagcccuccagcggguguuacauucacuucuuucgggagccgacagaccucaaacaguucaagcaggacgccaaguauucccauggaaucgauguuacggaccuguuuucuacccaaccuggccuuacaagcgcugugauugaagcgcugcccagaaauaugguccuuaccugccagggguccgaugacaucaaaaagcugcuggagucucagggacgccgggauaucaaacuuauugacaucagccucuccaaggccgauagcagaaaauucgagaacgcugugugggaccaguacaaggaucugugucacaugcauacaggcguuguggucgaaaagaaaaagcgcgggggcaaagaggaaauuaccccucacugcgcccugcucgacuguaucauguuugaugccgcuacgacaggaucucugaauauuaccacccuucgggccgugcugcccagagacauggucuuccgcacauccacccccaaggugguucucugaggacuagucccuguucccagagcccacuuuuuuuucuuuuuuugaaauaaaauagccugucuuucagaucuaaaaaaaaaaaaaaaaaaaaaaaaaaaaaaaaaaaaaaaaaaaaaaaaaaaaaaaaaaaaaaaaaaaaaaaaaaaaaaaaaaaaaaaaaaaaaaaaaaaa

SEQ ID NO: 17018 - RNA, 1958 nt, Artificial Sequence
  mRNA product Design a-1 (A100) comprising derived and/or modified sequence from LASV(803213;Clade II)__AAF86704__NP (opt5)
aggagagucccgcagucggcguccagcggcucugcuuguucgugugugugucguugcaggccuuauucaagcuuaccaugagcgccuccaaggaggugaaaucuuuccuguggacccagagccucagacgggaacuguccggcuacugcucuaacaucaaacuucaagucguuaaggacgcucaggcccugcuccacgggcuggauuuuagcgaggugaauaacgugcagcgccuuaugagaaagcagaaacgggacgauggagaccugaagcgccucagagaucugaaucaagcggucaacaaucugguggaacucaaguccacacagcagaaaucuauucugcggguuggcacgcuuaccagcgacgaucugcucacacuggcugccgaccuugagaagcugaaauccaaggugauccgcaccgaaagaccccucagcucuggggucuauaugggaaaccuguccacacagcaacuggagcagcggcgcgcccuccugaauaugauuggcauggugggaggagcucagggcacccagccuggcagagaugggguugugcgggucugggacgugaaaaacccggaucuucugaauaaccaauucggaacaaugcccagccucacccuggccugucuuacgaagcagggccagguggaccugaaugaugcuguccucgcccugaccgaccuggggcucaucuacacagcgaaguauccuaacucuuccgaccuggaucgccuuagccaaucucaucccauucugaauaugguugacaccaaaaaguccagccucaacaucuccggauacaauuuuucucugggcgccgcugugaaagccggggcuugcaugcuugauggaggcaacaugcuggagacaaucaaggugaccccucagacgauggacggcauucucaaaagcauccugaaggucaaaagaucccuggggauguucgugagcgauacacccggagaacggaacccuuaugagaauauucucuacaagaucugucugucuggcgacggguggccguauauugccucccgcaccagcaucguugggagagcgugggaaaacacaaccguggaucuugagucugacggcaagccccagaaagucgggaccgccggaagcaauaagucccugcagucugcuggcuuuccuacaggccucacguacagccaacugaugacccugaaagauuccaugaugcagcuugaccccagcgccaagacauggauugauaucgaggggcggccugaagaccccguggagaucgcucucuaccagccgaugucuggaugcuauauucacuucuuuagagaaccuaccgaccugaaacaguucaagcaagaugccaaguacucccauggcaucgacguugccgaucuguuucccgcucagccugggcucacaagcgcggugauugaggcccugccccgcaacaugguccuuaccugucagggaucugacgauaucaaaaagcugcucgacucccagggccggagagauauuaaacugaucgacaucagccuguccaagguggauucucgcaaauucgaaaaugcugucugggaccaaugcaaggaucuuugucacaugcauacgggggugguuguggagaagaaaaagcggggcggaaaagaggaaauuacaccccacugcgcccucauggacuguaucauguuugaugccgcugucagcggcgggcugaacauuccugugcugagagccguucucccgcgcgacaugguguuccggaccuccucucccaaggucgugcugugaggacuagucccuguucccagagcccacuuuuuuuucuuuuuuugaaauaaaauagccugucuuucagaucuaaaaaaaaaaaaaaaaaaaaaaaaaaaaaaaaaaaaaaaaaaaaaaaaaaaaaaaaaaaaaaaaaaaaaaaaaaaaaaaaaaaaaaaaaaaaaaaaaaaa

SEQ ID NO: 17019 - RNA, 1961 nt, Artificial Sequence
  mRNA product Design a-1 (A100) comprising derived and/or modified sequence from LASV(GA391;Clade III)__CAA36646__NP (opt5)
aggagagucccgcagucggcguccagcggcucugcuuguucgugugugugucguugcaggccuuauucaagcuuaccaugagcgccuccaaggaggugagaucuuuccuguggacccagagccuccggcgcgaacuguccggcuacugcucuaacaucaaacuucaagucguuaaggacgcucaggcccugcuccacgggcuggauuuuagcgagguguccaaugugcagagacuuaugcggaaacagaagcgcgacgauggagaccugaaaagacuccgggaucugaaccaagcggucaauaaccugguggaacucaagucuacacagcagaaaagcguucugcgcgugggcacgcuuuccagcgacgaucugcucauucuggcugccgaccuugagaaacugaagucuaaagucaccagaacagaacggccccucuccagcgggguguauaugggaaaucugucuucccagcaacuggaucagcgcagagcccuccugaacaugaucggcaugaccgggguuagcggaggcggcaagggggcuucugacggaauugugcgggucugggaugugaaaaaugccgagcuucugaacaaucaguucggcacaaugccuucccucacccuggcuugucuuacaaagcaggggcaaguggaccugaacgaugccguccaggcgcucaccgaccugggacugaucuacacggccaaguauccgaauagcuccgaccucgaucgccugucucagagccaucccauucuuaacaugaucgacaccaaaaaguccagccugaauaucucuggcuacaacuuuucccucggggcugccguuaaagcuggagccugcaugcuggauggcggcaauaugcuugagacaauuaaggugagcccucaaaccauggacgggauccugaaaucuauucucaaggugaaaaagagccugggaauguucgucuccgauacacccggcgaaagaaacccuuaugagaacauccuguacaagauuugucucucuggggacggauggcccuauaucgcgagccggaccuccauugugggccgcgccugggaaaauacgguuguggaucuggagcaggacaacaaaccucagaagaucgggaauggaggcagcaacaaaucucuucaguccgcuggcuuugccgcugggcugacauacagccaacucaugacccugaaggauuucaaaugcuuuaaucugaucccgaacgccaagacauggauggacauugagggaagacccgaagauccugucgagaucgcccuuuaccagcccucuuccggcuguuaugugcacuucuuucgggaaccuaccgaccucaagcaguucaaacaggacgcuaaguacagccaugggauugauguuaccgaccuguuugcggcccaacccggacugacauccgcugugaucgaggcccucccgagaaauauggucauuacgugccagggcucugaagauauccgcaaacugcuugagagccaggggcggagagacaucaagcugauugauaucacccucuccaaagccgacucucgcaaguucgagaacgcugugugggaucaguuuaaggaccugugucacaugcauacaggcgucgugguugaaaagaagaaacggggaggcaaggaggaaauuaccccucacugcgcccugauggauuguaucauguucgacgcggcugugagcgggggacuugaugccaaaguccucagagugguucugccccgcgacaugguguuccggacauccaccccuaaggucgugcugugaggacuagucccuguucccagagcccacuuuuuuuucuuuuuuugaaauaaaauagccugucuuucagaucuaaaaaaaaaaaaaaaaaaaaaaaaaaaaaaaaaaaaaaaaaaaaaaaaaaaaaaaaaaaaaaaaaaaaaaaaaaaaaaaaaaaaaaaaaaaaaaaaaaaa

SEQ ID NO: 17020 - RNA, 1958 nt, Artificial Sequence
  mRNA product Design a-1 (A100) comprising derived and/or modified sequence from LASV(AV;Clade V)__CCA30315__NP (opt5)
aggagagucccgcagucggcguccagcggcucugcuuguucgugugugugucguugcaggccuuauucaagcuuaccaugagcgccuccaaggaggugaaaucuuuccuguggacccagagccucagacgggaacuguccggcuacugcucuaacaucaaacuucaagucguuaaggacgcucaggcccugcuccacgggcuggauuuuagcgagguguccaaugugcagcgccuuaugagaaagcagcggcgcgacgauucugaccugaaaagacuccgggaucugaaccaagcggucaauaaccugguggaacucaagagcacacagcagaaguccguucugcgcgugggaacgcuuagcucugacgaucugcucacccuggcugccgaccuugagaaacugaaguccaaagucacaagaaccgaacggccccucagcucuggcguguauauggggaaucuguccagccagcaacuggaucagcgcagagcccuccugaaccuuauuggaaugacaaauggcucucaggggucccaggcuggacgggacggcguugugcgcgucugggaugugaagaacgccgagcugcucaauaaccaauucggcaccaugccuagccugacacuugcuugucugaccaaacagggacagguggaccucaaugaugucguucaagcccugacggaccuggggcucaucuacaccgcgaaguauccgaacacauccgaccuggauagacuuacccagucucaucccauucugaauaugaucgacacaaagaaaagcucccucaacauuagcggcuacaauuuuucucugggggccgcugugaaggccggagcuugcaugcuugauggcgggaacaugcuggagaccaucaaaguguccccucagagcauggacggaauccucaagucuauucugaaagucaagcgggcccugggcauguucgugagcgauacgcccggcgaacgcaacccuuaugagaauauccucuacaaaauuugucuguccggggacggauggcccuauaucgcgucuagaacaagcauuguuggccgggccugggaaaacaccguggucgaucuugagacagacgggaagccucagaagaucggauccggcaauagcaacaaaucucugcaauccgcuggguuuagcgccggacucaccuacucucagcugaugacccugaaggaugcuaugcuucagcucgacccgaaugccaaaacauggauggauauugagggcagacccgaagacccuguggagguugcccuguaccagcccaucuccggcugcuauauccacuucuuucgcgaaccuacggaccugaagcaauucaaacaggaugcuaaguacagccaugggauugacaucgcggaucucuuugccgcucagcccggacugaccuccgccgugauugaggcccuuccgcggaacauggucaucacaugucagggcucugaagacauuaagaaacugcucgagagccaagggagaaaggauaucaaacugaucgacauugcucuguccaagaucgauucucgcaaauucgagaaugccgugugggaccaguauaaggaucuuugccacaugcauaccggagucgugguugaaaagaaaaagcggggcgggaaagaggaaauuacaccucacugugcgcucauggacugcaucauguuugaugcugccgugagcggcggacugaacacccugguccucagagccgugcugccccgcgacaugguuuuccggacguccacaccuagagugguccuuugaggacuagucccuguucccagagcccacuuuuuuuucuuuuuuugaaauaaaauagccugucuuucagaucuaaaaaaaaaaaaaaaaaaaaaaaaaaaaaaaaaaaaaaaaaaaaaaaaaaaaaaaaaaaaaaaaaaaaaaaaaaaaaaaaaaaaaaaaaaaaaaaaaaaa

SEQ ID NO: 17021 - RNA, 1958 nt, Artificial Sequence
  mRNA product Design a-1 (A100) comprising derived and/or modified sequence from LASV(Togo/2016/7082;Clade VI)__AMR44578__NP (opt5)
aggagagucccgcagucggcguccagcggcucugcuuguucgugugugugucguugcaggccuuauucaagcuuaccaugagcaacuccaaggaggugaaaucuuuccuguggacccagagccucagacgggaacuguccggcuacugcucuaauaucaaacuucaagucguuaaagacgcccaggcucugcuccacgggcuggauuuuagcgagguguccaacgugcagcgccuuaugagaaagcagaaacgggacgauggagaccugaagcgccucagagaucugaaucaagccgucaacaaucugguggaacucaagucuguucagcagaaaagcauucugcgggugggcacacuuacguccgacgaucugcucacccuggcggcugaccuugagaagcugaaaagcaaggucacacgcaccgaaagaccccucucuuccgggguguauaugggaaaccugagcucucagcaacuggaucagcggcgcgcccuccuguccaugaucggcaugagcgggggaaaucagaacucucagccuaaaggcgacggcguugugagagucugggaugugaagaaugccgaccuucugaacaaucaauucgggacaaugccgucccucacccuggcuugucuuacaaagcagggacagguggaucugaacgacgccguccaagcucucaccgaccugggccugauuuacacggccaaauaucccaauagcuccgaucucgaccggcugucucagagccauccuauccuuaacaugauugauaccaagaaauccagccugaauaucucuggguacaacuuuucccucggagcggccaucaagacaggcgcuugcaugcuggacgggggaaacaugcuugagaccauuaaaguuacaccccagaccauggauggcauccucaagagcauucugaaagugaagcgcucucugggcauguucaucagcgacacgccuggggagagaaaucccuaugaaaacauucuguacaagaucugucucuccggagauggcuggccuuauauugccucucggacagcuaucaucgggcgcgccugggagaauaccguggucgaccuggaaagcgauuccaaaccgcagaagauuggaagcaacggcucuaauaaaucccuucaaagcgcgggguuugcccccggacugacauacucucagcucaugacccugaaggacuccaugcugcagcuugauccuaacgcuaaaaccuggaucgacauugagggcagacccgaggacccuguggaaguugcccucuuccagcccaucagcggcugcuacauucacuuuuuccgggagccgacagaucugaagcaauuuaagcaggacgcuaaauauucccaugggaucgaugugacggaccuguucgccgcccagccuggacucaccucugcugucaucgaagcgcugcccagaaauauggugcuuacaugucagggcagcgaugacauuaagaaacugcucgauucccaagggcgccgggacaucaagcugauugauguuucucugaacaaaaucgacagcagaaaguuugagaaugccgugugggaucaguacaaggaccuuugccacaugcauaccggagucguggucgaaaagaagaaaaagggcgggaaagaggagauuacaccucacugugcucuccuggauugcaucauguucgacgccgccguguccggcggacugaacgcuaccguucuccgcgccgugcugccccgggacauggucuuuagaacgagcucucccaaggugguucuuugaggacuagucccuguucccagagcccacuuuuuuuucuuuuuuugaaauaaaauagccugucuuucagaucuaaaaaaaaaaaaaaaaaaaaaaaaaaaaaaaaaaaaaaaaaaaaaaaaaaaaaaaaaaaaaaaaaaaaaaaaaaaaaaaaaaaaaaaaaaaaaaaaaaaa

SEQ ID NO: 17022 - RNA, 1958 nt, Artificial Sequence
  mRNA product Design a-1 (A100) comprising derived and/or modified sequence from LASV(KAK-428;Clade n.d. (VII))__ANH09741__NP (opt5)
aggagagucccgcagucggcguccagcggcucugcuuguucgugugugugucguugcaggccuuauucaagcuuaccaugagcaacuccaaggaggugaaaucuuuccuguggacccagagccucagacgggaacuguccggcuacugcacaaauaucaaacuucaagucguuaaggacgcccaggcucugcuccacgggcuggauuuuucugaggugagcaacgugcagcgccuuaugagaaagcagaaacgggacgauaaugaccugaagcgccucagagaucugaaccaagccgucaauaaccugguggaacucaaguccguucagcagaaaucugugcugaaggucggaacgcuuaauagcgacgaucugcucacccuggcggcugaccuugagaaacugaaguccaaagugguucggacagaacgcccccucagcucuggcguguauauggggaaccuguccagccagcaacuggaucagagacgggcccuccugaauaugauuggaauggccggcgggucucagggaaaccagccuucccgcgacggcgucgugagagugugggaugucaagaaugcugaccuucugaacaaucaauucggcaccaugccgagccucacacuggccugucuuaccaagcaggggcagguugaucugaacgacguggugcucgcucugacagaccugggacucaucuacaccgccaaauaucccaauucuuccgaucuggaccggcuuagccaaaaccauccuguccugaacaugauugaugugaauaaguccucucucaacaucagcggcuacaauuuuucccugggggcggccguuaaagcuggagccugcaugcuugacggcgggaacaugcuggagacgauuaagaucagcccccagaccguggauggaauccucaaaucuauucugaaggucaaacgcgcucugggcauguucguguccgacacaccuggcgagagaaaucccuaugaaaacauccucuacaagguuugucugagcgggaauggauggccuuauauugccucucggaccagcaucgugggccgcgcgugggagaacacagucguggaucuugaauccaauaagaaccagccgaaagucgggaauaacggaucuaauaagaugcugcagagcuccggcuuugccaccgggcucacguacagccaacugaugacacugagagacucuaugcuucagcucgaucccaccgcuaaaacauggauugacaucgagggacggccugaggaucccguggaacuggcccuguuccagccuuccagcggcugcuacauucacuuuuucagagagcccaccgaccucaagcaguuuaaacaagacgcuaaguauucucauggcaucgauguuaacgaccuguucuccgcccagccggggcuuaccagcgccgugcuggaagcucucccucgcaauaugguccugacaugucagggauccgaugacauccggaagcugcuugauucucaggacagaaaagauauuaagcucaucgacauuagccuguccaaagcggaugcccgcaaguuugagaacgacgugugggaucaauucaaagaccugugccacaugcauacgggcaucguuguggaaaagaagaaaaagggagggaaacaggagaugacaccccacugugcucuccuggauugcauuauguuugacgccgccgucucuggcgggcuuaacgugccuacccugcgggcugugcuccccaccgacaugguuuucagaacaaucaccacgaaggucgugcugugaggacuagucccuguucccagagcccacuuuuuuuucuuuuuuugaaauaaaauagccugucuuucagaucuaaaaaaaaaaaaaaaaaaaaaaaaaaaaaaaaaaaaaaaaaaaaaaaaaaaaaaaaaaaaaaaaaaaaaaaaaaaaaaaaaaaaaaaaaaaaaaaaaaaa

SEQ ID NO: 17023 - RNA, 1958 nt, Artificial Sequence; identical to SEQ ID NO: 17017
  mRNA product Design a-1 (A100) comprising derived and/or modified sequence from LASV(Pinneo-NIG-1969;Clade I)__AIT17837__NP (opt5)

SEQ ID NO: 17024 - RNA, 1958 nt, Artificial Sequence
  mRNA product Design a-1 (A100) comprising derived and/or modified sequence from LASV(ISTH0009-NIG-2011;Clade II)__AIT17405__NP (opt5)
aggagagucccgcagucggcguccagcggcucugcuuguucgugugugugucguugcaggccuuauucaagcuuaccaugagcguguccaaggaggucaaaucuuuccuguggacccagagccucagacgggaacuguccggcuacugcucuaacaucaaacuucaaguugugaaggacgcccaggcucugcuccacgggcuggauuuuagcgagguguccaauguccagcgccuuaugagaaagcagaaacgggacgauucugaccugaagcgccucagagaucugaaccaagccgugaauaaccugguugaacucaagagcacacagcagaaauccauucugcgggugggaacgcuuaccagcgacgaucugcucacacuggcggcugaccuugagaagcugaaaucuaaggucauccgcaccgaaagaccccucuccagcggcguguauauggggaaucugucuacacagcaacuggagcagcggcgcgcccuccugaacaugauuggaaugguuggcggggcccagggaacccagccuggcagagauggcgugguccgggugugggacgugaaaaauccggaucuucugaacaaucaauucgggacaaugcccucccucacccuggcuugucuuacgaagcagggacaggucgaccugaacgaugccguucucgcucugaccgaccugggccucaucuacacagccaaguauccuaauagcucugaccuggaucgccuuucccaaagccaucccauucugaacaugguggacaucaaaaaguccucucucaauaucagcggguacaacuuuucccugggagcggccgugaaagcuggcgccugcaugcuugaugggggaaauaugcuggagaccauuaaggucacaccucagaccauggacggcauccucaaaagcauucugaaggugaaaagaucucugggcauguucguuuccgauacgcccggggaacggaacccuuaugagaacauccucuacaagauuugucugagcggagacggcuggccguauaucgcuucucgcacaagcauuguggggagagccugggaaaauaccacagucgaucuugaguccgacggaaagccccagaaagugggcucugcggggagcaacaagucccugcagagcgccggauuuccuaccggccucaccuacucucaacugaugacacugaaagauuccaugaugcagcuugaccccagcgcuaagacguggaucgauaucgagggccggccugaagaccccguugagauugcccucuaccagccgaugucugggugcuauauccacuucuuuagagaaccuaccgaccugaaacaguucaagcaagaugcuaaguacucccauggaauugacguggccgaucuguuucccgcccagccuggccucacaagcgcugucaucgaggcgcugccccgcaauauggugcuuaccugucagggguccgacgauauuaaacggcugcucgacucucagggaagacgcgauaucaagcugaucgacauugcccugagcaaagcugauucccggagauucgaaaacgccgucugggaccaaugcaaggaucuuugucacaugcauacaggcgugguuguggagaaaaagaagcgcgggggcaaagaggaaaucacgccccacugcgcccucauggacuguauuauguaugaugcugccgucucuggaggccugaauaucccugugcugcgggcgguucucccgagagacaugguguuucgcaccagcucccccaaggucgugcugugaggacuagucccuguucccagagcccacuuuuuuuucuuuuuuugaaauaaaauagccugucuuucagaucuaaaaaaaaaaaaaaaaaaaaaaaaaaaaaaaaaaaaaaaaaaaaaaaaaaaaaaaaaaaaaaaaaaaaaaaaaaaaaaaaaaaaaaaaaaaaaaaaaaaa

SEQ ID NO: 17025 - RNA, 1958 nt, Artificial Sequence
  mRNA product Design a-1 (A100) comprising derived and/or modified sequence from LASV(ISTH2010-NIG-2012;Clade II)__AIT17483__NP (opt5)
aggagagucccgcagucggcguccagcggcucugcuuguucgugugugugucguugcaggccuuauucaagcuuaccaugagcgccuccaaggaggugaaaucuuuccuguggacccagagccucagacgggaacuguccggcuacugcucuaacaucaaacuucaagucguuaaggacgcucaggcccugcuccacgggcuggauuuuagcgagguguccaaugugcagcgccuuaugagaaagcagaaacgggacgauucugaccugaagcgccucagagaucugaaccaagcggucaauaaccugguggaacucaagagcacacagcagaaauccauucugcggguuggaacgcuuaccagcgacgaucugcucacacuggcugccgaccuugagaagcugaaaucuaaggugauccgcaccgaaagaccccucuccagcggcgucuauauggggaaucugucuacacagcaacuggagcagcggcgcgcccuccugaaccuuauuggaauggugggcggggcucagggaacccagccuggcagagauggcguugugcgggucugggacgugaaaaauccggaucugcucaacaaucaauucgggacaaugcccucccugacccuugccugucugacgaagcagggacagguggaccucaacgaugcuguccuggcccugaccgaccucggccugaucuacacagcgaaguauccuaauagcucugaccuugaucgccugucccaaagccaucccauucucaacaugguugacaccaaaaaguccucucugaauaucagcggguuuaacuucucccuuggagccgcugugaaagccggcgcuugcaugcuggaugggggaaauaugcucgagacaaucaaggugaccccucagacgauggacggcauucugaaaagcauccugaaggucaaaaagucucucggcauguuuguguccgauacacccggggaaagaaacccuuacgagaacauucuguauaagaucugucuuagcggagacggcuggccguacauugccucucggaccagcaucguugggcgcgcgugggaaaauacaaccguggaucuggaguccgacggaaaaccccacaaggucggcaccgccgggucuaacaaaagccuccaguccgcuggauucccuacaggccugacguauagccagcugaugacccuuaaggauucuaugaugcaacucgaccccuccgccaaaacauggauugauaucgagggcagaccugaagaccccguggagaucgcucuguaccagccgaugagcgggugcuacauucacuuuuuccgggaaccuaccgaccugaagcaguuuaagcaggaugccaaauauucucauggaaucgacguugccgaucucuuccccgcucaaccuggccugacauccgcggugauugaggcccuucccagaaauaugguccugaccugucaggggagcgacgauaucaagcgccuccuggacucccagggacggagagauauuaaacugaucgacaucgcucuuucuaaggccgauagccgccgguuugaaaacgccgugugggaccagugcaaagaucucugucauaugcacacgggcgucgugguugagaagaagaaaagagggggcaaggaggaaauuacaccccacugcgcucugauggacuguaucauguacgaugccgcgguguccggaggccugaauauuccuguccuccgcgcugugcugccgcgggacaugguuuucagaaccucuagccccaaagugguccuuugaggacuagucccuguucccagagcccacuuuuuuuucuuuuuuugaaauaaaauagccugucuuucagaucuaaaaaaaaaaaaaaaaaaaaaaaaaaaaaaaaaaaaaaaaaaaaaaaaaaaaaaaaaaaaaaaaaaaaaaaaaaaaaaaaaaaaaaaaaaaaaaaaaaaa

SEQ ID NO: 17026 - RNA, 1958 nt, Artificial Sequence
  mRNA product Design a-1 (A100) comprising derived and/or modified sequence from LASV(Lassa virus/H.sapiens-wt/NGA/2015/ISTH_0543;Clade II)__AVO03640__NP (opt5)
aggagagucccgcagucggcguccagcggcucugcuuguucgugugugugucguugcaggccuuauucaagcuuaccaugagcgccuccaaggaggugaaaucuuuccuguggacccagagccucagacgggaacuguccggcuacugcucuaacaucaaacuucaagucguuaaggacgcucaggcccugcuccacgggcuggauuuuagcgagguguccaaugugcagcgccuuaugagaaagcagaaacgggacgauucugaccugaagcgccucagagaucugaaccaagcggucaauaaccugguggaacucaagagcacacagcagaaauccauucugcggguuggaacgcuuaccagcgacgaucugcucacacuggcugccgaccuugagaagcugaaaucuaaggugauccgcaccgaaagaccccucuccagcggcgucuauauggggaaucugucuacacagcaacuggagcagcggcgcgcccuccugaacaugauuggaauggugggcggggcucagggaacccagccuggcagagauggcguugugcgggucugggacgugaaaaauccggaucuucugaacaaucaauucgggacaaugcccucccucacccuggccugucuuacgaagcagggacagguggaccugaacgaugcuguccucgcccugaccgaccugggccucaucuacacagcgaaguauccuaauagcucugaccuggaucgccuuucccaaagccaucccauucugaacaugguugacaccaaaaaguccucucucaauaucagcggguacaacuuuucccugggagccgcugugaaagccggcgcuugcaugcuugaugggggaaauaugcuggagacaaucaaggugaccccucagacgauggacggcauucucaaaagcauccugaaggucaaaaagucucugggcauguucguguccgauacacccggggaaagaaacccuuaugagaacauucucuacaagaucugucugagcggagacggcuggccguauauugccucucggaccagcaucguugggcgcgcgugggaaaauacaaccguggaucuugaguccgacggaaaaccccagaaggucggcucugccgggagcaacaaaucccugcagagcgcuggauuuccuaccggccucacauacucucaacugaugacgcugaaggauuccaugaugcagcuugaccccagcgccaaaaccuggauugauaucgagggcagaccugaagaccccguggagaucgcucucuaccagccgaugucugggugcuauauucacuucuuucgggaaccuacagaccugaagcaguucaagcaagaugccaaauacucccauggaaucgacguugccgaucuguuucccgcucagccuggccucaccagcgcggugauugaggcccugcccagaaauaugguccuuacaugucagggguccgacgauaucaagcgccugcucgacucucagggacggaaagauauuaagcugaucgacaucgcucugagcaaagccgauuccagacgcuucgaaaacgccgugugggaccaaugcaaggaucuuugucacaugcauaccggcgucgugguugagaagaaaaagagagggggcaaagaggaaauuacgccccacugcgcucucauggacuguaucauguaugaugccgcggugucuggaggccugaauauuccuguccugcgggcugugcucccgcgcgacaugguuuuucggacaagcucccccaaggugguccugugaggacuagucccuguucccagagcccacuuuuuuuucuuuuuuugaaauaaaauagccugucuuucagaucuaaaaaaaaaaaaaaaaaaaaaaaaaaaaaaaaaaaaaaaaaaaaaaaaaaaaaaaaaaaaaaaaaaaaaaaaaaaaaaaaaaaaaaaaaaaaaaaaaaaa

SEQ ID NO: 17027 - RNA, 1958 nt, Artificial Sequence
  mRNA product Design a-1 (A100) comprising derived and/or modified sequence from LASV(Lassa virus/H.sapiens-wt/NGA/2016/ISTH_0009;Clade II)__AVO03572__NP (opt5)
aggagagucccgcagucggcguccagcggcucugcuuguucgugugugugucguugcaggccuuauucaagcuuaccaugagcgccuccaaggaggugaaaucuuuccuguggacccagagccucagacgggaacuguccggcuacugcucuaacaucaaacuucaagucguuaaggacgcucaggcccugcuccacgggcuggauuuuagcgagguguccaaugugcagcgccuuaugagaaagcagaaacgggacgauucugaccugaagcgccucagagaucugaaccaagcggucaauaaccugguggaacucaagagcacacagcagaaauccauucugcggguuggaacgcuuaccagcgacgaucugcucacacuggcugccgaccuugagaagcugaaaucuaaggugauccgcaccgaaagaccccucuccagcggcgucuauauggggaaucugucuacacagcaacuggagcagcggcgcgcccuccugaacaugauuggaauggugggcggggcucagggaacccagccuggcagagauggcguugugcgggucugggacgugaaaaauccggaucuucugaacaaucaauucgggacaaugcccucccucacccuggccugucuuacgaagcagggacagguggaccugaacgaugcuguccucgcccugaccgaccugggccucaucuacacagcgaaguauccuaauagcucugaccuggaucgccuuucccaaagccaucccauucugaacaugguugacaccaaaaaguccucucucaauaucagcggguacaacuuuucccugggagccgcugugaaagccggcgcuugcaugcuugaugggggaaauaugcuggagacaaucaaggugaccccucagacgauggacggcauucucaaaagcauccugaaggucaaaaagucucugggcauguucguguccgauacacccggggaaagaaacccuuaugagaacauucucuacaagaucugucugagcggagacggcuggccguauauugccucucggaccagcaucguugggcgcgcgugggaaaauacaaccguggaucuugaguccgacggaaaaccccagaaggucggcucugccgggagcaacaaaucccugcagagcgcuggauuuccuaccggccucacauacucucaacugaugacgcugaaggauuccaugaugcagcuugaccccagcgccaaaaccuggauugauaucgagggcagaccugaagaccccguggagaucgcucucuaccagccgaugucugggugcuauauucacuucuuucgggaaccuacagaccugaagcaguucaagcaagaugccaaauacucccauggaaucgacguugccgaucuguuucccgcucagccuggccucaccagcgcggugauugaggcccugcccagaaauaugguccuuacaugucagggguccgacgauaucaagcgccugcucgacucucagggacggagagauauuaaacugaucgacaucgcucugagcaaggccgauucccgccgguucgaaaacgccgugugggaccaaugcaaagaucuuugucacaugcauaccggcgucgugguugagaagaagaaaagagggggcaaggaggaaauuacgccccacugcgcucucauggacuguaucauguaugaugccgcggugucuggaggccugaauauuccuguccugcgcgcugugcucccgcgggacaugguuuuuagaacaagcucccccaaagugguccugugaggacuagucccuguucccagagcccacuuuuuuuucuuuuuuugaaauaaaauagccugucuuucagaucuaaaaaaaaaaaaaaaaaaaaaaaaaaaaaaaaaaaaaaaaaaaaaaaaaaaaaaaaaaaaaaaaaaaaaaaaaaaaaaaaaaaaaaaaaaaaaaaaaaaa

SEQ ID NO: 17028 - RNA, 1958 nt, Artificial Sequence
  mRNA product Design a-1 (A100) comprising derived and/or modified sequence from LASV(Lassa virus/H.sapiens-wt/NGA/2016/ISTH_0017;Clade II)__AVO03568__NP (opt5)
aggagagucccgcagucggcguccagcggcucugcuuguucgugugugugucguugcaggccuuauucaagcuuaccaugagcgccuccaaggaggugaaaucuuuccuguggacccagagccucagacgggaacuguccggcuacugcucuagcaucaaacuucaagucguuaaggacgcucaggcccugcuccacgggcuggauuuuuccgaggugucuaacgugcagcgccuuaugagaaagcagaaacgggacgauagcgaccugaagcgccucagagaucugaaucaagcggucaacaaucugguggaacucaaguccacacagcagaaaagcauucugcggguuggaacgcuuaccucugacgaucugcucacacuggcugccgaccuugagaagcugaaauccaaggugauccgcaccgaaagaccccucagcucuggcgucuauauggggaaccuguccacacagcaacuggagcagcggcgcgcccuccugaauaugauuggaauggcuggcggggcccagggaacccagccuggcagagauggcgugguucgggugugggacgucaaaaacccggaucuucugaauaaccaauucgggacaaugcccagccucacccuggcuugucuuacgaagcagggacagguggaccugaaugaugccgugcucgcgcugaccgaccugggccucaucuacacagccaaguauccuaacucuuccgaccuggaucgccuuagccaaucccaucccauucugaauauggucgacaccaaaaagucuagccucaacaucuccggguacaauuuuagccugggagcugccguuaaagcuggcgccugcaugcuugaugggggaaacaugcuggagacaaucaaggugaccccucagacgauggacggcauucucaaaucuauccugaaggugaaaagaucccugggcauguucgucagcgaugcgcccggggaacggaauccuuaugagaacauucucuacaagaucugucugucuggagacggcuggccguauauugccagccgcacauccaucguggggagagcuugggaaaacaccacaguugaucuugagucugacggaaagccccagaaagugggcgccaccgggagcaauaagucccugcagagcgcuggauuuccuaccggccucacauacucucaacugaugacgcugaaagauuccaugaugcagcuugaccccagcgccaagaccuggauugauaucgagggccggccugaagaccccgucgagguggcccucuaccagccgguuucugggugcuauauccacuucuuuagagaaccuacagaccugaaacaguucaagcaagaugcuaaguacucccauggaauugacguggcggaucuguuucccgcccagccuggccucaccagcgcugucaucgaggcccugccccgcaacauggugcuuacaugucagggguccgacgauauuaaaaagcugcucgacucucagggacggaaagauaucaagcugauugacaucgcccugagcaaagcugauuccagacgcuucgaaaaugccgucugggaccaaugcaaggaucuuugucacaugcauaccggcgugguuguggagaagaaaaagagagggggcaaagaggaaaucacgccccacugcgcgcucauggacuguauuauguaugaugcugccgucucuggaggccugaacaucccugugcugcgggccguucucccgcgcgacaugguguuucggacaagcucccccaaggucgugcugugaggacuagucccuguucccagagcccacuuuuuuuucuuuuuuugaaauaaaauagccugucuuucagaucuaaaaaaaaaaaaaaaaaaaaaaaaaaaaaaaaaaaaaaaaaaaaaaaaaaaaaaaaaaaaaaaaaaaaaaaaaaaaaaaaaaaaaaaaaaaaaaaaaaaa

SEQ ID NO: 17029 - RNA, 1958 nt, Artificial Sequence
  mRNA product Design a-1 (A100) comprising derived and/or modified sequence from LASV(Lassa virus/H.sapiens-wt/NGA/2018/ISTH_0959;Clade II)__AVV65100__NP (opt5)
aggagagucccgcagucggcguccagcggcucugcuuguucgugugugugucguugcaggccuuauucaagcuuaccaugagcgccuccaaggaggugaaaucuuuccuguggacccagagccucagacgggaacuguccggcuacugcucuaacaucaaacuucaagucguuaaggacgcucaggcccugcuccacgggcuggauuuuagcgagguguccaaugugcagcgccuuaugagaaagcagaaacgggacgauucugaccugaagcgccucagagaucugaaccaagcggucaauaaccugguggaacucaagagcacccagcagaaauccauucugcggguuggaacgcuuaccagcgacgaucugcucacacuggcugccgaccuugagaagcugaaaucuaaggugauccgcaccgaaagaccccucuccagcggcgucuauauggggaaucugucuacacagcaacuggagcagcggcgcgcccuccugaaccuuauuggaauggugggcggggcucagggaacccagccuggcagagauggcguugugcgggucugggacgugaaaaauccggaucugcucaacaaucaauucgggacaaugcccucccugacccuugccugucugacgaagcagggacagguggaccucaacgaugucguucuggcucugaccgaccucggccugaucuacacagccaaguauccuaauagcucugaccuugaucgccugucccaaagccaucccauucucaacaugguggacaccaaaaaguccucucugaauaucagcggguuuaacuucucccuuggagcggccgugaaagcuggcgccugcaugcuggaugggggaaauaugcucgagacaaucaaggucaccccucagacgauggacggcauucugaaaagcauccugaaggugaaaaagucucucggcauguuuguuuccgauacacccggggaaagaaacccuuacgagaacauucuguauaagaucugucuuagcggagacggcuggccguacauugcuucucggaccagcaucguggggcgcgccugggaaaauacaaccgucgaucuggaguccgacggaaaaccccacaaggugggcaccgcggggucuaacaaaagccuccaguccgccggauucccuacaggccugacguauagccagcugaugacccuuaaggauucuaugaugcaacucgaccccuccgcuaaaacauggauugauaucgagggcagaccugaagaccccguugagaucgcccuguaccagccgaugagcgggugcuacauucacuuuuuccgggaaccuaccgaccugaagcaguuuaagcaggaugcuaaauauucucauggaaucgacguggccgaucucuuccccgcccaaccuggccugacauccgcugucauugaggcgcuucccagaaauauggugcugaccugucaggggagcgacgauaucaagcgccuccuggacucccagggacggaaagauauuaagcugaucgacaucgcccuuucuaaaacggauagcagacgcuuugaaaacgcugucugggaccagugcaaggaucucugucauaugcacacaggcgugguuguggagaagaaaaagagagggggcaaagaggaaauuacaccccacugcgcccugauggacuguaucauguacgaugccgcugucuccggaggccugaauauuccugugcuccgggccguucugccgcgcgacaugguguuccggaccucuagccccaaggucgugcuuugaggacuagucccuguucccagagcccacuuuuuuuucuuuuuuugaaauaaaauagccugucuuucagaucuaaaaaaaaaaaaaaaaaaaaaaaaaaaaaaaaaaaaaaaaaaaaaaaaaaaaaaaaaaaaaaaaaaaaaaaaaaaaaaaaaaaaaaaaaaaaaaaaaaaa

SEQ ID NO: 17030 - RNA, 1958 nt, Artificial Sequence
  mRNA product Design a-1 (A100) comprising derived and/or modified sequence from LASV(LASV003-NIG-2008;Clade II)__AIT17581__NP (opt5)
aggagagucccgcagucggcguccagcggcucugcuuguucgugugugugucguugcaggccuuauucaagcuuaccaugagcgccuccaaggaggugaaaucuuuccuguggacccagagccucagacgggaacuguccggcuacugcucuagcaucaaacuucaagucguuaaggacgcucaggcccugcuccacgggcuggauuuuuccgaggugucuaacgugcagcgccuuaugagaaagcagaaacgggacgauagcgaccugaagcgccucagagaucugaaucaagcggucaacaaucugguggaacucaaguccacccagcagaaaagcguucugcgggugggaacgcuuaccucugacgaucugcucacacuggcugccgaccuugagaagcugaaauccaaggucauucgcaccgaaagaccccucagcucuggcguguauauggggaaccuguccgcccagcaacuggagcagcggcgcacacuccugaauaugaucggaaugguuggcggggcucagggaacccagccuggcagagauggcgugguccgggugugggacgugaaaaacccggaucuucugaauaaccaauucgggacaaugcccagccucacccuggccugucuuacgaagcagggacaggucgaccugaaugauguugugcucgcucugaccgaccugggccucauuuacacagccaaguauccuaacucuuccgaccuggaucgccuuagccaaucccaucccauccugucuaugguggacaccaaaaagagcucccucaauauuagcggguacaacuuuucucugggagcggccgucaaagcuggcgccugcaugcuugaugggggaaauaugcuggagacaaucaaggugaccccucagacgauggacggcauccucaaauccauucugaagguuaaaaagagccugggcauguucgugucugauacacccggggaaagaaacccuuaugagaauauccucuacaagauuugucugagcggagacggcuggccguauaucgcuucccggaccucuauugucgggcgcgccugggaaaacacaaccguggaucuugagagcgacggaaaaccccagaagguuggcaccgcgggguccaacaaaagccugcagucugccggauuuccuacaggccucacguacucccaacugaugacccugaaggauagcaugaugcagcuugaccccucugcuaaaacauggaucgauauugagggcagaccugaagaccccguggagaucgcccucuaccagccgauguccgggugcuauauccacuucuuucgggaaccuaccgaccugaagcaguucaagcaagaugcuaaauacagccauggaauugacgucacagaucuguuucccgcccagccuggccucaccuccgccgugaucgaggcucugcccagaaauaugguccuuacgugucaggggucugacgauauuaagcgccugcucgacagccagggacggagagauaucaaacugauugacaucgcgcuguccaaggccgauucucgccgguucgaaaacgcugugugggaccaaugcaaagaucuuugucacaugcauacaggcguuguggucgagaagaagaaaagagggggcaaggaggaaaucacaccccacugcgcccucauggacuguauuauguaugaugccgcugugagcggaggccugaauaucccuguucugcgcgccgugcucccgcgggacauggucuuuagaaccuccagccccaaaguggugcugugaggacuagucccuguucccagagcccacuuuuuuuucuuuuuuugaaauaaaauagccugucuuucagaucuaaaaaaaaaaaaaaaaaaaaaaaaaaaaaaaaaaaaaaaaaaaaaaaaaaaaaaaaaaaaaaaaaaaaaaaaaaaaaaaaaaaaaaaaaaaaaaaaaaaa

SEQ ID NO: 17031 - RNA, 1958 nt, Artificial Sequence
  mRNA product Design a-1 (A100) comprising derived and/or modified sequence from LASV(LASV035-NIG-2009;Clade II)__AIT17589__NP (opt5)
aggagagucccgcagucggcguccagcggcucugcuuguucgugugugugucguugcaggccuuauucaagcuuaccaugagcgccuccaaggaggugaaaucuuuccuguggacccagagccucagacgggaacuguccggcuacugcucuagcaucaaacuucaagucguuaaagacgcucaggcccugcuccacgggcuggauuuuuccgaggugucuaacgugcagcgccuuaugagaaagcagaaacgggacgauagcgaccugaagcgccucagagaucugaaucaagcggucaacaaucugguggaacucaaguccacacagcagaaaagcauucugcggguuggaacgcuuaccucugacgaucugcucacacuggcugccgaccuugagaagcugaaauccaaggugauccgcaccgaaagaccccucagcucuggcgucuauauggggaaccuguccgcccagcaacuggagcagcggcgcgcucuccugaauaugauuggaauggugggcggggcccagggaacacagccuggcagagauggcguugugcgggucugggacgugaaaaacccggaucuucugaauaaccaauucgggaccaugcccagccucacacuggcuugucuuaccaagcagggacagguggaccugaaugaugccguccucgcgcugacggaccugggccucaucuacaccgccaaguauccuaacucuuccgaccuggaucgccuuagccaaucccaucccauucugaauaugguugacacaaagaagucuagccucaacaucuccggguacaauuuuagccugggagcugccgugaaagcuggcgccugcaugcuugaugggggaaacaugcuggagaccaucaaggugacaccucagaccauggacggcauucucaaaucuauccugaaggucaaaagaucccugggcauguucgugagcgauacgcccggggaacggaauccuuaugagaacauucucuacaagaucugucugucuggagacggcuggccguauauugcgagccgcacauccaucguugggagagccugggaaaacaccacaguggaucuugagucugacggaaagccccagaaagucggcaccaccgggagcaauaagucccugcagagcgcuggauuuccuacaggccucacguacucucaacugaugacccugaaagauuccaugaugcagcuugaccccagcgccaagacauggauugauaucgagggccggccugaagaccccguggagaucgcucucuaccagccgaugucugggugcuauauucacuucuuuagagaaccuaccgaccugaaacaguucaagcaagaugccaaguacucccauggaaucgacguugccgaucuguuucccgcucagccuggccucacaagcgcggugauugaggcccugccccgcaacaugguccuuaccugucagggguccgacgauaucaaaaagcugcucgacucucagggacggagagauauuaaacugaucgacaucgcucugagcaaggccgauucccgcaaauucgaaaaugccgugugggaccaaugcaaggaucuuugucacaugcauacgggcgucgugguugagaagaaaaagagagggggcaaagaggaaauuacaccccacugcgcucucauggacuguaucauguaugaugccgcggugucuggaggccugaacauuccuguccugcgggcugugcucccgcgcgacaugguuuuucggaccagcucccccaaggugguccugugaggacuagucccuguucccagagcccacuuuuuuuucuuuuuuugaaauaaaauagccugucuuucagaucuaaaaaaaaaaaaaaaaaaaaaaaaaaaaaaaaaaaaaaaaaaaaaaaaaaaaaaaaaaaaaaaaaaaaaaaaaaaaaaaaaaaaaaaaaaaaaaaaaaaa

SEQ ID NO: 17032 - RNA, 1958 nt, Artificial Sequence
  mRNA product Design a-1 (A100) comprising derived and/or modified sequence from LASV(LASV1000-NIG-2009;Clade II)__AIT17783__NP (opt5)
aggagagucccgcagucggcguccagcggcucugcuuguucgugugugugucguugcaggccuuauucaagcuuaccaugagcgccuccaaggaggugaaaucuuuccuguggacccagagccucagacgggaacuguccggcuacugcucuaacaucaaacuucaagucguuaaggacgcucaggcccugcuccacgggcuggauuuuagcgagguguccaaugugcagcgccuuaugagaaagcagaaacgggacgauucugaccugaagcgccucagagaucugaaccaagcggucaauaaccugguggaacucaagagcacacagcagaaauccauucugcggguuggaacgcuuaccagcgacgaucugcucacacuggcugccgaccuugagaagcugaaaucuaaggugauccgcaccgaaagaccccucuccagcggcgucuauauggggaaucugucuacacagcaacuggagcagcggcgcgcccuccugaacaugauuggaauggugggcggggcucagggaacccagccuggcagagauggcguugugcgggucugggacgugaaaaauccggaucuucugaacaaucaauucgggacaaugcccucccucacccuggccugucuuacgaagcagggacagguggaccugaacgaugucguucucgcucugaccgaccugggccucaucuacacagccaaguauccuaauagcucugaccuggaucgccuuucccaaagccaucccauucugaacaugguggacaccaaaaaguccucucucaauaucagcggguacaacuuuucccugggagcggccgugaaagcuggcgccugcaugcuugaugggggaaauaugcuggagacaaucaaggucaccccucagacgauggacggcauucucaaaagcauccugaaggugaaaaagucucugggcauguucguuuccgauacacccggggaaagaaacccuuaugagaacauucucuacaagaucugucugagcggagacggcuggccguauauugcuucucggaccagcaucguggggcgcgccugggaaaauacaaccgucgaucuugaguccgacggaaaaccccagaaggugggcaccgcggggucuaacaaaagccugcaguccgccggauuuccuacaggccucacguacagccaacugaugacccugaaggauucuaugaugcagcuugaccccuccgcuaaaacauggauugauaucgagggcagaccugaagaccccguugagaucgcccucuaccagccggugagcgggugcuauauucacuucuuucgggaaccuaccgaccugaagcaguucaagcaagaugcuaaauacucucauggaaucgacgucgccgaucuguuucccgcccagccuggccucacauccgcugugauugaggcgcugcccagaaauaugguccuuaccugucaggggagcgacgauaucaagcgccugcucgacucccagggacggagagauauuaaacugaucgacaucgcccugucuaaggcugauagccgccgguucgaaaacgccgugugggaccaaugcaaagaucuuugucacaugcauacgggcguuguggucgagaagaagaaaagagggggcaaggaggaaauuacaccccacugcgcccucauggacuguaucauguaugaugcugccguguccggaggccugaauauuccuguucugcgcgcggugcucccgcgggacauggucuuuagaaccucuagccccaaaguggugcugugaggacuagucccuguucccagagcccacuuuuuuuucuuuuuuugaaauaaaauagccugucuuucagaucuaaaaaaaaaaaaaaaaaaaaaaaaaaaaaaaaaaaaaaaaaaaaaaaaaaaaaaaaaaaaaaaaaaaaaaaaaaaaaaaaaaaaaaaaaaaaaaaaaaaa

SEQ ID NO: 17033 - RNA, 1958 nt, Artificial Sequence
  mRNA product Design a-1 (A100) comprising derived and/or modified sequence from LASV(LASV221-NIG-2010;Clade II)__AIT17625__NP (opt5)
aggagagucccgcagucggcguccagcggcucugcuuguucgugugugugucguugcaggccuuauucaagcuuaccaugagcgccuccaaggaggugaaaucuuuccuguggacccagagccucagacgggaacuguccggcuacugcucuagcaucaaacuucaagucguuaaggacgcucaggcccugcuccacgggcuggauuuuuccgaggugucuaacgugcagcgccuuaugagaaagcagcggcgcgacgauagcgaccugaaaagacuccgggaucugaaucaagcggucaacaaucugguggaacucaaguccacacagcaaaagagcauucugcgcguuggaacgcuuaccucugacgaucugcucacacuggcugccgaccuugagaaacugaaguccaaagugaucagaaccgaacggccccucagcucuggcgucuauauggggaaccuguccacacagcagcuggagcagcgcagagcccuccugaauaugauuggaauggugggcggggcucagggaacccagccuggccgggauggcguugugcgcgucugggacgugaagaacccggaucuucugaauaaccaauucgggacaaugcccagccucacccuggccugucuuacgaaacagggacagguggaccugaaugaugcuguccucgcccugaccgaccugggccucaucuacacagcgaaguauccuaacucuuccgaccuggauagacuuagccaaucccaucccauucugaauaugguugacaccaagaaaucuagccucaacaucuccggguacaauuuuagccugggagccgcugugaaggccggcgcuugcaugcuugaugggggaaacaugcuggagacaaucaaagugaccccucagacggucgacggcauucucaagucuauccugaaagugaagcggucccugggcauguucguuagcgauacacccggggaacgcaauccuuaugagaacauucucuacaaaaucugucugucuggagacggcuggccguauauugccagcagaaccuccaucguggggcgggcgugggaaaacacaaccgucgaucuugagucugacggaaagccccagaaggugggcaccgccgggagcaauaaaucccugcagagcgcuggauuuccuacaggccucacguacucucaacugaugacccugaaggauuccaugaugcagcuugaccccagcgccaaaacauggauugauaucgagggcagaccugaagaccccguugagaucgcucucuaccagccgaugucugggugcuauauucacuucuuucgcgaaccuaccgaccugaagcaguucaaacaagaugccaaguacucccauggaaucgacguggccgaucuguuucccgcucagccuggccucacaagcgcggucauugaggcccugccccggaacauggugcuuaccugucagggguccgacgauaucaagagacugcucgacucucagggacgccgggauauuaaacugaucgacaucgcucugagcaaggccgauuccagaaaauucgaaaaugccgucugggaccaaugcaaggaucuuugucacaugcauacgggcgugguuguggagaaaaagaagcgcgggggcaaagaggaaauuacaccccacugcgcucucauggacuguaucauguaugaugccgcggucucuggaggccugaacauuccugugcugcgggcuguucucccgagagacaugguguuucgcaccagcucccccaaggucgugcugugaggacuagucccuguucccagagcccacuuuuuuuucuuuuuuugaaauaaaauagccugucuuucagaucuaaaaaaaaaaaaaaaaaaaaaaaaaaaaaaaaaaaaaaaaaaaaaaaaaaaaaaaaaaaaaaaaaaaaaaaaaaaaaaaaaaaaaaaaaaaaaaaaaaaa

SEQ ID NO: 17034 - RNA, 1958 nt, Artificial Sequence
  mRNA product Design a-1 (A100) comprising derived and/or modified sequence from LASV(LASV237-NIG-2010;Clade II)__AIT17639__NP (opt5)
aggagagucccgcagucggcguccagcggcucugcuuguucgugugugugucguugcaggccuuauucaagcuuaccaugagcgccuccaaggaggugaaaucuuuccuguggacccagagccucagacgggaacuguccggcuacugcucuaacaucaaacuucaagucguuaaggacgcucaggcccugcuccacgggcuggauuuuagcgagguguccaaugugcagcgccuuaugagaaagcagaaacgggacgauucugaccugaagcgccucagagaucugaaccaagcggucaauaaccugguggaacucaagagcacacagcagaaauccauucugcggguuggaacgcuuaccagcgacgaucugcucacacuggcugccgaccuugagaagcugaaaucuaaggugauccgcaccgaaagaccccucuccagcggcgucuauauggggaaucugucuacacagcaacuggagcagcggcgcgcccuccugaacaugauuggaauggugggcggggcucagggaacccagccuggcagagauggcguugugcgggucugggacgugaaaaauccggaucuucugaacaaucaauucgggacaaugcccucccucacccuggccugucuuacgaagcagggacagguggaccugaacgaugcuguccucgcccugaccgaccugggccucaucuacacagcgaaguauccuaauagcucugaccuggaucgccuuucccaaagccaucccauucugaacaugguugacaucaaaaaguccucucucaauaucagcggguacaacuuuucccugggagccgcugugaaagccggcgcuugcaugcuugaugggggaaauaugcuggagaccauuaaggugacaccucagaccauggacggcauccucaaaagcauucugaaggucaaaagaucucugggcauguucguguccgauacgcccggggaacggaacccuuaugagaacauccucuacaagauuugucugagcggagacggcuggccguauaucgccucucgcacaagcauuguugggagagcgugggaaaauaccacaguggaucuugaguccgacggaaagccccagaaagucggcucugccgggagcaacaagucccugcagagcgcuggauuuccuaccggccucaccuacucucaacugaugacacugaaagauuccaugaugcagcuugaccccagcgccaagacguggaucgauaucgagggccggccugaagaccccguggagauugcucucuaccagccgaugucugggugcuauauccacuucuuuagagaaccuaccgaccugaaacaguucaagcaagaugccaaguacucccauggaauugacguugccgaucuguuucccgcucagccuggccucacaagcgcggugaucgaggcccugccccgcaauaugguccuuaccugucagggguccgacgauauuaaacggcugcucgacucucagggaagacgcgauaucaagcugaucgacauugcucugagcaaagccgauucccggagauucgaaaacgccgugugggaccaaugcaaggaucuuugucacaugcauacaggcgucgugguugagaaaaagaagcgcgggggcaaagaggaaaucacgccccacugcgcucucauggacuguauuauguaugaugccgcggugucuggaggccugaauaucccuguccugcgggcugugcucccgagagacaugguuuuucgcaccagcucccccaaggugguccugugaggacuagucccuguucccagagcccacuuuuuuuucuuuuuuugaaauaaaauagccugucuuucagaucuaaaaaaaaaaaaaaaaaaaaaaaaaaaaaaaaaaaaaaaaaaaaaaaaaaaaaaaaaaaaaaaaaaaaaaaaaaaaaaaaaaaaaaaaaaaaaaaaaaaa

SEQ ID NO: 17035 - RNA, 1958 nt, Artificial Sequence
  mRNA product Design a-1 (A100) comprising derived and/or modified sequence from LASV(LASV253-NIG-2011;Clade II)__AIT17671__NP (opt5)
aggagagucccgcagucggcguccagcggcucugcuuguucgugugugugucguugcaggccuuauucaagcuuaccaugagcgccuccaaggaggugaaaucuuuccuguggacccagagccucagacgggaacuguccggcuacugcucuagcaucaaacuucaagucguuaaggacgcucaggcccugcuccacgggcuggauuuuuccgaggugucuaacgugcagcgccuuaugagaaagcagaaacgggacgauagcgaccugaagcgccucagagaucugaaucaagcggucaacaaucugguggaacucaaguccacccagcagaaaagcguucugcgggugggaacgcuuaccucugacgaucugcucacacuggcugccgaccuugagaagcugaaauccaaggucauucgcaccgaaagaccccucagcucuggcguguauauggggaaccuguccacacagcaacuggagcagcggcgcgcccuccugaauaugaucggaaugguuggcggggcucagggaacccagccuggcagagauggcgugguccgggugugggacgugaaaaacccggaucuucugaauaaccaauucgggacaaugcccagccucacccuggccugucuuacgaagcagggacaggucgaccugaaugauguugugcucgcucugaccgaccugggccucauuuacacagccaaguauccuaacucuuccgaccuggaucgccuuagccaaucccaucccauccugaauaugguggacaccaaaaagucuagccucaacauuuccggguacaauuuuagccugggagcggccgucaaagcuggcgccugcaugcuugaugggggaaacaugcuggagacaaucaaggugaccccucagacgauggacggcauccucaaaucuauucugaagguuaaaaagucccugggcauguucgugagcgauacacccggggaaagaaauccuuaugagaacauccucuacaagauuugucugucuggagacggcuggccguauaucgcuagccggaccuccauugucgggcgcgccugggaaaacacaaccguggaucuugagucugacggaaaaccccagaagguuggcaccgcggggagcaauaaaucccugcagagcgccggauuuccuacaggccucacguacucucaacugaugacccugaaggauuccaugaugcagcuugaccccagcgcuaaaacauggaucgauauugagggcagaccugaagaccccguggagaucgcccucuaccagccgaugucugggugcuauauccacuucuuucgggaaccuaccgaccugaagcaguucaagcaagaugcuaaauacucccauggaauugacgucacagaucuguuucccgcccagccuggccucaccagcgccgugaucgaggcucugcccagaaacaugguccuuacgugucagggguccgacgauauuaagcgccugcucgacucucagggacggagagauaucaaacugauugacaucgcgcugagcaaggccgauucccgccgguucgaaaaugcugugugggaccaaugcaaagaucuuugucacaugcauacaggcguuguggucgagaagaagaaaagagggggcaaggaggaaaucacaccccacugcgcccucauggacuguauuauguaugaugccgcugugucuggaggccugaacaucccuguucugcgcgccgugcucccgcgggacauggucuuuagaaccagcucccccaaaguggugcugugaggacuagucccuguucccagagcccacuuuuuuuucuuuuuuugaaauaaaauagccugucuuucagaucuaaaaaaaaaaaaaaaaaaaaaaaaaaaaaaaaaaaaaaaaaaaaaaaaaaaaaaaaaaaaaaaaaaaaaaaaaaaaaaaaaaaaaaaaaaaaaaaaaaaa

SEQ ID NO: 17036 - RNA, 1958 nt, Artificial Sequence
  mRNA product Design a-1 (A100) comprising derived and/or modified sequence from LASV(LASV254-NIG-2011;Clade II)__AIT17675__NP (opt5)
aggagagucccgcagucggcguccagcggcucugcuuguucgugugugugucguugcaggccuuauucaagcuuaccaugagcgccuccaaggaggugaaaucuuuccuguggacccagagccucagacgggaacuguccggcuacugcucuagcaucaaacuucaagucguuaaggacgcucaggcccugcuccacgggcuggauuuuuccgaggugucuaacgugcagcgccuuaugagaaagcagaaacgggacgauagcgaccugaagcgccucagagaucugaaucaagcggucaacaaucugguggaacucaaguccacacagcagaaaagcguucugcgggugggaacgcuuaccucugacgaucugcucacacuggcugccgaccuugagaagcugaaauccaaggucauucgcaccgaaagaccccucagcucuggcguguauauggggaaccuguccacacagcaacuggagcagcggcgcgcccuccugaauaugaucggaaugguuggcggggcucagggaacccagccuggcagagauggcgugguccgggugugggacgugaaaaacccggaucuucugaauaaccaauucgggacaaugcccagccucacccuggccugucuuacgaagcagggacaggucgaccugaaugaugcuguucucgcccugaccgaccugggccucauuuacacagcgaaguauccuaacucuuccgaccuggaucgccuuagccaaucccaucccauccugaauaugguggacaccaaaaagucuagccucaacauuuccggguacaauuuuagccugggagccgcugugaaagccggcgcuugcaugcuugaugggggaaacaugcuggagacaaucaaggucaccccucagacgauggacggcauccucaaaucuauucugaaggugaaaaagucccugggcauguucguuagcgauacacccggggaaagaaauccuuaugagaacauccucuacaagauuugucugucuggagacggcuggccguauaucgccagccggaccuccauuguggggcgcgcgugggaaaacacaaucgucgaucuugagucugacggaaaaccccagaaggugggcaccgccgggagcaauaaaucccugcagagcgcuggauuuccuaccggccucacauacucucaacugaugacgcugaaggauuccaugaugcagcuugaccccagcgccaaaaccuggauugauaucgagggcagaccugaagaccccguugagaucgcucucuaccagccgaugucugggugcuauauucacuucuuucgggaaccuacagaccugaagcaguucaagcaagaugccaaauacucccauggaaucgacguggccgaucuguuucccgcucagccuggccucaccagcgcggucauugaggcccugcccagaaacauggugcuuacaugucagggguccgacgauaucaagcgccugcucgacucucagggacggagagauauuaaacugaucgacaucgcucugagcaaggccgauucccgccgguucgaaaaugccgucugggaccaaugcaaagaucuuugucacaugcauaccggcgugguuguggagaagaagaaaagagggggcaaggaggaaauuacgccccacugcgcucucauggacuguaucauguaugaugccgcggucucuggaggccugaacauuccugugcugcgcgcuguucucccgcgggacaugguguuuagaacaagcucccccaaagucgugcugugaggacuagucccuguucccagagcccacuuuuuuuucuuuuuuugaaauaaaauagccugucuuucagaucuaaaaaaaaaaaaaaaaaaaaaaaaaaaaaaaaaaaaaaaaaaaaaaaaaaaaaaaaaaaaaaaaaaaaaaaaaaaaaaaaaaaaaaaaaaaaaaaaaaaa

SEQ ID NO: 17037 - RNA, 1958 nt, Artificial Sequence
  mRNA product Design a-1 (A100) comprising derived and/or modified sequence from LASV(Nig08-04;Clade II)__ADU56611__NP (opt5)
aggagagucccgcagucggcguccagcggcucugcuuguucgugugugugucguugcaggccuuauucaagcuuaccaugagcgccuccaaggaggugaaaucuuuccuguggacccagagccucagacgggaacuguccggcuacugcucuaacaucaaacuucaagucguuaaggacgcucaggcccugcuccacgggcuggauuuuagcgagguguccaaugugcagcgccuuaugagaaagcagaaacgggacgauggagaccugaagcgccucagagaucugaaccaagcggucaauaaccugguggaacucaagucuacccagcagaaaagcguucugcgggugggcacgcuuaccuccgacgaucugcucacacuggcugccgaccuugagaagcugaaaagcaaggucauucgcaccgaaagaccccucucuuccgggguguauaugggaaaucugagcacacagcaacuggagcagcggaaagcccuccugucuaugaucggcaugguugggggagcucagggcacccagccuggccgcgaugggguggucagagugugggacgugaagaacccggaucuucugaauaaccaauucggaacaaugcccucccucacccuggccugucuuacgaagcagggccaggucgaccugaaugaugcuguucucgcccugaccgaccuggggcucauuuacacagcgaaauauccuaacagcucugaccuggaucggcuuucccaaagccaucccauccugaauaugguggacaccaagaaauccucucucaacauuagcggauacaauuuuucccugggcgccgcugugaaggccggggcuugcaugcuugauggaggcaacaugcuggagacaaucaaagucaccccucagacgauggacggcauccucaagagcauucugaaagugaagcgcucucuggggauguucguuuccgauacacccggagaaagaaauccuuaugagaacauccucuacaagauuugucugagcggcgacggguggccguauaucgccucucggaccagcauugugggacgcgcgugggaaaacacaaccgucgaucuugaguccgacggcaaaccccagaagguggggaccgccggaucuaauaaaagccugcaguccgcuggcuuuccuacaggccucacguacagccaacugaugacccugaaggauucuaugaugcagcuugaccccuccgccaaaacauggaucgauauugaggggagaccugaagaccccguugagaucgcucucuaccagccgaugagcggaugcuauauccacuucuuucgggaaccuaccgaccugaagcaguucaagcaagaugccaaauacucucauggcauugacgugacagaucuguuuuccgcccagcccgggcucaccagcgcugucaucgaggcgcugccuagaaacauggugcuuacgugucagggauccgacgauauuaagaaacugcucgacucucagggccgccgggauaucaagcugauugacaucagccugaauaaagccgauuccagacgcuucgaaaacgcugucugggaccaaugcaaggaucuuugucacaugcauacaggggugguuguggagaagaaaaagcggggcggaaaagaggaaaucacaccccacugcgcccucauggacuguauuauguuugaugccgcugucucuggcgggcugaauauccccauucugagagccgugcucccucgcgacaugguuuuccggaccagcuccccgaaggugguccugugaggacuagucccuguucccagagcccacuuuuuuuucuuuuuuugaaauaaaauagccugucuuucagaucuaaaaaaaaaaaaaaaaaaaaaaaaaaaaaaaaaaaaaaaaaaaaaaaaaaaaaaaaaaaaaaaaaaaaaaaaaaaaaaaaaaaaaaaaaaaaaaaaaaaa

SEQ ID NO: 17038 - RNA, 1961 nt, Artificial Sequence
  mRNA product Design a-1 (A100) comprising derived and/or modified sequence from LASV(GA391;Clade III)__AAA46284__NP (opt5)
aggagagucccgcagucggcguccagcggcucugcuuguucgugugugugucguugcaggccuuauucaagcuuaccaugagcgccuccaaggaggugagaucuugccuguggacccagagccuccggcgcgaacuguccggcuacuguucuaacaucaaacuucaagucguuaaggacgcucaggcccugcuccacgggcuggauuucagcgagguguccaaugugcagagacuuaugcggaaacagaagcgcgacgauggagaccugaaaagacuccgggaucugaaccaagcggucaauaaccugguggaacucaagucuacacagcagaaaagcguucugcgcgugggcacgcuuuccagcgacgaucugcucauucuggcugccgaccuugagaaacugaagucuaaagucaccagaacagaacggccccucuccagcgggguguauaugggaaaucugucuucccagcaacuggaucagcgcagagcccuccugaacaugaucggcaugaccgggguuagcggaggcggcaagggggcuucuaauggaauugugcgggucugggacgugaaaaacgccgagcuucugaauaaccaguuuggcacaaugccuucccucacccuggcuugccuuacaaagcaggggcaaguggaucugaaugacgccguccaggcgcucaccgaucugggacugaucuacacggccaaguauccgaacagcuccgaccucgaccgccugucucagagccaucccauucuuaauaugaucgauaccaaaaaguccagccugaacaucucuggcuacaauuucucccucggggcugccguuaaagcuggagccuguaugcuggacggcggcaacaugcuugagacaauuaaggugagcccucaaaccauggaugggauccugaaaucuauucucaaggugaaaaagagccugggaauguuugucuccgacacacccggcgaaagaaacccuuaugagaauauccuguacaagauuugccucucuggggauggauggagcuauaucgcgucccggaccagcauugugggccgcgccugggaaaacacgguuguggaccuggagcaggauaauaaaccccagaagaucgggaacggaggcucuaauaaaucccuucagagcgcuggcuucgccgcugggcugaucuacucucaacucaugacacugaaggacuuuaaauguuucaaccugauuccuaaugccaagaccuggauggauaucgagggaagaccggaagaccccgucgagauugcccuuuaccagccuuccagcggcugcuaugugcacuuuuuccgggaacccacagaucucaagcaguuuaaacaggacgcuaaguacucccaugggagagacguuaccgaucuguucgcggcccaaccuggacugaccucugcugugaucgaggcccucccccgcaacauggucauuacaugucagggcagcgaagacauccggaaacugcuugagucccaggggagacgcgauaucaagcugauugacaucacgcucucuaaagccgauagccggaaguuugagaaugcugugugggaccaguucaaggaucugugccacaugcauaccggcgucgugguugaaaagaagaaaagaggaggcaaggaggaaauuacaccgcacugugcccugauggacugcaucauguuugaugcggcuguguccgggggacuugacgccaaaguccuccgcgugguucugccucgggauaugguguucagaaccagcacacccaaggucgugcugugaggacuagucccuguucccagagcccacuuuuuuuucuuuuuuugaaauaaaauagccugucuuucagaucuaaaaaaaaaaaaaaaaaaaaaaaaaaaaaaaaaaaaaaaaaaaaaaaaaaaaaaaaaaaaaaaaaaaaaaaaaaaaaaaaaaaaaaaaaaaaaaaaaaaa

SEQ ID NO: 17039 - RNA, 1958 nt, Artificial Sequence
  mRNA product Design a-1 (A100) comprising derived and/or modified sequence from LASV(Nig08-A19;Clade III)__ADU56619__NP (opt5)
aggagagucccgcagucggcguccagcggcucugcuuguucgugugugugucguugcaggccuuauucaagcuuaccaugagcgccuccaaggaggugaaaucuuuccuguggacccagagccucagacgggaacuguccggcuacugcucuaacaucaaacuucaagucguuaaggacgcucaggcccugcuccacgggcuggauuuuagcgagguguccaaugugcagcgccuuaugagaaagcagaaacgggacgauggagaccugaagcgccucagagaucugaaccaagcggucaauaaccugguggaacucaagucuacacagcagaaaagcguucugcgggugggcacgcuuuccagcgacgaucugcucguccuggcugccgaccuugagaagcugaaaucuaaggugguucgcaccgaaagaccccucuccagcgggauuuauaugggaaaucugucuucccagcaacuggaucagcggaaagcccuccugaacaugaucggcaugacagggggaaauggcggccgcaacaccacaagcgacgggauugugagagucugggaugugaagaaugcugagcuucugaacaaucaguucggaaccaugccuucucucacacuggccugucuuaccaagcagggccaaguggaccugaacgaugcuguccaggcccucacggaccuggggcugaucuacaccgcgaaauaucccaauuccagcgaccucgaucggcuggcccagucccauccgauucuuaacaugaucgacacaaagaaaucuagccugaauaucuccggauacaacuuuagccucggcgcugccguuaaggcuggggccugcaugcuggauggaggcaacaugcuugagaccauuaaagugucuccucaaacaauggacggcauccugaaguccauucucaaagugaagcgcagccuggggauguucaucucugauacccccggagaaagaaauccuuaugagaacauucuguacaagaucugucucagcggcgacggguggcccuauauugcgucccggacgucuaucgucggacgcgccugggaaaauacagugguugaucuggagagcgacaacaaaccucagaagaccggcaaugggggauccaacaaaagccuucagucugcuggcuuugccgcuggccugacauacucccagcucaugacccugaaggauagcaugcugcaacuugacccgaaugccaaaaccuggauggauaucgaggggagacccgaagacccuguggagauugcccucuaccagcccucuuccggaugcuauauccacuucuuucgggaaccuacagaccugaagcaguucaagcaggaugcuaaauacagccauggcauugacgucacggaucuguuugcggcccaacccgggcucaccuccgcugugaucgaggcccugccgagaaacaugguuauuacaugucagggaucugaagacauccgcaaacuucuggagagccagggccggagagauaucaagcucauugacaucucccugucuaagguggauagccgcaaauucgagaaugccgucugggaccaguuuaaggaucugugccacaugcauaccgggauuguggucgaaaagaaaaagcggggcggaaaagaggaaaucacaccucacugugcucuuauggacugcauuauguucgaugccgcgguguccggcgggguugacgcuaaggugcucagagccguccugccccgcgauaugguguuucggaccagcacgccuaaaguugugcugugaggacuagucccuguucccagagcccacuuuuuuuucuuuuuuugaaauaaaauagccugucuuucagaucuaaaaaaaaaaaaaaaaaaaaaaaaaaaaaaaaaaaaaaaaaaaaaaaaaaaaaaaaaaaaaaaaaaaaaaaaaaaaaaaaaaaaaaaaaaaaaaaaaaaa

SEQ ID NO: 17040 - RNA, 1958 nt, Artificial Sequence
  mRNA product Design a-1 (A100) comprising derived and/or modified sequence from LASV(G1180-SLE-2010;Clade IV)__AIT17169__NP (opt5)
aggagagucccgcagucggcguccagcggcucugcuuguucgugugugugucguugcaggccuuauucaagcuuaccaugagcgccuccaaggagaucaaaucuuuccuguggacccagagccucagacgggaacuguccggcuacugcucuaacauuaagcugcaaguggucaaagacgcucaggcccugcuccacgggcuggauuuuagcgagguuuccaaugugcagcgccuuaugagaaaggaacggcgcgacgauaacgaccugaaaagacuccgggaucugaaucaggcggugaacaaucuggucgagcucaagucuacacaacaaaagagcauccugcgcgugggaacgcuuaccuccgacgaucugcucauucuggcugccgaccuugaaaaacuuaagagcaaaguuaucagaacagagcggccccucucugccggcguguauauggggaaccuguccagccagcagcuggaucagcgcagagcucuccugucuaugauuggaauguccagcggcaaucagcgggcccaggcugggcgcgacggagucgugagaguuugggaugugaagaacgucgagcuucugaauaaccaguucggcaccaugccuucucucacacuggccugucuuaccaaacaaggccagguggaccugaaugaugcggugcaggcccucacagaccuggggcugaucuacaccgcuaaguauccgaacacguccgaccucgaucggcugacccaaagccaucccauccuuaauaugauugacacaaagaaauccucucugaacaucagcggauacaauuuuucccucggcgccgcugucaaggccggggcgugcaugcuggauggaggcaacaugcuugaaaccauuaaaguuagcccucagacaauggacgggauccugaagucuauucucaaagugaagaaagcccugggaauguucaucuccgauacccccggcgagcgcaacccuuaugaaaauauucuguacaagaucugucucagcggcgacggguggcccuauaucgcuucuagaacgagcauuacaggacgggccugggagaacaccguggucgaucuggaguccgacggcaagccucagaaagcugggucuaauaacagcaauaagucccuucagagcgugggauuuacagccggccugaccuacucucaacucaugacccugaaagaugccaugcugcagcuugacccgaacgcuaagacauggauggauaucgaagggagacccgaggacccuguugaaauugcgcucuaccagcccuccagcggaugcuauauccacuucuuucgcgagccuacggaccugaaacaguucaagcaagaugccaaguacucucauggcauugacgugaccgaucuguuugcugcccagcccggccucacauccgccgucaucgacgcucugccgcggaauauggugaucaccugucaggggagcgaugacauuagaaaacuucuggaaucccagggacgcaaggauaucaaacucauugacaucgcccugucuaagacagauagccggaaauaugagaacgcgguuugggaccaauacaaggaucugugccacaugcauaccggcguggucguggagaagaaaaagagagggggaaaagaagagauuacgccucacugugcucuuauggacugcaucauguucgaugccgccgucuccggcgggcucaauacaucugugcugcgcgcuguucugccccgggacaugguguuuagaaccagcaccccucgcgucgugcucugaggacuagucccuguucccagagcccacuuuuuuuucuuuuuuugaaauaaaauagccugucuuucagaucuaaaaaaaaaaaaaaaaaaaaaaaaaaaaaaaaaaaaaaaaaaaaaaaaaaaaaaaaaaaaaaaaaaaaaaaaaaaaaaaaaaaaaaaaaaaaaaaaaaaa

SEQ ID NO: 17041 - RNA, 1958 nt, Artificial Sequence
  mRNA product Design a-1 (A100) comprising derived and/or modified sequence from LASV(G1442-SLE-2011;Clade IV)__AIT17181__NP (opt5)
aggagagucccgcagucggcguccagcggcucugcuuguucgugugugugucguugcaggccuuauucaagcuuaccaugagcgccuccaaggaggugaaaucuuuccuguggacccagagccucagacgggaacuguccggcuacugcucuaacaucaaacuucaagucguuaaggacgcucaggcccugcuccacgggcuggauuuuagcgagguguccaaugugcagcgccuuaugagaaagcagcggcgcgacgauaacgaccugaaaagacuccgggaucugaaucaagcggucaacaaucugguggaacucaagucuacacagcaaaagagcguucugcgcgugggaacgcuuaccuccgacgaucugcucguccuggcugccgaccuugagaaacuuaagagcaaagugauuagaacagaacggccccucucugccggcguuuauauggggaaccuguccagccagcagcuggaucagcgcagagcucuccugaauaugaucggaaugucuggcgggauucagggaacccggacaggccgcgacggcguggucagagugugggaugugaagaacgccgaccuucugaauaaccaguucgggaccaugccuucccucacacuggcuugucuuaccaaacaaggacaggucgaucugaaugacguugugcaggcccucacggaccugggccugaucuacaccgcgaaguauccgaacgccagcgaucucgaccggcugacacaaucucaucccauucuuaauaugaucgauaccaagaaauccagccugaacaucuccggguacaauuuuucucucggagcugccgugaaggcuggcgccugcaugcuggacgggggaaacaugcuugagacaauuaaagucagcccucagaccauggauggcauccugaaguccauucucaaagugaagaaaacgcugggcauguucaucagcgacacacccggggagcgcaacccuuaugaaaauauucuguacaagaucugucucucuggagauggcuggcccuauauugcguccagaaccagcaucacagggcgggccugggagaacaccguuguggaccuggaaucugauggaaagccucagaaagcuggcagcaauaacuccaauaagucucuucagagcgccggguuugcugccggacugaccuacucccaacucaugacacugaaagacgccaugcugcagcuugauccgaacgcuaagacguggauggacaucgagggcagacccgaggacccugucgaaauugcgcucuaccagcccagcucuggcugcuauauccacuucuuucgcgagccuaccgaucugaaacaguucaagcaagacgccaaguacucccaugggauugaugugacagaccuguuugcugcccagcccggacucaccagcgccguuaucgaagcucugccgcggaauauggugauuacaugucagggcucugaugacaucaaaaagcugcuggagucccaggggagaaaagauaucaagcucauugacaucgcccugagcaaaaccgauucccgcaaguaugaaaacgcggucugggaccaauacaaggaucugugccacaugcauacgggaguggucguggagaaaaagaaacggggcgggaaggaggaaauuacaccucacugugcucuuauggacugcaucauguucgaugccgccguuucuggcggacucaauacccuggugcugagagcuguccucccccgcgacaugguguuucggaccagcacaccuagaguugugcugugaggacuagucccuguucccagagcccacuuuuuuuucuuuuuuugaaauaaaauagccugucuuucagaucuaaaaaaaaaaaaaaaaaaaaaaaaaaaaaaaaaaaaaaaaaaaaaaaaaaaaaaaaaaaaaaaaaaaaaaaaaaaaaaaaaaaaaaaaaaaaaaaaaaaa

SEQ ID NO: 17042 - RNA, 1958 nt, Artificial Sequence
  mRNA product Design a-1 (A100) comprising derived and/or modified sequence from LASV(G3010-SLE-2013;Clade IV)__AIT17345__NP (opt5)
aggagagucccgcagucggcguccagcggcucugcuuguucgugugugugucguugcaggccuuauucaagcuuaccaugagcgccuccaaggagaucaaaucuuuccuguggacccagagccucagacgggaacuguccggcuacugcucuaacauuaaacuucaaguggucaaagacgcucaggcccugcuccacgggcuggauuuuagcgagguuuccaaugugcagcgccuuaugagaaaggaacggcgcgacgauaacgaccugaaaagacuccgggaucugaaucaggcggugaacaaucuggucgagcucaagucuacacaacaaaagagcauccugcgcgugggaacgcuuaccuccgacgaucugcucauucuggcugccgaccuugaaaaacuuaagagcaaaguuacaagaaccgagcggccccucucugccggcguguauauggggaaccuguccagccagcagcuggaucagcgcagagcucuccugucuaugaucggaauguccagcggcguccagggggcccgggcuggacgcgacggcgugguuagagugugggaugucaagaaugccgagcuucugaacaaucaguucggcacaaugccuucucucacccuggcgugucuuacaaaacaggggcaaguggaccugaacgaugugguccaggcccucaccgaccugggacugauuuacacggcuaaguauccgaauaccuccgaccucgaucggcugacacagagccaucccauccuuaacaugaucgacaccaagaaauccucucugaauauuagcggcuacaacuuuucccucggggccgcuguuaaggccggagcgugcaugcuggauggcgggaauaugcuugaaacaaucaaagugagcccucaaaccauggacggcauucugaagucuauccucaaagugaagaaagcccugggaauguucauuuccgagacgcccggcgaacgcaacccuuaugagaacauccuguacaagauuugucucagcggggauggauggcccuauaucgcuucuagaacaagcaucaccggccgggccugggagaauacagucguggaccuggaauccgaugggaagccucagaaagcuggaucuaacaauagcaacaagucccuucagagcgccggcuuuaccgccgggcugaccuacucucagcucaugacacugaaagacgcuaugcugcaacuugauccgaaugcgaagacguggauggacauugagggaagacccgaagauccuguugagguggcccucuaccagcccuccagcggcugcuauauccacuucuuucgcgaaccuaccgaccugaaacaguucaagcaggacgcuaaguacucucauggcauugaugucacagaccuguuugccgcccaacccgggcucaccuccgcugugaucgaugcccugccgcggaacaugguuauuacaugucagggaagcgacgauaucaaaaagcugcuggagucccagggcagaaaagacaucaagcucauugauaucgcgcugucuaaaaccgacagccgcaaguaugagaaugcugugugggaucaguacaaggaccugugccacaugcauacgggggucguggucgaaaagaagaaacggggaggcaaggaggaaauuacaccucacugugcccuuauggauugcaucauguucgacgccgcuguguccgggggccucaacaccucuguucugagagccgugcugccccgcgauauggucuuucggaccagcacaccuagagugguucucugaggacuagucccuguucccagagcccacuuuuuuuucuuuuuuugaaauaaaauagccugucuuucagaucuaaaaaaaaaaaaaaaaaaaaaaaaaaaaaaaaaaaaaaaaaaaaaaaaaaaaaaaaaaaaaaaaaaaaaaaaaaaaaaaaaaaaaaaaaaaaaaaaaaaa

SEQ ID NO: 17043 - RNA, 1958 nt, Artificial Sequence
  mRNA product Design a-1 (A100) comprising derived and/or modified sequence from LASV(G502-SLE-2009;Clade IV)__AIT17127__NP (opt5)
aggagagucccgcagucggcguccagcggcucugcuuguucgugugugugucguugcaggccuuauucaagcuuaccaugagcgccuccaaggagaucaaaucuuuccuguggacccagagccucagacgggaacuguccggcuacugcucuaacauuaagcugcaaguggucaaagacgcucaggcccugcuccacgggcuggauuuuagcgagguuuccaaugugcagcgccuuaugagaaaggaacggcgcgacgauaacgaccugaaaagacuccgggaucugaaucaggcggugaacaaucuggucgagcucaagucuacacaacaaaagagcauccugcgcgugggaacgcuuaccuccgacgaucugcucauucuggcugccgaccuugaaaaacuuaagagcaaaguuaucagaacagagcggccccucucugccggcguguauauggggaaccuguccagccagcagcuggaucagcgcagagcucuccugucuaugauuggaauguccggcgggaaucagggaguccgggccggcaaggacggcgugguucgcgugugggaugucaaaaacgcugagcuucugaauaaccaguucgggaccaugccuagccucacacuggccugucuuaccaagcagggacaaguggaccugaaugaugcggugcaggcccucacagaccugggccugaucuacaccgcuaaguauccgaacacgucugaccucgauagacugacccagucccaucccauccuuaauaugauugacaccaaaaagagcucccugaacaucucuggguacaauuuuagccucggagccgcugucaaagccggcgcgugcaugcuggaugggggaaacaugcuugaaacaauuaagguuuccccucaaacaauggacggcauccugaaaagcauucucaaggugaaaaaggcccugggcauguucaucucugauacccccggggagcggaacccuuaugaaaauauucuguacaagaucugucucuccggagacggcuggcccuauaucgcuagccgcacgucuauuacagggagagccugggagaacaccguggucgaucuggagagcgacggaaaaccucagaaggcuggcuccaauaacucuaauaaaagccuucaguccgccggguuuacagccggacugaccuacagccagcucaugacccugaaggaugcuaugcugcaacuugacccgaacacaaaaacguggauggauaucgaaggccggcccgaggacccuguggaaauugcgcucuaccagcccucuuccggcugcuauauccacuucuuuagagagccuaccgaccugaagcaguucaagcaggaugccaaauacagccaugggauugacguuacagaucuguuugcugcccaacccggacucaccucugccgugaucgacgcucugccgcgcaauauggucaucacaugucagggcuccgaugacauucggaaacuucuggaaagccaggggagaaaggauaucaagcucauugacaucgcccugaacaaaaccgauucccgcaaguaugagaaugcggugugggaccaguacaaggaucugugccacaugcauacgggaguuguggucgagaaaaagaaacggggcgggaaggaagagauuacaccucacugugcucuuauggacugcaucauguucgaugccgccgugucuggcggacucaacaccagcguccugagagcugugcugccccgcgacaugguuuuucggaccuccacaccuagagugguccucugaggacuagucccuguucccagagcccacuuuuuuuucuuuuuuugaaauaaaauagccugucuuucagaucuaaaaaaaaaaaaaaaaaaaaaaaaaaaaaaaaaaaaaaaaaaaaaaaaaaaaaaaaaaaaaaaaaaaaaaaaaaaaaaaaaaaaaaaaaaaaaaaaaaaa

SEQ ID NO: 17044 - RNA, 1958 nt, Artificial Sequence
  mRNA product Design a-1 (A100) comprising derived and/or modified sequence from LASV(G733-SLE-2010;Clade IV)__AIT17155__NP (opt5)
aggagagucccgcagucggcguccagcggcucugcuuguucgugugugugucguugcaggccuuauucaagcuuaccaugagcgccuccaaggagaucaaaucuuuccuguggacccagagccucagacgggaacuguccggcuacugcucuaacauuaagcugcaaguggucaaagacgcucaggcccugcuccacgggcuggauuuuagcgagguuuccaaugugcagcgccuuaugagaaaggaacggcgcgacgauaacgaccugaaaagacuccgggaucugaaucaggcggugaacaaucuggucgagcucaagucuacacaacaaaagagcgugcugcgcguuggaacgcuuaccuccgacgaacugcucgugcuggcugccgaucuugagaaacuuaagagcaaagucaucagaacagagcggccccucucugccggcguguauauggggaaccuguccagccagcagcuggaccagcgcagagcucuccugucuaugauuggaauguccggcgggaaucagggagcccggaccggccgcgauggcguugugagagucugggacgugaagaacgcugaacuucugaauaaccaguucgggacaaugccuagccucacccuggccugucuuacaaaacagggacaaguggaucugaaugacgcgguccaggcccucaccgaucugggccugaucuacacggcuaaguauccgaacaccucugaccucgaccggcugacacagucccaucccauucuuaauaugaucgauaccaagaaaagcucccugaacaucucuggguacaauuuuagccucggagccgcuguuaaggccggcgcgugcaugcuggacgggggaaacaugcuugagacaauuaaaguguccccucaaaccauggauggcauccucaagagcauucugaaagugaagaaagcccugggcauguucaucucugacacgcccggggaacgcaacccuuaugagaauauucuguacaagaucugucucuccggagauggcuggcccuauauugcuagcagaacaucuaucaccgggcgggccugggagaacacagucguggaccuggaaagcgauggaaagccucagaaagcuggcuccaauaacucuaauaagagccuucaguccgccggguuuaccgccggacugaccuacagccagcucaugacacugaaagacgcuaugcugcaacuugauccgaacgcgaagacguggauggacaucgagggcagacccgaagauccuguugagauugcccucuaccagcccucuuccggcugcuauauccacuucuuucgcgaaccuaccgaccugaaacaguucaagcaggacgcuaaguacagccaugggauugaugugacagaccuguuugccgcccaacccggacucaccucugcugucaucgaugcccugccgcggaauauggugauuacaugucagggcuccgacgauaucagaaaacuucuggagagccaggggcgcaaggacaucaaacucauugauaucgcgcuguccaagauugacucucggaaauaugagaacgcuguuugggaucaguacaaggaccugugccacaugcauaccggaguggucguggaaaagaaaaagagaggcgggaaagaggaaaucacgccucacugugcccuuauggauugcauuauguucgacgccgcugucagcggcggacucaauucccuggugcugcgcgccguucucccccgggauaugguguuuagaacaucuaccccucgcgucgugcugugaggacuagucccuguucccagagcccacuuuuuuuucuuuuuuugaaauaaaauagccugucuuucagaucuaaaaaaaaaaaaaaaaaaaaaaaaaaaaaaaaaaaaaaaaaaaaaaaaaaaaaaaaaaaaaaaaaaaaaaaaaaaaaaaaaaaaaaaaaaaaaaaaaaaa

SEQ ID NO: 17045 - RNA, 1958 nt, Artificial Sequence
  mRNA product Design a-1 (A100) comprising derived and/or modified sequence from MOPV/LASV reassortant(IGS-1;Clade IV)__AFY05578__NP (opt5)
aggagagucccgcagucggcguccagcggcucugcuuguucgugugugugucguugcaggccuuauucaagcuuaccaugagcgccuccaaggagaucaaaucuuuccuguggacccagagccucagacgggaacuguccggcuacugcucuaacauuaaacuucaaguggucaaggacgcucaggcccugcuccacgggcuggauuuuagcgagguuuccaaugugcagcgccuuaugagaaaggaacggcgcgacgauaacgaccugaaaagacuccgggaucugaaucaggcggugaacaaucuggucgagcucaagucuacacaacaaaagagcauccugcgcgugggaacgcuuaccuccgacgaucugcucauucuggcugccgaccuugaaaaacugagaagcaagguuauccggacagagcgcccccucucugccggcguguauauggggaaccuguccagccagcagcuggaucagagacgggcucuccugaauaugauuggaaugucuggcgggaaccagggagcccgcgcuggcagagacggcgucgugcggguuugggaugugaaaaaugccgagcuucuguccaaccaguucgggaccaugccuagccucacacuggcgugucuuaccaagcagggacaagucgaccugaaugaugccgugcaggcucucacagaccugggccugaucuacaccgccaaauauccgaacacgucugaccucgaucgccugacccagucccaucccauccuuaauaugauugacacaaagaaaagcucccugaacaucucuggguacaauuuuagccucggagcugccgugaaggcgggcgccugcaugcuggaugggggaaacaugcuugaaaccauuaaggucuccccucaaacaauggacggcauccugaaaagcauucucaagguuaaaaaggcucugggcauguucaucucugauacccccggggagagaaacccuuaugaaaauauucuguacaaaaucugucucuccggagacggcuggcccuauaucgccagccggacgucuauuacagggagagcuugggagaacaccgugguggaucuggagagcgacggaaagccucagaaggccgauuccaauaacucuagcaaaucccuucagagcgccggcuuuacagcugggcugaccuacucucagcucaugacccugaaggacgcgaugcugcaacuugauccgaaugccaaaacauggauggacaucgaaggacgccccgaggacccugucgaaauugcucucuaccagcccuccagcggcugcuauauccacuucuuucgggagccuacggaucugaagcaguucaaacaggacgccaaguacucucauggcauugaugugaccgaccuguuugccacacaacccgggcucaccuccgcuguuaucgaugcccugccgagaaacauggugaucacaugucagggaagcgacgauauucgcaaacuucuggaaucccagggccggaaggacaucaagcucauugauaucgaccugucuaaaaccgauagcagaaaguaugagaaugcggucugggaccaguacaaagaucugugccacaugcauacgggggugguuguggagaagaagaaacgcggaggcaaggaagagauuacaccucacugugcucuuauggacugcaucauguucgacgccgccgucuccgggggccucaacaccucugugcugcgggcuguccugcccagagauaugguguuucgcaccagcacaccucggguugugcucugaggacuagucccuguucccagagcccacuuuuuuuucuuuuuuugaaauaaaauagccugucuuucagaucuaaaaaaaaaaaaaaaaaaaaaaaaaaaaaaaaaaaaaaaaaaaaaaaaaaaaaaaaaaaaaaaaaaaaaaaaaaaaaaaaaaaaaaaaaaaaaaaaaaaa

SEQ ID NO: 17046 - RNA, 1958 nt, Artificial Sequence
  mRNA product Design a-1 (A100) comprising derived and/or modified sequence from LASV(LM765-SLE-2012;Clade IV)__AIT17815__NP (opt5)
aggagagucccgcagucggcguccagcggcucugcuuguucgugugugugucguugcaggccuuauucaagcuuaccaugagcgccuccaaggagaucaaaucuuuccuguggacccagagccucagacgggaacuguccggcuacugcucuaacauuaagcugcaaguggucaaagacgcucaggcccugcuccacgggcuggauuuuagcgagguuuccaaugugcagcgccuuaugagaaaggaacggcgcgacgauaacgaccugaaaagacuccgggaucugaaucaggcggugaacaaucuggucgagcucaagucuacacaacaaaagagcauccugcgcgugggaacgcuuaccuccgacgaucugcucauucuggcugccgaccuugaaaaacuuaagagcaaaguuacaagaaccgagcggccccucucugccggcguguauauggggaaccuguccagccagcagcuggaucagcgcagagcucuccuggacaugaucggaaugucuggcuccaaucagggggcccgggcuggacgcgauggcgucgugagaguuugggacgugaagaacgccgagcuucugaauaaccaguucggcacaaugccuagccucacccuggcgugucuuacaaaacaggggcaagucgaucugaaugacgccgugcaggcucucaccgaccugggacugauuuacacggccaaguauccgaacaccucugaucucgaccggcugacacagucccaucccauccuuaauaugaucgauaccaagaaaagcucccugaacauuucuggcuacaauuuuagccucggggcugccgugaaggcgggagccugcaugcuggacggcgggaacaugcuugaaacaaucaaagucuccccucaaaccauggauggcauucucaagagcauccugaaaguuaagaaagcucugggaauguucauuucugacgcccccggcgagcgcaacccuuaugaaaauauccuguacaagauuugucucuccggggauggauggcccuauaucgcuagcagaacgucuaucacaggccgggccugggagaacaccgugguggaccuggagagcgaugggaagccucagaaagccggauccaauggcucuaacaagagccuucaguccgcuggguuuacagcgggacugaccuacagccagcucaugacccugaaagacgccaugcugcaacuugauccgaaugcuaagacauggauggacauugaaggcagacccgaggacccugucgaaaucgcccucuaccagcccucuuccggcugcuauauucacuucuuucgcgagccuacggaucugaaacaguucaagcaggacgccaaguacagccaugggaucgaugugaccgaccuguuugcugcccaacccggacucacaucugcgguuauugaugcucugccgcggaacauggugaucaccugucagggcuccgacgauaucagaaaacuuuucgaaagccaggggcgcaaggacauuaaacugaucgauauugcccucuccaagacagacucucggaaauaugagaaugccgucugggaucaguacaaggaccugugccacaugcauaccggaaucgugguugagaagaaaaagagaggcgggaaagaagagauuacgccucacugugcucugauggauugcaucauguuugacgccgcugugagcggcggacuuaacacauccguccuccgcgccgugcugccccgggacauggucuucagaaccucuaccccucgcgugguucugugaggacuagucccuguucccagagcccacuuuuuuuucuuuuuuugaaauaaaauagccugucuuucagaucuaaaaaaaaaaaaaaaaaaaaaaaaaaaaaaaaaaaaaaaaaaaaaaaaaaaaaaaaaaaaaaaaaaaaaaaaaaaaaaaaaaaaaaaaaaaaaaaaaaaa

SEQ ID NO: 17047 - RNA, 1958 nt, Artificial Sequence
  mRNA product Design a-1 (A100) comprising derived and/or modified sequence from LASV(LM776-SLE-2012;Clade IV)__AIT17825__NP (opt5)
aggagagucccgcagucggcguccagcggcucugcuuguucgugugugugucguugcaggccuuauucaagcuuaccaugagcgccuccaaggagaucaaaucuuuccuguggacccagagccucagacgggaacuguccucuuacugcagcaacauuaaacuucaaguggucaaggacgcucaggcccugcuccacggccuggauuuuuccgagguuucuaaugugcagcgccuuaugagaaaggaacggcgcgacgauaacgaccugaaaagacuccgggaucugaaucaggcggugaacaaucuggucgagcucaagagcacacaacagaaguccauccugcgcguggggacgcuuaccagcgacgaucugcucauucuggcugccgaccuugaaaaacugaagucuaaaguuacaagaaccgagcggccccucuccgccggaguguauaugggcaaccugagcucucagcagcuggaucaacgcagagcucuccuguccaugaucgggaugagcggaucuaaucagggcgcccgggcugggcgcgacggagucgugagaguuugggaugugaagaacgccgagcuucugaauaaccaguucggcacaaugccuucccucacccuggcgugucuuacaaaacagggccaagucgaccugaaugaugccgugcaggcucucaccgaccuggggcugauuuacacggccaaguauccgaacaccagcgaccucgaucggcugacacagucccaucccauccuuaauaugaucgacaccaagaaaucuagccugaacauuuccggauacaauuuuagccucggcgcugccgugaaggcgggggccugcaugcuggauggaggcaacaugcuugaaacaaucaaagucucuccucaaaccauggacgggauucugaaguccauccucaaaguuaagaaagcucugggaauguucauuagcgauacgcccggcgagcgcaacccuuaugaaaauauccuguacaagauuugucucucuggcgacggguggcccuauaucgccagcagaacauccaucaccggacgggcuugggagaacacagugguggaucuggagucugacggcaagccucagaaagccgggagcaauaacuccaauaagagccuucagucugccggauuuaccgcuggccugaccuacucccagcucaugacacugaaagaugcgaugcugcaacuugacccgaacgccaagacguggauggauauugaagggagacccgaggacccugucgaaguggcucucuaccagcccagcucuggaugcuauauccacuucuuucgcgagccuaccgaccugaaacaguucaagcaggaugccaaguacucccauggcauugacguuacagaucuguuugccgcucaacccggccucaccagcgccgugaucgacgcgcugccgcggaauauggucauuacaugucagggguccgaugacaucagaaaacuucuggaaucucagggacgcaaggauaucaaacucauugacaucgcucugagcaagaccgauucccggaaauaugagaacgccgugugggaccaguacaaggaucugugccacaugcauacgggcguuguggucgagaagaaaaagagagggggaaaagaagagauuacaccucacugugcccuuauggacugcaucauguucgaugcugccgugucuggcgggcucaauaccagcguccugcgcgcugugcugccccgggacaugguuuuuagaaccuccacaccucgcgugguccucugaggacuagucccuguucccagagcccacuuuuuuuucuuuuuuugaaauaaaauagccugucuuucagaucuaaaaaaaaaaaaaaaaaaaaaaaaaaaaaaaaaaaaaaaaaaaaaaaaaaaaaaaaaaaaaaaaaaaaaaaaaaaaaaaaaaaaaaaaaaaaaaaaaaaa

SEQ ID NO: 17048 - RNA, 1958 nt, Artificial Sequence
  mRNA product Design a-1 (A100) comprising derived and/or modified sequence from LASV(Mad39;Clade IV)__ANH09723__NP (opt5)
aggagagucccgcagucggcguccagcggcucugcuuguucgugugugugucguugcaggccuuauucaagcuuaccaugagcgccuccaaggagaucaaaucuuuccuguggacccagagccucagacgggaacuguccggcuacugcucuaacauuaagcugcaaguggucaaagacgcucaggcccugcuccacgggcuggauuuuagcgagguuuccaaugugcagcgccuuaugagaaagcagcggcgcgacgauaacgaccugaaaagacuccgggaucugaaucaagcggugaacaaucuggucgaacucaagucuacacagcaaaagagcgugcugcgcguuggaacgcuuaccuccgacgaucugcucacacuggcugccgaccuugagaaacuuaagagcaaagugaccagaacagaacggccccucaccgccggcgucuauauggggaaccugucuucccagcagcuggaucagcgcagagcucuccugaauaugaucggaaugagcggcgggaaccagggagcccggacaggccgcgacggcgugguuagagugugggaugucaagaaugcugagcuucugaacaaucaguucgggaccaugccuucucucacgcuggccugucuuaccaaacaaggacagguggaccugaacgaugugguccaggcgcucacagaccugggccugauuuacaccgccaaguauccgaauacauccgaccucgaucggcugacccaaagccaucccauccuuaacaugauugacacgaauaagucuucccugaacaucagcggguacaacuuuucccucggagcugccguuaaagcuggcgccugcaugcuggaugggggaaauaugcuugagacaaucaaggugucuccucagaccauggacggcauucugaaaagcauccucaaggugaaaaagucccugggcauguucauuagcgauacacccggggaacgcaacccuuaugagaauauccuguacaaaauuugucucucuggagacggcuggcccuauaucgcguccagaaccagcauuaccgggcgggccugggaaaacacagucguggaucuggagucuggaggcaagccucagaaggcugggagcaauaacuccaauaaaucucuucagagcgccggauuugcugccggccugacguacucccaacucaugacccugaaggacgccaugcugcagcuugauccgaacgcuaaaacauggauggacaucgagggcagacccgaagauccuguugagaucgcgcucuaccagcccauuagcgggugcuauauccacuucuuucgcgaaccuaccgaccugaagcaguucaaacaagacgccaaguacucucauggaauugaugugacagaccuguuugcugcccagcccggccucaccuccgccgucaucgaggcucugccgcggaauauggugauuacgugucaggggagcgaugacaucagaaaacuuuucgaaucucagggacgcaaggauaucaagcugauugacaucgcccucuccaaaacagauagccggaaguaugagaacgcgguuugggaccaauacaaagaucugugccacaugcauaccggcguggucguggagaagaagaaaaagggcgggaaagaagagauuaccccucacugugcucugauggacugcaucauguuugaugccgccgucuccggaggccuuaauacacucgugcugagagcuguucugccccgcgacaugguguuccggaccucuacaccuaaggucgugcucugaggacuagucccuguucccagagcccacuuuuuuuucuuuuuuugaaauaaaauagccugucuuucagaucuaaaaaaaaaaaaaaaaaaaaaaaaaaaaaaaaaaaaaaaaaaaaaaaaaaaaaaaaaaaaaaaaaaaaaaaaaaaaaaaaaaaaaaaaaaaaaaaaaaaa

SEQ ID NO: 17049 - RNA, 1958 nt, Artificial Sequence
  mRNA product Design a-1 (A100) comprising derived and/or modified sequence from LASV(Z0947-SLE-2011;Clade IV)__AIT17841__NP (opt5)
aggagagucccgcagucggcguccagcggcucugcuuguucgugugugugucguugcaggccuuauucaagcuuaccaugagcgccuccaaggagaucaaaucuuuccuguggacccagagccucagacgggaacuguccggcuacugcucuaacauuaagcugcaaguggucaaagacgcucaggcccugcuccacgggcuggauuuuagcgagguuuccaaugugcagcgccuuaugagaaaggaacggcgcgacgauaacgaccugaaaagacuccgggaucugaaucaggcggugaacaaucuggucgagcucaagucuacacaacaaaagagcauccugcgcgugggaacgcuuaccuccgacgaucugcucauucuggcugccgaccuugaaaaacuuaagagcaaaguuacaagaaccgagcggccccucucugccggcguguauauggggaaccuguccagccagcagcuggaucagcgcagagcucuccugaauaugaucggaaugucuggcuccaaccagggggcccggacaggacgcgacggcgucgugagaguuugggaugugaagaaugcugagcuucugaacaaucaguucggcaccaugccuagccucacacuggccugucuuaccaaacaggggcaagucgaccugaacgaugcggugcaggcccucacggaccugggacugauuuacaccgcuaaguauccgaauacaucugaccucgaucggcugacccagucccaucccauccuuaacaugaucgacacaaagaaaagcucccugaauauuucuggcuacaacuuuagccucggggccgcugugaaggccggagcgugcaugcuggauggcgggaacaugcuugaaaccaucaaagucuccccucaaacgauggacggcauucucaagagcauccugaaaguuaagaaagcccugggaauguucauuucugaugcucccggcgagcgcaauccuuaugaaaacauccuguacaagauuugucucuccggggacggauggcccuauaucgccagcagaacaucuaucaccggccgggcuugggagaauacagugguggaucuggagagcgacgggaagccucagaaagccggauccaacggcucuaauaagagccuucaguccgccggguuuaccgcuggacugaccuacagccagcucaugacacugaaagaugcgaugcugcaacuugacccgaacgccaagacguggauggauauugaaggcagacccgaggacccugucgaaaucgcucucuaccagcccucuuccggcugcuauauucacuucuuucgcgagccuaccgaccugaaacaguucaagcaggaugccaaguacagccaugggaucgacgugacagaucuguuugccgcucaacccggacucaccucugccguuauugacgcgcugccgcggaauauggugaucacaugucagggcuccgaugacaucagaaaacuuuucgaaagccaggggcgcaaggauauuaaacugaucgacauugcucucuccaagaccgauucucggaaauaugagaacgccgucugggaccaguacaaggaucugugccacaugcauacgggaaucgugguugagaagaaaaagagaggcgggaaagaagagauuacaccucacugugcccugauggacugcaucauguuugaugcugccgugagcggcggacuuaauaccuccguccuccgcgcugugcugccccgggacauggucuucagaaccucuacaccucgcgugguucugugaggacuagucccuguucccagagcccacuuuuuuuucuuuuuuugaaauaaaauagccugucuuucagaucuaaaaaaaaaaaaaaaaaaaaaaaaaaaaaaaaaaaaaaaaaaaaaaaaaaaaaaaaaaaaaaaaaaaaaaaaaaaaaaaaaaaaaaaaaaaaaaaaaaaa

SEQ ID NO: 17050 - RNA, 1970 nt, Artificial Sequence
  mRNA product Design a-2 (hSL-A64-N5) comprising derived and/or modified sequence from LASV(Josiah;Clade IV)__NP_694869__NP (opt1)
aggagaguccgcucagccagguugcagaagcggcuuagcguguguccuaaucuucucucugcguguagguaggccugugccgcaaacaagcuuaccaugagcgccuccaaggagaucaagagcuuccuguggacccagucccuccgccgggagcugagcggcuacugcuccaacaucaagcuccagguggucaaggacgcccaggcgcugcugcacgggcuggacuucagcgagguguccaacgugcagcgccucaugcggaaggagcgccgggacgacaacgaccugaagcgccugcgggaccucaaccaggccgucaacaaccugguggagcucaagagcacccagcagaaguccauccugcgcgugggcacccugaccagcgacgaccugcucauccuggccgccgaccuggagaagcucaaguccaaggucauccggaccgagcgcccccugagcgccgggguguacaugggcaaccuguccagccagcagcucgaccagcggcgcgcgcugcugaacaugaucgggauguccggcggcaaccagggggcccgggccggccgcgacggggugguccgggugugggacgugaagaacgccgagcuccugaacaaccaguucggcaccaugccgagccugacgcucgcgugccugaccaagcaggggcaggucgaccugaacgacgccgugcaggcccucaccgaccugggccugaucuacaccgccaaguaccccaacacguccgaccucgaccgccugacccagagccaccccauccugaacaugaucgacaccaagaaguccagccucaacaucagcggcuacaacuucucccugggggccgcggugaaggccggcgccugcaugcuggacgggggcaacaugcucgagaccaucaaggucagcccccagacgauggacggcauccugaaguccauccugaaggugaagaaggcccucgggauguucaucagcgacaccccgggcgagcggaaccccuacgagaacauccuguacaagaucugccuguccggggacggcuggcccuacaucgccagccgcaccuccaucaccgggcgggcgugggagaacacgguggucgaccucgagagcgacggcaagccccagaaggccgacuccaacaacagcuccaagagccugcaguccgccggcuucaccgccgggcugaccuacagccagcucaugacccugaaggacgccaugcugcagcuggacccgaacgcgaagacguggauggacaucgagggccgccccgaggaccccguggagaucgcccucuaccagcccuccagcgggugcuacauccacuucuuccgggagccgaccgaccugaagcaguucaagcaggacgccaaguacucccacggcaucgacgugaccgaccuguucgccacccagcccgggcucacgagcgccgucaucgacgcgcugccccgcaacauggugaucacgugccagggcuccgacgacauccgcaagcugcucgagagccagggccggaaggacaucaagcugaucgacaucgcccugagcaagaccgacucccgcaaguacgagaacgccgugugggaccaguacaaggaccucugccacaugcacaccggggucguggucgagaagaagaagcggggcgggaaggaggagaucaccccgcacugcgcccugauggacugcaucauguucgacgcggccgugagcggcgggcugaacaccuccgugcuccgcgccguccugccccgggacaugguguuccgcaccagcacgccccgggugguccugugaggacuagucccuguucccagagcccacuuuuuuuucuuuuuuugaaauaaaauagccugucuuucagaucucaaaggcucuuuucagagccaccaaaaaaaaaaaaaaaaaaaaaaaaaaaaaaaaaaaaaaaaaaaaaaaaaaaaaaaaaaaaaaaaagaauu

SEQ ID NO: 17051 - RNA, 1970 nt, Artificial Sequence
  mRNA product Design a-2 (hSL-A64-N5) comprising derived and/or modified sequence from LASV(LP;Clade I)__AAF86702__NP (opt1)
aggagaguccgcucagccagguugcagaagcggcuuagcguguguccuaaucuucucucugcguguagguaggccugugccgcaaacaagcuuaccaugagcaacuccaaggagaucaagagcuuccuguggacccagucccuccgccgggagcugagcggcuacugcuccaacaucaagcuccagguggucaaggacgcccaggcccugcugcacgggcuggacuucagcgagguguccaacgugcagcgccucaugcggaagcagaagcgcgacgacgcggaccugaagcggcugcgcgaccucaaccaggccgucaacaaccugguggagcucaagagcacccagcagaagaacgugcugcgggucggcacgcuguccagcgacgaccugaucacccucgccgccgaccuggagaagcugaaguccaaggugauccgcaccgagcggccccucagcuccgggguguacaugggcaaccugagcucccagcagcuggaccagcgccgggcccuccugagcaugaucgggauguccggcggcccgcaggggaaccgcaccggcggggacggcgucgugcgggugugggacgucaagaacgcggagcugcucaacaaccaguucgggacgaugcccagccugacccuggccugccucaccaagcagggccagguggaccugaacgacgccgugcaggcccugaccgaccucggccugaucuacacggcgaaguaccccaacuccagcgaccuggacaugcucacccagagccaccccauccuggggauggucgacaccaagaaguccagccugaacaucuccggcuacaacuucagccucggggccgccgugaaggccggcgccugcaugcuggacggcgggaacaugcuggagaccaucaagguguccccgcagacgauggacggcauccucaagagcauccugaaggucaagcgcucccuggggauguucaucagcgacacccccggcgagcggaaccccuacgagaacauccucuacaagaucugccuguccggggagggcuggcccuacaucgcgagccgcaccuccaucaccggccgggccugggagaacacgcugguggaccucgagagcgacaacaagccgcccaagcugaacuccgccgggagcaacaagucccugcaggccgccggccucaacgcggggcugaccuacagccagcugaugacccugaaggacugcaugcuccagcuggaccccuccagcaagaccuggaucgacaucgagggccgccccgaggacccgguggagaucgcccuguuccagcccuccagcgggugcuacauccacuucuuccgggagcccacggaccucaagcaguucaagcaggacgccaaguacagccacggcaucgacgucaccgaccuguucuccacccagcccggccugaccagcgccgugaucgaggcccucccgcgcaacauggugcugacgugccagggguccgacgacaucaagaagcugcucgagagccagggccggcgcgacaucaagcugaucgacaucucccugagcaaggcggacucccgcaaguucgagaacgccgucugggaccaguacaaggaccucugccacaugcacaccgggguggucguggagaagaagaagcggggcgggaaggaggagaucacgccccacugcgcccugcuggacugcaucauguucgacgccgccaccaccggcagccucaacaucaccacccugcgcgcggugcugccccgggacauggucuuccgcaccuccacgcccaagguggugcucugaggacuagucccuguucccagagcccacuuuuuuuucuuuuuuugaaauaaaauagccugucuuucagaucucaaaggcucuuuucagagccaccaaaaaaaaaaaaaaaaaaaaaaaaaaaaaaaaaaaaaaaaaaaaaaaaaaaaaaaaaaaaaaaaagaauu

SEQ ID NO: 17052 - RNA, 1970 nt, Artificial Sequence
  mRNA product Design a-2 (hSL-A64-N5) comprising derived and/or modified sequence from LASV(803213;Clade II)__AAF86704__NP (opt1)
aggagaguccgcucagccagguugcagaagcggcuuagcguguguccuaaucuucucucugcguguagguaggccugugccgcaaacaagcuuaccaugagcgccuccaaggaggugaaguccuuccuguggacccagagccuccgccgggagcugagcggcuacugcuccaacaucaagcugcaggucgugaaggacgcccaggcgcuccugcacgggcuggacuucagcgaggugaacaacguccagcgccucaugcggaagcagaagcgcgacgacggcgaccugaagcggcugcgcgaccucaaccaggccgugaacaaccugguggagcugaaguccacccagcagaaguccauccuccgggucgggacgcugaccagcgacgaccugcucacccuggccgccgaccuggagaagcucaagagcaaggugauccgcaccgagcggccccuguccagcggcguguacauggggaaccuguccacgcagcagcucgagcagcgccgggcccugcugaacaugaucggcauggucggcggggcgcagggcacccagccggggcgcgacggcguggugcgggucugggacgugaagaaccccgaccuccugaacaaccaguucgggaccaugcccagccugacccucgccugccugacgaagcagggccagguggaccugaacgacgccguccucgcccugaccgaccugggccucaucuacaccgcgaaguaccccaacuccagcgaccuggaccgccugucccagagccacccgauccucaacaugguggacaccaagaaguccagccugaacaucagcggguacaacuucucccugggcgccgccgugaaggccggggccugcaugcucgacggcggcaacaugcuggagacgaucaaggucacgccccagaccauggacgggauccucaagagcauccugaaggugaagcggucccugggcauguucgugagcgacacccccggggagcgcaaccccuacgagaacauccuguacaagaucugccucuccggcgacggguggccguacaucgcgagccggaccuccaucgucggccgcgccugggagaacaccaccguggaccuggagagcgacggcaagccccagaagguggggaccgccggcuccaacaagagccugcaguccgccggguuccccacgggccucaccuacagccagcugaugacccugaaggacuccaugaugcagcuggaccccagcgccaagaccuggaucgacaucgaggggcggccggaggaccccgucgagaucgcgcucuaccagcccauguccggcugcuacauccacuucuuccgcgagcccacggaccugaagcaguucaagcaggacgccaaguacagccacggcaucgacguggccgaccuguucccggcccagcccgggcucaccuccgccgucaucgaggcgcugccccggaacauggugcugaccugccagggcagcgacgacaucaagaagcuccuggacucccaggggcgccgcgacaucaagcugaucgacaucagccucagcaagguggacucccggaaguucgagaacgccgucugggaccagugcaaggaccugugccacaugcacaccggcgugguggucgagaagaagaagcgcgggggcaaggaggagaucacgccccacugcgcccugauggacugcaucauguucgacgccgccgugagcggcgggcucaacaucccggugcugcgggcgguccugccccgcgacaugguguuccggaccuccagccccaaggugguccucugaggacuagucccuguucccagagcccacuuuuuuuucuuuuuuugaaauaaaauagccugucuuucagaucucaaaggcucuuuucagagccaccaaaaaaaaaaaaaaaaaaaaaaaaaaaaaaaaaaaaaaaaaaaaaaaaaaaaaaaaaaaaaaaaagaauu

SEQ ID NO: 17053 - RNA, 1973 nt, Artificial Sequence
  mRNA product Design a-2 (hSL-A64-N5) comprising derived and/or modified sequence from LASV(GA391;Clade III)__CAA36646__NP (opt1)
aggagaguccgcucagccagguugcagaagcggcuuagcguguguccuaaucuucucucugcguguagguaggccugugccgcaaacaagcuuaccaugagcgccuccaaggaggugcgcagcuuccuguggacccagucccuccggcgcgagcugagcggcuacugcuccaacaucaagcugcaggucgugaaggacgcccaggcgcuccugcacgggcuggacuucagcgagguguccaacguccagcggcucaugcgcaagcagaagcgggacgacggcgaccugaagcgccugcgggaccucaaccaggccgugaacaaccugguggagcucaagagcacccagcagaaguccguccugcgcguggggacccugagcuccgacgaccugcucauccuggccgccgaccuggagaagcucaagagcaaggugacccggaccgagcgcccccuguccagcggcgucuacauggggaaccuguccagccagcagcucgaccagcggcgcgcccugcugaacaugaucggcaugaccggcguguccgggggcgggaagggcgcgagcgacgggaucgugcgggucugggacgugaagaacgccgagcuccugaacaaccaguucggcacgaugccgucccugacccucgccugccugaccaagcagggccagguggaccugaacgacgccguccaggcgcucaccgaccuggggcugaucuacacggccaaguaccccaacagcagcgaccucgaccgccugucccagagccaccccauccugaacaugaucgacaccaagaaguccagccucaacaucuccggcuacaacuucagccugggggccgccgugaaggccggcgcgugcaugcuggacggcgggaacaugcucgagaccaucaaggugagcccccagaccauggacggcauccucaaguccauccugaaggucaagaagucccuggggauguucgugagcgacacgccgggcgagcggaaccccuacgagaacauccuguacaagaucugccuguccggggacggcuggcccuacaucgccagccgcaccuccaucgugggccgggccugggagaacaccgucguggaccucgagcaggacaacaagccccagaagaucgggaacggcgggagcaacaagucccugcagagcgccggcuucgccgcggggcugaccuacucccagcucaugacgcugaaggacuucaagugcuucaaccugaucccgaacgccaagaccuggauggacaucgagggccgccccgaggaccccguggagaucgcccuguaccagcccagcuccggcugcuacguccacuucuuccgggagccgaccgaccucaagcaguucaagcaggacgccaaguacagccacgggaucgacgugaccgaccuguucgccgcgcagcccggccugacgagcgccgucaucgaggcccucccccgcaacauggugaucacgugccagggguccgaggacauccggaagcugcuggagagccagggccgccgcgacaucaagcucaucgacaucacccuguccaaggccgacagccggaaguucgagaacgccgugugggaccaguucaaggaccugugccacaugcacaccggggucgugguggagaagaagaagcgcggcggcaaggaggagaucacgccccacugcgcgcucauggacugcaucauguucgacgccgccgucuccgggggccuggacgccaaggugcugcgggugguccucccgcgcgacaugguguuccggaccagcacccccaaggugguccugugaggacuagucccuguucccagagcccacuuuuuuuucuuuuuuugaaauaaaauagccugucuuucagaucucaaaggcucuuuucagagccaccaaaaaaaaaaaaaaaaaaaaaaaaaaaaaaaaaaaaaaaaaaaaaaaaaaaaaaaaaaaaaaaaagaauu

SEQ ID NO: 17054 - RNA, 1970 nt, Artificial Sequence
  mRNA product Design a-2 (hSL-A64-N5) comprising derived and/or modified sequence from LASV(AV;Clade V)__CCA30315__NP (opt1)
aggagaguccgcucagccagguugcagaagcggcuuagcguguguccuaaucuucucucugcguguagguaggccugugccgcaaacaagcuuaccaugagcgccuccaaggaggugaaguccuuccuguggacccagagccuccgccgggagcugagcggcuacugcuccaacaucaagcugcaggucgugaaggacgcccaggcgcuccugcacgggcuggacuucagcgagguguccaacguccagcgccucaugcggaagcagcgccgggacgacagcgaccugaagcgccugcgggaccucaaccaggccgugaacaaccugguggagcugaaguccacccagcagaaguccguccuccgcgugggcacgcugagcagcgacgaccugcucacccuggccgccgaccuggagaagcucaaguccaaggugacccggaccgagcgcccccugagcuccggggucuacaugggcaaccugagcucccagcagcucgaccagcggcgcgcccugcugaaccucaucgggaugacgaacggcagccagggcucccaggcggggcgggacggcguggugcgcgucugggacgugaagaacgccgagcugcugaacaaccaguucgggaccaugccgagccucacccuggccugccugaccaagcagggccagguggaccucaacgacgucgugcaggcccugacggaccuggggcucaucuacaccgcgaaguaccccaacaccagcgaccuggaccggcugacccagucccaccccauccucaacaugaucgacacgaagaaguccagccugaacaucagcggcuacaacuucucccugggcgccgccgugaaggccggggccugcaugcucgacggcgggaacaugcuggagaccaucaaggucagcccccaguccauggacggcauccucaagagcauccugaaggugaagcgcgcgcugggcauguucguguccgacaccccgggggagcggaaccccuacgagaacauccuguacaagaucugccucagcggcgacggguggcccuacaucgccucccgcaccagcaucgucggccgggccugggagaacacggugguggaccuggagaccgacgggaagccccagaagaucggcuccggcaacagcaacaagucccugcagagcgccggguucuccgccggccucaccuacagccagcugaugacccugaaggacgcgaugcugcagcucgacccgaacgccaagacguggauggacaucgaggggcgccccgaggaccccgucgagguggcccuguaccagcccaucuccggcugcuacauccacuucuuccgggagccgaccgaccugaagcaguucaagcaggacgccaaguacagccacgggaucgacaucgccgaccucuucgcggcccagcccggccugaccagcgccgucaucgaggcccugccccgcaacauggugaucacgugccagggcuccgaggacaucaagaagcuccuggagagccaggggcgcaaggacaucaagcugaucgacaucgcccucuccaagaucgacagccggaaguucgagaacgcggugugggaccaguacaaggaccugugccacaugcacaccggcgucgugguggagaagaagaagcgcgggggcaaggaggagaucaccccgcacugcgcccugauggacugcaucauguucgacgccgccgucuccgggggccucaacacccuggugcugcgggcggugcucccccgcgacauggucuuccggaccagcacgccccgcguggugcugugaggacuagucccuguucccagagcccacuuuuuuuucuuuuuuugaaauaaaauagccugucuuucagaucucaaaggcucuuuucagagccaccaaaaaaaaaaaaaaaaaaaaaaaaaaaaaaaaaaaaaaaaaaaaaaaaaaaaaaaaaaaaaaaaagaauu

SEQ ID NO: 17055 - RNA, 1970 nt, Artificial Sequence
  mRNA product Design a-2 (hSL-A64-N5) comprising derived and/or modified sequence from LASV(Togo/2016/7082;Clade VI)__AMR44578__NP (opt1)
aggagaguccgcucagccagguugcagaagcggcuuagcguguguccuaaucuucucucugcguguagguaggccugugccgcaaacaagcuuaccaugagcaacuccaaggaggugaaguccuuccuguggacccagagccuccgccgggagcugagcggcuacugcuccaacaucaagcugcaggucgugaaggacgcccaggcccuccugcacgggcuggacuucagcgagguguccaacguccagcgccucaugcggaagcagaagcgcgacgacggcgaccugaagcggcugcgcgaccucaaccaggcggugaacaaccugguggagcucaagagcguccagcagaaguccauccugcggguggggacccugaccagcgacgaccugcucacccuggccgccgaccuggagaagcucaaguccaaggugacccgcaccgagcggccccugagcuccggcgucuacauggggaaccugagcucccagcagcucgaccagcgccgggcccugcugagcaugaucggcauguccggcgggaaccagaacagccagccgaagggcgacgggguggugcgcgucugggacgugaagaacgccgaccuccugaacaaccaguucggcacgaugcccucccugacccucgcgugccugaccaagcagggccagguggaccugaacgacgccguccaggcccucaccgaccuggggcugaucuacacggccaaguaccccaacagcagcgaccucgaccggcugucccagagccaccccauccugaacaugaucgacaccaagaaguccagccucaacaucuccggcuacaacuucagccugggggcggccaucaagaccggcgccugcaugcuggacgggggcaacaugcucgagaccaucaaggugacgccgcagaccauggacggcauccugaaguccauccugaaggugaagcgcagccucgggauguucaucuccgacacccccggcgagcggaaccccuacgagaacauccuguacaagaucugccugagcggggacggcuggcccuacaucgccucccgcaccgccaucaucgggcgggcgugggagaacacggucguggaccucgagagcgacuccaagccgcagaagaucggcagcaacggcuccaacaagagccugcaguccgccggguucgcccccggccugaccuacagccagcucaugacccugaaggacuccaugcugcagcuggaccccaacgccaagaccuggaucgacaucgaggggcgccccgaggacccgguggaggucgcccucuuccagcccaucagcggcugcuacauccacuucuuccgggagcccacggaccugaagcaguucaagcaggacgcgaaguacagccacgggaucgacgugaccgaccuguucgccgcccagcccggccucaccuccgccgugaucgaggcccugccgcgcaacaugguccugaccugccagggcagcgacgacaucaagaagcuccuggacucccaggggcggcgcgacaucaagcugaucgacgugagccucaacaagaucgacucccgcaaguucgagaacgcggucugggaccaguacaaggaccugugccacaugcacacgggcgugguggucgagaagaagaagaagggcgggaaggaggagaucacgccccacugcgcccugcucgacugcaucauguucgacgccgccgugagcgggggccugaacgccaccgugcugcgggcgguccucccccgcgacaugguguuccggaccuccagccccaaggugguccugugaggacuagucccuguucccagagcccacuuuuuuuucuuuuuuugaaauaaaauagccugucuuucagaucucaaaggcucuuuucagagccaccaaaaaaaaaaaaaaaaaaaaaaaaaaaaaaaaaaaaaaaaaaaaaaaaaaaaaaaaaaaaaaaaagaauu

SEQ ID NO: 17056 - RNA, 1970 nt, Artificial Sequence
  mRNA product Design a-2 (hSL-A64-N5) comprising derived and/or modified sequence from LASV(KAK-428;Clade n.d. (VII))__ANH09741__NP (opt1)
aggagaguccgcucagccagguugcagaagcggcuuagcguguguccuaaucuucucucugcguguagguaggccugugccgcaaacaagcuuaccaugagcaacuccaaggaggugaaguccuuccuguggacccagagccuccgccgggagcugagcggcuacugcaccaacaucaagcugcaggucgugaaggacgcccaggcccuccugcacgggcuggacuucuccgaggugagcaacguccagcgccucaugcggaagcagaagcgcgacgacaacgaccugaagcggcugcgcgaccucaaccaggcggugaacaaccugguggagcugaaguccguccagcagaaguccgugcucaaggugggcacgcugaacagcgacgaccugcucacccuggccgccgaccuggagaagcucaagagcaaggucgugcggaccgagcgcccccuguccagcgggguguacaugggcaaccuguccagccagcagcucgaccagcggcgcgcccugcugaacaugaucgggauggccggcggcucccaggggaaccagccgagccgggacggcgucgugcgcgugugggacgucaagaacgcggaccuccugaacaaccaguucgggaccaugcccucccugacgcucgccugccugaccaagcagggccagguggaccugaacgacgugguccucgcccugaccgaccuggggcucaucuacaccgccaaguaccccaacagcuccgaccuggaccggcugagccagaaccaccccgugcucaacaugaucgacgugaacaagagcucccugaacaucagcggcuacaacuucucccugggcgcggccgucaaggccggggccugcaugcucgacggcgggaacaugcuggagacgaucaagaucagcccgcagaccguggacggcauccugaaguccauccucaaggugaagcgcgcccugggcauguucgucagcgacacccccggggagcggaaccccuacgagaacauccuguacaaggugugccucuccggcaacggguggcccuacaucgcgagccgcaccuccaucgucggccgggccugggagaacacggugguggaccuggagagcaacaagaaccagccgaaggucgggaacaacggcuccaacaagaugcugcagagcuccggcuucgccaccgggcucaccuacagccagcugaugacccugcgcgacuccaugcugcagcucgaccccacggccaagaccuggaucgacaucgagggccggcccgaggaccccguggagcuggcccuguuccagccgagcuccgggugcuacauccacuucuuccgcgagcccaccgaccucaagcaguucaagcaggacgcgaaguacagccacggcaucgacgugaacgaccuguucuccgcccagcccgggcugaccagcgccguccucgaggcccugccccggaacauggugcugacgugccagggcagcgacgacauccgcaagcuccuggacucccaggaccgcaaggacaucaagcugaucgacaucagccucuccaaggccgacgcgcggaaguucgagaacgacgugugggaccaguucaaggaccugugccacaugcacaccggcaucgucguggagaagaagaagaagggcgggaagcaggagaugaccccgcacugcgcccugcucgacugcaucauguucgacgccgccgugagcgggggccugaacguccccacccugcgcgccgugcuccccacggacaugguguuccggaccaucaccaccaaggucgugcugugaggacuagucccuguucccagagcccacuuuuuuuucuuuuuuugaaauaaaauagccugucuuucagaucucaaaggcucuuuucagagccaccaaaaaaaaaaaaaaaaaaaaaaaaaaaaaaaaaaaaaaaaaaaaaaaaaaaaaaaaaaaaaaaaagaauu

SEQ ID NO: 17057 - RNA, 1970 nt, Artificial Sequence; identical to SEQ ID NO: 17051
  mRNA product Design a-2 (hSL-A64-N5) comprising derived and/or modified sequence from LASV(Pinneo-NIG-1969;Clade I)__AIT17837__NP (opt1)

SEQ ID NO: 17058 - RNA, 1970 nt, Artificial Sequence
  mRNA product Design a-2 (hSL-A64-N5) comprising derived and/or modified sequence from LASV(ISTH0009-NIG-2011;Clade II)__AIT17405__NP (opt1)
aggagaguccgcucagccagguugcagaagcggcuuagcguguguccuaaucuucucucugcguguagguaggccugugccgcaaacaagcuuaccaugagcguguccaaggaggucaagagcuuccuguggacccagucccuccgccgggagcugagcggcuacugcuccaacaucaagcuccagguggugaaggacgcccaggcccugcugcacgggcuggacuucagcgaggucuccaacgugcagcgccucaugcggaagcagaagcgcgacgacagcgaccugaagcggcugcgcgaccucaaccaggcggugaacaaccuggucgagcugaaguccacccagcagaaguccauccuccgggugggcacccugaccagcgacgaccugcucacccuggccgccgaccuggagaagcucaagagcaaggugauccgcaccgagcggccccuguccagcggggucuacaugggcaaccuguccacgcagcagcucgagcagcgccgggcccugcugaacaugaucgggauggugggcggcgcccaggggacccagccgggccgcgacggggugguccgggugugggacgugaagaaccccgaccuccugaacaaccaguucggcaccaugcccagccugacccucgcgugccugacgaagcaggggcaggucgaccugaacgacgccgugcucgcccugaccgaccugggccucaucuacaccgccaaguaccccaacuccagcgaccuggaccgccugucccagagccacccgauccucaacaugguggacaucaagaaguccagccugaacaucagcggcuacaacuucucccugggggcggccgucaaggccggcgccugcaugcucgacgggggcaacaugcuggagaccaucaaggugacgccccagaccauggacggcauccucaagagcauccugaaggugaagcggucccuggggauguucgucagcgacacccccggcgagcgcaaccccuacgagaacauccuguacaagaucugccucuccggggacggcuggccguacaucgccagccggaccuccaucguggggcgcgcgugggagaacacgaccguggaccuggagagcgacggcaagccccagaaggucggcuccgccgggagcaacaagucccugcagagcgccggcuuccccaccgggcucaccuacucccagcugaugacgcugaaggacagcaugaugcagcuggaccccuccgccaagaccuggaucgacaucgagggccggccggaggaccccguggagaucgcccucuaccagcccaugagcgggugcuacauccacuucuuccgcgagcccaccgaccugaagcaguucaagcaggacgcgaaguacucccacggcaucgacgucgccgaccuguucccggcccagcccggccucaccagcgccgugaucgaggcccugccccggaacauggugcugacgugccaggggagcgacgacaucaagcgccuccuggacucccagggccgccgggacaucaagcugaucgacaucgcgcucagcaaggccgacucccgccgguucgagaacgccgucugggaccagugcaaggaccugugccacaugcacaccggggugguggucgagaagaagaagcgcggcgggaaggaggagaucacgccccacugcgcccugauggacugcaucauguacgacgccgcggugagcggcggccucaacaucccggugcugcgggccguccugccccgcgacaugguguuccggaccuccagccccaaggugguccucugaggacuagucccuguucccagagcccacuuuuuuuucuuuuuuugaaauaaaauagccugucuuucagaucucaaaggcucuuuucagagccaccaaaaaaaaaaaaaaaaaaaaaaaaaaaaaaaaaaaaaaaaaaaaaaaaaaaaaaaaaaaaaaaaagaauu

SEQ ID NO: 17059 - RNA, 1970 nt, Artificial Sequence
  mRNA product Design a-2 (hSL-A64-N5) comprising derived and/or modified sequence from LASV(ISTH2010-NIG-2012;Clade II)__AIT17483__NP (opt1)
aggagaguccgcucagccagguugcagaagcggcuuagcguguguccuaaucuucucucugcguguagguaggccugugccgcaaacaagcuuaccaugagcgccuccaaggaggugaaguccuuccuguggacccagagccuccgccgggagcugagcggcuacugcuccaacaucaagcugcaggucgugaaggacgcccaggcgcuccugcacgggcuggacuucagcgagguguccaacguccagcgccucaugcggaagcagaagcgcgacgacagcgaccugaagcggcugcgcgaccucaaccaggccgugaacaaccugguggagcugaaguccacccagcagaaguccauccuccgggucggcacgcugaccagcgacgaccugcucacccuggccgccgaccuggagaagcucaagagcaaggugauccgcaccgagcggccccuguccagcgggguguacaugggcaaccuguccacgcagcagcucgagcagcgccgggcccugcugaaccucaucgggauggucggcggcgcgcaggggacccagccgggccgcgacgggguggugcgggucugggacgugaagaaccccgaccugcugaacaaccaguucggcaccaugcccagccucacccuggccugccugacgaagcagggccagguggaccucaacgacgccguccuggcccugaccgaccucgggcugaucuacaccgcgaaguaccccaacuccagcgaccuggaccgccucucccagagccacccgauccugaacaugguggacaccaagaaguccagccugaacaucagcggcuucaacuucucccucggggccgccgugaaggccggcgccugcaugcuggacgggggcaacaugcuggagacgaucaaggucacgccccagaccauggacggcauccucaagagcauccugaaggugaagaagucccuggggauguucgugagcgacacccccggcgagcggaaccccuacgagaacauccucuacaagaucugccuguccggggacggcuggccguacaucgcgagccgcaccuccaucgucgggcgggccugggagaacaccaccguggaccuggagagcgacggcaagccccacaaggugggcaccgccggguccaacaagagccuccaguccgccggcuuccccacggggcugaccuacagccagcugaugacccugaaggacuccaugaugcagcucgaccccagcgccaagaccuggaucgacaucgagggccgcccggaggaccccgucgagaucgcgcuguaccagcccauguccgggugcuacauccacuucuuccgggagcccacggaccugaagcaguucaagcaggacgccaaguacagccacggcaucgacguggccgaccucuucccggcccagcccggccugaccuccgccgucaucgaggcgcugccccgcaacauggugcugaccugccaggggagcgacgacaucaagcggcuccuggacagccagggccgccgcgacaucaagcucaucgacaucgcccuguccaaggccgacagccggcgcuucgagaacgccgugugggaccagugcaaggaccugugccacaugcacaccggggucgugguggagaagaagaagcggggcgggaaggaggagaucacgccccacugcgcccucauggacugcaucauguacgacgcggccgucuccggcggccugaacaucccggugcugcgcgccgugcucccccgggacauggucuuccgcaccagcucccccaagguggugcugugaggacuagucccuguucccagagcccacuuuuuuuucuuuuuuugaaauaaaauagccugucuuucagaucucaaaggcucuuuucagagccaccaaaaaaaaaaaaaaaaaaaaaaaaaaaaaaaaaaaaaaaaaaaaaaaaaaaaaaaaaaaaaaaaagaauu

SEQ ID NO: 17060 - RNA, 1970 nt, Artificial Sequence
  mRNA product Design a-2 (hSL-A64-N5) comprising derived and/or modified sequence from LASV(Lassa virus/H.sapiens-wt/NGA/2015/ISTH_0543;Clade II)__AVO03640__NP (opt1)
aggagaguccgcucagccagguugcagaagcggcuuagcguguguccuaaucuucucucugcguguagguaggccugugccgcaaacaagcuuaccaugagcgccuccaaggaggugaaguccuuccuguggacccagagccuccgccgggagcugagcggcuacugcuccaacaucaagcugcaggucgugaaggacgcccaggcgcuccugcacgggcuggacuucagcgagguguccaacguccagcgccucaugcggaagcagaagcgcgacgacagcgaccugaagcggcugcgcgaccucaaccaggccgugaacaaccugguggagcugaaguccacccagcagaaguccauccuccgggucggcacgcugaccagcgacgaccugcucacccuggccgccgaccuggagaagcucaagagcaaggugauccgcaccgagcggccccuguccagcgggguguacaugggcaaccuguccacgcagcagcucgagcagcgccgggcccugcugaacaugaucgggauggucggcggcgcgcaggggacccagccgggccgcgacgggguggugcgggucugggacgugaagaaccccgaccuccugaacaaccaguucggcaccaugcccagccugacccucgccugccugacgaagcagggccagguggaccugaacgacgccguccucgcccugaccgaccuggggcucaucuacaccgcgaaguaccccaacuccagcgaccuggaccgccugucccagagccacccgauccucaacaugguggacaccaagaaguccagccugaacaucagcggcuacaacuucucccugggggccgccgugaaggccggcgccugcaugcucgacgggggcaacaugcuggagacgaucaaggucacgccccagaccauggacggcauccucaagagcauccugaaggugaagaagucccuggggauguucgugagcgacacccccggcgagcggaaccccuacgagaacauccuguacaagaucugccucuccggggacggcuggccguacaucgcgagccgcaccuccaucgucgggcgggccugggagaacaccaccguggaccuggagagcgacggcaagccccagaaggugggcuccgccgggagcaacaagucccugcagagcgccggcuuccccaccgggcucacguacucccagcugaugacccugaaggacagcaugaugcagcuggaccccuccgccaagaccuggaucgacaucgagggccgcccggaggaccccgucgagaucgcgcucuaccagcccaugagcgggugcuacauccacuucuuccgggagcccaccgaccugaagcaguucaagcaggacgccaaguacucccacggcaucgacguggccgaccuguucccggcccagcccggccucacgagcgccgucaucgaggcgcugccccgcaacauggugcugaccugccaggggagcgacgacaucaagcggcuccuggacucccagggccgcaaggacaucaagcugaucgacaucgcccucagcaaggccgacucccgccgguucgagaacgccgugugggaccagugcaaggaccugugccacaugcacaccggggucgugguggagaagaagaagcgcggcgggaaggaggagaucacgccccacugcgcccugauggacugcaucauguacgacgcggccgucagcggcggccucaacaucccggugcugcgggccgugcugccccgcgacauggucuuccggaccuccagccccaagguggugcucugaggacuagucccuguucccagagcccacuuuuuuuucuuuuuuugaaauaaaauagccugucuuucagaucucaaaggcucuuuucagagccaccaaaaaaaaaaaaaaaaaaaaaaaaaaaaaaaaaaaaaaaaaaaaaaaaaaaaaaaaaaaaaaaaagaauu

SEQ ID NO: 17061 - RNA, 1970 nt, Artificial Sequence
  mRNA product Design a-2 (hSL-A64-N5) comprising derived and/or modified sequence from LASV(Lassa virus/H.sapiens-wt/NGA/2016/ISTH_0009;Clade II)__AVO03572__NP (opt1)
aggagaguccgcucagccagguugcagaagcggcuuagcguguguccuaaucuucucucugcguguagguaggccugugccgcaaacaagcuuaccaugagcgccuccaaggaggugaaguccuuccuguggacccagagccuccgccgggagcugagcggcuacugcuccaacaucaagcugcaggucgugaaggacgcccaggcgcuccugcacgggcuggacuucagcgagguguccaacguccagcgccucaugcggaagcagaagcgcgacgacagcgaccugaagcggcugcgcgaccucaaccaggccgugaacaaccugguggagcugaaguccacccagcagaaguccauccuccgggucggcacgcugaccagcgacgaccugcucacccuggccgccgaccuggagaagcucaagagcaaggugauccgcaccgagcggccccuguccagcgggguguacaugggcaaccuguccacgcagcagcucgagcagcgccgggcccugcugaacaugaucgggauggucggcggcgcgcaggggacccagccgggccgcgacgggguggugcgggucugggacgugaagaaccccgaccuccugaacaaccaguucggcaccaugcccagccugacccucgccugccugacgaagcagggccagguggaccugaacgacgccguccucgcccugaccgaccuggggcucaucuacaccgcgaaguaccccaacuccagcgaccuggaccgccugucccagagccacccgauccucaacaugguggacaccaagaaguccagccugaacaucagcggcuacaacuucucccugggggccgccgugaaggccggcgccugcaugcucgacgggggcaacaugcuggagacgaucaaggucacgccccagaccauggacggcauccucaagagcauccugaaggugaagaagucccuggggauguucgugagcgacacccccggcgagcggaaccccuacgagaacauccuguacaagaucugccucuccggggacggcuggccguacaucgcgagccgcaccuccaucgucgggcgggccugggagaacaccaccguggaccuggagagcgacggcaagccccagaaggugggcuccgccgggagcaacaagucccugcagagcgccggcuuccccaccgggcucacguacucccagcugaugacccugaaggacagcaugaugcagcuggaccccuccgccaagaccuggaucgacaucgagggccgcccggaggaccccgucgagaucgcgcucuaccagcccaugagcgggugcuacauccacuucuuccgggagcccaccgaccugaagcaguucaagcaggacgccaaguacucccacggcaucgacguggccgaccuguucccggcccagcccggccucacgagcgccgucaucgaggcgcugccccgcaacauggugcugaccugccaggggagcgacgacaucaagcggcuccuggacucccagggccgccgcgacaucaagcugaucgacaucgcccucagcaaggccgacucccggcgcuucgagaacgccgugugggaccagugcaaggaccugugccacaugcacaccggggucgugguggagaagaagaagcggggcgggaaggaggagaucacgccccacugcgcccugauggacugcaucauguacgacgcggccgucagcggcggccucaacaucccggugcugcgcgccgugcugccccgggacauggucuuccgcaccuccagccccaagguggugcucugaggacuagucccuguucccagagcccacuuuuuuuucuuuuuuugaaauaaaauagccugucuuucagaucucaaaggcucuuuucagagccaccaaaaaaaaaaaaaaaaaaaaaaaaaaaaaaaaaaaaaaaaaaaaaaaaaaaaaaaaaaaaaaaaagaauu

SEQ ID NO: 17062 - RNA, 1970 nt, Artificial Sequence
  mRNA product Design a-2 (hSL-A64-N5) comprising derived and/or modified sequence from LASV(Lassa virus/H.sapiens-wt/NGA/2016/ISTH_0017;Clade II)__AVO03568__NP (opt1)
aggagaguccgcucagccagguugcagaagcggcuuagcguguguccuaaucuucucucugcguguagguaggccugugccgcaaacaagcuuaccaugagcgccuccaaggaggugaaguccuuccuguggacccagagccuccgccgggagcugagcggcuacugcuccagcaucaagcugcaggucgugaaggacgcccaggcgcuccugcacgggcuggacuucuccgaggugagcaacguccagcgccucaugcggaagcagaagcgcgacgacuccgaccugaagcggcugcgcgaccucaaccaggccgugaacaaccugguggagcucaagagcacccagcagaaguccauccugcgggucggcacgcugaccagcgacgaccugcucacccuggccgccgaccuggagaagcucaaguccaaggugauccgcaccgagcggccccugagcuccgggguguacaugggcaaccugagcacgcagcagcucgagcagcgccgggcccugcugaacaugaucgggauggcgggcggcgcccaggggacccagccgggccgcgacggggucgugcgggugugggacgucaagaaccccgaccuccugaacaaccaguucggcaccaugcccucccugacccucgccugccugacgaagcagggccagguggaccugaacgacgccgugcucgcgcugaccgaccuggggcucaucuacaccgccaaguaccccaacagcuccgaccuggaccgccugagccagagccacccgauccucaacauggucgacaccaagaaguccagccugaacaucuccggcuacaacuucagccugggggccgccgugaaggccggcgcgugcaugcucgacgggggcaacaugcuggagacgaucaaggugacgccccagaccauggacggcauccugaaguccauccucaaggucaagcggagccuggggauguucguguccgacgcccccggcgagcgcaaccccuacgagaacauccuguacaagaucugccucagcggggacggcuggccguacaucgccucccggaccagcaucguggggcgcgccugggagaacaccaccgucgaccuggaguccgacggcaagccccagaaggugggcgccaccgggagcaacaagucccugcagagcgcgggcuuccccaccgggcucacguacucccagcugaugacccugaaggacagcaugaugcagcuggaccccuccgccaagaccuggaucgacaucgagggccggccggaggaccccguggaggucgcccucuaccagcccgugagcgggugcuacauccacuucuuccgcgagcccaccgaccugaagcaguucaagcaggacgccaaguacucccacggcaucgacgucgccgaccuguucccggcgcagcccggccucacgagcgccgugaucgaggcccugccccggaacauggugcugaccugccaggggagcgacgacaucaagaagcuccuggacucccagggccgcaaggacaucaagcugaucgacaucgcccucagcaaggccgacucccgccgguucgagaacgcggucugggaccagugcaaggaccugugccacaugcacaccggggugguggucgagaagaagaagcgcggcgggaaggaggagaucacgccccacugcgcccugauggacugcaucauguacgacgccgccgugagcggcggccucaacaucccggugcugcgggcgguccugccccgcgacaugguguuccggaccuccagccccaaggugguccucugaggacuagucccuguucccagagcccacuuuuuuuucuuuuuuugaaauaaaauagccugucuuucagaucucaaaggcucuuuucagagccaccaaaaaaaaaaaaaaaaaaaaaaaaaaaaaaaaaaaaaaaaaaaaaaaaaaaaaaaaaaaaaaaaagaauu

SEQ ID NO: 17063 - RNA, 1970 nt, Artificial Sequence
  mRNA product Design a-2 (hSL-A64-N5) comprising derived and/or modified sequence from LASV(Lassa virus/H.sapiens-wt/NGA/2018/ISTH_0959;Clade II)__AVV65100__NP (opt1)
aggagaguccgcucagccagguugcagaagcggcuuagcguguguccuaaucuucucucugcguguagguaggccugugccgcaaacaagcuuaccaugagcgccuccaaggaggugaaguccuuccuguggacccagagccuccgccgggagcugagcggcuacugcuccaacaucaagcugcaggucgugaaggacgcccaggcgcuccugcacgggcuggacuucagcgagguguccaacguccagcgccucaugcggaagcagaagcgcgacgacagcgaccugaagcggcugcgcgaccucaaccaggccgugaacaaccugguggagcugaaguccacccagcagaaguccauccuccgggucggcacccugaccagcgacgaccugcucacccuggccgccgaccuggagaagcucaagagcaaggugauccgcaccgagcggccccuguccagcgggguguacaugggcaaccuguccacgcagcagcucgagcagcgccgggcccugcugaaccucaucgggauggucggcggcgcgcaggggacccagccgggccgcgacgggguggugcgggucugggacgugaagaaccccgaccugcugaacaaccaguucggcaccaugcccagccucacccuggccugccugacgaagcagggccagguggaccucaacgacgucgugcuggcccugaccgaccucgggcugaucuacaccgccaaguaccccaacuccagcgaccuggaccgccucucccagagccacccgauccugaacaugguggacaccaagaaguccagccugaacaucagcggcuucaacuucucccucggggcggccgucaaggccggcgccugcaugcuggacgggggcaacaugcuggagacgaucaaggugacgccccagaccauggacggcauccucaagagcauccugaaggugaagaagucccuggggauguucgucagcgacacccccggcgagcggaaccccuacgagaacauccucuacaagaucugccuguccggggacggcuggccguacaucgccagccgcaccuccaucguggggcgggcgugggagaacaccaccguggaccuggagagcgacggcaagccccacaaggucggcaccgccggguccaacaagagccuccaguccgccggcuuccccacggggcugaccuacagccagcugaugacccugaaggacuccaugaugcagcucgaccccagcgccaagaccuggaucgacaucgagggccgcccggaggaccccguggagaucgcccuguaccagcccauguccgggugcuacauccacuucuuccgggagcccacggaccugaagcaguucaagcaggacgcgaaguacagccacggcaucgacgucgccgaccucuucccggcccagcccggccugaccuccgccgugaucgaggcccugccccgcaacauggugcugaccugccaggggagcgacgacaucaagcggcuccuggacagccagggccgcaaggacaucaagcucaucgacaucgcgcuguccaagaccgacagccgccgguucgagaacgccgucugggaccagugcaaggaccugugccacaugcacacgggggugguggucgagaagaagaagcgcggcgggaaggaggagaucacgccccacugcgcccucauggacugcaucauguacgacgccgccguguccggcggccugaacaucccggugcugcgggcgguccucccccgcgacaugguguuccggaccagcucccccaaggugguccugugaggacuagucccuguucccagagcccacuuuuuuuucuuuuuuugaaauaaaauagccugucuuucagaucucaaaggcucuuuucagagccaccaaaaaaaaaaaaaaaaaaaaaaaaaaaaaaaaaaaaaaaaaaaaaaaaaaaaaaaaaaaaaaaaagaauu

SEQ ID NO: 17064 - RNA, 1970 nt, Artificial Sequence
  mRNA product Design a-2 (hSL-A64-N5) comprising derived and/or modified sequence from LASV(LASV003-NIG-2008;Clade II)__AIT17581__NP (opt1)
aggagaguccgcucagccagguugcagaagcggcuuagcguguguccuaaucuucucucugcguguagguaggccugugccgcaaacaagcuuaccaugagcgccuccaaggaggugaaguccuuccuguggacccagagccuccgccgggagcugagcggcuacugcuccagcaucaagcugcaggucgugaaggacgcccaggcgcuccugcacgggcuggacuucuccgaggugagcaacguccagcgccucaugcggaagcagaagcgcgacgacuccgaccugaagcggcugcgcgaccucaaccaggccgugaacaaccugguggagcucaagagcacccagcagaaguccguccugcgggugggcacccugaccagcgacgaccugcucacccuggccgccgaccuggagaagcucaaguccaaggugauccgcaccgagcggccccugagcuccggggucuacaugggcaaccugagcgcccagcagcucgagcagcgccggacgcugcugaacaugaucgggauggugggcggcgcgcaggggacccagccgggccgcgacggggugguccgggugugggacgugaagaaccccgaccuccugaacaaccaguucggcaccaugcccucccugacccucgccugccugacgaagcaggggcaggucgaccugaacgacguggugcucgcccugaccgaccugggccucaucuacaccgccaaguaccccaacagcuccgaccuggaccgccugagccagagccacccgauccucuccauggucgacaccaagaaguccagccugaacaucagcggcuacaacuucucccugggggcggccgugaaggccggcgccugcaugcucgacgggggcaacaugcuggagacgaucaaggugacgccccagaccauggacggcauccucaagagcauccugaaggucaagaagucccuggggauguucgugagcgacacccccggcgagcggaaccccuacgagaacauccuguacaagaucugccucuccggggacggcuggccguacaucgccagccgcaccuccaucguggggcgggcgugggagaacaccaccgucgaccuggagagcgacggcaagccccagaaggugggcaccgccggguccaacaagagccugcaguccgccggcuuccccacggggcucaccuacagccagcugaugacccugaaggacuccaugaugcagcuggaccccagcgccaagaccuggaucgacaucgagggccgcccggaggaccccgucgagaucgcccucuaccagcccauguccgggugcuacauccacuucuuccgggagcccacggaccugaagcaguucaagcaggacgcgaaguacagccacggcaucgacgugaccgaccuguucccggcccagcccggccucaccagcgccgugaucgaggcccugccccgcaacaugguccugaccugccagggguccgacgacaucaagcggcuccuggacagccagggccgccgcgacaucaagcugaucgacaucgcccucuccaaggcggacagccggcgcuucgagaacgccgugugggaccagugcaaggaccugugccacaugcacacggggguggucguggagaagaagaagcggggcgggaaggaggagaucacgccccacugcgcccugauggacugcaucauguacgacgccgccguguccggcggccucaacaucccgguccugcgcgcggugcugccccgggacaugguguuccgcaccagcucccccaaggucgugcucugaggacuagucccuguucccagagcccacuuuuuuuucuuuuuuugaaauaaaauagccugucuuucagaucucaaaggcucuuuucagagccaccaaaaaaaaaaaaaaaaaaaaaaaaaaaaaaaaaaaaaaaaaaaaaaaaaaaaaaaaaaaaaaaaagaauu

SEQ ID NO: 17065 - RNA, 1970 nt, Artificial Sequence
  mRNA product Design a-2 (hSL-A64-N5) comprising derived and/or modified sequence from LASV(LASV035-NIG-2009;Clade II)__AIT17589__NP (opt1)
aggagaguccgcucagccagguugcagaagcggcuuagcguguguccuaaucuucucucugcguguagguaggccugugccgcaaacaagcuuaccaugagcgccuccaaggaggugaaguccuuccuguggacccagagccuccgccgggagcugagcggcuacugcuccagcaucaagcugcaggucgugaaggacgcccaggcgcuccugcacgggcuggacuucuccgaggugagcaacguccagcgccucaugcggaagcagaagcgcgacgacuccgaccugaagcggcugcgcgaccucaaccaggccgugaacaaccugguggagcucaagagcacccagcagaaguccauccugcgggucggcacgcugaccagcgacgaccugcucacccuggccgccgaccuggagaagcucaaguccaaggugauccgcaccgagcggccccugagcuccgggguguacaugggcaaccugagcgcccagcagcucgagcagcgccgggcgcugcugaacaugaucgggauggucggcggcgcccaggggacgcagccgggccgcgacgggguggugcgggucugggacgugaagaaccccgaccuccugaacaaccaguucggcaccaugcccucccugacccucgccugccugaccaagcagggccagguggaccugaacgacgccguccucgcgcugacggaccuggggcucaucuacaccgccaaguaccccaacagcuccgaccuggaccgccugagccagagccacccgauccucaacaugguggacaccaagaaguccagccugaacaucuccggcuacaacuucagccugggggccgccgugaaggccggcgcgugcaugcucgacgggggcaacaugcuggagaccaucaaggucacgccccagaccauggacggcauccugaaguccauccucaaggugaagcggagccuggggauguucguguccgacacccccggcgagcgcaaccccuacgagaacauccuguacaagaucugccucagcggggacggcuggccguacaucgccucccggaccagcaucgucgggcgcgccugggagaacacgaccguggaccuggaguccgacggcaagccccagaaggugggcaccaccgggagcaacaagucccugcagagcgccggcuuccccacggggcucaccuacucccagcugaugacccugaaggacagcaugaugcagcuggaccccuccgccaagaccuggaucgacaucgagggccggccggaggaccccgucgagaucgcgcucuaccagcccaugagcgggugcuacauccacuucuuccgcgagcccacggaccugaagcaguucaagcaggacgccaaguacucccacggcaucgacguggccgaccuguucccggcccagcccggccucaccagcgccgucaucgaggcgcugccccggaacauggugcugaccugccaggggagcgacgacaucaagaagcuccuggacucccagggccgccgcgacaucaagcugaucgacaucgcccucagcaaggccgacucccggaaguucgagaacgccgugugggaccagugcaaggaccugugccacaugcacaccggggucgugguggagaagaagaagcgcggcgggaaggaggagaucacgccccacugcgcccugauggacugcaucauguacgacgcggccgucagcggcggccucaacaucccggugcugcgggccgugcugccccgcgacauggucuuccggaccuccagccccaagguggugcucugaggacuagucccuguucccagagcccacuuuuuuuucuuuuuuugaaauaaaauagccugucuuucagaucucaaaggcucuuuucagagccaccaaaaaaaaaaaaaaaaaaaaaaaaaaaaaaaaaaaaaaaaaaaaaaaaaaaaaaaaaaaaaaaaagaauu

SEQ ID NO: 17066 - RNA, 1970 nt, Artificial Sequence
  mRNA product Design a-2 (hSL-A64-N5) comprising derived and/or modified sequence from LASV(LASV1000-NIG-2009;Clade II)__AIT17783__NP (opt1)
aggagaguccgcucagccagguugcagaagcggcuuagcguguguccuaaucuucucucugcguguagguaggccugugccgcaaacaagcuuaccaugagcgccuccaaggaggugaaguccuuccuguggacccagagccuccgccgggagcugagcggcuacugcuccaacaucaagcugcaggucgugaaggacgcccaggcgcuccugcacgggcuggacuucagcgagguguccaacguccagcgccucaugcggaagcagaagcgcgacgacagcgaccugaagcggcugcgcgaccucaaccaggccgugaacaaccugguggagcugaaguccacccagcagaaguccauccuccgggucggcacgcugaccagcgacgaccugcucacccuggccgccgaccuggagaagcucaagagcaaggugauccgcaccgagcggccccuguccagcgggguguacaugggcaaccuguccacgcagcagcucgagcagcgccgggcccugcugaacaugaucgggauggucggcggcgcgcaggggacccagccgggccgcgacgggguggugcgggucugggacgugaagaaccccgaccuccugaacaaccaguucggcaccaugcccagccugacccucgccugccugacgaagcagggccagguggaccugaacgacgucgugcucgcccugaccgaccuggggcucaucuacaccgccaaguaccccaacuccagcgaccuggaccgccugucccagagccacccgauccucaacaugguggacaccaagaaguccagccugaacaucagcggcuacaacuucucccugggggcggccgucaaggccggcgccugcaugcucgacgggggcaacaugcuggagacgaucaaggugacgccccagaccauggacggcauccucaagagcauccugaaggugaagaagucccuggggauguucgucagcgacacccccggcgagcggaaccccuacgagaacauccuguacaagaucugccucuccggggacggcuggccguacaucgccagccgcaccuccaucguggggcgggcgugggagaacaccaccguggaccuggagagcgacggcaagccccagaaggucggcaccgccggguccaacaagagccugcaguccgccggcuuccccacggggcucaccuacagccagcugaugacccugaaggacuccaugaugcagcuggaccccagcgccaagaccuggaucgacaucgagggccgcccggaggaccccguggagaucgcccucuaccagcccgucuccgggugcuacauccacuucuuccgggagcccacggaccugaagcaguucaagcaggacgcgaaguacagccacggcaucgacguggccgaccuguucccggcccagcccggccucaccuccgccgugaucgaggcccugccccgcaacaugguccugaccugccaggggagcgacgacaucaagcggcuccuggacagccagggccgccgcgacaucaagcugaucgacaucgcgcucuccaaggccgacagccggcgcuucgagaacgccgugugggaccagugcaaggaccugugccacaugcacaccgggguggucguggagaagaagaagcggggcgggaaggaggagaucacgccccacugcgcccugauggacugcaucauguacgacgccgcgguguccggcggccucaacaucccgguccugcgcgccgugcugccccgggacaugguguuccgcaccagcucccccaaggucgugcucugaggacuagucccuguucccagagcccacuuuuuuuucuuuuuuugaaauaaaauagccugucuuucagaucucaaaggcucuuuucagagccaccaaaaaaaaaaaaaaaaaaaaaaaaaaaaaaaaaaaaaaaaaaaaaaaaaaaaaaaaaaaaaaaaagaauu

SEQ ID NO: 17067 - RNA, 1970 nt, Artificial Sequence
  mRNA product Design a-2 (hSL-A64-N5) comprising derived and/or modified sequence from LASV(LASV221-NIG-2010;Clade II)__AIT17625__NP (opt1)
aggagaguccgcucagccagguugcagaagcggcuuagcguguguccuaaucuucucucugcguguagguaggccugugccgcaaacaagcuuaccaugagcgccuccaaggaggugaaguccuuccuguggacccagagccuccgccgggagcugagcggcuacugcuccagcaucaagcugcaggucgugaaggacgcccaggcgcuccugcacgggcuggacuucuccgaggugagcaacguccagcgccucaugcggaagcagcgccgggacgacuccgaccugaagcgccugcgggaccucaaccaggccgugaacaaccugguggagcucaagagcacccagcagaaguccauccugcgcgucggcacgcugaccagcgacgaccugcucacccuggccgccgaccuggagaagcucaaguccaaggugauccggaccgagcgcccccugagcuccgggguguacaugggcaaccugagcacgcagcagcucgagcagcggcgcgcccugcugaacaugaucgggauggucggcggcgcgcaggggacccagccgggccgggacgggguggugcgcgucugggacgugaagaaccccgaccuccugaacaaccaguucggcaccaugcccucccugacccucgccugccugacgaagcagggccagguggaccugaacgacgccguccucgcccugaccgaccuggggcucaucuacaccgcgaaguaccccaacagcuccgaccuggaccggcugagccagagccacccgauccucaacaugguggacaccaagaaguccagccugaacaucuccggcuacaacuucagccugggggccgccgugaaggccggcgccugcaugcucgacgggggcaacaugcuggagacgaucaaggucacgccccagaccguggacggcauccugaaguccauccucaaggugaagcgcagccuggggauguucgucuccgacacccccggcgagcggaaccccuacgagaacauccuguacaagaucugccucagcggggacggcuggccguacaucgcgucccgcaccagcaucguggggcgggccugggagaacaccaccguggaccuggaguccgacggcaagccccagaaggucggcaccgccgggagcaacaagucccugcagagcgccggcuuccccacggggcucaccuacucccagcugaugacccugaaggacagcaugaugcagcuggaccccuccgccaagaccuggaucgacaucgagggccgcccggaggaccccguggagaucgcgcucuaccagcccaugagcgggugcuacauccacuucuuccgggagcccacggaccugaagcaguucaagcaggacgccaaguacucccacggcaucgacgucgccgaccuguucccggcccagcccggccucaccagcgccgugaucgaggcgcugccccgcaacauggugcugaccugccaggggagcgacgacaucaagcgccuccuggacucccagggccggcgcgacaucaagcugaucgacaucgcccucagcaaggccgacucccggaaguucgagaacgccgucugggaccagugcaaggaccugugccacaugcacaccggggugguggucgagaagaagaagcgcggcgggaaggaggagaucacgccccacugcgcccugauggacugcaucauguacgacgcggccgugagcggcggccucaacaucccggugcugcgggccguccugccccgcgacaugguguuccggaccuccagccccaaggugguccucugaggacuagucccuguucccagagcccacuuuuuuuucuuuuuuugaaauaaaauagccugucuuucagaucucaaaggcucuuuucagagccaccaaaaaaaaaaaaaaaaaaaaaaaaaaaaaaaaaaaaaaaaaaaaaaaaaaaaaaaaaaaaaaaaagaauu

SEQ ID NO: 17068 - RNA, 1970 nt, Artificial Sequence
  mRNA product Design a-2 (hSL-A64-N5) comprising derived and/or modified sequence from LASV(LASV237-NIG-2010;Clade II)__AIT17639__NP (opt1)
aggagaguccgcucagccagguugcagaagcggcuuagcguguguccuaaucuucucucugcguguagguaggccugugccgcaaacaagcuuaccaugagcgccuccaaggaggugaaguccuuccuguggacccagagccuccgccgggagcugagcggcuacugcuccaacaucaagcugcaggucgugaaggacgcccaggcgcuccugcacgggcuggacuucagcgagguguccaacguccagcgccucaugcggaagcagaagcgcgacgacagcgaccugaagcggcugcgcgaccucaaccaggccgugaacaaccugguggagcugaaguccacccagcagaaguccauccuccgggucggcacccugaccagcgacgaccugcucacccuggccgccgaccuggagaagcucaagagcaaggugauccgcaccgagcggccccuguccagcgggguguacaugggcaaccuguccacgcagcagcucgagcagcgccgggcccugcugaacaugaucgggauggucggcggcgcgcaggggacccagccgggccgcgacgggguggugcgggucugggacgugaagaaccccgaccuccugaacaaccaguucggcaccaugcccagccugacccucgccugccugacgaagcagggccagguggaccugaacgacgccguccucgcccugaccgaccuggggcucaucuacaccgcgaaguaccccaacuccagcgaccuggaccgccugucccagagccacccgauccucaacaugguggacaucaagaaguccagccugaacaucagcggcuacaacuucucccugggggccgccgugaaggccggcgccugcaugcucgacgggggcaacaugcuggagaccaucaaggucacgccccagaccauggacggcauccucaagagcauccugaaggugaagcggucccuggggauguucgugagcgacacccccggcgagcgcaaccccuacgagaacauccuguacaagaucugccucuccggggacggcuggccguacaucgcgagccggaccuccaucgucgggcgcgccugggagaacacgaccguggaccuggagagcgacggcaagccccagaaggugggcuccgccgggagcaacaagucccugcagagcgccggcuuccccaccgggcucaccuacucccagcugaugacgcugaaggacagcaugaugcagcuggaccccuccgccaagaccuggaucgacaucgagggccggccggaggaccccgucgagaucgcgcucuaccagcccaugagcgggugcuacauccacuucuuccgcgagcccaccgaccugaagcaguucaagcaggacgccaaguacucccacggcaucgacguggccgaccuguucccggcccagcccggccucaccagcgccgucaucgaggcgcugccccggaacauggugcugacgugccaggggagcgacgacaucaagcgccuccuggacucccagggccgccgggacaucaagcugaucgacaucgcccucagcaaggccgacucccgccgguucgagaacgccgugugggaccagugcaaggaccugugccacaugcacaccggggucgugguggagaagaagaagcgcggcgggaaggaggagaucacgccccacugcgcccugauggacugcaucauguacgacgcggccgucagcggcggccucaacaucccggugcugcgggccgugcugccccgcgacauggucuuccggaccuccagccccaagguggugcucugaggacuagucccuguucccagagcccacuuuuuuuucuuuuuuugaaauaaaauagccugucuuucagaucucaaaggcucuuuucagagccaccaaaaaaaaaaaaaaaaaaaaaaaaaaaaaaaaaaaaaaaaaaaaaaaaaaaaaaaaaaaaaaaaagaauu

SEQ ID NO: 17069 - RNA, 1970 nt, Artificial Sequence
  mRNA product Design a-2 (hSL-A64-N5) comprising derived and/or modified sequence from LASV(LASV253-NIG-2011;Clade II)__AIT17671__NP (opt1)
aggagaguccgcucagccagguugcagaagcggcuuagcguguguccuaaucuucucucugcguguagguaggccugugccgcaaacaagcuuaccaugagcgccuccaaggaggugaaguccuuccuguggacccagagccuccgccgggagcugagcggcuacugcuccagcaucaagcugcaggucgugaaggacgcccaggcgcuccugcacgggcuggacuucuccgaggugagcaacguccagcgccucaugcggaagcagaagcgcgacgacuccgaccugaagcggcugcgcgaccucaaccaggccgugaacaaccugguggagcucaagagcacccagcagaaguccguccugcgggugggcacccugaccagcgacgaccugcucacccuggccgccgaccuggagaagcucaaguccaaggugauccgcaccgagcggccccugagcuccggggucuacaugggcaaccugagcacgcagcagcucgagcagcgccgggcccugcugaacaugaucgggauggugggcggcgcgcaggggacccagccgggccgcgacggggugguccgggugugggacgugaagaaccccgaccuccugaacaaccaguucggcaccaugcccucccugacccucgccugccugacgaagcaggggcaggucgaccugaacgacguggugcucgcccugaccgaccugggccucaucuacaccgccaaguaccccaacagcuccgaccuggaccgccugagccagagccacccgauccucaacauggucgacaccaagaaguccagccugaacaucuccggcuacaacuucagccugggggcggccgugaaggccggcgccugcaugcucgacgggggcaacaugcuggagacgaucaaggugacgccccagaccauggacggcauccugaaguccauccucaaggucaagaagucccuggggauguucgugagcgacacccccggcgagcggaaccccuacgagaacauccuguacaagaucugccucagcggggacggcuggccguacaucgccucccgcaccagcaucguggggcgggcgugggagaacaccaccgucgaccuggaguccgacggcaagccccagaaggugggcaccgccgggagcaacaagucccugcagagcgccggcuuccccacggggcucaccuacucccagcugaugacccugaaggacagcaugaugcagcuggaccccuccgccaagaccuggaucgacaucgagggccgcccggaggaccccgucgagaucgcccucuaccagcccaugagcgggugcuacauccacuucuuccgggagcccacggaccugaagcaguucaagcaggacgcgaaguacucccacggcaucgacgugaccgaccuguucccggcccagcccggccucaccagcgccgugaucgaggcccugccccgcaacaugguccugaccugccaggggagcgacgacaucaagcggcuccuggacucccagggccgccgcgacaucaagcugaucgacaucgcccucagcaaggcggacucccggcgcuucgagaacgccgugugggaccagugcaaggaccugugccacaugcacacggggguggucguggagaagaagaagcggggcgggaaggaggagaucacgccccacugcgcccugauggacugcaucauguacgacgccgccgugagcggcggccucaacaucccgguccugcgcgcggugcugccccgggacaugguguuccgcaccuccagccccaaggucgugcucugaggacuagucccuguucccagagcccacuuuuuuuucuuuuuuugaaauaaaauagccugucuuucagaucucaaaggcucuuuucagagccaccaaaaaaaaaaaaaaaaaaaaaaaaaaaaaaaaaaaaaaaaaaaaaaaaaaaaaaaaaaaaaaaaagaauu

SEQ ID NO: 17070 - RNA, 1970 nt, Artificial Sequence
  mRNA product Design a-2 (hSL-A64-N5) comprising derived and/or modified sequence from LASV(LASV254-NIG-2011;Clade II)__AIT17675__NP (opt1)
aggagaguccgcucagccagguugcagaagcggcuuagcguguguccuaaucuucucucugcguguagguaggccugugccgcaaacaagcuuaccaugagcgccuccaaggaggugaaguccuuccuguggacccagagccuccgccgggagcugagcggcuacugcuccagcaucaagcugcaggucgugaaggacgcccaggcgcuccugcacgggcuggacuucuccgaggugagcaacguccagcgccucaugcggaagcagaagcgcgacgacuccgaccugaagcggcugcgcgaccucaaccaggccgugaacaaccugguggagcucaagagcacccagcagaaguccguccugcgggugggcacgcugaccagcgacgaccugcucacccuggccgccgaccuggagaagcucaaguccaaggugauccgcaccgagcggccccugagcuccggggucuacaugggcaaccugagcacgcagcagcucgagcagcgccgggcccugcugaacaugaucgggauggugggcggcgcgcaggggacccagccgggccgcgacggggugguccgggugugggacgugaagaaccccgaccuccugaacaaccaguucggcaccaugcccucccugacccucgccugccugacgaagcaggggcaggucgaccugaacgacgccgugcucgcccugaccgaccugggccucaucuacaccgcgaaguaccccaacagcuccgaccuggaccgccugagccagagccacccgauccucaacaugguggacaccaagaaguccagccugaacaucuccggcuacaacuucagccugggggccgccgucaaggccggcgccugcaugcucgacgggggcaacaugcuggagacgaucaaggugacgccccagaccauggacggcauccugaaguccauccucaaggugaagaagucccuggggauguucgucagcgacacccccggcgagcggaaccccuacgagaacauccuguacaagaucugccucagcggggacggcuggccguacaucgcgucccgcaccagcaucguggggcgggccugggagaacaccaucguggaccuggaguccgacggcaagccccagaaggucggcaccgccgggagcaacaagucccugcagagcgccggcuuccccaccgggcucacguacucccagcugaugacccugaaggacagcaugaugcagcuggaccccuccgccaagaccuggaucgacaucgagggccgcccggaggaccccguggagaucgcgcucuaccagcccaugagcgggugcuacauccacuucuuccgggagcccaccgaccugaagcaguucaagcaggacgccaaguacucccacggcaucgacgucgccgaccuguucccggcccagcccggccucacgagcgccgugaucgaggcgcugccccgcaacauggugcugaccugccaggggagcgacgacaucaagcggcuccuggacucccagggccgccgcgacaucaagcugaucgacaucgcccucagcaaggccgacucccggcgcuucgagaacgccgucugggaccagugcaaggaccugugccacaugcacaccggggugguggucgagaagaagaagcggggcgggaaggaggagaucacgccccacugcgcccugauggacugcaucauguacgacgcggccgugagcggcggccucaacaucccggugcugcgcgccguccugccccgggacaugguguuccgcaccuccagccccaaggugguccucugaggacuagucccuguucccagagcccacuuuuuuuucuuuuuuugaaauaaaauagccugucuuucagaucucaaaggcucuuuucagagccaccaaaaaaaaaaaaaaaaaaaaaaaaaaaaaaaaaaaaaaaaaaaaaaaaaaaaaaaaaaaaaaaaagaauu

SEQ ID NO: 17071 - RNA, 1970 nt, Artificial Sequence
  mRNA product Design a-2 (hSL-A64-N5) comprising derived and/or modified sequence from LASV(Nig08-04;Clade II)__ADU56611__NP (opt1)
aggagaguccgcucagccagguugcagaagcggcuuagcguguguccuaaucuucucucugcguguagguaggccugugccgcaaacaagcuuaccaugagcgccuccaaggaggugaaguccuuccuguggacccagagccuccgccgggagcugagcggcuacugcuccaacaucaagcugcaggucgugaaggacgcccaggcgcuccugcacgggcuggacuucagcgagguguccaacguccagcgccucaugcggaagcagaagcgcgacgacggcgaccugaagcggcugcgcgaccucaaccaggccgugaacaaccugguggagcucaagagcacccagcagaaguccguccugcggguggggacccugaccagcgacgaccugcucacccuggccgccgaccuggagaagcucaaguccaaggugauccgcaccgagcggccccugagcuccggcgucuacauggggaaccugagcacgcagcagcucgagcagcgcaaggcccugcuguccaugaucggcauggugggcggggcgcagggcacccagccggggcgggacggcgugguccgcgugugggacgugaagaaccccgaccuccugaacaaccaguucgggaccaugcccagccugacccucgccugccugacgaagcagggccaggucgaccugaacgacgccgugcucgcccugaccgaccugggccucaucuacaccgcgaaguaccccaacuccagcgaccuggaccggcugucccagagccacccgauccucaacaugguggacaccaagaaguccagccugaacaucagcggguacaacuucucccugggcgccgccgucaaggccggggccugcaugcucgacggcggcaacaugcuggagacgaucaaggugacgccccagaccauggacgggauccucaagagcauccugaaggugaagcgcucccugggcauguucgucagcgacacccccggggagcggaaccccuacgagaacauccuguacaagaucugccucuccggcgacggguggccguacaucgcgagccgcaccuccaucgugggccgggccugggagaacaccaccguggaccuggagagcgacggcaagccccagaaggucgggaccgccggcuccaacaagagccugcaguccgccggguuccccacgggccucaccuacagccagcugaugacccugaaggacuccaugaugcagcuggaccccagcgccaagaccuggaucgacaucgaggggcgcccggaggaccccguggagaucgcgcucuaccagcccauguccggcugcuacauccacuucuuccgggagcccacggaccugaagcaguucaagcaggacgccaaguacagccacggcaucgacgucaccgaccuguucuccgcccagccggggcucaccagcgccgugaucgaggcccugccccgcaacauggugcugaccugccagggcagcgacgacaucaagaagcuccuggacucccaggggcggcgcgacaucaagcugaucgacaucagccucaacaaggcggacucccgccgguucgagaacgccgucugggaccagugcaaggaccugugccacaugcacacgggcgugguggucgagaagaagaagcgcgggggcaaggaggagaucacgccccacugcgcccugauggacugcaucauguucgacgccgccgugagcggcgggcucaacauccccauccugcgggcggugcugccgcgcgacauggucuuccggaccuccagccccaagguggugcucugaggacuagucccuguucccagagcccacuuuuuuuucuuuuuuugaaauaaaauagccugucuuucagaucucaaaggcucuuuucagagccaccaaaaaaaaaaaaaaaaaaaaaaaaaaaaaaaaaaaaaaaaaaaaaaaaaaaaaaaaaaaaaaaaagaauu

SEQ ID NO: 17072 - RNA, 1973 nt, Artificial Sequence
  mRNA product Design a-2 (hSL-A64-N5) comprising derived and/or modified sequence from LASV(GA391;Clade III)__AAA46284__NP (opt1)
aggagaguccgcucagccagguugcagaagcggcuuagcguguguccuaaucuucucucugcguguagguaggccugugccgcaaacaagcuuaccaugagcgccuccaaggaggugcgcagcugccuguggacccagucccuccggcgcgagcugagcggcuacugcuccaacaucaagcugcaggucgugaaggacgcccaggcgcuccugcacgggcuggacuucagcgagguguccaacguccagcggcucaugcgcaagcagaagcgggacgacggcgaccugaagcgccugcgggaccucaaccaggccgugaacaaccugguggagcugaaguccacccagcagaaguccguccuccgcguggggacgcugagcuccgacgaccugcucauccuggccgccgaccuggagaagcucaagagcaaggugacccggaccgagcgcccccuguccagcggcgucuacauggggaaccuguccagccagcagcucgaccagcggcgcgcccugcugaacaugaucggcaugaccggcguguccgggggcgggaagggcgcgagcaacgggaucgugcgggucugggacgugaagaacgccgagcuccugaacaaccaguucggcacgaugccgucccugacccucgccugccugaccaagcagggccagguggaccugaacgacgccguccaggcgcucaccgaccuggggcugaucuacacggccaaguaccccaacagcagcgaccucgaccgccugucccagagccaccccauccugaacaugaucgacaccaagaaguccagccucaacaucuccggcuacaacuucagccugggggccgccgugaaggccggcgcgugcaugcuggacggcgggaacaugcucgagaccaucaaggugagcccccagaccauggacggcauccucaagagcauccugaaggucaagaagucccuggggauguucgugagcgacacgccgggcgagcggaaccccuacgagaacauccuguacaagaucugccuguccggggacggcuggagcuacaucgccucccgcaccagcaucgugggccgggccugggagaacaccgucguggaccucgagcaggacaacaagccccagaagaucgggaacggcggguccaacaagagccugcaguccgccggcuucgccgcggggcugaucuacagccagcucaugacccugaaggacuucaagugcuucaaccugauccccaacgccaagacguggauggacaucgagggccgcccggaggaccccguggagaucgcccuguaccagcccuccagcggcugcuacguccacuucuuccgggagcccaccgaccucaagcaguucaagcaggacgccaaguacagccacgggcgcgacgugaccgaccuguucgccgcgcagccgggccugaccuccgccgucaucgaggcccucccccggaacauggugaucacgugccaggggagcgaggacauccgcaagcugcuggagucccagggccgccgggacaucaagcucaucgacaucacccugagcaaggccgacucccgcaaguucgagaacgccgugugggaccaguucaaggaccugugccacaugcacaccggggucgugguggagaagaagaagcggggcggcaaggaggagaucacgccccacugcgcgcucauggacugcaucauguucgacgccgccgucagcgggggccuggacgccaaggugcugcgcgugguccucccccgggacaugguguuccgcaccuccaccccgaaggugguccugugaggacuagucccuguucccagagcccacuuuuuuuucuuuuuuugaaauaaaauagccugucuuucagaucucaaaggcucuuuucagagccaccaaaaaaaaaaaaaaaaaaaaaaaaaaaaaaaaaaaaaaaaaaaaaaaaaaaaaaaaaaaaaaaaagaauu

SEQ ID NO: 17073 - RNA, 1970 nt, Artificial Sequence
  mRNA product Design a-2 (hSL-A64-N5) comprising derived and/or modified sequence from LASV(Nig08-A19;Clade III)__ADU56619__NP (opt1)
aggagaguccgcucagccagguugcagaagcggcuuagcguguguccuaaucuucucucugcguguagguaggccugugccgcaaacaagcuuaccaugagcgccuccaaggaggugaaguccuuccuguggacccagucccuccgccgggagcugagcggcuacugcuccaacaucaagcugcaggucgugaaggacgcccaggcgcuccugcacgggcuggacuucagcgagguguccaacguccagcgccucaugcggaagcagaagcgcgacgacggcgaccugaagcggcugcgcgaccucaaccaggccgugaacaaccugguggagcucaagagcacccagcagaaguccguccugcggguggggacccugagcuccgacgaccugcucgugcuggccgccgaccuggagaagcucaagagcaaggucgugcgcaccgagcggccccuguccagcggcaucuacauggggaaccuguccagccagcagcucgaccagcgcaaggcccugcugaacaugaucggcaugaccggcgggaacggcgggcggaacaccacguccgacggcaucgugcgcgucugggacgugaagaacgcggagcuccugaacaaccaguucgggaccaugccgagccugacccucgccugccugaccaagcagggccagguggaccugaacgacgccguccaggcccucacggaccugggccugaucuacaccgcgaaguaccccaacuccagcgaccucgaccggcuggcccagagccaccccauccugaacaugaucgacaccaagaaguccagccucaacaucuccggguacaacuucagccugggcgccgccgugaaggccggggcgugcaugcuggacggcggcaacaugcucgagaccaucaaggugagcccccagacgauggacgggauccucaagagcauccugaaggucaagcgcucccugggcauguucaucagcgacaccccgggggagcggaaccccuacgagaacauccuguacaagaucugccuguccggcgacggguggcccuacaucgccagccgcaccuccaucgugggccgggccugggagaacaccguggucgaccucgagagcgacaacaagccccagaagacgggcaacgggggcuccaacaagagccugcaguccgccggguucgccgcgggccugaccuacagccagcucaugacccugaaggacuccaugcugcagcuggacccgaacgccaagaccuggauggacaucgaggggcgccccgaggaccccguggagaucgcccucuaccagcccagcuccggcugcuacauccacuucuuccgggagccgacggaccugaagcaguucaagcaggacgccaaguacagccacggcaucgacgugaccgaccuguucgccgcgcagcccgggcucaccagcgccgucaucgaggcccugccccgcaacauggugaucacgugccagggcuccgaggacauccggaagcugcucgagagccaggggcgccgcgacaucaagcugaucgacaucucccugagcaaggucgacucccggaaguucgagaacgccgugugggaccaguucaaggaccucugccacaugcacaccggcaucguggucgagaagaagaagcgcgggggcaaggaggagaucacgccccacugcgcccugauggacugcaucauguucgacgcggccgugagcggcgggguggacgccaagguccugcgggccgugcucccgcgcgacaugguguuccggaccuccacccccaaggucgugcugugaggacuagucccuguucccagagcccacuuuuuuuucuuuuuuugaaauaaaauagccugucuuucagaucucaaaggcucuuuucagagccaccaaaaaaaaaaaaaaaaaaaaaaaaaaaaaaaaaaaaaaaaaaaaaaaaaaaaaaaaaaaaaaaaagaauu

SEQ ID NO: 17074 - RNA, 1970 nt, Artificial Sequence
  mRNA product Design a-2 (hSL-A64-N5) comprising derived and/or modified sequence from LASV(G1180-SLE-2010;Clade IV)__AIT17169__NP (opt1)
aggagaguccgcucagccagguugcagaagcggcuuagcguguguccuaaucuucucucugcguguagguaggccugugccgcaaacaagcuuaccaugagcgccuccaaggagaucaagagcuuccuguggacccagucccuccgccgggagcugagcggcuacugcuccaacaucaagcuccagguggucaaggacgcccaggcgcugcugcacgggcuggacuucagcgagguguccaacgugcagcgccucaugcggaaggagcgccgggacgacaacgaccugaagcgccugcgggaccucaaccaggccgucaacaaccugguggagcucaagagcacccagcagaaguccauccugcgcgugggcacccugaccagcgacgaccugcucauccuggccgccgaccuggagaagcucaaguccaaggucauccggaccgagcgcccccugagcgccgggguguacaugggcaaccuguccagccagcagcucgaccagcggcgcgcgcugcuguccaugaucgggaugagcuccggcaaccagcgggcccaggccggccgcgacggggugguccgggugugggacgugaagaacgucgagcuccugaacaaccaguucggcaccaugccgagccugacgcucgccugccugaccaagcagggccagguggaccugaacgacgcggugcaggcccucaccgaccuggggcugaucuacaccgccaaguaccccaacacguccgaccucgaccgccugacccagagccaccccauccugaacaugaucgacaccaagaaguccagccucaacaucagcggguacaacuucucccugggcgccgccgucaaggcgggcgccugcaugcuggacgggggcaacaugcucgagaccaucaaggugagcccccagacgauggacgggauccugaaguccauccugaaggugaagaaggcccucggcauguucaucagcgacaccccgggcgagcggaaccccuacgagaacauccuguacaagaucugccuguccggggacggcuggcccuacaucgccagccgcaccuccaucaccgggcgggccugggagaacacggucguggaccucgagagcgacggcaagccccagaaggcgggguccaacaacagcaacaagucccugcagagcgugggcuucaccgccggccugaccuacucccagcucaugacccugaaggacgccaugcugcagcuggacccgaacgccaagacguggauggacaucgaggggcgccccgaggaccccgucgagaucgcccucuaccagcccagcuccggcugcuacauccacuucuuccgggagccgaccgaccugaagcaguucaagcaggacgcgaaguacagccacgggaucgacgugaccgaccuguucgccgcccagcccggccucaccuccgccgugaucgacgcccugccccgcaacauggucaucacgugccaggggagcgacgacauccgcaagcugcucgagagccagggccggaaggacaucaagcugaucgacaucgcgcuguccaagaccgacagccgcaaguacgagaacgccgugugggaccaguacaaggaccucugccacaugcacaccggcgucgugguggagaagaagaagcgcgggggcaaggaggagaucacgccccacugcgcccugauggacugcaucauguucgacgccgcggucuccgggggccugaacaccagcgugcuccgggccgugcugccgcgggacauggucuuccgcaccuccacgccccggguggugcugugaggacuagucccuguucccagagcccacuuuuuuuucuuuuuuugaaauaaaauagccugucuuucagaucucaaaggcucuuuucagagccaccaaaaaaaaaaaaaaaaaaaaaaaaaaaaaaaaaaaaaaaaaaaaaaaaaaaaaaaaaaaaaaaaagaauu

SEQ ID NO: 17075 - RNA, 1970 nt, Artificial Sequence
  mRNA product Design a-2 (hSL-A64-N5) comprising derived and/or modified sequence from LASV(G1442-SLE-2011;Clade IV)__AIT17181__NP (opt1)
aggagaguccgcucagccagguugcagaagcggcuuagcguguguccuaaucuucucucugcguguagguaggccugugccgcaaacaagcuuaccaugagcgccuccaaggaggugaaguccuuccuguggacccagagccuccgccgggagcugagcggcuacugcuccaacaucaagcugcaggucgugaaggacgcccaggcgcuccugcacgggcuggacuucagcgagguguccaacguccagcgccucaugcggaagcagcgccgggacgacaacgaccugaagcgccugcgggaccucaaccaggccgugaacaaccugguggagcucaagagcacccagcagaaguccguccugcgcgugggcacccugaccagcgacgaccugcucgugcuggccgccgaccuggagaagcucaaguccaaggucauccggaccgagcgcccccugagcgccgggguguacaugggcaaccuguccagccagcagcucgaccagcggcgcgcgcugcugaacaugaucgggauguccggcggcauccaggggacccggacgggccgcgacggggugguccgggugugggacgugaagaacgccgaccuccugaacaaccaguucggcaccaugccgagccugacccucgccugccugaccaagcaggggcaggucgaccugaacgacguggugcaggcccucacggaccugggccugaucuacaccgcgaaguaccccaacgccuccgaccucgaccgccugacccagagccaccccauccugaacaugaucgacaccaagaaguccagccucaacaucagcggcuacaacuucucccugggggccgccgucaaggccggcgcgugcaugcuggacgggggcaacaugcucgagacgaucaaggugagcccccagaccauggacggcauccugaaguccauccugaaggugaagaagacccucgggauguucaucagcgacaccccgggcgagcggaaccccuacgagaacauccuguacaagaucugccuguccggggacggcuggcccuacaucgccagccgcacguccaucaccgggcgggccugggagaacaccgucguggaccucgagagcgacggcaagccccagaaggccggcuccaacaacagcaacaagucccugcagagcgccggguucgcggccggccugaccuacucccagcucaugacgcugaaggacgccaugcugcagcuggacccgaacgccaagaccuggauggacaucgaggggcgccccgaggaccccguggagaucgcccucuaccagcccagcuccggcugcuacauccacuucuuccgggagccgaccgaccugaagcaguucaagcaggacgcgaaguacagccacgggaucgacgucaccgaccuguucgccgcccagcccggccucacguccgccgugaucgaggcccugccccgcaacauggucaucacgugccagggcagcgacgacaucaagaagcugcucgagucccaggggcgcaaggacaucaagcugaucgacaucgcgcugagcaagaccgacagccggaaguacgagaacgccgugugggaccaguacaaggaccucugccacaugcacaccggcguggucguggagaagaagaagcgcgggggcaaggaggagaucaccccgcacugcgcccugauggacugcaucauguucgacgccgcgguguccgggggccugaacacccucguccugcgggccgugcugccccgcgacaugguguuccggaccagcacgccccgcgucgugcucugaggacuagucccuguucccagagcccacuuuuuuuucuuuuuuugaaauaaaauagccugucuuucagaucucaaaggcucuuuucagagccaccaaaaaaaaaaaaaaaaaaaaaaaaaaaaaaaaaaaaaaaaaaaaaaaaaaaaaaaaaaaaaaaaagaauu

SEQ ID NO: 17076 - RNA, 1970 nt, Artificial Sequence
  mRNA product Design a-2 (hSL-A64-N5) comprising derived and/or modified sequence from LASV(G3010-SLE-2013;Clade IV)__AIT17345__NP (opt1)
aggagaguccgcucagccagguugcagaagcggcuuagcguguguccuaaucuucucucugcguguagguaggccugugccgcaaacaagcuuaccaugagcgccuccaaggagaucaagagcuuccuguggacccagucccuccgccgggagcugagcggcuacugcuccaacaucaagcuccagguggucaaggacgcccaggcgcugcugcacgggcuggacuucagcgagguguccaacgugcagcgccucaugcggaaggagcgccgggacgacaacgaccugaagcgccugcgggaccucaaccaggccgucaacaaccugguggagcucaagagcacccagcagaaguccauccugcgcgugggcacccugaccagcgacgaccugcucauccuggccgccgaccuggagaagcucaaguccaaggucacccggaccgagcgcccccugagcgccgggguguacaugggcaaccuguccagccagcagcucgaccagcggcgcgcgcugcuguccaugaucgggaugagcuccggcgugcagggcgcccgggccgggcgcgacggcgucgugcgggugugggacgucaagaacgccgagcuccugaacaaccaguucgggacgaugccgagccugacccucgcgugccugaccaagcagggccagguggaccugaacgacgugguccaggcccucaccgaccuggggcugaucuacacggccaaguaccccaacaccuccgaccucgaccgccugacccagagccaccccauccugaacaugaucgacaccaagaaguccagccucaacaucagcggcuacaacuucucccugggcgccgccgugaaggcgggggccugcaugcuggacggcgggaacaugcucgagacgaucaaggugagcccccagaccauggacggcauccugaaguccauccugaaggucaagaaggcccucggcauguucaucagcgagaccccgggggagcggaaccccuacgagaacauccuguacaagaucugccuguccggcgacggguggcccuacaucgccagccgcaccuccaucacgggccgggccugggagaacaccgugguggaccucgagagcgacgggaagccccagaaggcgggcuccaacaacagcaacaagucccugcagagcgccggcuucaccgccgggcugaccuacucccagcucaugacgcugaaggacgccaugcugcagcuggacccgaacgccaagaccuggauggacaucgagggccgccccgaggaccccgucgagguggcgcucuaccagcccagcuccgggugcuacauccacuucuuccgggagccgaccgaccugaagcaguucaagcaggacgccaaguacagccacggcaucgacgugaccgaccuguucgccgcccagcccgggcucacguccgccgucaucgacgcgcugccccgcaacauggugaucacgugccagggcagcgacgacaucaagaagcugcucgagagccagggccgcaaggacaucaagcugaucgacaucgcccuguccaagaccgacagccggaaguacgagaacgccgucugggaccaguacaaggaccucugccacaugcacaccggggugguggucgagaagaagaagcgcggcgggaaggaggagaucaccccgcacugcgcccugauggacugcaucauguucgacgcggccguguccggcgggcugaacaccagcgugcuccgggccguccugccccgcgacaugguguuccggaccuccacgccccgcgugguccugugaggacuagucccuguucccagagcccacuuuuuuuucuuuuuuugaaauaaaauagccugucuuucagaucucaaaggcucuuuucagagccaccaaaaaaaaaaaaaaaaaaaaaaaaaaaaaaaaaaaaaaaaaaaaaaaaaaaaaaaaaaaaaaaaagaauu

SEQ ID NO: 17077 - RNA, 1970 nt, Artificial Sequence
  mRNA product Design a-2 (hSL-A64-N5) comprising derived and/or modified sequence from LASV(G502-SLE-2009;Clade IV)__AIT17127__NP (opt1)
aggagaguccgcucagccagguugcagaagcggcuuagcguguguccuaaucuucucucugcguguagguaggccugugccgcaaacaagcuuaccaugagcgccuccaaggagaucaagagcuuccuguggacccagucccuccgccgggagcugagcggcuacugcuccaacaucaagcuccagguggucaaggacgcccaggcgcugcugcacgggcuggacuucagcgagguguccaacgugcagcgccucaugcggaaggagcgccgggacgacaacgaccugaagcgccugcgggaccucaaccaggccgucaacaaccugguggagcucaagagcacccagcagaaguccauccugcgcgugggcacccugaccagcgacgaccugcucauccuggccgccgaccuggagaagcucaaguccaaggucauccggaccgagcgcccccugagcgccgggguguacaugggcaaccuguccagccagcagcucgaccagcggcgcgcgcugcuguccaugaucgggaugagcggcggcaaccagggggugcgggccggcaaggacggggucgugcgcgugugggacgucaagaacgccgagcuccugaacaaccaguucggcaccaugccgucccugacgcucgccugccugaccaagcagggccagguggaccugaacgacgcggugcaggcccucaccgaccuggggcugaucuacaccgccaaguaccccaacacgagcgaccucgaccggcugacccagucccaccccauccugaacaugaucgacaccaagaaguccagccucaacaucuccggcuacaacuucagccugggggccgccgucaaggcgggcgccugcaugcuggacgggggcaacaugcucgagaccaucaaggugagcccccagacgauggacggcauccucaagagcauccugaaggugaagaaggcccuggggauguucaucuccgacaccccgggcgagcgcaaccccuacgagaacauccuguacaagaucugccugagcggggacggcuggcccuacaucgccucccggaccagcaucaccgggcgcgccugggagaacacggucguggaccucgaguccgacggcaagccccagaaggcgggcagcaacaacuccaacaagagccugcaguccgccggguucaccgccggccugaccuacagccagcucaugacccugaaggacgccaugcugcagcuggacccgaacacgaagaccuggauggacaucgaggggcggcccgaggaccccguggagaucgcccucuaccagcccuccagcggcugcuacauccacuucuuccgcgagccgaccgaccugaagcaguucaagcaggacgcgaaguacucccacgggaucgacgucaccgaccuguucgccgcccagcccggccucacgagcgccgugaucgacgcccugccccggaacauggugaucacgugccagggcuccgacgacauccgcaagcugcucgagagccaggggcgcaaggacaucaagcugaucgacaucgcgcugaacaagaccgacagccggaaguacgagaacgccgucugggaccaguacaaggaccucugccacaugcacaccggcguggucguggagaagaagaagcgcgggggcaaggaggagaucaccccgcacugcgcccugauggacugcaucauguucgacgccgcgguguccgggggccugaacaccagcguccuccgggccgugcugccccgcgacaugguguuccggaccuccacgccccgcgucgugcugugaggacuagucccuguucccagagcccacuuuuuuuucuuuuuuugaaauaaaauagccugucuuucagaucucaaaggcucuuuucagagccaccaaaaaaaaaaaaaaaaaaaaaaaaaaaaaaaaaaaaaaaaaaaaaaaaaaaaaaaaaaaaaaaaagaauu

SEQ ID NO: 17078 - RNA, 1970 nt, Artificial Sequence
  mRNA product Design a-2 (hSL-A64-N5) comprising derived and/or modified sequence from LASV(G733-SLE-2010;Clade IV)__AIT17155__NP (opt1)
aggagaguccgcucagccagguugcagaagcggcuuagcguguguccuaaucuucucucugcguguagguaggccugugccgcaaacaagcuuaccaugagcgccuccaaggagaucaagagcuuccuguggacccagucccuccgccgggagcugagcggcuacugcuccaacaucaagcuccagguggucaaggacgcccaggcgcugcugcacgggcuggacuucagcgagguguccaacgugcagcgccucaugcggaaggagcgccgggacgacaacgaccugaagcgccugcgggaccucaaccaggccgucaacaaccugguggagcucaagagcacccagcagaaguccgugcugcgcgucggcacccugaccagcgacgagcugcucgugcuggccgccgaccuggagaagcucaaguccaaggugauccggaccgagcgcccccugagcgccggggucuacaugggcaaccuguccagccagcagcucgaccagcggcgcgcgcugcuguccaugaucgggaugagcggcggcaaccagggggcccggaccggccgcgacgggguggugcgggucugggacgugaagaacgccgagcuccugaacaaccaguucggcaccaugccgucccugacccucgccugccugaccaagcagggccagguggaccugaacgacgcgguccaggcccucaccgaccuggggcugaucuacacggccaaguaccccaacaccagcgaccucgaccgccugacccagucccaccccauccugaacaugaucgacaccaagaaguccagccucaacaucuccggcuacaacuucagccugggggccgccgugaaggcgggcgccugcaugcuggacgggggcaacaugcucgagacgaucaaggugagcccccagaccauggacggcauccucaagagcauccugaaggucaagaaggcccuggggauguucaucuccgacaccccgggcgagcggaaccccuacgagaacauccuguacaagaucugccugagcggggacggcuggcccuacaucgccucccgcaccagcaucacggggcgggccugggagaacaccgugguggaccucgaguccgacggcaagccccagaaggcgggcagcaacaacuccaacaagagccugcaguccgccggguucaccgccggccugaccuacagccagcucaugacgcugaaggacgccaugcugcagcuggacccgaacgccaagaccuggauggacaucgaggggcgccccgaggaccccgucgagaucgcgcucuaccagcccuccagcggcugcuacauccacuucuuccgggagccgaccgaccugaagcaguucaagcaggacgccaaguacucccacgggaucgacgugaccgaccuguucgccgcccagcccggccucacgagcgccgugaucgacgcgcugccccgcaacauggucaucacgugccagggcuccgacgacauccgcaagcugcucgagagccaggggcggaaggacaucaagcugaucgacaucgcccugagcaagaucgacucccgcaaguacgagaacgccgugugggaccaguacaaggaccucugccacaugcacaccggcgucgugguggagaagaagaagcgcgggggcaaggaggagaucacgccccacugcgcccugauggacugcaucauguucgacgcggccgucagcgggggccugaacucccucgugcugcgggccgugcugccgcgggacauggucuuccgcaccagcacgccccggguggugcucugaggacuagucccuguucccagagcccacuuuuuuuucuuuuuuugaaauaaaauagccugucuuucagaucucaaaggcucuuuucagagccaccaaaaaaaaaaaaaaaaaaaaaaaaaaaaaaaaaaaaaaaaaaaaaaaaaaaaaaaaaaaaaaaaagaauu

SEQ ID NO: 17079 - RNA, 1970 nt, Artificial Sequence
  mRNA product Design a-2 (hSL-A64-N5) comprising derived and/or modified sequence from MOPV/LASV reassortant(IGS-1;Clade IV)__AFY05578__NP (opt1)
aggagaguccgcucagccagguugcagaagcggcuuagcguguguccuaaucuucucucugcguguagguaggccugugccgcaaacaagcuuaccaugagcgccuccaaggagaucaagagcuuccuguggacccagucccuccgccgggagcugagcggcuacugcuccaacaucaagcuccagguggucaaggacgcccaggcgcugcugcacgggcuggacuucagcgagguguccaacgugcagcgccucaugcggaaggagcgccgggacgacaacgaccugaagcgccugcgggaccucaaccaggccgucaacaaccugguggagcucaagagcacccagcagaaguccauccugcgcgugggcacccugaccagcgacgaccugcucauccuggccgccgaccuggagaagcuccgguccaaggucauccgcaccgagcggccccugagcgccgggguguacaugggcaaccuguccagccagcagcucgaccagcgccgggcgcugcugaacaugaucgggauguccggcggcaaccagggggcccgcgccggccgggacggggugguccgcgugugggacgugaagaacgccgagcuccugagcaaccaguucggcaccaugccgucccugacgcucgcgugccugaccaagcaggggcaggucgaccugaacgacgccgugcaggcccucaccgaccugggccugaucuacaccgccaaguaccccaacacgagcgaccucgaccggcugacccagucccaccccauccugaacaugaucgacaccaagaaguccagccucaacaucuccggcuacaacuucagccugggggccgcggugaaggccggcgccugcaugcuggacgggggcaacaugcucgagaccaucaaggucagcccccagacgauggacggcauccucaagagcauccugaaggugaagaaggcccuggggauguucaucuccgacaccccgggcgagcgcaaccccuacgagaacauccuguacaagaucugccugagcggggacggcuggcccuacaucgccucccggaccagcaucaccgggcgcgcgugggagaacacgguggucgaccucgaguccgacggcaagccccagaaggccgacagcaacaacuccagcaagucccugcagagcgccggcuucaccgccgggcugaccuacucccagcucaugacccugaaggacgccaugcugcagcuggacccgaacgcgaagacguggauggacaucgagggccggcccgaggaccccguggagaucgcccucuaccagcccagcuccgggugcuacauccacuucuuccgcgagccgaccgaccugaagcaguucaagcaggacgccaaguacagccacggcaucgacgugaccgaccuguucgccacccagcccgggcucacguccgccgucaucgacgcgcugccccgcaacauggugaucacgugccagggcagcgacgacauccggaagcugcucgagagccagggccgcaaggacaucaagcugaucgacaucgaccuguccaagaccgacagccggaaguacgagaacgccgugugggaccaguacaaggaccucugccacaugcacaccggggucguggucgagaagaagaagcgcggcgggaaggaggagaucaccccgcacugcgcccugauggacugcaucauguucgacgccgcgguguccggcgggcugaacaccagcgugcuccgggccguccugccccgcgacaugguguuccggaccuccacgccccgcgugguccugugaggacuagucccuguucccagagcccacuuuuuuuucuuuuuuugaaauaaaauagccugucuuucagaucucaaaggcucuuuucagagccaccaaaaaaaaaaaaaaaaaaaaaaaaaaaaaaaaaaaaaaaaaaaaaaaaaaaaaaaaaaaaaaaaagaauu

SEQ ID NO: 17080 - RNA, 1970 nt, Artificial Sequence
  mRNA product Design a-2 (hSL-A64-N5) comprising derived and/or modified sequence from LASV(LM765-SLE-2012;Clade IV)__AIT17815__NP (opt1)
aggagaguccgcucagccagguugcagaagcggcuuagcguguguccuaaucuucucucugcguguagguaggccugugccgcaaacaagcuuaccaugagcgccuccaaggagaucaagagcuuccuguggacccagucccuccgccgggagcugagcggcuacugcuccaacaucaagcuccagguggucaaggacgcccaggcgcugcugcacgggcuggacuucagcgagguguccaacgugcagcgccucaugcggaaggagcgccgggacgacaacgaccugaagcgccugcgggaccucaaccaggccgucaacaaccugguggagcucaagagcacccagcagaaguccauccugcgcgugggcacccugaccagcgacgaccugcucauccuggccgccgaccuggagaagcucaaguccaaggucacccggaccgagcgcccccugagcgccgggguguacaugggcaaccuguccagccagcagcucgaccagcggcgcgcgcugcuggacaugaucgggauguccggcagcaaccagggcgcccgggccgggcgcgacggcgugguccgggugugggacgugaagaacgccgagcuccugaacaaccaguucgggacgaugccgucccugacccucgcgugccugaccaagcagggccaggucgaccugaacgacgccgugcaggcccucaccgaccuggggcugaucuacacggccaaguaccccaacaccagcgaccucgaccgccugacccagucccaccccauccugaacaugaucgacaccaagaaguccagccucaacaucuccggcuacaacuucagccugggcgccgcggugaaggccggggccugcaugcuggacggcgggaacaugcucgagacgaucaaggucagcccccagaccauggacggcauccucaagagcauccugaaggugaagaaggcccugggcauguucaucuccgacgccccgggggagcggaaccccuacgagaacauccuguacaagaucugccugagcggcgacggguggcccuacaucgcgucccgcaccagcaucaccggccgggccugggagaacacgguggucgaccucgaguccgacgggaagccccagaaggccggcagcaacggcuccaacaagagccugcaguccgccggguucaccgccggccugaccuacagccagcucaugacccugaaggacgcgaugcugcagcuggacccgaacgccaagacguggauggacaucgaggggcgccccgaggaccccguggagaucgcccucuaccagcccuccagcggcugcuacauccacuucuuccgggagccgaccgaccugaagcaguucaagcaggacgccaaguacucccacgggaucgacgugaccgaccuguucgccgcgcagcccggccucaccagcgccgucaucgacgcccugccccgcaacauggugaucacgugccagggcuccgacgacauccgcaagcuguucgagagccaggggcggaaggacaucaagcucaucgacaucgcccugagcaagaccgacucccgcaaguacgagaacgcggugugggaccaguacaaggaccugugccacaugcacaccggcaucgucguggagaagaagaagcgcgggggcaaggaggagaucacgccccacugcgcccucauggacugcaucauguucgacgccgccgucagcgggggccugaacaccuccgugcugcgggccgugcucccgcgggacauggucuuccgcaccagcacgccccggguggugcugugaggacuagucccuguucccagagcccacuuuuuuuucuuuuuuugaaauaaaauagccugucuuucagaucucaaaggcucuuuucagagccaccaaaaaaaaaaaaaaaaaaaaaaaaaaaaaaaaaaaaaaaaaaaaaaaaaaaaaaaaaaaaaaaaagaauu

SEQ ID NO: 17081 - RNA, 1970 nt, Artificial Sequence
  mRNA product Design a-2 (hSL-A64-N5) comprising derived and/or modified sequence from LASV(LM776-SLE-2012;Clade IV)__AIT17825__NP (opt1)
aggagaguccgcucagccagguugcagaagcggcuuagcguguguccuaaucuucucucugcguguagguaggccugugccgcaaacaagcuuaccaugagcgccuccaaggagaucaagagcuuccuguggacccagucccuccgccgggagcugagcuccuacugcagcaacaucaagcuccagguggucaaggacgcccaggcgcugcugcacggccuggacuucuccgaggugagcaacgugcagcgccucaugcggaaggagcgccgggacgacaacgaccugaagcgccugcgggaccucaaccaggccgucaacaaccugguggagcugaaguccacccagcagaaguccauccuccgcguggggacccugaccuccgacgaccugcucauccuggccgccgaccuggagaagcucaagagcaaggucacccggaccgagcgcccccuguccgccggcguguacauggggaaccugagcucccagcagcucgaccagcggcgcgcgcugcugagcaugaucggcauguccgggagcaaccagggcgcccgggccggccgcgacggggugguccgggugugggacgugaagaacgccgagcuccugaacaaccaguucggcacgaugccgucccugacccucgcgugccugaccaagcaggggcaggucgaccugaacgacgccgugcaggcccucaccgaccugggccugaucuacacggccaaguaccccaacaccagcgaccucgaccgccugacccagagccaccccauccugaacaugaucgacaccaagaaguccagccucaacaucuccggguacaacuucagccugggcgccgcggugaaggccggcgccugcaugcuggacgggggcaacaugcucgagacgaucaaggucagcccccagaccauggacgggauccucaagagcauccugaaggugaagaaggcccugggcauguucaucuccgacaccccgggcgagcggaaccccuacgagaacauccuguacaagaucugccugagcggggacggcuggcccuacaucgccucccgcaccagcaucacggggcgggcgugggagaacaccguggucgaccucgaguccgacggcaagccccagaaggccgggagcaacaacuccaacaagagccugcaguccgccggcuucaccgccggccugaccuacagccagcucaugacgcugaaggacgccaugcugcagcuggacccgaacgcgaagaccuggauggacaucgaggggcgccccgaggaccccguggagguggcccucuaccagcccuccagcggcugcuacauccacuucuuccgggagccgaccgaccugaagcaguucaagcaggacgccaaguacucccacgggaucgacgucaccgaccuguucgccgcccagcccggccucacgagcgcggugaucgacgcccugccccgcaacauggugaucacgugccaggggagcgacgacauccgcaagcugcucgagucccagggccggaaggacaucaagcugaucgacaucgcccugagcaagaccgacucccgcaaguacgagaacgccgucugggaccaguacaaggaccucugccacaugcacaccggcguggucguggagaagaagaagcgcgggggcaaggaggagaucaccccgcacugcgcgcugauggacugcaucauguucgacgccgccgugagcgggggccugaacaccuccguccuccgggccgugcugccccgggacaugguguuccgcaccagcacgccccgggucgugcugugaggacuagucccuguucccagagcccacuuuuuuuucuuuuuuugaaauaaaauagccugucuuucagaucucaaaggcucuuuucagagccaccaaaaaaaaaaaaaaaaaaaaaaaaaaaaaaaaaaaaaaaaaaaaaaaaaaaaaaaaaaaaaaaaagaauu

SEQ ID NO: 17082 - RNA, 1970 nt, Artificial Sequence
  mRNA product Design a-2 (hSL-A64-N5) comprising derived and/or modified sequence from LASV(Mad39;Clade IV)__ANH09723__NP (opt1)
aggagaguccgcucagccagguugcagaagcggcuuagcguguguccuaaucuucucucugcguguagguaggccugugccgcaaacaagcuuaccaugagcgccuccaaggagaucaagagcuuccuguggacccagucccuccgccgggagcugagcggcuacugcuccaacaucaagcuccagguggucaaggacgcccaggcgcugcugcacgggcuggacuucagcgagguguccaacgugcagcgccucaugcggaagcagcgccgggacgacaacgaccugaagcgccugcgggaccucaaccaggccgucaacaaccugguggagcugaaguccacccagcagaaguccgugcuccgcgucggcacgcugaccagcgacgaccugcucacccuggccgccgaccuggagaagcucaaguccaaggugacccggacggagcgcccccugaccgccgggguguacaugggcaaccugagcucccagcagcucgaccagcggcgcgcgcugcugaacaugaucgggaugagcggcggcaaccagggggcccggaccggccgcgacggggucgugcgggugugggacgucaagaacgccgagcuccugaacaaccaguucggcaccaugccgucccugacgcucgccugccugaccaagcagggccagguggaccugaacgacgugguccaggcgcucaccgaccuggggcugaucuacaccgccaaguaccccaacacgagcgaccucgaccgccugacccagucccaccccauccugaacaugaucgacaccaacaagagcucccucaacaucagcggcuacaacuucagccugggggccgccgugaaggccggcgcgugcaugcuggacgggggcaacaugcucgagaccaucaaggugagcccccagacgauggacggcauccucaagagcauccugaaggucaagaagucccuggggauguucaucagcgacaccccgggcgagcggaaccccuacgagaacauccuguacaagaucugccuguccggggacggcuggcccuacaucgccagccgcaccuccaucaccgggcgggccugggagaacacggugguggaccucgagagcggcggcaagccccagaaggccggguccaacaacagcaacaagucccugcagagcgccggcuucgcggccgggcugaccuacucccagcucaugacccugaaggacgccaugcugcagcuggacccgaacgccaagaccuggauggacaucgagggccgccccgaggaccccgucgagaucgcccucuaccagcccaucagcgggugcuacauccacuucuuccgggagccgacggaccugaagcaguucaagcaggacgcgaaguacucccacggcaucgacgugaccgaccuguucgccgcccagcccggccucaccagcgccgugaucgaggcccugccccgcaacauggucaucacgugccagggguccgacgacauccgcaagcuguucgagagccagggccggaaggacaucaagcucaucgacaucgcgcuguccaagaccgacagccgcaaguacgagaacgccgugugggaccaguacaaggaccugugccacaugcacaccggggucgugguggagaagaagaagaagggcgggaaggaggagaucacgccccacugcgcccucauggacugcaucauguucgacgccgcggucagcggcggccugaacacccuggugcuccgggccgugcugccgcgcgacauggucuuccggaccuccacccccaagguggugcugugaggacuagucccuguucccagagcccacuuuuuuuucuuuuuuugaaauaaaauagccugucuuucagaucucaaaggcucuuuucagagccaccaaaaaaaaaaaaaaaaaaaaaaaaaaaaaaaaaaaaaaaaaaaaaaaaaaaaaaaaaaaaaaaaagaauu

SEQ ID NO: 17083 - RNA, 1970 nt, Artificial Sequence
  mRNA product Design a-2 (hSL-A64-N5) comprising derived and/or modified sequence from LASV(Z0947-SLE-2011;Clade IV)__AIT17841__NP (opt1)
aggagaguccgcucagccagguugcagaagcggcuuagcguguguccuaaucuucucucugcguguagguaggccugugccgcaaacaagcuuaccaugagcgccuccaaggagaucaagagcuuccuguggacccagucccuccgccgggagcugagcggcuacugcuccaacaucaagcuccagguggucaaggacgcccaggcgcugcugcacgggcuggacuucagcgagguguccaacgugcagcgccucaugcggaaggagcgccgggacgacaacgaccugaagcgccugcgggaccucaaccaggccgucaacaaccugguggagcucaagagcacccagcagaaguccauccugcgcgugggcacccugaccagcgacgaccugcucauccuggccgccgaccuggagaagcucaaguccaaggucacccggaccgagcgcccccugagcgccgggguguacaugggcaaccuguccagccagcagcucgaccagcggcgcgcgcugcugaacaugaucgggauguccggcagcaaccagggcgcccggacggggcgcgacggcgugguccgggugugggacgugaagaacgccgagcuccugaacaaccaguucgggaccaugccgucccugacccucgccugccugaccaagcagggccaggucgaccugaacgacgcggugcaggcccucacggaccuggggcugaucuacaccgccaaguaccccaacaccagcgaccucgaccgccugacccagucccaccccauccugaacaugaucgacacgaagaaguccagccucaacaucuccggcuacaacuucagccugggcgccgccgugaaggcgggggccugcaugcuggacggcgggaacaugcucgagaccaucaaggucagcccccagaccauggacggcauccucaagagcauccugaaggugaagaaggcccugggcauguucaucuccgacgccccgggggagcggaaccccuacgagaacauccuguacaagaucugccugagcggcgacggguggcccuacaucgccucccgcaccagcaucacgggccgggcgugggagaacaccguggucgaccucgaguccgacgggaagccccagaaggccggcagcaacggcuccaacaagagccugcaguccgccggguucaccgccggccugaccuacagccagcucaugacgcugaaggacgccaugcugcagcuggacccgaacgcgaagaccuggauggacaucgaggggcgccccgaggaccccguggagaucgcccucuaccagcccuccagcggcugcuacauccacuucuuccgggagccgaccgaccugaagcaguucaagcaggacgccaaguacucccacgggaucgacgugaccgaccuguucgccgcccagcccggccucacgagcgcggucaucgacgcccugccccgcaacauggugaucacgugccagggcuccgacgacauccgcaagcuguucgagagccaggggcggaaggacaucaagcucaucgacaucgcccugagcaagaccgacucccgcaaguacgagaacgccgugugggaccaguacaaggaccugugccacaugcacaccggcaucgucguggagaagaagaagcgcgggggcaaggaggagaucaccccgcacugcgcgcucauggacugcaucauguucgacgccgccgucagcgggggccugaacaccuccgugcugcgggccgugcucccccgggacauggucuuccgcaccagcacgccccggguggugcugugaggacuagucccuguucccagagcccacuuuuuuuucuuuuuuugaaauaaaauagccugucuuucagaucucaaaggcucuuuucagagccaccaaaaaaaaaaaaaaaaaaaaaaaaaaaaaaaaaaaaaaaaaaaaaaaaaaaaaaaaaaaaaaaaagaauu

SEQ ID NO: 17084 - RNA, 1970 nt, Artificial Sequence
  mRNA product Design a-2 (hSL-A64-N5) comprising derived and/or modified sequence from LASV(Josiah;Clade IV)__NP_694869__NP (opt4)
aggagaguccgcucagccagguugcagaagcggcuuagcguguguccuaaucuucucucugcguguagguaggccugugccgcaaacaagcuuaccaugagcgccagcaaggagaucaagagcuuccuguggacccagagccugagaagagagcugagcggcuacugcagcaacaucaagcugcagguggugaaggacgcccaggcccugcugcacggccuggacuucagcgaggugagcaacgugcagagacugaugagaaaggagagaagagacgacaacgaccugaagagacugagagaccugaaccaggccgugaacaaccugguggagcugaagagcacccagcagaagagcauccugagagugggcacccugaccagcgacgaccugcugauccuggccgccgaccuggagaagcugaagagcaaggugaucagaaccgagagaccccugagcgccggcguguacaugggcaaccugagcagccagcagcuggaccagagaagagcccugcugaacaugaucggcaugagcggcggcaaccagggcgccagagccggcagagacggcguggugagagugugggacgugaagaacgccgagcugcugaacaaccaguucggcaccaugcccagccugacccuggccugccugaccaagcagggccagguggaccugaacgacgccgugcaggcccugaccgaccugggccugaucuacaccgccaaguaccccaacaccagcgaccuggacagacugacccagagccaccccauccugaacaugaucgacaccaagaagagcagccugaacaucagcggcuacaacuucagccugggcgccgccgugaaggccggcgccugcaugcuggacggcggcaacaugcuggagaccaucaaggugagcccccagaccauggacggcauccugaagagcauccugaaggugaagaaggcccugggcauguucaucagcgacacccccggcgagagaaaccccuacgagaacauccuguacaagaucugccugagcggcgacggcuggcccuacaucgccagcagaaccagcaucaccggcagagccugggagaacaccgugguggaccuggagagcgacggcaagccccagaaggccgacagcaacaacagcagcaagagccugcagagcgccggcuucaccgccggccugaccuacagccagcugaugacccugaaggacgccaugcugcagcuggaccccaacgccaagaccuggauggacaucgagggcagacccgaggaccccguggagaucgcccuguaccagcccagcagcggcugcuacauccacuucuucagagagcccaccgaccugaagcaguucaagcaggacgccaaguacagccacggcaucgacgugaccgaccuguucgccacccagcccggccugaccagcgccgugaucgacgcccugcccagaaacauggugaucaccugccagggcagcgacgacaucagaaagcugcuggagagccagggcagaaaggacaucaagcugaucgacaucgcccugagcaagaccgacagcagaaaguacgagaacgccgugugggaccaguacaaggaccugugccacaugcacaccggcguggugguggagaagaagaagagaggcggcaaggaggagaucaccccccacugcgcccugauggacugcaucauguucgacgccgccgugagcggcggccugaacaccagcgugcugagagccgugcugcccagagacaugguguucagaaccagcacccccagaguggugcugugaggacuagucccuguucccagagcccacuuuuuuuucuuuuuuugaaauaaaauagccugucuuucagaucucaaaggcucuuuucagagccaccaaaaaaaaaaaaaaaaaaaaaaaaaaaaaaaaaaaaaaaaaaaaaaaaaaaaaaaaaaaaaaaaagaauu

SEQ ID NO: 17085 - RNA, 1970 nt, Artificial Sequence
  mRNA product Design a-2 (hSL-A64-N5) comprising derived and/or modified sequence from LASV(LP;Clade I)__AAF86702__NP (opt4)
aggagaguccgcucagccagguugcagaagcggcuuagcguguguccuaaucuucucucugcguguagguaggccugugccgcaaacaagcuuaccaugagcaacagcaaggagaucaagagcuuccuguggacccagagccugagaagagagcugagcggcuacugcagcaacaucaagcugcagguggugaaggacgcccaggcccugcugcacggccuggacuucagcgaggugagcaacgugcagagacugaugagaaagcagaagagagacgacgccgaccugaagagacugagagaccugaaccaggccgugaacaaccugguggagcugaagagcacccagcagaagaacgugcugagagugggcacccugagcagcgacgaccugaucacccuggccgccgaccuggagaagcugaagagcaaggugaucagaaccgagagaccccugagcagcggcguguacaugggcaaccugagcagccagcagcuggaccagagaagagcccugcugagcaugaucggcaugagcggcggcccccagggcaacagaaccggcggcgacggcguggugagagugugggacgugaagaacgccgagcugcugaacaaccaguucggcaccaugcccagccugacccuggccugccugaccaagcagggccagguggaccugaacgacgccgugcaggcccugaccgaccugggccugaucuacaccgccaaguaccccaacagcagcgaccuggacaugcugacccagagccaccccauccugggcaugguggacaccaagaagagcagccugaacaucagcggcuacaacuucagccugggcgccgccgugaaggccggcgccugcaugcuggacggcggcaacaugcuggagaccaucaaggugagcccccagaccauggacggcauccugaagagcauccugaaggugaagagaagccugggcauguucaucagcgacacccccggcgagagaaaccccuacgagaacauccuguacaagaucugccugagcggcgagggcuggcccuacaucgccagcagaaccagcaucaccggcagagccugggagaacacccugguggaccuggagagcgacaacaagccccccaagcugaacagcgccggcagcaacaagagccugcaggccgccggccugaacgccggccugaccuacagccagcugaugacccugaaggacugcaugcugcagcuggaccccagcagcaagaccuggaucgacaucgagggcagacccgaggaccccguggagaucgcccuguuccagcccagcagcggcugcuacauccacuucuucagagagcccaccgaccugaagcaguucaagcaggacgccaaguacagccacggcaucgacgugaccgaccuguucagcacccagcccggccugaccagcgccgugaucgaggcccugcccagaaacauggugcugaccugccagggcagcgacgacaucaagaagcugcuggagagccagggcagaagagacaucaagcugaucgacaucagccugagcaaggccgacagcagaaaguucgagaacgccgugugggaccaguacaaggaccugugccacaugcacaccggcguggugguggagaagaagaagagaggcggcaaggaggagaucaccccccacugcgcccugcuggacugcaucauguucgacgccgccaccaccggcagccugaacaucaccacccugagagccgugcugcccagagacaugguguucagaaccagcacccccaagguggugcugugaggacuagucccuguucccagagcccacuuuuuuuucuuuuuuugaaauaaaauagccugucuuucagaucucaaaggcucuuuucagagccaccaaaaaaaaaaaaaaaaaaaaaaaaaaaaaaaaaaaaaaaaaaaaaaaaaaaaaaaaaaaaaaaaagaauu

SEQ ID NO: 17086 - RNA, 1970 nt, Artificial Sequence
  mRNA product Design a-2 (hSL-A64-N5) comprising derived and/or modified sequence from LASV(803213;Clade II)__AAF86704__NP (opt4)
aggagaguccgcucagccagguugcagaagcggcuuagcguguguccuaaucuucucucugcguguagguaggccugugccgcaaacaagcuuaccaugagcgccagcaaggaggugaagagcuuccuguggacccagagccugagaagagagcugagcggcuacugcagcaacaucaagcugcagguggugaaggacgcccaggcccugcugcacggccuggacuucagcgaggugaacaacgugcagagacugaugagaaagcagaagagagacgacggcgaccugaagagacugagagaccugaaccaggccgugaacaaccugguggagcugaagagcacccagcagaagagcauccugagagugggcacccugaccagcgacgaccugcugacccuggccgccgaccuggagaagcugaagagcaaggugaucagaaccgagagaccccugagcagcggcguguacaugggcaaccugagcacccagcagcuggagcagagaagagcccugcugaacaugaucggcauggugggcggcgcccagggcacccagcccggcagagacggcguggugagagugugggacgugaagaaccccgaccugcugaacaaccaguucggcaccaugcccagccugacccuggccugccugaccaagcagggccagguggaccugaacgacgccgugcuggcccugaccgaccugggccugaucuacaccgccaaguaccccaacagcagcgaccuggacagacugagccagagccaccccauccugaacaugguggacaccaagaagagcagccugaacaucagcggcuacaacuucagccugggcgccgccgugaaggccggcgccugcaugcuggacggcggcaacaugcuggagaccaucaaggugaccccccagaccauggacggcauccugaagagcauccugaaggugaagagaagccugggcauguucgugagcgacacccccggcgagagaaaccccuacgagaacauccuguacaagaucugccugagcggcgacggcuggcccuacaucgccagcagaaccagcaucgugggcagagccugggagaacaccaccguggaccuggagagcgacggcaagccccagaaggugggcaccgccggcagcaacaagagccugcagagcgccggcuuccccaccggccugaccuacagccagcugaugacccugaaggacagcaugaugcagcuggaccccagcgccaagaccuggaucgacaucgagggcagacccgaggaccccguggagaucgcccuguaccagcccaugagcggcugcuacauccacuucuucagagagcccaccgaccugaagcaguucaagcaggacgccaaguacagccacggcaucgacguggccgaccuguuccccgcccagcccggccugaccagcgccgugaucgaggcccugcccagaaacauggugcugaccugccagggcagcgacgacaucaagaagcugcuggacagccagggcagaagagacaucaagcugaucgacaucagccugagcaagguggacagcagaaaguucgagaacgccgugugggaccagugcaaggaccugugccacaugcacaccggcguggugguggagaagaagaagagaggcggcaaggaggagaucaccccccacugcgcccugauggacugcaucauguucgacgccgccgugagcggcggccugaacauccccgugcugagagccgugcugcccagagacaugguguucagaaccagcagccccaagguggugcugugaggacuagucccuguucccagagcccacuuuuuuuucuuuuuuugaaauaaaauagccugucuuucagaucucaaaggcucuuuucagagccaccaaaaaaaaaaaaaaaaaaaaaaaaaaaaaaaaaaaaaaaaaaaaaaaaaaaaaaaaaaaaaaaaagaauu

SEQ ID NO: 17087 - RNA, 1973 nt, Artificial Sequence
  mRNA product Design a-2 (hSL-A64-N5) comprising derived and/or modified sequence from LASV(GA391;Clade III)__CAA36646__NP (opt4)
aggagaguccgcucagccagguugcagaagcggcuuagcguguguccuaaucuucucucugcguguagguaggccugugccgcaaacaagcuuaccaugagcgccagcaaggaggugagaagcuuccuguggacccagagccugagaagagagcugagcggcuacugcagcaacaucaagcugcagguggugaaggacgcccaggcccugcugcacggccuggacuucagcgaggugagcaacgugcagagacugaugagaaagcagaagagagacgacggcgaccugaagagacugagagaccugaaccaggccgugaacaaccugguggagcugaagagcacccagcagaagagcgugcugagagugggcacccugagcagcgacgaccugcugauccuggccgccgaccuggagaagcugaagagcaaggugaccagaaccgagagaccccugagcagcggcguguacaugggcaaccugagcagccagcagcuggaccagagaagagcccugcugaacaugaucggcaugaccggcgugagcggcggcggcaagggcgccagcgacggcaucgugagagugugggacgugaagaacgccgagcugcugaacaaccaguucggcaccaugcccagccugacccuggccugccugaccaagcagggccagguggaccugaacgacgccgugcaggcccugaccgaccugggccugaucuacaccgccaaguaccccaacagcagcgaccuggacagacugagccagagccaccccauccugaacaugaucgacaccaagaagagcagccugaacaucagcggcuacaacuucagccugggcgccgccgugaaggccggcgccugcaugcuggacggcggcaacaugcuggagaccaucaaggugagcccccagaccauggacggcauccugaagagcauccugaaggugaagaagagccugggcauguucgugagcgacacccccggcgagagaaaccccuacgagaacauccuguacaagaucugccugagcggcgacggcuggcccuacaucgccagcagaaccagcaucgugggcagagccugggagaacaccgugguggaccuggagcaggacaacaagccccagaagaucggcaacggcggcagcaacaagagccugcagagcgccggcuucgccgccggccugaccuacagccagcugaugacccugaaggacuucaagugcuucaaccugauccccaacgccaagaccuggauggacaucgagggcagacccgaggaccccguggagaucgcccuguaccagcccagcagcggcugcuacgugcacuucuucagagagcccaccgaccugaagcaguucaagcaggacgccaaguacagccacggcaucgacgugaccgaccuguucgccgcccagcccggccugaccagcgccgugaucgaggcccugcccagaaacauggugaucaccugccagggcagcgaggacaucagaaagcugcuggagagccagggcagaagagacaucaagcugaucgacaucacccugagcaaggccgacagcagaaaguucgagaacgccgugugggaccaguucaaggaccugugccacaugcacaccggcguggugguggagaagaagaagagaggcggcaaggaggagaucaccccccacugcgcccugauggacugcaucauguucgacgccgccgugagcggcggccuggacgccaaggugcugagaguggugcugcccagagacaugguguucagaaccagcacccccaagguggugcugugaggacuagucccuguucccagagcccacuuuuuuuucuuuuuuugaaauaaaauagccugucuuucagaucucaaaggcucuuuucagagccaccaaaaaaaaaaaaaaaaaaaaaaaaaaaaaaaaaaaaaaaaaaaaaaaaaaaaaaaaaaaaaaaaagaauu

SEQ ID NO: 17088 - RNA, 1970 nt, Artificial Sequence
  mRNA product Design a-2 (hSL-A64-N5) comprising derived and/or modified sequence from LASV(AV;Clade V)__CCA30315__NP (opt4)
aggagaguccgcucagccagguugcagaagcggcuuagcguguguccuaaucuucucucugcguguagguaggccugugccgcaaacaagcuuaccaugagcgccagcaaggaggugaagagcuuccuguggacccagagccugagaagagagcugagcggcuacugcagcaacaucaagcugcagguggugaaggacgcccaggcccugcugcacggccuggacuucagcgaggugagcaacgugcagagacugaugagaaagcagagaagagacgacagcgaccugaagagacugagagaccugaaccaggccgugaacaaccugguggagcugaagagcacccagcagaagagcgugcugagagugggcacccugagcagcgacgaccugcugacccuggccgccgaccuggagaagcugaagagcaaggugaccagaaccgagagaccccugagcagcggcguguacaugggcaaccugagcagccagcagcuggaccagagaagagcccugcugaaccugaucggcaugaccaacggcagccagggcagccaggccggcagagacggcguggugagagugugggacgugaagaacgccgagcugcugaacaaccaguucggcaccaugcccagccugacccuggccugccugaccaagcagggccagguggaccugaacgacguggugcaggcccugaccgaccugggccugaucuacaccgccaaguaccccaacaccagcgaccuggacagacugacccagagccaccccauccugaacaugaucgacaccaagaagagcagccugaacaucagcggcuacaacuucagccugggcgccgccgugaaggccggcgccugcaugcuggacggcggcaacaugcuggagaccaucaaggugagcccccagagcauggacggcauccugaagagcauccugaaggugaagagagcccugggcauguucgugagcgacacccccggcgagagaaaccccuacgagaacauccuguacaagaucugccugagcggcgacggcuggcccuacaucgccagcagaaccagcaucgugggcagagccugggagaacaccgugguggaccuggagaccgacggcaagccccagaagaucggcagcggcaacagcaacaagagccugcagagcgccggcuucagcgccggccugaccuacagccagcugaugacccugaaggacgccaugcugcagcuggaccccaacgccaagaccuggauggacaucgagggcagacccgaggaccccguggagguggcccuguaccagcccaucagcggcugcuacauccacuucuucagagagcccaccgaccugaagcaguucaagcaggacgccaaguacagccacggcaucgacaucgccgaccuguucgccgcccagcccggccugaccagcgccgugaucgaggcccugcccagaaacauggugaucaccugccagggcagcgaggacaucaagaagcugcuggagagccagggcagaaaggacaucaagcugaucgacaucgcccugagcaagaucgacagcagaaaguucgagaacgccgugugggaccaguacaaggaccugugccacaugcacaccggcguggugguggagaagaagaagagaggcggcaaggaggagaucaccccccacugcgcccugauggacugcaucauguucgacgccgccgugagcggcggccugaacacccuggugcugagagccgugcugcccagagacaugguguucagaaccagcacccccagaguggugcugugaggacuagucccuguucccagagcccacuuuuuuuucuuuuuuugaaauaaaauagccugucuuucagaucucaaaggcucuuuucagagccaccaaaaaaaaaaaaaaaaaaaaaaaaaaaaaaaaaaaaaaaaaaaaaaaaaaaaaaaaaaaaaaaaagaauu

SEQ ID NO: 17089 - RNA, 1970 nt, Artificial Sequence
  mRNA product Design a-2 (hSL-A64-N5) comprising derived and/or modified sequence from LASV(Togo/2016/7082;Clade VI)__AMR44578__NP (opt4)
aggagaguccgcucagccagguugcagaagcggcuuagcguguguccuaaucuucucucugcguguagguaggccugugccgcaaacaagcuuaccaugagcaacagcaaggaggugaagagcuuccuguggacccagagccugagaagagagcugagcggcuacugcagcaacaucaagcugcagguggugaaggacgcccaggcccugcugcacggccuggacuucagcgaggugagcaacgugcagagacugaugagaaagcagaagagagacgacggcgaccugaagagacugagagaccugaaccaggccgugaacaaccugguggagcugaagagcgugcagcagaagagcauccugagagugggcacccugaccagcgacgaccugcugacccuggccgccgaccuggagaagcugaagagcaaggugaccagaaccgagagaccccugagcagcggcguguacaugggcaaccugagcagccagcagcuggaccagagaagagcccugcugagcaugaucggcaugagcggcggcaaccagaacagccagcccaagggcgacggcguggugagagugugggacgugaagaacgccgaccugcugaacaaccaguucggcaccaugcccagccugacccuggccugccugaccaagcagggccagguggaccugaacgacgccgugcaggcccugaccgaccugggccugaucuacaccgccaaguaccccaacagcagcgaccuggacagacugagccagagccaccccauccugaacaugaucgacaccaagaagagcagccugaacaucagcggcuacaacuucagccugggcgccgccaucaagaccggcgccugcaugcuggacggcggcaacaugcuggagaccaucaaggugaccccccagaccauggacggcauccugaagagcauccugaaggugaagagaagccugggcauguucaucagcgacacccccggcgagagaaaccccuacgagaacauccuguacaagaucugccugagcggcgacggcuggcccuacaucgccagcagaaccgccaucaucggcagagccugggagaacaccgugguggaccuggagagcgacagcaagccccagaagaucggcagcaacggcagcaacaagagccugcagagcgccggcuucgcccccggccugaccuacagccagcugaugacccugaaggacagcaugcugcagcuggaccccaacgccaagaccuggaucgacaucgagggcagacccgaggaccccguggagguggcccuguuccagcccaucagcggcugcuacauccacuucuucagagagcccaccgaccugaagcaguucaagcaggacgccaaguacagccacggcaucgacgugaccgaccuguucgccgcccagcccggccugaccagcgccgugaucgaggcccugcccagaaacauggugcugaccugccagggcagcgacgacaucaagaagcugcuggacagccagggcagaagagacaucaagcugaucgacgugagccugaacaagaucgacagcagaaaguucgagaacgccgugugggaccaguacaaggaccugugccacaugcacaccggcguggugguggagaagaagaagaagggcggcaaggaggagaucaccccccacugcgcccugcuggacugcaucauguucgacgccgccgugagcggcggccugaacgccaccgugcugagagccgugcugcccagagacaugguguucagaaccagcagccccaagguggugcugugaggacuagucccuguucccagagcccacuuuuuuuucuuuuuuugaaauaaaauagccugucuuucagaucucaaaggcucuuuucagagccaccaaaaaaaaaaaaaaaaaaaaaaaaaaaaaaaaaaaaaaaaaaaaaaaaaaaaaaaaaaaaaaaaagaauu

SEQ ID NO: 17090 - RNA, 1970 nt, Artificial Sequence
  mRNA product Design a-2 (hSL-A64-N5) comprising derived and/or modified sequence from LASV(KAK-428;Clade n.d. (VII))__ANH09741__NP (opt4)
aggagaguccgcucagccagguugcagaagcggcuuagcguguguccuaaucuucucucugcguguagguaggccugugccgcaaacaagcuuaccaugagcaacagcaaggaggugaagagcuuccuguggacccagagccugagaagagagcugagcggcuacugcaccaacaucaagcugcagguggugaaggacgcccaggcccugcugcacggccuggacuucagcgaggugagcaacgugcagagacugaugagaaagcagaagagagacgacaacgaccugaagagacugagagaccugaaccaggccgugaacaaccugguggagcugaagagcgugcagcagaagagcgugcugaaggugggcacccugaacagcgacgaccugcugacccuggccgccgaccuggagaagcugaagagcaagguggugagaaccgagagaccccugagcagcggcguguacaugggcaaccugagcagccagcagcuggaccagagaagagcccugcugaacaugaucggcauggccggcggcagccagggcaaccagcccagcagagacggcguggugagagugugggacgugaagaacgccgaccugcugaacaaccaguucggcaccaugcccagccugacccuggccugccugaccaagcagggccagguggaccugaacgacguggugcuggcccugaccgaccugggccugaucuacaccgccaaguaccccaacagcagcgaccuggacagacugagccagaaccaccccgugcugaacaugaucgacgugaacaagagcagccugaacaucagcggcuacaacuucagccugggcgccgccgugaaggccggcgccugcaugcuggacggcggcaacaugcuggagaccaucaagaucagcccccagaccguggacggcauccugaagagcauccugaaggugaagagagcccugggcauguucgugagcgacacccccggcgagagaaaccccuacgagaacauccuguacaaggugugccugagcggcaacggcuggcccuacaucgccagcagaaccagcaucgugggcagagccugggagaacaccgugguggaccuggagagcaacaagaaccagcccaaggugggcaacaacggcagcaacaagaugcugcagagcagcggcuucgccaccggccugaccuacagccagcugaugacccugagagacagcaugcugcagcuggaccccaccgccaagaccuggaucgacaucgagggcagacccgaggaccccguggagcuggcccuguuccagcccagcagcggcugcuacauccacuucuucagagagcccaccgaccugaagcaguucaagcaggacgccaaguacagccacggcaucgacgugaacgaccuguucagcgcccagcccggccugaccagcgccgugcuggaggcccugcccagaaacauggugcugaccugccagggcagcgacgacaucagaaagcugcuggacagccaggacagaaaggacaucaagcugaucgacaucagccugagcaaggccgacgccagaaaguucgagaacgacgugugggaccaguucaaggaccugugccacaugcacaccggcaucgugguggagaagaagaagaagggcggcaagcaggagaugaccccccacugcgcccugcuggacugcaucauguucgacgccgccgugagcggcggccugaacgugcccacccugagagccgugcugcccaccgacaugguguucagaaccaucaccaccaagguggugcugugaggacuagucccuguucccagagcccacuuuuuuuucuuuuuuugaaauaaaauagccugucuuucagaucucaaaggcucuuuucagagccaccaaaaaaaaaaaaaaaaaaaaaaaaaaaaaaaaaaaaaaaaaaaaaaaaaaaaaaaaaaaaaaaaagaauu

SEQ ID NO: 17091 - RNA, 1970 nt, Artificial Sequence; identical to SEQ ID NO: 17085
  mRNA product Design a-2 (hSL-A64-N5) comprising derived and/or modified sequence from LASV(Pinneo-NIG-1969;Clade I)__AIT17837__NP (opt4)

SEQ ID NO: 17092 - RNA, 1970 nt, Artificial Sequence
  mRNA product Design a-2 (hSL-A64-N5) comprising derived and/or modified sequence from LASV(ISTH0009-NIG-2011;Clade II)__AIT17405__NP (opt4)
aggagaguccgcucagccagguugcagaagcggcuuagcguguguccuaaucuucucucugcguguagguaggccugugccgcaaacaagcuuaccaugagcgugagcaaggaggugaagagcuuccuguggacccagagccugagaagagagcugagcggcuacugcagcaacaucaagcugcagguggugaaggacgcccaggcccugcugcacggccuggacuucagcgaggugagcaacgugcagagacugaugagaaagcagaagagagacgacagcgaccugaagagacugagagaccugaaccaggccgugaacaaccugguggagcugaagagcacccagcagaagagcauccugagagugggcacccugaccagcgacgaccugcugacccuggccgccgaccuggagaagcugaagagcaaggugaucagaaccgagagaccccugagcagcggcguguacaugggcaaccugagcacccagcagcuggagcagagaagagcccugcugaacaugaucggcauggugggcggcgcccagggcacccagcccggcagagacggcguggugagagugugggacgugaagaaccccgaccugcugaacaaccaguucggcaccaugcccagccugacccuggccugccugaccaagcagggccagguggaccugaacgacgccgugcuggcccugaccgaccugggccugaucuacaccgccaaguaccccaacagcagcgaccuggacagacugagccagagccaccccauccugaacaugguggacaucaagaagagcagccugaacaucagcggcuacaacuucagccugggcgccgccgugaaggccggcgccugcaugcuggacggcggcaacaugcuggagaccaucaaggugaccccccagaccauggacggcauccugaagagcauccugaaggugaagagaagccugggcauguucgugagcgacacccccggcgagagaaaccccuacgagaacauccuguacaagaucugccugagcggcgacggcuggcccuacaucgccagcagaaccagcaucgugggcagagccugggagaacaccaccguggaccuggagagcgacggcaagccccagaaggugggcagcgccggcagcaacaagagccugcagagcgccggcuuccccaccggccugaccuacagccagcugaugacccugaaggacagcaugaugcagcuggaccccagcgccaagaccuggaucgacaucgagggcagacccgaggaccccguggagaucgcccuguaccagcccaugagcggcugcuacauccacuucuucagagagcccaccgaccugaagcaguucaagcaggacgccaaguacagccacggcaucgacguggccgaccuguuccccgcccagcccggccugaccagcgccgugaucgaggcccugcccagaaacauggugcugaccugccagggcagcgacgacaucaagagacugcuggacagccagggcagaagagacaucaagcugaucgacaucgcccugagcaaggccgacagcagaagauucgagaacgccgugugggaccagugcaaggaccugugccacaugcacaccggcguggugguggagaagaagaagagaggcggcaaggaggagaucaccccccacugcgcccugauggacugcaucauguacgacgccgccgugagcggcggccugaacauccccgugcugagagccgugcugcccagagacaugguguucagaaccagcagccccaagguggugcugugaggacuagucccuguucccagagcccacuuuuuuuucuuuuuuugaaauaaaauagccugucuuucagaucucaaaggcucuuuucagagccaccaaaaaaaaaaaaaaaaaaaaaaaaaaaaaaaaaaaaaaaaaaaaaaaaaaaaaaaaaaaaaaaaagaauu

SEQ ID NO: 17093 - RNA, 1970 nt, Artificial Sequence
  mRNA product Design a-2 (hSL-A64-N5) comprising derived and/or modified sequence from LASV(ISTH2010-NIG-2012;Clade II)__AIT17483__NP (opt4)
aggagaguccgcucagccagguugcagaagcggcuuagcguguguccuaaucuucucucugcguguagguaggccugugccgcaaacaagcuuaccaugagcgccagcaaggaggugaagagcuuccuguggacccagagccugagaagagagcugagcggcuacugcagcaacaucaagcugcagguggugaaggacgcccaggcccugcugcacggccuggacuucagcgaggugagcaacgugcagagacugaugagaaagcagaagagagacgacagcgaccugaagagacugagagaccugaaccaggccgugaacaaccugguggagcugaagagcacccagcagaagagcauccugagagugggcacccugaccagcgacgaccugcugacccuggccgccgaccuggagaagcugaagagcaaggugaucagaaccgagagaccccugagcagcggcguguacaugggcaaccugagcacccagcagcuggagcagagaagagcccugcugaaccugaucggcauggugggcggcgcccagggcacccagcccggcagagacggcguggugagagugugggacgugaagaaccccgaccugcugaacaaccaguucggcaccaugcccagccugacccuggccugccugaccaagcagggccagguggaccugaacgacgccgugcuggcccugaccgaccugggccugaucuacaccgccaaguaccccaacagcagcgaccuggacagacugagccagagccaccccauccugaacaugguggacaccaagaagagcagccugaacaucagcggcuucaacuucagccugggcgccgccgugaaggccggcgccugcaugcuggacggcggcaacaugcuggagaccaucaaggugaccccccagaccauggacggcauccugaagagcauccugaaggugaagaagagccugggcauguucgugagcgacacccccggcgagagaaaccccuacgagaacauccuguacaagaucugccugagcggcgacggcuggcccuacaucgccagcagaaccagcaucgugggcagagccugggagaacaccaccguggaccuggagagcgacggcaagccccacaaggugggcaccgccggcagcaacaagagccugcagagcgccggcuuccccaccggccugaccuacagccagcugaugacccugaaggacagcaugaugcagcuggaccccagcgccaagaccuggaucgacaucgagggcagacccgaggaccccguggagaucgcccuguaccagcccaugagcggcugcuacauccacuucuucagagagcccaccgaccugaagcaguucaagcaggacgccaaguacagccacggcaucgacguggccgaccuguuccccgcccagcccggccugaccagcgccgugaucgaggcccugcccagaaacauggugcugaccugccagggcagcgacgacaucaagagacugcuggacagccagggcagaagagacaucaagcugaucgacaucgcccugagcaaggccgacagcagaagauucgagaacgccgugugggaccagugcaaggaccugugccacaugcacaccggcguggugguggagaagaagaagagaggcggcaaggaggagaucaccccccacugcgcccugauggacugcaucauguacgacgccgccgugagcggcggccugaacauccccgugcugagagccgugcugcccagagacaugguguucagaaccagcagccccaagguggugcugugaggacuagucccuguucccagagcccacuuuuuuuucuuuuuuugaaauaaaauagccugucuuucagaucucaaaggcucuuuucagagccaccaaaaaaaaaaaaaaaaaaaaaaaaaaaaaaaaaaaaaaaaaaaaaaaaaaaaaaaaaaaaaaaaagaauu

SEQ ID NO: 17094 - RNA, 1970 nt, Artificial Sequence
  mRNA product Design a-2 (hSL-A64-N5) comprising derived and/or modified sequence from LASV(Lassa virus/H.sapiens-wt/NGA/2015/ISTH_0543;Clade II)__AVO03640__NP (opt4)
aggagaguccgcucagccagguugcagaagcggcuuagcguguguccuaaucuucucucugcguguagguaggccugugccgcaaacaagcuuaccaugagcgccagcaaggaggugaagagcuuccuguggacccagagccugagaagagagcugagcggcuacugcagcaacaucaagcugcagguggugaaggacgcccaggcccugcugcacggccuggacuucagcgaggugagcaacgugcagagacugaugagaaagcagaagagagacgacagcgaccugaagagacugagagaccugaaccaggccgugaacaaccugguggagcugaagagcacccagcagaagagcauccugagagugggcacccugaccagcgacgaccugcugacccuggccgccgaccuggagaagcugaagagcaaggugaucagaaccgagagaccccugagcagcggcguguacaugggcaaccugagcacccagcagcuggagcagagaagagcccugcugaacaugaucggcauggugggcggcgcccagggcacccagcccggcagagacggcguggugagagugugggacgugaagaaccccgaccugcugaacaaccaguucggcaccaugcccagccugacccuggccugccugaccaagcagggccagguggaccugaacgacgccgugcuggcccugaccgaccugggccugaucuacaccgccaaguaccccaacagcagcgaccuggacagacugagccagagccaccccauccugaacaugguggacaccaagaagagcagccugaacaucagcggcuacaacuucagccugggcgccgccgugaaggccggcgccugcaugcuggacggcggcaacaugcuggagaccaucaaggugaccccccagaccauggacggcauccugaagagcauccugaaggugaagaagagccugggcauguucgugagcgacacccccggcgagagaaaccccuacgagaacauccuguacaagaucugccugagcggcgacggcuggcccuacaucgccagcagaaccagcaucgugggcagagccugggagaacaccaccguggaccuggagagcgacggcaagccccagaaggugggcagcgccggcagcaacaagagccugcagagcgccggcuuccccaccggccugaccuacagccagcugaugacccugaaggacagcaugaugcagcuggaccccagcgccaagaccuggaucgacaucgagggcagacccgaggaccccguggagaucgcccuguaccagcccaugagcggcugcuacauccacuucuucagagagcccaccgaccugaagcaguucaagcaggacgccaaguacagccacggcaucgacguggccgaccuguuccccgcccagcccggccugaccagcgccgugaucgaggcccugcccagaaacauggugcugaccugccagggcagcgacgacaucaagagacugcuggacagccagggcagaaaggacaucaagcugaucgacaucgcccugagcaaggccgacagcagaagauucgagaacgccgugugggaccagugcaaggaccugugccacaugcacaccggcguggugguggagaagaagaagagaggcggcaaggaggagaucaccccccacugcgcccugauggacugcaucauguacgacgccgccgugagcggcggccugaacauccccgugcugagagccgugcugcccagagacaugguguucagaaccagcagccccaagguggugcugugaggacuagucccuguucccagagcccacuuuuuuuucuuuuuuugaaauaaaauagccugucuuucagaucucaaaggcucuuuucagagccaccaaaaaaaaaaaaaaaaaaaaaaaaaaaaaaaaaaaaaaaaaaaaaaaaaaaaaaaaaaaaaaaaagaauu

SEQ ID NO: 17095 - RNA, 1970 nt, Artificial Sequence
  mRNA product Design a-2 (hSL-A64-N5) comprising derived and/or modified sequence from LASV(Lassa virus/H.sapiens-wt/NGA/2016/ISTH_0009;Clade II)__AVO03572__NP (opt4)
aggagaguccgcucagccagguugcagaagcggcuuagcguguguccuaaucuucucucugcguguagguaggccugugccgcaaacaagcuuaccaugagcgccagcaaggaggugaagagcuuccuguggacccagagccugagaagagagcugagcggcuacugcagcaacaucaagcugcagguggugaaggacgcccaggcccugcugcacggccuggacuucagcgaggugagcaacgugcagagacugaugagaaagcagaagagagacgacagcgaccugaagagacugagagaccugaaccaggccgugaacaaccugguggagcugaagagcacccagcagaagagcauccugagagugggcacccugaccagcgacgaccugcugacccuggccgccgaccuggagaagcugaagagcaaggugaucagaaccgagagaccccugagcagcggcguguacaugggcaaccugagcacccagcagcuggagcagagaagagcccugcugaacaugaucggcauggugggcggcgcccagggcacccagcccggcagagacggcguggugagagugugggacgugaagaaccccgaccugcugaacaaccaguucggcaccaugcccagccugacccuggccugccugaccaagcagggccagguggaccugaacgacgccgugcuggcccugaccgaccugggccugaucuacaccgccaaguaccccaacagcagcgaccuggacagacugagccagagccaccccauccugaacaugguggacaccaagaagagcagccugaacaucagcggcuacaacuucagccugggcgccgccgugaaggccggcgccugcaugcuggacggcggcaacaugcuggagaccaucaaggugaccccccagaccauggacggcauccugaagagcauccugaaggugaagaagagccugggcauguucgugagcgacacccccggcgagagaaaccccuacgagaacauccuguacaagaucugccugagcggcgacggcuggcccuacaucgccagcagaaccagcaucgugggcagagccugggagaacaccaccguggaccuggagagcgacggcaagccccagaaggugggcagcgccggcagcaacaagagccugcagagcgccggcuuccccaccggccugaccuacagccagcugaugacccugaaggacagcaugaugcagcuggaccccagcgccaagaccuggaucgacaucgagggcagacccgaggaccccguggagaucgcccuguaccagcccaugagcggcugcuacauccacuucuucagagagcccaccgaccugaagcaguucaagcaggacgccaaguacagccacggcaucgacguggccgaccuguuccccgcccagcccggccugaccagcgccgugaucgaggcccugcccagaaacauggugcugaccugccagggcagcgacgacaucaagagacugcuggacagccagggcagaagagacaucaagcugaucgacaucgcccugagcaaggccgacagcagaagauucgagaacgccgugugggaccagugcaaggaccugugccacaugcacaccggcguggugguggagaagaagaagagaggcggcaaggaggagaucaccccccacugcgcccugauggacugcaucauguacgacgccgccgugagcggcggccugaacauccccgugcugagagccgugcugcccagagacaugguguucagaaccagcagccccaagguggugcugugaggacuagucccuguucccagagcccacuuuuuuuucuuuuuuugaaauaaaauagccugucuuucagaucucaaaggcucuuuucagagccaccaaaaaaaaaaaaaaaaaaaaaaaaaaaaaaaaaaaaaaaaaaaaaaaaaaaaaaaaaaaaaaaaagaauu

SEQ ID NO: 17096 - RNA, 1970 nt, Artificial Sequence
  mRNA product Design a-2 (hSL-A64-N5) comprising derived and/or modified sequence from LASV(Lassa virus/H.sapiens-wt/NGA/2016/ISTH_0017;Clade II)__AVO03568__NP (opt4)
aggagaguccgcucagccagguugcagaagcggcuuagcguguguccuaaucuucucucugcguguagguaggccugugccgcaaacaagcuuaccaugagcgccagcaaggaggugaagagcuuccuguggacccagagccugagaagagagcugagcggcuacugcagcagcaucaagcugcagguggugaaggacgcccaggcccugcugcacggccuggacuucagcgaggugagcaacgugcagagacugaugagaaagcagaagagagacgacagcgaccugaagagacugagagaccugaaccaggccgugaacaaccugguggagcugaagagcacccagcagaagagcauccugagagugggcacccugaccagcgacgaccugcugacccuggccgccgaccuggagaagcugaagagcaaggugaucagaaccgagagaccccugagcagcggcguguacaugggcaaccugagcacccagcagcuggagcagagaagagcccugcugaacaugaucggcauggccggcggcgcccagggcacccagcccggcagagacggcguggugagagugugggacgugaagaaccccgaccugcugaacaaccaguucggcaccaugcccagccugacccuggccugccugaccaagcagggccagguggaccugaacgacgccgugcuggcccugaccgaccugggccugaucuacaccgccaaguaccccaacagcagcgaccuggacagacugagccagagccaccccauccugaacaugguggacaccaagaagagcagccugaacaucagcggcuacaacuucagccugggcgccgccgugaaggccggcgccugcaugcuggacggcggcaacaugcuggagaccaucaaggugaccccccagaccauggacggcauccugaagagcauccugaaggugaagagaagccugggcauguucgugagcgacgcccccggcgagagaaaccccuacgagaacauccuguacaagaucugccugagcggcgacggcuggcccuacaucgccagcagaaccagcaucgugggcagagccugggagaacaccaccguggaccuggagagcgacggcaagccccagaaggugggcgccaccggcagcaacaagagccugcagagcgccggcuuccccaccggccugaccuacagccagcugaugacccugaaggacagcaugaugcagcuggaccccagcgccaagaccuggaucgacaucgagggcagacccgaggaccccguggagguggcccuguaccagcccgugagcggcugcuacauccacuucuucagagagcccaccgaccugaagcaguucaagcaggacgccaaguacagccacggcaucgacguggccgaccuguuccccgcccagcccggccugaccagcgccgugaucgaggcccugcccagaaacauggugcugaccugccagggcagcgacgacaucaagaagcugcuggacagccagggcagaaaggacaucaagcugaucgacaucgcccugagcaaggccgacagcagaagauucgagaacgccgugugggaccagugcaaggaccugugccacaugcacaccggcguggugguggagaagaagaagagaggcggcaaggaggagaucaccccccacugcgcccugauggacugcaucauguacgacgccgccgugagcggcggccugaacauccccgugcugagagccgugcugcccagagacaugguguucagaaccagcagccccaagguggugcugugaggacuagucccuguucccagagcccacuuuuuuuucuuuuuuugaaauaaaauagccugucuuucagaucucaaaggcucuuuucagagccaccaaaaaaaaaaaaaaaaaaaaaaaaaaaaaaaaaaaaaaaaaaaaaaaaaaaaaaaaaaaaaaaaagaauu

SEQ ID NO: 17097 - RNA, 1970 nt, Artificial Sequence
  mRNA product Design a-2 (hSL-A64-N5) comprising derived and/or modified sequence from LASV(Lassa virus/H.sapiens-wt/NGA/2018/ISTH_0959;Clade II)__AVV65100__NP (opt4)
aggagaguccgcucagccagguugcagaagcggcuuagcguguguccuaaucuucucucugcguguagguaggccugugccgcaaacaagcuuaccaugagcgccagcaaggaggugaagagcuuccuguggacccagagccugagaagagagcugagcggcuacugcagcaacaucaagcugcagguggugaaggacgcccaggcccugcugcacggccuggacuucagcgaggugagcaacgugcagagacugaugagaaagcagaagagagacgacagcgaccugaagagacugagagaccugaaccaggccgugaacaaccugguggagcugaagagcacccagcagaagagcauccugagagugggcacccugaccagcgacgaccugcugacccuggccgccgaccuggagaagcugaagagcaaggugaucagaaccgagagaccccugagcagcggcguguacaugggcaaccugagcacccagcagcuggagcagagaagagcccugcugaaccugaucggcauggugggcggcgcccagggcacccagcccggcagagacggcguggugagagugugggacgugaagaaccccgaccugcugaacaaccaguucggcaccaugcccagccugacccuggccugccugaccaagcagggccagguggaccugaacgacguggugcuggcccugaccgaccugggccugaucuacaccgccaaguaccccaacagcagcgaccuggacagacugagccagagccaccccauccugaacaugguggacaccaagaagagcagccugaacaucagcggcuucaacuucagccugggcgccgccgugaaggccggcgccugcaugcuggacggcggcaacaugcuggagaccaucaaggugaccccccagaccauggacggcauccugaagagcauccugaaggugaagaagagccugggcauguucgugagcgacacccccggcgagagaaaccccuacgagaacauccuguacaagaucugccugagcggcgacggcuggcccuacaucgccagcagaaccagcaucgugggcagagccugggagaacaccaccguggaccuggagagcgacggcaagccccacaaggugggcaccgccggcagcaacaagagccugcagagcgccggcuuccccaccggccugaccuacagccagcugaugacccugaaggacagcaugaugcagcuggaccccagcgccaagaccuggaucgacaucgagggcagacccgaggaccccguggagaucgcccuguaccagcccaugagcggcugcuacauccacuucuucagagagcccaccgaccugaagcaguucaagcaggacgccaaguacagccacggcaucgacguggccgaccuguuccccgcccagcccggccugaccagcgccgugaucgaggcccugcccagaaacauggugcugaccugccagggcagcgacgacaucaagagacugcuggacagccagggcagaaaggacaucaagcugaucgacaucgcccugagcaagaccgacagcagaagauucgagaacgccgugugggaccagugcaaggaccugugccacaugcacaccggcguggugguggagaagaagaagagaggcggcaaggaggagaucaccccccacugcgcccugauggacugcaucauguacgacgccgccgugagcggcggccugaacauccccgugcugagagccgugcugcccagagacaugguguucagaaccagcagccccaagguggugcugugaggacuagucccuguucccagagcccacuuuuuuuucuuuuuuugaaauaaaauagccugucuuucagaucucaaaggcucuuuucagagccaccaaaaaaaaaaaaaaaaaaaaaaaaaaaaaaaaaaaaaaaaaaaaaaaaaaaaaaaaaaaaaaaaagaauu

SEQ ID NO: 17098 - RNA, 1970 nt, Artificial Sequence
  mRNA product Design a-2 (hSL-A64-N5) comprising derived and/or modified sequence from LASV(LASV003-NIG-2008;Clade II)__AIT17581__NP (opt4)
aggagaguccgcucagccagguugcagaagcggcuuagcguguguccuaaucuucucucugcguguagguaggccugugccgcaaacaagcuuaccaugagcgccagcaaggaggugaagagcuuccuguggacccagagccugagaagagagcugagcggcuacugcagcagcaucaagcugcagguggugaaggacgcccaggcccugcugcacggccuggacuucagcgaggugagcaacgugcagagacugaugagaaagcagaagagagacgacagcgaccugaagagacugagagaccugaaccaggccgugaacaaccugguggagcugaagagcacccagcagaagagcgugcugagagugggcacccugaccagcgacgaccugcugacccuggccgccgaccuggagaagcugaagagcaaggugaucagaaccgagagaccccugagcagcggcguguacaugggcaaccugagcgcccagcagcuggagcagagaagaacccugcugaacaugaucggcauggugggcggcgcccagggcacccagcccggcagagacggcguggugagagugugggacgugaagaaccccgaccugcugaacaaccaguucggcaccaugcccagccugacccuggccugccugaccaagcagggccagguggaccugaacgacguggugcuggcccugaccgaccugggccugaucuacaccgccaaguaccccaacagcagcgaccuggacagacugagccagagccaccccauccugagcaugguggacaccaagaagagcagccugaacaucagcggcuacaacuucagccugggcgccgccgugaaggccggcgccugcaugcuggacggcggcaacaugcuggagaccaucaaggugaccccccagaccauggacggcauccugaagagcauccugaaggugaagaagagccugggcauguucgugagcgacacccccggcgagagaaaccccuacgagaacauccuguacaagaucugccugagcggcgacggcuggcccuacaucgccagcagaaccagcaucgugggcagagccugggagaacaccaccguggaccuggagagcgacggcaagccccagaaggugggcaccgccggcagcaacaagagccugcagagcgccggcuuccccaccggccugaccuacagccagcugaugacccugaaggacagcaugaugcagcuggaccccagcgccaagaccuggaucgacaucgagggcagacccgaggaccccguggagaucgcccuguaccagcccaugagcggcugcuacauccacuucuucagagagcccaccgaccugaagcaguucaagcaggacgccaaguacagccacggcaucgacgugaccgaccuguuccccgcccagcccggccugaccagcgccgugaucgaggcccugcccagaaacauggugcugaccugccagggcagcgacgacaucaagagacugcuggacagccagggcagaagagacaucaagcugaucgacaucgcccugagcaaggccgacagcagaagauucgagaacgccgugugggaccagugcaaggaccugugccacaugcacaccggcguggugguggagaagaagaagagaggcggcaaggaggagaucaccccccacugcgcccugauggacugcaucauguacgacgccgccgugagcggcggccugaacauccccgugcugagagccgugcugcccagagacaugguguucagaaccagcagccccaagguggugcugugaggacuagucccuguucccagagcccacuuuuuuuucuuuuuuugaaauaaaauagccugucuuucagaucucaaaggcucuuuucagagccaccaaaaaaaaaaaaaaaaaaaaaaaaaaaaaaaaaaaaaaaaaaaaaaaaaaaaaaaaaaaaaaaaagaauu

SEQ ID NO: 17099 - RNA, 1970 nt, Artificial Sequence
  mRNA product Design a-2 (hSL-A64-N5) comprising derived and/or modified sequence from LASV(LASV035-NIG-2009;Clade II)__AIT17589__NP (opt4)
aggagaguccgcucagccagguugcagaagcggcuuagcguguguccuaaucuucucucugcguguagguaggccugugccgcaaacaagcuuaccaugagcgccagcaaggaggugaagagcuuccuguggacccagagccugagaagagagcugagcggcuacugcagcagcaucaagcugcagguggugaaggacgcccaggcccugcugcacggccuggacuucagcgaggugagcaacgugcagagacugaugagaaagcagaagagagacgacagcgaccugaagagacugagagaccugaaccaggccgugaacaaccugguggagcugaagagcacccagcagaagagcauccugagagugggcacccugaccagcgacgaccugcugacccuggccgccgaccuggagaagcugaagagcaaggugaucagaaccgagagaccccugagcagcggcguguacaugggcaaccugagcgcccagcagcuggagcagagaagagcccugcugaacaugaucggcauggugggcggcgcccagggcacccagcccggcagagacggcguggugagagugugggacgugaagaaccccgaccugcugaacaaccaguucggcaccaugcccagccugacccuggccugccugaccaagcagggccagguggaccugaacgacgccgugcuggcccugaccgaccugggccugaucuacaccgccaaguaccccaacagcagcgaccuggacagacugagccagagccaccccauccugaacaugguggacaccaagaagagcagccugaacaucagcggcuacaacuucagccugggcgccgccgugaaggccggcgccugcaugcuggacggcggcaacaugcuggagaccaucaaggugaccccccagaccauggacggcauccugaagagcauccugaaggugaagagaagccugggcauguucgugagcgacacccccggcgagagaaaccccuacgagaacauccuguacaagaucugccugagcggcgacggcuggcccuacaucgccagcagaaccagcaucgugggcagagccugggagaacaccaccguggaccuggagagcgacggcaagccccagaaggugggcaccaccggcagcaacaagagccugcagagcgccggcuuccccaccggccugaccuacagccagcugaugacccugaaggacagcaugaugcagcuggaccccagcgccaagaccuggaucgacaucgagggcagacccgaggaccccguggagaucgcccuguaccagcccaugagcggcugcuacauccacuucuucagagagcccaccgaccugaagcaguucaagcaggacgccaaguacagccacggcaucgacguggccgaccuguuccccgcccagcccggccugaccagcgccgugaucgaggcccugcccagaaacauggugcugaccugccagggcagcgacgacaucaagaagcugcuggacagccagggcagaagagacaucaagcugaucgacaucgcccugagcaaggccgacagcagaaaguucgagaacgccgugugggaccagugcaaggaccugugccacaugcacaccggcguggugguggagaagaagaagagaggcggcaaggaggagaucaccccccacugcgcccugauggacugcaucauguacgacgccgccgugagcggcggccugaacauccccgugcugagagccgugcugcccagagacaugguguucagaaccagcagccccaagguggugcugugaggacuagucccuguucccagagcccacuuuuuuuucuuuuuuugaaauaaaauagccugucuuucagaucucaaaggcucuuuucagagccaccaaaaaaaaaaaaaaaaaaaaaaaaaaaaaaaaaaaaaaaaaaaaaaaaaaaaaaaaaaaaaaaaagaauu

SEQ ID NO: 17100 - RNA, 1970 nt, Artificial Sequence
  mRNA product Design a-2 (hSL-A64-N5) comprising derived and/or modified sequence from LASV(LASV1000-NIG-2009;Clade II)__AIT17783__NP (opt4)
aggagaguccgcucagccagguugcagaagcggcuuagcguguguccuaaucuucucucugcguguagguaggccugugccgcaaacaagcuuaccaugagcgccagcaaggaggugaagagcuuccuguggacccagagccugagaagagagcugagcggcuacugcagcaacaucaagcugcagguggugaaggacgcccaggcccugcugcacggccuggacuucagcgaggugagcaacgugcagagacugaugagaaagcagaagagagacgacagcgaccugaagagacugagagaccugaaccaggccgugaacaaccugguggagcugaagagcacccagcagaagagcauccugagagugggcacccugaccagcgacgaccugcugacccuggccgccgaccuggagaagcugaagagcaaggugaucagaaccgagagaccccugagcagcggcguguacaugggcaaccugagcacccagcagcuggagcagagaagagcccugcugaacaugaucggcauggugggcggcgcccagggcacccagcccggcagagacggcguggugagagugugggacgugaagaaccccgaccugcugaacaaccaguucggcaccaugcccagccugacccuggccugccugaccaagcagggccagguggaccugaacgacguggugcuggcccugaccgaccugggccugaucuacaccgccaaguaccccaacagcagcgaccuggacagacugagccagagccaccccauccugaacaugguggacaccaagaagagcagccugaacaucagcggcuacaacuucagccugggcgccgccgugaaggccggcgccugcaugcuggacggcggcaacaugcuggagaccaucaaggugaccccccagaccauggacggcauccugaagagcauccugaaggugaagaagagccugggcauguucgugagcgacacccccggcgagagaaaccccuacgagaacauccuguacaagaucugccugagcggcgacggcuggcccuacaucgccagcagaaccagcaucgugggcagagccugggagaacaccaccguggaccuggagagcgacggcaagccccagaaggugggcaccgccggcagcaacaagagccugcagagcgccggcuuccccaccggccugaccuacagccagcugaugacccugaaggacagcaugaugcagcuggaccccagcgccaagaccuggaucgacaucgagggcagacccgaggaccccguggagaucgcccuguaccagcccgugagcggcugcuacauccacuucuucagagagcccaccgaccugaagcaguucaagcaggacgccaaguacagccacggcaucgacguggccgaccuguuccccgcccagcccggccugaccagcgccgugaucgaggcccugcccagaaacauggugcugaccugccagggcagcgacgacaucaagagacugcuggacagccagggcagaagagacaucaagcugaucgacaucgcccugagcaaggccgacagcagaagauucgagaacgccgugugggaccagugcaaggaccugugccacaugcacaccggcguggugguggagaagaagaagagaggcggcaaggaggagaucaccccccacugcgcccugauggacugcaucauguacgacgccgccgugagcggcggccugaacauccccgugcugagagccgugcugcccagagacaugguguucagaaccagcagccccaagguggugcugugaggacuagucccuguucccagagcccacuuuuuuuucuuuuuuugaaauaaaauagccugucuuucagaucucaaaggcucuuuucagagccaccaaaaaaaaaaaaaaaaaaaaaaaaaaaaaaaaaaaaaaaaaaaaaaaaaaaaaaaaaaaaaaaaagaauu

SEQ ID NO: 17101 - RNA, 1970 nt, Artificial Sequence
  mRNA product Design a-2 (hSL-A64-N5) comprising derived and/or modified sequence from LASV(LASV221-NIG-2010;Clade II)__AIT17625__NP (opt4)
aggagaguccgcucagccagguugcagaagcggcuuagcguguguccuaaucuucucucugcguguagguaggccugugccgcaaacaagcuuaccaugagcgccagcaaggaggugaagagcuuccuguggacccagagccugagaagagagcugagcggcuacugcagcagcaucaagcugcagguggugaaggacgcccaggcccugcugcacggccuggacuucagcgaggugagcaacgugcagagacugaugagaaagcagagaagagacgacagcgaccugaagagacugagagaccugaaccaggccgugaacaaccugguggagcugaagagcacccagcagaagagcauccugagagugggcacccugaccagcgacgaccugcugacccuggccgccgaccuggagaagcugaagagcaaggugaucagaaccgagagaccccugagcagcggcguguacaugggcaaccugagcacccagcagcuggagcagagaagagcccugcugaacaugaucggcauggugggcggcgcccagggcacccagcccggcagagacggcguggugagagugugggacgugaagaaccccgaccugcugaacaaccaguucggcaccaugcccagccugacccuggccugccugaccaagcagggccagguggaccugaacgacgccgugcuggcccugaccgaccugggccugaucuacaccgccaaguaccccaacagcagcgaccuggacagacugagccagagccaccccauccugaacaugguggacaccaagaagagcagccugaacaucagcggcuacaacuucagccugggcgccgccgugaaggccggcgccugcaugcuggacggcggcaacaugcuggagaccaucaaggugaccccccagaccguggacggcauccugaagagcauccugaaggugaagagaagccugggcauguucgugagcgacacccccggcgagagaaaccccuacgagaacauccuguacaagaucugccugagcggcgacggcuggcccuacaucgccagcagaaccagcaucgugggcagagccugggagaacaccaccguggaccuggagagcgacggcaagccccagaaggugggcaccgccggcagcaacaagagccugcagagcgccggcuuccccaccggccugaccuacagccagcugaugacccugaaggacagcaugaugcagcuggaccccagcgccaagaccuggaucgacaucgagggcagacccgaggaccccguggagaucgcccuguaccagcccaugagcggcugcuacauccacuucuucagagagcccaccgaccugaagcaguucaagcaggacgccaaguacagccacggcaucgacguggccgaccuguuccccgcccagcccggccugaccagcgccgugaucgaggcccugcccagaaacauggugcugaccugccagggcagcgacgacaucaagagacugcuggacagccagggcagaagagacaucaagcugaucgacaucgcccugagcaaggccgacagcagaaaguucgagaacgccgugugggaccagugcaaggaccugugccacaugcacaccggcguggugguggagaagaagaagagaggcggcaaggaggagaucaccccccacugcgcccugauggacugcaucauguacgacgccgccgugagcggcggccugaacauccccgugcugagagccgugcugcccagagacaugguguucagaaccagcagccccaagguggugcugugaggacuagucccuguucccagagcccacuuuuuuuucuuuuuuugaaauaaaauagccugucuuucagaucucaaaggcucuuuucagagccaccaaaaaaaaaaaaaaaaaaaaaaaaaaaaaaaaaaaaaaaaaaaaaaaaaaaaaaaaaaaaaaaaagaauu

SEQ ID NO: 17102 - RNA, 1970 nt, Artificial Sequence
  mRNA product Design a-2 (hSL-A64-N5) comprising derived and/or modified sequence from LASV(LASV237-NIG-2010;Clade II)__AIT17639__NP (opt4)
aggagaguccgcucagccagguugcagaagcggcuuagcguguguccuaaucuucucucugcguguagguaggccugugccgcaaacaagcuuaccaugagcgccagcaaggaggugaagagcuuccuguggacccagagccugagaagagagcugagcggcuacugcagcaacaucaagcugcagguggugaaggacgcccaggcccugcugcacggccuggacuucagcgaggugagcaacgugcagagacugaugagaaagcagaagagagacgacagcgaccugaagagacugagagaccugaaccaggccgugaacaaccugguggagcugaagagcacccagcagaagagcauccugagagugggcacccugaccagcgacgaccugcugacccuggccgccgaccuggagaagcugaagagcaaggugaucagaaccgagagaccccugagcagcggcguguacaugggcaaccugagcacccagcagcuggagcagagaagagcccugcugaacaugaucggcauggugggcggcgcccagggcacccagcccggcagagacggcguggugagagugugggacgugaagaaccccgaccugcugaacaaccaguucggcaccaugcccagccugacccuggccugccugaccaagcagggccagguggaccugaacgacgccgugcuggcccugaccgaccugggccugaucuacaccgccaaguaccccaacagcagcgaccuggacagacugagccagagccaccccauccugaacaugguggacaucaagaagagcagccugaacaucagcggcuacaacuucagccugggcgccgccgugaaggccggcgccugcaugcuggacggcggcaacaugcuggagaccaucaaggugaccccccagaccauggacggcauccugaagagcauccugaaggugaagagaagccugggcauguucgugagcgacacccccggcgagagaaaccccuacgagaacauccuguacaagaucugccugagcggcgacggcuggcccuacaucgccagcagaaccagcaucgugggcagagccugggagaacaccaccguggaccuggagagcgacggcaagccccagaaggugggcagcgccggcagcaacaagagccugcagagcgccggcuuccccaccggccugaccuacagccagcugaugacccugaaggacagcaugaugcagcuggaccccagcgccaagaccuggaucgacaucgagggcagacccgaggaccccguggagaucgcccuguaccagcccaugagcggcugcuacauccacuucuucagagagcccaccgaccugaagcaguucaagcaggacgccaaguacagccacggcaucgacguggccgaccuguuccccgcccagcccggccugaccagcgccgugaucgaggcccugcccagaaacauggugcugaccugccagggcagcgacgacaucaagagacugcuggacagccagggcagaagagacaucaagcugaucgacaucgcccugagcaaggccgacagcagaagauucgagaacgccgugugggaccagugcaaggaccugugccacaugcacaccggcguggugguggagaagaagaagagaggcggcaaggaggagaucaccccccacugcgcccugauggacugcaucauguacgacgccgccgugagcggcggccugaacauccccgugcugagagccgugcugcccagagacaugguguucagaaccagcagccccaagguggugcugugaggacuagucccuguucccagagcccacuuuuuuuucuuuuuuugaaauaaaauagccugucuuucagaucucaaaggcucuuuucagagccaccaaaaaaaaaaaaaaaaaaaaaaaaaaaaaaaaaaaaaaaaaaaaaaaaaaaaaaaaaaaaaaaaagaauu

SEQ ID NO: 17103 - RNA, 1970 nt, Artificial Sequence
  mRNA product Design a-2 (hSL-A64-N5) comprising derived and/or modified sequence from LASV(LASV253-NIG-2011;Clade II)__AIT17671__NP (opt4)
aggagaguccgcucagccagguugcagaagcggcuuagcguguguccuaaucuucucucugcguguagguaggccugugccgcaaacaagcuuaccaugagcgccagcaaggaggugaagagcuuccuguggacccagagccugagaagagagcugagcggcuacugcagcagcaucaagcugcagguggugaaggacgcccaggcccugcugcacggccuggacuucagcgaggugagcaacgugcagagacugaugagaaagcagaagagagacgacagcgaccugaagagacugagagaccugaaccaggccgugaacaaccugguggagcugaagagcacccagcagaagagcgugcugagagugggcacccugaccagcgacgaccugcugacccuggccgccgaccuggagaagcugaagagcaaggugaucagaaccgagagaccccugagcagcggcguguacaugggcaaccugagcacccagcagcuggagcagagaagagcccugcugaacaugaucggcauggugggcggcgcccagggcacccagcccggcagagacggcguggugagagugugggacgugaagaaccccgaccugcugaacaaccaguucggcaccaugcccagccugacccuggccugccugaccaagcagggccagguggaccugaacgacguggugcuggcccugaccgaccugggccugaucuacaccgccaaguaccccaacagcagcgaccuggacagacugagccagagccaccccauccugaacaugguggacaccaagaagagcagccugaacaucagcggcuacaacuucagccugggcgccgccgugaaggccggcgccugcaugcuggacggcggcaacaugcuggagaccaucaaggugaccccccagaccauggacggcauccugaagagcauccugaaggugaagaagagccugggcauguucgugagcgacacccccggcgagagaaaccccuacgagaacauccuguacaagaucugccugagcggcgacggcuggcccuacaucgccagcagaaccagcaucgugggcagagccugggagaacaccaccguggaccuggagagcgacggcaagccccagaaggugggcaccgccggcagcaacaagagccugcagagcgccggcuuccccaccggccugaccuacagccagcugaugacccugaaggacagcaugaugcagcuggaccccagcgccaagaccuggaucgacaucgagggcagacccgaggaccccguggagaucgcccuguaccagcccaugagcggcugcuacauccacuucuucagagagcccaccgaccugaagcaguucaagcaggacgccaaguacagccacggcaucgacgugaccgaccuguuccccgcccagcccggccugaccagcgccgugaucgaggcccugcccagaaacauggugcugaccugccagggcagcgacgacaucaagagacugcuggacagccagggcagaagagacaucaagcugaucgacaucgcccugagcaaggccgacagcagaagauucgagaacgccgugugggaccagugcaaggaccugugccacaugcacaccggcguggugguggagaagaagaagagaggcggcaaggaggagaucaccccccacugcgcccugauggacugcaucauguacgacgccgccgugagcggcggccugaacauccccgugcugagagccgugcugcccagagacaugguguucagaaccagcagccccaagguggugcugugaggacuagucccuguucccagagcccacuuuuuuuucuuuuuuugaaauaaaauagccugucuuucagaucucaaaggcucuuuucagagccaccaaaaaaaaaaaaaaaaaaaaaaaaaaaaaaaaaaaaaaaaaaaaaaaaaaaaaaaaaaaaaaaaagaauu

SEQ ID NO: 17104 - RNA, 1970 nt, Artificial Sequence
  mRNA product Design a-2 (hSL-A64-N5) comprising derived and/or modified sequence from LASV(LASV254-NIG-2011;Clade II)__AIT17675__NP (opt4)
aggagaguccgcucagccagguugcagaagcggcuuagcguguguccuaaucuucucucugcguguagguaggccugugccgcaaacaagcuuaccaugagcgccagcaaggaggugaagagcuuccuguggacccagagccugagaagagagcugagcggcuacugcagcagcaucaagcugcagguggugaaggacgcccaggcccugcugcacggccuggacuucagcgaggugagcaacgugcagagacugaugagaaagcagaagagagacgacagcgaccugaagagacugagagaccugaaccaggccgugaacaaccugguggagcugaagagcacccagcagaagagcgugcugagagugggcacccugaccagcgacgaccugcugacccuggccgccgaccuggagaagcugaagagcaaggugaucagaaccgagagaccccugagcagcggcguguacaugggcaaccugagcacccagcagcuggagcagagaagagcccugcugaacaugaucggcauggugggcggcgcccagggcacccagcccggcagagacggcguggugagagugugggacgugaagaaccccgaccugcugaacaaccaguucggcaccaugcccagccugacccuggccugccugaccaagcagggccagguggaccugaacgacgccgugcuggcccugaccgaccugggccugaucuacaccgccaaguaccccaacagcagcgaccuggacagacugagccagagccaccccauccugaacaugguggacaccaagaagagcagccugaacaucagcggcuacaacuucagccugggcgccgccgugaaggccggcgccugcaugcuggacggcggcaacaugcuggagaccaucaaggugaccccccagaccauggacggcauccugaagagcauccugaaggugaagaagagccugggcauguucgugagcgacacccccggcgagagaaaccccuacgagaacauccuguacaagaucugccugagcggcgacggcuggcccuacaucgccagcagaaccagcaucgugggcagagccugggagaacaccaucguggaccuggagagcgacggcaagccccagaaggugggcaccgccggcagcaacaagagccugcagagcgccggcuuccccaccggccugaccuacagccagcugaugacccugaaggacagcaugaugcagcuggaccccagcgccaagaccuggaucgacaucgagggcagacccgaggaccccguggagaucgcccuguaccagcccaugagcggcugcuacauccacuucuucagagagcccaccgaccugaagcaguucaagcaggacgccaaguacagccacggcaucgacguggccgaccuguuccccgcccagcccggccugaccagcgccgugaucgaggcccugcccagaaacauggugcugaccugccagggcagcgacgacaucaagagacugcuggacagccagggcagaagagacaucaagcugaucgacaucgcccugagcaaggccgacagcagaagauucgagaacgccgugugggaccagugcaaggaccugugccacaugcacaccggcguggugguggagaagaagaagagaggcggcaaggaggagaucaccccccacugcgcccugauggacugcaucauguacgacgccgccgugagcggcggccugaacauccccgugcugagagccgugcugcccagagacaugguguucagaaccagcagccccaagguggugcugugaggacuagucccuguucccagagcccacuuuuuuuucuuuuuuugaaauaaaauagccugucuuucagaucucaaaggcucuuuucagagccaccaaaaaaaaaaaaaaaaaaaaaaaaaaaaaaaaaaaaaaaaaaaaaaaaaaaaaaaaaaaaaaaaagaauu

SEQ ID NO: 17105 - RNA, 1970 nt, Artificial Sequence
  mRNA product Design a-2 (hSL-A64-N5) comprising derived and/or modified sequence from LASV(Nig08-04;Clade II)__ADU56611__NP (opt4)
aggagaguccgcucagccagguugcagaagcggcuuagcguguguccuaaucuucucucugcguguagguaggccugugccgcaaacaagcuuaccaugagcgccagcaaggaggugaagagcuuccuguggacccagagccugagaagagagcugagcggcuacugcagcaacaucaagcugcagguggugaaggacgcccaggcccugcugcacggccuggacuucagcgaggugagcaacgugcagagacugaugagaaagcagaagagagacgacggcgaccugaagagacugagagaccugaaccaggccgugaacaaccugguggagcugaagagcacccagcagaagagcgugcugagagugggcacccugaccagcgacgaccugcugacccuggccgccgaccuggagaagcugaagagcaaggugaucagaaccgagagaccccugagcagcggcguguacaugggcaaccugagcacccagcagcuggagcagagaaaggcccugcugagcaugaucggcauggugggcggcgcccagggcacccagcccggcagagacggcguggugagagugugggacgugaagaaccccgaccugcugaacaaccaguucggcaccaugcccagccugacccuggccugccugaccaagcagggccagguggaccugaacgacgccgugcuggcccugaccgaccugggccugaucuacaccgccaaguaccccaacagcagcgaccuggacagacugagccagagccaccccauccugaacaugguggacaccaagaagagcagccugaacaucagcggcuacaacuucagccugggcgccgccgugaaggccggcgccugcaugcuggacggcggcaacaugcuggagaccaucaaggugaccccccagaccauggacggcauccugaagagcauccugaaggugaagagaagccugggcauguucgugagcgacacccccggcgagagaaaccccuacgagaacauccuguacaagaucugccugagcggcgacggcuggcccuacaucgccagcagaaccagcaucgugggcagagccugggagaacaccaccguggaccuggagagcgacggcaagccccagaaggugggcaccgccggcagcaacaagagccugcagagcgccggcuuccccaccggccugaccuacagccagcugaugacccugaaggacagcaugaugcagcuggaccccagcgccaagaccuggaucgacaucgagggcagacccgaggaccccguggagaucgcccuguaccagcccaugagcggcugcuacauccacuucuucagagagcccaccgaccugaagcaguucaagcaggacgccaaguacagccacggcaucgacgugaccgaccuguucagcgcccagcccggccugaccagcgccgugaucgaggcccugcccagaaacauggugcugaccugccagggcagcgacgacaucaagaagcugcuggacagccagggcagaagagacaucaagcugaucgacaucagccugaacaaggccgacagcagaagauucgagaacgccgugugggaccagugcaaggaccugugccacaugcacaccggcguggugguggagaagaagaagagaggcggcaaggaggagaucaccccccacugcgcccugauggacugcaucauguucgacgccgccgugagcggcggccugaacauccccauccugagagccgugcugcccagagacaugguguucagaaccagcagccccaagguggugcugugaggacuagucccuguucccagagcccacuuuuuuuucuuuuuuugaaauaaaauagccugucuuucagaucucaaaggcucuuuucagagccaccaaaaaaaaaaaaaaaaaaaaaaaaaaaaaaaaaaaaaaaaaaaaaaaaaaaaaaaaaaaaaaaaagaauu

SEQ ID NO: 17106 - RNA, 1973 nt, Artificial Sequence
  mRNA product Design a-2 (hSL-A64-N5) comprising derived and/or modified sequence from LASV(GA391;Clade III)__AAA46284__NP (opt4)
aggagaguccgcucagccagguugcagaagcggcuuagcguguguccuaaucuucucucugcguguagguaggccugugccgcaaacaagcuuaccaugagcgccagcaaggaggugagaagcugccuguggacccagagccugagaagagagcugagcggcuacugcagcaacaucaagcugcagguggugaaggacgcccaggcccugcugcacggccuggacuucagcgaggugagcaacgugcagagacugaugagaaagcagaagagagacgacggcgaccugaagagacugagagaccugaaccaggccgugaacaaccugguggagcugaagagcacccagcagaagagcgugcugagagugggcacccugagcagcgacgaccugcugauccuggccgccgaccuggagaagcugaagagcaaggugaccagaaccgagagaccccugagcagcggcguguacaugggcaaccugagcagccagcagcuggaccagagaagagcccugcugaacaugaucggcaugaccggcgugagcggcggcggcaagggcgccagcaacggcaucgugagagugugggacgugaagaacgccgagcugcugaacaaccaguucggcaccaugcccagccugacccuggccugccugaccaagcagggccagguggaccugaacgacgccgugcaggcccugaccgaccugggccugaucuacaccgccaaguaccccaacagcagcgaccuggacagacugagccagagccaccccauccugaacaugaucgacaccaagaagagcagccugaacaucagcggcuacaacuucagccugggcgccgccgugaaggccggcgccugcaugcuggacggcggcaacaugcuggagaccaucaaggugagcccccagaccauggacggcauccugaagagcauccugaaggugaagaagagccugggcauguucgugagcgacacccccggcgagagaaaccccuacgagaacauccuguacaagaucugccugagcggcgacggcuggagcuacaucgccagcagaaccagcaucgugggcagagccugggagaacaccgugguggaccuggagcaggacaacaagccccagaagaucggcaacggcggcagcaacaagagccugcagagcgccggcuucgccgccggccugaucuacagccagcugaugacccugaaggacuucaagugcuucaaccugauccccaacgccaagaccuggauggacaucgagggcagacccgaggaccccguggagaucgcccuguaccagcccagcagcggcugcuacgugcacuucuucagagagcccaccgaccugaagcaguucaagcaggacgccaaguacagccacggcagagacgugaccgaccuguucgccgcccagcccggccugaccagcgccgugaucgaggcccugcccagaaacauggugaucaccugccagggcagcgaggacaucagaaagcugcuggagagccagggcagaagagacaucaagcugaucgacaucacccugagcaaggccgacagcagaaaguucgagaacgccgugugggaccaguucaaggaccugugccacaugcacaccggcguggugguggagaagaagaagagaggcggcaaggaggagaucaccccccacugcgcccugauggacugcaucauguucgacgccgccgugagcggcggccuggacgccaaggugcugagaguggugcugcccagagacaugguguucagaaccagcacccccaagguggugcugugaggacuagucccuguucccagagcccacuuuuuuuucuuuuuuugaaauaaaauagccugucuuucagaucucaaaggcucuuuucagagccaccaaaaaaaaaaaaaaaaaaaaaaaaaaaaaaaaaaaaaaaaaaaaaaaaaaaaaaaaaaaaaaaaagaauu

SEQ ID NO: 17107 - RNA, 1970 nt, Artificial Sequence
  mRNA product Design a-2 (hSL-A64-N5) comprising derived and/or modified sequence from LASV(Nig08-A19;Clade III)__ADU56619__NP (opt4)
aggagaguccgcucagccagguugcagaagcggcuuagcguguguccuaaucuucucucugcguguagguaggccugugccgcaaacaagcuuaccaugagcgccagcaaggaggugaagagcuuccuguggacccagagccugagaagagagcugagcggcuacugcagcaacaucaagcugcagguggugaaggacgcccaggcccugcugcacggccuggacuucagcgaggugagcaacgugcagagacugaugagaaagcagaagagagacgacggcgaccugaagagacugagagaccugaaccaggccgugaacaaccugguggagcugaagagcacccagcagaagagcgugcugagagugggcacccugagcagcgacgaccugcuggugcuggccgccgaccuggagaagcugaagagcaagguggugagaaccgagagaccccugagcagcggcaucuacaugggcaaccugagcagccagcagcuggaccagagaaaggcccugcugaacaugaucggcaugaccggcggcaacggcggcagaaacaccaccagcgacggcaucgugagagugugggacgugaagaacgccgagcugcugaacaaccaguucggcaccaugcccagccugacccuggccugccugaccaagcagggccagguggaccugaacgacgccgugcaggcccugaccgaccugggccugaucuacaccgccaaguaccccaacagcagcgaccuggacagacuggcccagagccaccccauccugaacaugaucgacaccaagaagagcagccugaacaucagcggcuacaacuucagccugggcgccgccgugaaggccggcgccugcaugcuggacggcggcaacaugcuggagaccaucaaggugagcccccagaccauggacggcauccugaagagcauccugaaggugaagagaagccugggcauguucaucagcgacacccccggcgagagaaaccccuacgagaacauccuguacaagaucugccugagcggcgacggcuggcccuacaucgccagcagaaccagcaucgugggcagagccugggagaacaccgugguggaccuggagagcgacaacaagccccagaagaccggcaacggcggcagcaacaagagccugcagagcgccggcuucgccgccggccugaccuacagccagcugaugacccugaaggacagcaugcugcagcuggaccccaacgccaagaccuggauggacaucgagggcagacccgaggaccccguggagaucgcccuguaccagcccagcagcggcugcuacauccacuucuucagagagcccaccgaccugaagcaguucaagcaggacgccaaguacagccacggcaucgacgugaccgaccuguucgccgcccagcccggccugaccagcgccgugaucgaggcccugcccagaaacauggugaucaccugccagggcagcgaggacaucagaaagcugcuggagagccagggcagaagagacaucaagcugaucgacaucagccugagcaagguggacagcagaaaguucgagaacgccgugugggaccaguucaaggaccugugccacaugcacaccggcaucgugguggagaagaagaagagaggcggcaaggaggagaucaccccccacugcgcccugauggacugcaucauguucgacgccgccgugagcggcggcguggacgccaaggugcugagagccgugcugcccagagacaugguguucagaaccagcacccccaagguggugcugugaggacuagucccuguucccagagcccacuuuuuuuucuuuuuuugaaauaaaauagccugucuuucagaucucaaaggcucuuuucagagccaccaaaaaaaaaaaaaaaaaaaaaaaaaaaaaaaaaaaaaaaaaaaaaaaaaaaaaaaaaaaaaaaaagaauu

SEQ ID NO: 17108 - RNA, 1970 nt, Artificial Sequence
  mRNA product Design a-2 (hSL-A64-N5) comprising derived and/or modified sequence from LASV(G1180-SLE-2010;Clade IV)__AIT17169__NP (opt4)
aggagaguccgcucagccagguugcagaagcggcuuagcguguguccuaaucuucucucugcguguagguaggccugugccgcaaacaagcuuaccaugagcgccagcaaggagaucaagagcuuccuguggacccagagccugagaagagagcugagcggcuacugcagcaacaucaagcugcagguggugaaggacgcccaggcccugcugcacggccuggacuucagcgaggugagcaacgugcagagacugaugagaaaggagagaagagacgacaacgaccugaagagacugagagaccugaaccaggccgugaacaaccugguggagcugaagagcacccagcagaagagcauccugagagugggcacccugaccagcgacgaccugcugauccuggccgccgaccuggagaagcugaagagcaaggugaucagaaccgagagaccccugagcgccggcguguacaugggcaaccugagcagccagcagcuggaccagagaagagcccugcugagcaugaucggcaugagcagcggcaaccagagagcccaggccggcagagacggcguggugagagugugggacgugaagaacguggagcugcugaacaaccaguucggcaccaugcccagccugacccuggccugccugaccaagcagggccagguggaccugaacgacgccgugcaggcccugaccgaccugggccugaucuacaccgccaaguaccccaacaccagcgaccuggacagacugacccagagccaccccauccugaacaugaucgacaccaagaagagcagccugaacaucagcggcuacaacuucagccugggcgccgccgugaaggccggcgccugcaugcuggacggcggcaacaugcuggagaccaucaaggugagcccccagaccauggacggcauccugaagagcauccugaaggugaagaaggcccugggcauguucaucagcgacacccccggcgagagaaaccccuacgagaacauccuguacaagaucugccugagcggcgacggcuggcccuacaucgccagcagaaccagcaucaccggcagagccugggagaacaccgugguggaccuggagagcgacggcaagccccagaaggccggcagcaacaacagcaacaagagccugcagagcgugggcuucaccgccggccugaccuacagccagcugaugacccugaaggacgccaugcugcagcuggaccccaacgccaagaccuggauggacaucgagggcagacccgaggaccccguggagaucgcccuguaccagcccagcagcggcugcuacauccacuucuucagagagcccaccgaccugaagcaguucaagcaggacgccaaguacagccacggcaucgacgugaccgaccuguucgccgcccagcccggccugaccagcgccgugaucgacgcccugcccagaaacauggugaucaccugccagggcagcgacgacaucagaaagcugcuggagagccagggcagaaaggacaucaagcugaucgacaucgcccugagcaagaccgacagcagaaaguacgagaacgccgugugggaccaguacaaggaccugugccacaugcacaccggcguggugguggagaagaagaagagaggcggcaaggaggagaucaccccccacugcgcccugauggacugcaucauguucgacgccgccgugagcggcggccugaacaccagcgugcugagagccgugcugcccagagacaugguguucagaaccagcacccccagaguggugcugugaggacuagucccuguucccagagcccacuuuuuuuucuuuuuuugaaauaaaauagccugucuuucagaucucaaaggcucuuuucagagccaccaaaaaaaaaaaaaaaaaaaaaaaaaaaaaaaaaaaaaaaaaaaaaaaaaaaaaaaaaaaaaaaaagaauu

SEQ ID NO: 17109 - RNA, 1970 nt, Artificial Sequence
  mRNA product Design a-2 (hSL-A64-N5) comprising derived and/or modified sequence from LASV(G1442-SLE-2011;Clade IV)__AIT17181__NP (opt4)
aggagaguccgcucagccagguugcagaagcggcuuagcguguguccuaaucuucucucugcguguagguaggccugugccgcaaacaagcuuaccaugagcgccagcaaggaggugaagagcuuccuguggacccagagccugagaagagagcugagcggcuacugcagcaacaucaagcugcagguggugaaggacgcccaggcccugcugcacggccuggacuucagcgaggugagcaacgugcagagacugaugagaaagcagagaagagacgacaacgaccugaagagacugagagaccugaaccaggccgugaacaaccugguggagcugaagagcacccagcagaagagcgugcugagagugggcacccugaccagcgacgaccugcuggugcuggccgccgaccuggagaagcugaagagcaaggugaucagaaccgagagaccccugagcgccggcguguacaugggcaaccugagcagccagcagcuggaccagagaagagcccugcugaacaugaucggcaugagcggcggcauccagggcaccagaaccggcagagacggcguggugagagugugggacgugaagaacgccgaccugcugaacaaccaguucggcaccaugcccagccugacccuggccugccugaccaagcagggccagguggaccugaacgacguggugcaggcccugaccgaccugggccugaucuacaccgccaaguaccccaacgccagcgaccuggacagacugacccagagccaccccauccugaacaugaucgacaccaagaagagcagccugaacaucagcggcuacaacuucagccugggcgccgccgugaaggccggcgccugcaugcuggacggcggcaacaugcuggagaccaucaaggugagcccccagaccauggacggcauccugaagagcauccugaaggugaagaagacccugggcauguucaucagcgacacccccggcgagagaaaccccuacgagaacauccuguacaagaucugccugagcggcgacggcuggcccuacaucgccagcagaaccagcaucaccggcagagccugggagaacaccgugguggaccuggagagcgacggcaagccccagaaggccggcagcaacaacagcaacaagagccugcagagcgccggcuucgccgccggccugaccuacagccagcugaugacccugaaggacgccaugcugcagcuggaccccaacgccaagaccuggauggacaucgagggcagacccgaggaccccguggagaucgcccuguaccagcccagcagcggcugcuacauccacuucuucagagagcccaccgaccugaagcaguucaagcaggacgccaaguacagccacggcaucgacgugaccgaccuguucgccgcccagcccggccugaccagcgccgugaucgaggcccugcccagaaacauggugaucaccugccagggcagcgacgacaucaagaagcugcuggagagccagggcagaaaggacaucaagcugaucgacaucgcccugagcaagaccgacagcagaaaguacgagaacgccgugugggaccaguacaaggaccugugccacaugcacaccggcguggugguggagaagaagaagagaggcggcaaggaggagaucaccccccacugcgcccugauggacugcaucauguucgacgccgccgugagcggcggccugaacacccuggugcugagagccgugcugcccagagacaugguguucagaaccagcacccccagaguggugcugugaggacuagucccuguucccagagcccacuuuuuuuucuuuuuuugaaauaaaauagccugucuuucagaucucaaaggcucuuuucagagccaccaaaaaaaaaaaaaaaaaaaaaaaaaaaaaaaaaaaaaaaaaaaaaaaaaaaaaaaaaaaaaaaaagaauu

SEQ ID NO: 17110 - RNA, 1970 nt, Artificial Sequence
  mRNA product Design a-2 (hSL-A64-N5) comprising derived and/or modified sequence from LASV(G3010-SLE-2013;Clade IV)__AIT17345__NP (opt4)
aggagaguccgcucagccagguugcagaagcggcuuagcguguguccuaaucuucucucugcguguagguaggccugugccgcaaacaagcuuaccaugagcgccagcaaggagaucaagagcuuccuguggacccagagccugagaagagagcugagcggcuacugcagcaacaucaagcugcagguggugaaggacgcccaggcccugcugcacggccuggacuucagcgaggugagcaacgugcagagacugaugagaaaggagagaagagacgacaacgaccugaagagacugagagaccugaaccaggccgugaacaaccugguggagcugaagagcacccagcagaagagcauccugagagugggcacccugaccagcgacgaccugcugauccuggccgccgaccuggagaagcugaagagcaaggugaccagaaccgagagaccccugagcgccggcguguacaugggcaaccugagcagccagcagcuggaccagagaagagcccugcugagcaugaucggcaugagcagcggcgugcagggcgccagagccggcagagacggcguggugagagugugggacgugaagaacgccgagcugcugaacaaccaguucggcaccaugcccagccugacccuggccugccugaccaagcagggccagguggaccugaacgacguggugcaggcccugaccgaccugggccugaucuacaccgccaaguaccccaacaccagcgaccuggacagacugacccagagccaccccauccugaacaugaucgacaccaagaagagcagccugaacaucagcggcuacaacuucagccugggcgccgccgugaaggccggcgccugcaugcuggacggcggcaacaugcuggagaccaucaaggugagcccccagaccauggacggcauccugaagagcauccugaaggugaagaaggcccugggcauguucaucagcgagacccccggcgagagaaaccccuacgagaacauccuguacaagaucugccugagcggcgacggcuggcccuacaucgccagcagaaccagcaucaccggcagagccugggagaacaccgugguggaccuggagagcgacggcaagccccagaaggccggcagcaacaacagcaacaagagccugcagagcgccggcuucaccgccggccugaccuacagccagcugaugacccugaaggacgccaugcugcagcuggaccccaacgccaagaccuggauggacaucgagggcagacccgaggaccccguggagguggcccuguaccagcccagcagcggcugcuacauccacuucuucagagagcccaccgaccugaagcaguucaagcaggacgccaaguacagccacggcaucgacgugaccgaccuguucgccgcccagcccggccugaccagcgccgugaucgacgcccugcccagaaacauggugaucaccugccagggcagcgacgacaucaagaagcugcuggagagccagggcagaaaggacaucaagcugaucgacaucgcccugagcaagaccgacagcagaaaguacgagaacgccgugugggaccaguacaaggaccugugccacaugcacaccggcguggugguggagaagaagaagagaggcggcaaggaggagaucaccccccacugcgcccugauggacugcaucauguucgacgccgccgugagcggcggccugaacaccagcgugcugagagccgugcugcccagagacaugguguucagaaccagcacccccagaguggugcugugaggacuagucccuguucccagagcccacuuuuuuuucuuuuuuugaaauaaaauagccugucuuucagaucucaaaggcucuuuucagagccaccaaaaaaaaaaaaaaaaaaaaaaaaaaaaaaaaaaaaaaaaaaaaaaaaaaaaaaaaaaaaaaaaagaauu

SEQ ID NO: 17111 - RNA, 1970 nt, Artificial Sequence
  mRNA product Design a-2 (hSL-A64-N5) comprising derived and/or modified sequence from LASV(G502-SLE-2009;Clade IV)__AIT17127__NP (opt4)
aggagaguccgcucagccagguugcagaagcggcuuagcguguguccuaaucuucucucugcguguagguaggccugugccgcaaacaagcuuaccaugagcgccagcaaggagaucaagagcuuccuguggacccagagccugagaagagagcugagcggcuacugcagcaacaucaagcugcagguggugaaggacgcccaggcccugcugcacggccuggacuucagcgaggugagcaacgugcagagacugaugagaaaggagagaagagacgacaacgaccugaagagacugagagaccugaaccaggccgugaacaaccugguggagcugaagagcacccagcagaagagcauccugagagugggcacccugaccagcgacgaccugcugauccuggccgccgaccuggagaagcugaagagcaaggugaucagaaccgagagaccccugagcgccggcguguacaugggcaaccugagcagccagcagcuggaccagagaagagcccugcugagcaugaucggcaugagcggcggcaaccagggcgugagagccggcaaggacggcguggugagagugugggacgugaagaacgccgagcugcugaacaaccaguucggcaccaugcccagccugacccuggccugccugaccaagcagggccagguggaccugaacgacgccgugcaggcccugaccgaccugggccugaucuacaccgccaaguaccccaacaccagcgaccuggacagacugacccagagccaccccauccugaacaugaucgacaccaagaagagcagccugaacaucagcggcuacaacuucagccugggcgccgccgugaaggccggcgccugcaugcuggacggcggcaacaugcuggagaccaucaaggugagcccccagaccauggacggcauccugaagagcauccugaaggugaagaaggcccugggcauguucaucagcgacacccccggcgagagaaaccccuacgagaacauccuguacaagaucugccugagcggcgacggcuggcccuacaucgccagcagaaccagcaucaccggcagagccugggagaacaccgugguggaccuggagagcgacggcaagccccagaaggccggcagcaacaacagcaacaagagccugcagagcgccggcuucaccgccggccugaccuacagccagcugaugacccugaaggacgccaugcugcagcuggaccccaacaccaagaccuggauggacaucgagggcagacccgaggaccccguggagaucgcccuguaccagcccagcagcggcugcuacauccacuucuucagagagcccaccgaccugaagcaguucaagcaggacgccaaguacagccacggcaucgacgugaccgaccuguucgccgcccagcccggccugaccagcgccgugaucgacgcccugcccagaaacauggugaucaccugccagggcagcgacgacaucagaaagcugcuggagagccagggcagaaaggacaucaagcugaucgacaucgcccugaacaagaccgacagcagaaaguacgagaacgccgugugggaccaguacaaggaccugugccacaugcacaccggcguggugguggagaagaagaagagaggcggcaaggaggagaucaccccccacugcgcccugauggacugcaucauguucgacgccgccgugagcggcggccugaacaccagcgugcugagagccgugcugcccagagacaugguguucagaaccagcacccccagaguggugcugugaggacuagucccuguucccagagcccacuuuuuuuucuuuuuuugaaauaaaauagccugucuuucagaucucaaaggcucuuuucagagccaccaaaaaaaaaaaaaaaaaaaaaaaaaaaaaaaaaaaaaaaaaaaaaaaaaaaaaaaaaaaaaaaaagaauu

SEQ ID NO: 17112 - RNA, 1970 nt, Artificial Sequence
  mRNA product Design a-2 (hSL-A64-N5) comprising derived and/or modified sequence from LASV(G733-SLE-2010;Clade IV)__AIT17155__NP (opt4)
aggagaguccgcucagccagguugcagaagcggcuuagcguguguccuaaucuucucucugcguguagguaggccugugccgcaaacaagcuuaccaugagcgccagcaaggagaucaagagcuuccuguggacccagagccugagaagagagcugagcggcuacugcagcaacaucaagcugcagguggugaaggacgcccaggcccugcugcacggccuggacuucagcgaggugagcaacgugcagagacugaugagaaaggagagaagagacgacaacgaccugaagagacugagagaccugaaccaggccgugaacaaccugguggagcugaagagcacccagcagaagagcgugcugagagugggcacccugaccagcgacgagcugcuggugcuggccgccgaccuggagaagcugaagagcaaggugaucagaaccgagagaccccugagcgccggcguguacaugggcaaccugagcagccagcagcuggaccagagaagagcccugcugagcaugaucggcaugagcggcggcaaccagggcgccagaaccggcagagacggcguggugagagugugggacgugaagaacgccgagcugcugaacaaccaguucggcaccaugcccagccugacccuggccugccugaccaagcagggccagguggaccugaacgacgccgugcaggcccugaccgaccugggccugaucuacaccgccaaguaccccaacaccagcgaccuggacagacugacccagagccaccccauccugaacaugaucgacaccaagaagagcagccugaacaucagcggcuacaacuucagccugggcgccgccgugaaggccggcgccugcaugcuggacggcggcaacaugcuggagaccaucaaggugagcccccagaccauggacggcauccugaagagcauccugaaggugaagaaggcccugggcauguucaucagcgacacccccggcgagagaaaccccuacgagaacauccuguacaagaucugccugagcggcgacggcuggcccuacaucgccagcagaaccagcaucaccggcagagccugggagaacaccgugguggaccuggagagcgacggcaagccccagaaggccggcagcaacaacagcaacaagagccugcagagcgccggcuucaccgccggccugaccuacagccagcugaugacccugaaggacgccaugcugcagcuggaccccaacgccaagaccuggauggacaucgagggcagacccgaggaccccguggagaucgcccuguaccagcccagcagcggcugcuacauccacuucuucagagagcccaccgaccugaagcaguucaagcaggacgccaaguacagccacggcaucgacgugaccgaccuguucgccgcccagcccggccugaccagcgccgugaucgacgcccugcccagaaacauggugaucaccugccagggcagcgacgacaucagaaagcugcuggagagccagggcagaaaggacaucaagcugaucgacaucgcccugagcaagaucgacagcagaaaguacgagaacgccgugugggaccaguacaaggaccugugccacaugcacaccggcguggugguggagaagaagaagagaggcggcaaggaggagaucaccccccacugcgcccugauggacugcaucauguucgacgccgccgugagcggcggccugaacagccuggugcugagagccgugcugcccagagacaugguguucagaaccagcacccccagaguggugcugugaggacuagucccuguucccagagcccacuuuuuuuucuuuuuuugaaauaaaauagccugucuuucagaucucaaaggcucuuuucagagccaccaaaaaaaaaaaaaaaaaaaaaaaaaaaaaaaaaaaaaaaaaaaaaaaaaaaaaaaaaaaaaaaaagaauu

SEQ ID NO: 17113 - RNA, 1970 nt, Artificial Sequence
  mRNA product Design a-2 (hSL-A64-N5) comprising derived and/or modified sequence from MOPV/LASV reassortant(IGS-1;Clade IV)__AFY05578__NP (opt4)
aggagaguccgcucagccagguugcagaagcggcuuagcguguguccuaaucuucucucugcguguagguaggccugugccgcaaacaagcuuaccaugagcgccagcaaggagaucaagagcuuccuguggacccagagccugagaagagagcugagcggcuacugcagcaacaucaagcugcagguggugaaggacgcccaggcccugcugcacggccuggacuucagcgaggugagcaacgugcagagacugaugagaaaggagagaagagacgacaacgaccugaagagacugagagaccugaaccaggccgugaacaaccugguggagcugaagagcacccagcagaagagcauccugagagugggcacccugaccagcgacgaccugcugauccuggccgccgaccuggagaagcugagaagcaaggugaucagaaccgagagaccccugagcgccggcguguacaugggcaaccugagcagccagcagcuggaccagagaagagcccugcugaacaugaucggcaugagcggcggcaaccagggcgccagagccggcagagacggcguggugagagugugggacgugaagaacgccgagcugcugagcaaccaguucggcaccaugcccagccugacccuggccugccugaccaagcagggccagguggaccugaacgacgccgugcaggcccugaccgaccugggccugaucuacaccgccaaguaccccaacaccagcgaccuggacagacugacccagagccaccccauccugaacaugaucgacaccaagaagagcagccugaacaucagcggcuacaacuucagccugggcgccgccgugaaggccggcgccugcaugcuggacggcggcaacaugcuggagaccaucaaggugagcccccagaccauggacggcauccugaagagcauccugaaggugaagaaggcccugggcauguucaucagcgacacccccggcgagagaaaccccuacgagaacauccuguacaagaucugccugagcggcgacggcuggcccuacaucgccagcagaaccagcaucaccggcagagccugggagaacaccgugguggaccuggagagcgacggcaagccccagaaggccgacagcaacaacagcagcaagagccugcagagcgccggcuucaccgccggccugaccuacagccagcugaugacccugaaggacgccaugcugcagcuggaccccaacgccaagaccuggauggacaucgagggcagacccgaggaccccguggagaucgcccuguaccagcccagcagcggcugcuacauccacuucuucagagagcccaccgaccugaagcaguucaagcaggacgccaaguacagccacggcaucgacgugaccgaccuguucgccacccagcccggccugaccagcgccgugaucgacgcccugcccagaaacauggugaucaccugccagggcagcgacgacaucagaaagcugcuggagagccagggcagaaaggacaucaagcugaucgacaucgaccugagcaagaccgacagcagaaaguacgagaacgccgugugggaccaguacaaggaccugugccacaugcacaccggcguggugguggagaagaagaagagaggcggcaaggaggagaucaccccccacugcgcccugauggacugcaucauguucgacgccgccgugagcggcggccugaacaccagcgugcugagagccgugcugcccagagacaugguguucagaaccagcacccccagaguggugcugugaggacuagucccuguucccagagcccacuuuuuuuucuuuuuuugaaauaaaauagccugucuuucagaucucaaaggcucuuuucagagccaccaaaaaaaaaaaaaaaaaaaaaaaaaaaaaaaaaaaaaaaaaaaaaaaaaaaaaaaaaaaaaaaaagaauu

SEQ ID NO: 17114 - RNA, 1970 nt, Artificial Sequence
  mRNA product Design a-2 (hSL-A64-N5) comprising derived and/or modified sequence from LASV(LM765-SLE-2012;Clade IV)__AIT17815__NP (opt4)
aggagaguccgcucagccagguugcagaagcggcuuagcguguguccuaaucuucucucugcguguagguaggccugugccgcaaacaagcuuaccaugagcgccagcaaggagaucaagagcuuccuguggacccagagccugagaagagagcugagcggcuacugcagcaacaucaagcugcagguggugaaggacgcccaggcccugcugcacggccuggacuucagcgaggugagcaacgugcagagacugaugagaaaggagagaagagacgacaacgaccugaagagacugagagaccugaaccaggccgugaacaaccugguggagcugaagagcacccagcagaagagcauccugagagugggcacccugaccagcgacgaccugcugauccuggccgccgaccuggagaagcugaagagcaaggugaccagaaccgagagaccccugagcgccggcguguacaugggcaaccugagcagccagcagcuggaccagagaagagcccugcuggacaugaucggcaugagcggcagcaaccagggcgccagagccggcagagacggcguggugagagugugggacgugaagaacgccgagcugcugaacaaccaguucggcaccaugcccagccugacccuggccugccugaccaagcagggccagguggaccugaacgacgccgugcaggcccugaccgaccugggccugaucuacaccgccaaguaccccaacaccagcgaccuggacagacugacccagagccaccccauccugaacaugaucgacaccaagaagagcagccugaacaucagcggcuacaacuucagccugggcgccgccgugaaggccggcgccugcaugcuggacggcggcaacaugcuggagaccaucaaggugagcccccagaccauggacggcauccugaagagcauccugaaggugaagaaggcccugggcauguucaucagcgacgcccccggcgagagaaaccccuacgagaacauccuguacaagaucugccugagcggcgacggcuggcccuacaucgccagcagaaccagcaucaccggcagagccugggagaacaccgugguggaccuggagagcgacggcaagccccagaaggccggcagcaacggcagcaacaagagccugcagagcgccggcuucaccgccggccugaccuacagccagcugaugacccugaaggacgccaugcugcagcuggaccccaacgccaagaccuggauggacaucgagggcagacccgaggaccccguggagaucgcccuguaccagcccagcagcggcugcuacauccacuucuucagagagcccaccgaccugaagcaguucaagcaggacgccaaguacagccacggcaucgacgugaccgaccuguucgccgcccagcccggccugaccagcgccgugaucgacgcccugcccagaaacauggugaucaccugccagggcagcgacgacaucagaaagcuguucgagagccagggcagaaaggacaucaagcugaucgacaucgcccugagcaagaccgacagcagaaaguacgagaacgccgugugggaccaguacaaggaccugugccacaugcacaccggcaucgugguggagaagaagaagagaggcggcaaggaggagaucaccccccacugcgcccugauggacugcaucauguucgacgccgccgugagcggcggccugaacaccagcgugcugagagccgugcugcccagagacaugguguucagaaccagcacccccagaguggugcugugaggacuagucccuguucccagagcccacuuuuuuuucuuuuuuugaaauaaaauagccugucuuucagaucucaaaggcucuuuucagagccaccaaaaaaaaaaaaaaaaaaaaaaaaaaaaaaaaaaaaaaaaaaaaaaaaaaaaaaaaaaaaaaaaagaauu

SEQ ID NO: 17115 - RNA, 1970 nt, Artificial Sequence
  mRNA product Design a-2 (hSL-A64-N5) comprising derived and/or modified sequence from LASV(LM776-SLE-2012;Clade IV)__AIT17825__NP (opt4)
aggagaguccgcucagccagguugcagaagcggcuuagcguguguccuaaucuucucucugcguguagguaggccugugccgcaaacaagcuuaccaugagcgccagcaaggagaucaagagcuuccuguggacccagagccugagaagagagcugagcagcuacugcagcaacaucaagcugcagguggugaaggacgcccaggcccugcugcacggccuggacuucagcgaggugagcaacgugcagagacugaugagaaaggagagaagagacgacaacgaccugaagagacugagagaccugaaccaggccgugaacaaccugguggagcugaagagcacccagcagaagagcauccugagagugggcacccugaccagcgacgaccugcugauccuggccgccgaccuggagaagcugaagagcaaggugaccagaaccgagagaccccugagcgccggcguguacaugggcaaccugagcagccagcagcuggaccagagaagagcccugcugagcaugaucggcaugagcggcagcaaccagggcgccagagccggcagagacggcguggugagagugugggacgugaagaacgccgagcugcugaacaaccaguucggcaccaugcccagccugacccuggccugccugaccaagcagggccagguggaccugaacgacgccgugcaggcccugaccgaccugggccugaucuacaccgccaaguaccccaacaccagcgaccuggacagacugacccagagccaccccauccugaacaugaucgacaccaagaagagcagccugaacaucagcggcuacaacuucagccugggcgccgccgugaaggccggcgccugcaugcuggacggcggcaacaugcuggagaccaucaaggugagcccccagaccauggacggcauccugaagagcauccugaaggugaagaaggcccugggcauguucaucagcgacacccccggcgagagaaaccccuacgagaacauccuguacaagaucugccugagcggcgacggcuggcccuacaucgccagcagaaccagcaucaccggcagagccugggagaacaccgugguggaccuggagagcgacggcaagccccagaaggccggcagcaacaacagcaacaagagccugcagagcgccggcuucaccgccggccugaccuacagccagcugaugacccugaaggacgccaugcugcagcuggaccccaacgccaagaccuggauggacaucgagggcagacccgaggaccccguggagguggcccuguaccagcccagcagcggcugcuacauccacuucuucagagagcccaccgaccugaagcaguucaagcaggacgccaaguacagccacggcaucgacgugaccgaccuguucgccgcccagcccggccugaccagcgccgugaucgacgcccugcccagaaacauggugaucaccugccagggcagcgacgacaucagaaagcugcuggagagccagggcagaaaggacaucaagcugaucgacaucgcccugagcaagaccgacagcagaaaguacgagaacgccgugugggaccaguacaaggaccugugccacaugcacaccggcguggugguggagaagaagaagagaggcggcaaggaggagaucaccccccacugcgcccugauggacugcaucauguucgacgccgccgugagcggcggccugaacaccagcgugcugagagccgugcugcccagagacaugguguucagaaccagcacccccagaguggugcugugaggacuagucccuguucccagagcccacuuuuuuuucuuuuuuugaaauaaaauagccugucuuucagaucucaaaggcucuuuucagagccaccaaaaaaaaaaaaaaaaaaaaaaaaaaaaaaaaaaaaaaaaaaaaaaaaaaaaaaaaaaaaaaaaagaauu

SEQ ID NO: 17116 - RNA, 1970 nt, Artificial Sequence
  mRNA product Design a-2 (hSL-A64-N5) comprising derived and/or modified sequence from LASV(Mad39;Clade IV)__ANH09723__NP (opt4)
aggagaguccgcucagccagguugcagaagcggcuuagcguguguccuaaucuucucucugcguguagguaggccugugccgcaaacaagcuuaccaugagcgccagcaaggagaucaagagcuuccuguggacccagagccugagaagagagcugagcggcuacugcagcaacaucaagcugcagguggugaaggacgcccaggcccugcugcacggccuggacuucagcgaggugagcaacgugcagagacugaugagaaagcagagaagagacgacaacgaccugaagagacugagagaccugaaccaggccgugaacaaccugguggagcugaagagcacccagcagaagagcgugcugagagugggcacccugaccagcgacgaccugcugacccuggccgccgaccuggagaagcugaagagcaaggugaccagaaccgagagaccccugaccgccggcguguacaugggcaaccugagcagccagcagcuggaccagagaagagcccugcugaacaugaucggcaugagcggcggcaaccagggcgccagaaccggcagagacggcguggugagagugugggacgugaagaacgccgagcugcugaacaaccaguucggcaccaugcccagccugacccuggccugccugaccaagcagggccagguggaccugaacgacguggugcaggcccugaccgaccugggccugaucuacaccgccaaguaccccaacaccagcgaccuggacagacugacccagagccaccccauccugaacaugaucgacaccaacaagagcagccugaacaucagcggcuacaacuucagccugggcgccgccgugaaggccggcgccugcaugcuggacggcggcaacaugcuggagaccaucaaggugagcccccagaccauggacggcauccugaagagcauccugaaggugaagaagagccugggcauguucaucagcgacacccccggcgagagaaaccccuacgagaacauccuguacaagaucugccugagcggcgacggcuggcccuacaucgccagcagaaccagcaucaccggcagagccugggagaacaccgugguggaccuggagagcggcggcaagccccagaaggccggcagcaacaacagcaacaagagccugcagagcgccggcuucgccgccggccugaccuacagccagcugaugacccugaaggacgccaugcugcagcuggaccccaacgccaagaccuggauggacaucgagggcagacccgaggaccccguggagaucgcccuguaccagcccaucagcggcugcuacauccacuucuucagagagcccaccgaccugaagcaguucaagcaggacgccaaguacagccacggcaucgacgugaccgaccuguucgccgcccagcccggccugaccagcgccgugaucgaggcccugcccagaaacauggugaucaccugccagggcagcgacgacaucagaaagcuguucgagagccagggcagaaaggacaucaagcugaucgacaucgcccugagcaagaccgacagcagaaaguacgagaacgccgugugggaccaguacaaggaccugugccacaugcacaccggcguggugguggagaagaagaagaagggcggcaaggaggagaucaccccccacugcgcccugauggacugcaucauguucgacgccgccgugagcggcggccugaacacccuggugcugagagccgugcugcccagagacaugguguucagaaccagcacccccaagguggugcugugaggacuagucccuguucccagagcccacuuuuuuuucuuuuuuugaaauaaaauagccugucuuucagaucucaaaggcucuuuucagagccaccaaaaaaaaaaaaaaaaaaaaaaaaaaaaaaaaaaaaaaaaaaaaaaaaaaaaaaaaaaaaaaaaagaauu

SEQ ID NO: 17117 - RNA, 1970 nt, Artificial Sequence
  mRNA product Design a-2 (hSL-A64-N5) comprising derived and/or modified sequence from LASV(Z0947-SLE-2011;Clade IV)__AIT17841__NP (opt4)
aggagaguccgcucagccagguugcagaagcggcuuagcguguguccuaaucuucucucugcguguagguaggccugugccgcaaacaagcuuaccaugagcgccagcaaggagaucaagagcuuccuguggacccagagccugagaagagagcugagcggcuacugcagcaacaucaagcugcagguggugaaggacgcccaggcccugcugcacggccuggacuucagcgaggugagcaacgugcagagacugaugagaaaggagagaagagacgacaacgaccugaagagacugagagaccugaaccaggccgugaacaaccugguggagcugaagagcacccagcagaagagcauccugagagugggcacccugaccagcgacgaccugcugauccuggccgccgaccuggagaagcugaagagcaaggugaccagaaccgagagaccccugagcgccggcguguacaugggcaaccugagcagccagcagcuggaccagagaagagcccugcugaacaugaucggcaugagcggcagcaaccagggcgccagaaccggcagagacggcguggugagagugugggacgugaagaacgccgagcugcugaacaaccaguucggcaccaugcccagccugacccuggccugccugaccaagcagggccagguggaccugaacgacgccgugcaggcccugaccgaccugggccugaucuacaccgccaaguaccccaacaccagcgaccuggacagacugacccagagccaccccauccugaacaugaucgacaccaagaagagcagccugaacaucagcggcuacaacuucagccugggcgccgccgugaaggccggcgccugcaugcuggacggcggcaacaugcuggagaccaucaaggugagcccccagaccauggacggcauccugaagagcauccugaaggugaagaaggcccugggcauguucaucagcgacgcccccggcgagagaaaccccuacgagaacauccuguacaagaucugccugagcggcgacggcuggcccuacaucgccagcagaaccagcaucaccggcagagccugggagaacaccgugguggaccuggagagcgacggcaagccccagaaggccggcagcaacggcagcaacaagagccugcagagcgccggcuucaccgccggccugaccuacagccagcugaugacccugaaggacgccaugcugcagcuggaccccaacgccaagaccuggauggacaucgagggcagacccgaggaccccguggagaucgcccuguaccagcccagcagcggcugcuacauccacuucuucagagagcccaccgaccugaagcaguucaagcaggacgccaaguacagccacggcaucgacgugaccgaccuguucgccgcccagcccggccugaccagcgccgugaucgacgcccugcccagaaacauggugaucaccugccagggcagcgacgacaucagaaagcuguucgagagccagggcagaaaggacaucaagcugaucgacaucgcccugagcaagaccgacagcagaaaguacgagaacgccgugugggaccaguacaaggaccugugccacaugcacaccggcaucgugguggagaagaagaagagaggcggcaaggaggagaucaccccccacugcgcccugauggacugcaucauguucgacgccgccgugagcggcggccugaacaccagcgugcugagagccgugcugcccagagacaugguguucagaaccagcacccccagaguggugcugugaggacuagucccuguucccagagcccacuuuuuuuucuuuuuuugaaauaaaauagccugucuuucagaucucaaaggcucuuuucagagccaccaaaaaaaaaaaaaaaaaaaaaaaaaaaaaaaaaaaaaaaaaaaaaaaaaaaaaaaaaaaaaaaaagaauu

SEQ ID NO: 17118 - RNA, 1970 nt, Artificial Sequence
  mRNA product Design a-2 (hSL-A64-N5) comprising derived and/or modified sequence from LASV(Josiah;Clade IV)__NP_694869__NP (opt5)
aggagaguccgcucagccagguugcagaagcggcuuagcguguguccuaaucuucucucugcguguagguaggccugugccgcaaacaagcuuaccaugagcgccuccaaggagaucaaaucuuuccuguggacccagagccucagacgggaacuguccggcuacugcucuaacauuaagcugcaaguggucaaagacgcucaggcccugcuccacgggcuggauuuuagcgagguuuccaaugugcagcgccuuaugagaaaggaacggcgcgacgauaacgaccugaaaagacuccgggaucugaaucaggcggugaacaaucuggucgagcucaagucuacacaacaaaagagcauccugcgcgugggaacgcuuaccuccgacgaucugcucauucuggcugccgaccuugaaaaacuuaagagcaaaguuaucagaacagagcggccccucucugccggcguguauauggggaaccuguccagccagcagcuggaucagcgcagagcucuccugaauaugauuggaaugucuggcgggaaccagggagcccgggcuggccgcgacggcgucgugagaguuugggaugugaagaaugccgagcuucugaacaaucaguucgggaccaugccuucccucacacuggcgugucuuaccaaacagggacaagucgaccugaacgaugccgugcaggcucucacagaccugggccugaucuacaccgccaaguauccgaauacgagcgaccucgaucggcugacccagucucaucccauccuuaacaugauugacacaaagaaauccagccugaauaucuccggguacaacuuuucucucggagcugccgugaaggcgggcgccugcaugcuggaugggggaaacaugcuugaaaccauuaaagucagcccucaaacaauggacggcauccugaaguccauucucaaaguuaagaaagcucugggcauguucaucagcgauacccccggggagcgcaauccuuaugaaaacauucuguacaagaucugucucucuggagacggcuggcccuauaucgccuccagaacgagcauuacagggcgggcuugggagaauaccgugguggaucuggagucugacggaaagccucagaaagccgauagcaacaauuccucuaagagccuucaguccgccggcuuuacagcugggcugaccuacagccagcucaugacccugaaagacgcgaugcugcaacuugauccgaacgccaagacauggauggacaucgaaggaagacccgaggacccugucgaaauugcucucuaccagcccucuuccggcugcuauauccacuucuuucgcgagccuacggaucugaaacaguucaagcaggacgccaaguacagccauggcauugaugugaccgaccuguuugccacacaacccgggcucaccucugcuguuaucgaugcccugccgcggaauauggugaucacaugucagggauccgacgauauuagaaaacuucuggaaagccagggccgcaaggacaucaaacucauugauaucgcgcuguccaagaccgacucucggaaauaugagaacgcugucugggaucaguacaaggaccugugccacaugcauacgggggugguuguggagaagaaaaagagaggaggcaaagaagagauuacaccucacugugcccuuauggauugcaucauguucgacgccgcugucagcgggggccucaauaccuccgugcugcgcgccguccugccccgggacaugguguuuagaaccucuacaccucgcguugugcucugaggacuagucccuguucccagagcccacuuuuuuuucuuuuuuugaaauaaaauagccugucuuucagaucucaaaggcucuuuucagagccaccaaaaaaaaaaaaaaaaaaaaaaaaaaaaaaaaaaaaaaaaaaaaaaaaaaaaaaaaaaaaaaaaagaauu

SEQ ID NO: 17119 - RNA, 1970 nt, Artificial Sequence
  mRNA product Design a-2 (hSL-A64-N5) comprising derived and/or modified sequence from LASV(LP;Clade I)__AAF86702__NP (opt5)
aggagaguccgcucagccagguugcagaagcggcuuagcguguguccuaaucuucucucugcguguagguaggccugugccgcaaacaagcuuaccaugagcaacuccaaggagaucaaaucuuuccuguggacccagagccucagacgggaacuguccggcuacugcucuaauauuaagcuccaaguggucaaagacgcccaggcucugcuccacgggcuggauuuuagcgagguuuccaacgugcagcgccuuaugagaaagcagaaacgggacgaugccgaccugaagcgccucagagaucugaaucaagcggugaacaaucuggucgaacucaagucuacacagcagaaaaacgugcugcggguuggaacgcuuagcuccgacgaucugaucacccucgcugccgaccuggagaaacuuaaaagcaaggugauucgcacagaaagaccccugucuuccggcgucuauauggggaaucucagcucucagcaacuggaucagcggcgcgcccugcucuccaugaucggaaugagcggcgggccucagggaaacagaaccggcggcgacggggugguucgggugugggaugucaaaaaugcugagcugcuuaacaaucaguucggaacaaugccgucucugacccucgccugucugacaaagcaaggccagguggaccuuaacgaugcugugcaggcccugaccgaccucgggcugauuuacacggcgaaguaucccaauuccagcgaccuggauaugcucacccaaucccauccuauccugggaauggucgacacaaagaagucuagccuuaacaucuccggcuacaauuuuagccugggggccgcuguuaaagccggagcuugcaugcucgauggcggcaacaugcuggagaccauuaaggugucuccccagacaauggacgggauccuuaaauccauucugaaggugaaacgcagccucggaauguucaucucugauaccccuggcgaaagaaaccccuaugagaauauucuguacaagaucugucugagcggggaaggauggccuuauauugccucccggacgucuaucacaggccgcgcgugggagaacacccucgucgaccuggagagcgauaauaagccgcccaaacuuaacuccgccgggagcaauaagucucugcaggcugccggacucaacgcuggccugacauacucccagcugaugacccuuaaagacugcaugcuccaacuggauccuagcucuaagaccuggaucgacauugaaggcagacccgaggauccuguggaaaucgcccuguuucagcccuccagcggguguuacauucacuucuuucgggagccgacagaccucaaacaguucaagcaggacgccaaguauucccauggaaucgauguuacggaccuguuuucuacccaaccuggccuuacaagcgcugugauugaagcgcugcccagaaauaugguccuuaccugccagggguccgaugacaucaaaaagcugcuggagucucagggacgccgggauaucaaacuuauugacaucagccucuccaaggccgauagcagaaaauucgagaacgcugugugggaccaguacaaggaucugugucacaugcauacaggcguuguggucgaaaagaaaaagcgcgggggcaaagaggaaauuaccccucacugcgcccugcucgacuguaucauguuugaugccgcuacgacaggaucucugaauauuaccacccuucgggccgugcugcccagagacauggucuuccgcacauccacccccaaggugguucucugaggacuagucccuguucccagagcccacuuuuuuuucuuuuuuugaaauaaaauagccugucuuucagaucucaaaggcucuuuucagagccaccaaaaaaaaaaaaaaaaaaaaaaaaaaaaaaaaaaaaaaaaaaaaaaaaaaaaaaaaaaaaaaaaagaauu

SEQ ID NO: 17120 - RNA, 1970 nt, Artificial Sequence
  mRNA product Design a-2 (hSL-A64-N5) comprising derived and/or modified sequence from LASV(803213;Clade II)__AAF86704__NP (opt5)
aggagaguccgcucagccagguugcagaagcggcuuagcguguguccuaaucuucucucugcguguagguaggccugugccgcaaacaagcuuaccaugagcgccuccaaggaggugaaaucuuuccuguggacccagagccucagacgggaacuguccggcuacugcucuaacaucaaacuucaagucguuaaggacgcucaggcccugcuccacgggcuggauuuuagcgaggugaauaacgugcagcgccuuaugagaaagcagaaacgggacgauggagaccugaagcgccucagagaucugaaucaagcggucaacaaucugguggaacucaaguccacacagcagaaaucuauucugcggguuggcacgcuuaccagcgacgaucugcucacacuggcugccgaccuugagaagcugaaauccaaggugauccgcaccgaaagaccccucagcucuggggucuauaugggaaaccuguccacacagcaacuggagcagcggcgcgcccuccugaauaugauuggcauggugggaggagcucagggcacccagccuggcagagaugggguugugcgggucugggacgugaaaaacccggaucuucugaauaaccaauucggaacaaugcccagccucacccuggccugucuuacgaagcagggccagguggaccugaaugaugcuguccucgcccugaccgaccuggggcucaucuacacagcgaaguauccuaacucuuccgaccuggaucgccuuagccaaucucaucccauucugaauaugguugacaccaaaaaguccagccucaacaucuccggauacaauuuuucucugggcgccgcugugaaagccggggcuugcaugcuugauggaggcaacaugcuggagacaaucaaggugaccccucagacgauggacggcauucucaaaagcauccugaaggucaaaagaucccuggggauguucgugagcgauacacccggagaacggaacccuuaugagaauauucucuacaagaucugucugucuggcgacggguggccguauauugccucccgcaccagcaucguugggagagcgugggaaaacacaaccguggaucuugagucugacggcaagccccagaaagucgggaccgccggaagcaauaagucccugcagucugcuggcuuuccuacaggccucacguacagccaacugaugacccugaaagauuccaugaugcagcuugaccccagcgccaagacauggauugauaucgaggggcggccugaagaccccguggagaucgcucucuaccagccgaugucuggaugcuauauucacuucuuuagagaaccuaccgaccugaaacaguucaagcaagaugccaaguacucccauggcaucgacguugccgaucuguuucccgcucagccugggcucacaagcgcggugauugaggcccugccccgcaacaugguccuuaccugucagggaucugacgauaucaaaaagcugcucgacucccagggccggagagauauuaaacugaucgacaucagccuguccaagguggauucucgcaaauucgaaaaugcugucugggaccaaugcaaggaucuuugucacaugcauacgggggugguuguggagaagaaaaagcggggcggaaaagaggaaauuacaccccacugcgcccucauggacuguaucauguuugaugccgcugucagcggcgggcugaacauuccugugcugagagccguucucccgcgcgacaugguguuccggaccuccucucccaaggucgugcugugaggacuagucccuguucccagagcccacuuuuuuuucuuuuuuugaaauaaaauagccugucuuucagaucucaaaggcucuuuucagagccaccaaaaaaaaaaaaaaaaaaaaaaaaaaaaaaaaaaaaaaaaaaaaaaaaaaaaaaaaaaaaaaaaagaauu

SEQ ID NO: 17121 - RNA, 1973 nt, Artificial Sequence
  mRNA product Design a-2 (hSL-A64-N5) comprising derived and/or modified sequence from LASV(GA391;Clade III)__CAA36646__NP (opt5)
aggagaguccgcucagccagguugcagaagcggcuuagcguguguccuaaucuucucucugcguguagguaggccugugccgcaaacaagcuuaccaugagcgccuccaaggaggugagaucuuuccuguggacccagagccuccggcgcgaacuguccggcuacugcucuaacaucaaacuucaagucguuaaggacgcucaggcccugcuccacgggcuggauuuuagcgagguguccaaugugcagagacuuaugcggaaacagaagcgcgacgauggagaccugaaaagacuccgggaucugaaccaagcggucaauaaccugguggaacucaagucuacacagcagaaaagcguucugcgcgugggcacgcuuuccagcgacgaucugcucauucuggcugccgaccuugagaaacugaagucuaaagucaccagaacagaacggccccucuccagcgggguguauaugggaaaucugucuucccagcaacuggaucagcgcagagcccuccugaacaugaucggcaugaccgggguuagcggaggcggcaagggggcuucugacggaauugugcgggucugggaugugaaaaaugccgagcuucugaacaaucaguucggcacaaugccuucccucacccuggcuugucuuacaaagcaggggcaaguggaccugaacgaugccguccaggcgcucaccgaccugggacugaucuacacggccaaguauccgaauagcuccgaccucgaucgccugucucagagccaucccauucuuaacaugaucgacaccaaaaaguccagccugaauaucucuggcuacaacuuuucccucggggcugccguuaaagcuggagccugcaugcuggauggcggcaauaugcuugagacaauuaaggugagcccucaaaccauggacgggauccugaaaucuauucucaaggugaaaaagagccugggaauguucgucuccgauacacccggcgaaagaaacccuuaugagaacauccuguacaagauuugucucucuggggacggauggcccuauaucgcgagccggaccuccauugugggccgcgccugggaaaauacgguuguggaucuggagcaggacaacaaaccucagaagaucgggaauggaggcagcaacaaaucucuucaguccgcuggcuuugccgcugggcugacauacagccaacucaugacccugaaggauuucaaaugcuuuaaucugaucccgaacgccaagacauggauggacauugagggaagacccgaagauccugucgagaucgcccuuuaccagcccucuuccggcuguuaugugcacuucuuucgggaaccuaccgaccucaagcaguucaaacaggacgcuaaguacagccaugggauugauguuaccgaccuguuugcggcccaacccggacugacauccgcugugaucgaggcccucccgagaaauauggucauuacgugccagggcucugaagauauccgcaaacugcuugagagccaggggcggagagacaucaagcugauugauaucacccucuccaaagccgacucucgcaaguucgagaacgcugugugggaucaguuuaaggaccugugucacaugcauacaggcgucgugguugaaaagaagaaacggggaggcaaggaggaaauuaccccucacugcgcccugauggauuguaucauguucgacgcggcugugagcgggggacuugaugccaaaguccucagagugguucugccccgcgacaugguguuccggacauccaccccuaaggucgugcugugaggacuagucccuguucccagagcccacuuuuuuuucuuuuuuugaaauaaaauagccugucuuucagaucucaaaggcucuuuucagagccaccaaaaaaaaaaaaaaaaaaaaaaaaaaaaaaaaaaaaaaaaaaaaaaaaaaaaaaaaaaaaaaaaagaauu

SEQ ID NO: 17122 - RNA, 1970 nt, Artificial Sequence
  mRNA product Design a-2 (hSL-A64-N5) comprising derived and/or modified sequence from LASV(AV;Clade V)__CCA30315__NP (opt5)
aggagaguccgcucagccagguugcagaagcggcuuagcguguguccuaaucuucucucugcguguagguaggccugugccgcaaacaagcuuaccaugagcgccuccaaggaggugaaaucuuuccuguggacccagagccucagacgggaacuguccggcuacugcucuaacaucaaacuucaagucguuaaggacgcucaggcccugcuccacgggcuggauuuuagcgagguguccaaugugcagcgccuuaugagaaagcagcggcgcgacgauucugaccugaaaagacuccgggaucugaaccaagcggucaauaaccugguggaacucaagagcacacagcagaaguccguucugcgcgugggaacgcuuagcucugacgaucugcucacccuggcugccgaccuugagaaacugaaguccaaagucacaagaaccgaacggccccucagcucuggcguguauauggggaaucuguccagccagcaacuggaucagcgcagagcccuccugaaccuuauuggaaugacaaauggcucucaggggucccaggcuggacgggacggcguugugcgcgucugggaugugaagaacgccgagcugcucaauaaccaauucggcaccaugccuagccugacacuugcuugucugaccaaacagggacagguggaccucaaugaugucguucaagcccugacggaccuggggcucaucuacaccgcgaaguauccgaacacauccgaccuggauagacuuacccagucucaucccauucugaauaugaucgacacaaagaaaagcucccucaacauuagcggcuacaauuuuucucugggggccgcugugaaggccggagcuugcaugcuugauggcgggaacaugcuggagaccaucaaaguguccccucagagcauggacggaauccucaagucuauucugaaagucaagcgggcccugggcauguucgugagcgauacgcccggcgaacgcaacccuuaugagaauauccucuacaaaauuugucuguccggggacggauggcccuauaucgcgucuagaacaagcauuguuggccgggccugggaaaacaccguggucgaucuugagacagacgggaagccucagaagaucggauccggcaauagcaacaaaucucugcaauccgcuggguuuagcgccggacucaccuacucucagcugaugacccugaaggaugcuaugcuucagcucgacccgaaugccaaaacauggauggauauugagggcagacccgaagacccuguggagguugcccuguaccagcccaucuccggcugcuauauccacuucuuucgcgaaccuacggaccugaagcaauucaaacaggaugcuaaguacagccaugggauugacaucgcggaucucuuugccgcucagcccggacugaccuccgccgugauugaggcccuuccgcggaacauggucaucacaugucagggcucugaagacauuaagaaacugcucgagagccaagggagaaaggauaucaaacugaucgacauugcucuguccaagaucgauucucgcaaauucgagaaugccgugugggaccaguauaaggaucuuugccacaugcauaccggagucgugguugaaaagaaaaagcggggcgggaaagaggaaauuacaccucacugugcgcucauggacugcaucauguuugaugcugccgugagcggcggacugaacacccugguccucagagccgugcugccccgcgacaugguuuuccggacguccacaccuagagugguccuuugaggacuagucccuguucccagagcccacuuuuuuuucuuuuuuugaaauaaaauagccugucuuucagaucucaaaggcucuuuucagagccaccaaaaaaaaaaaaaaaaaaaaaaaaaaaaaaaaaaaaaaaaaaaaaaaaaaaaaaaaaaaaaaaaagaauu

SEQ ID NO: 17123 - RNA, 1970 nt, Artificial Sequence
  mRNA product Design a-2 (hSL-A64-N5) comprising derived and/or modified sequence from LASV(Togo/2016/7082;Clade VI)__AMR44578__NP (opt5)
aggagaguccgcucagccagguugcagaagcggcuuagcguguguccuaaucuucucucugcguguagguaggccugugccgcaaacaagcuuaccaugagcaacuccaaggaggugaaaucuuuccuguggacccagagccucagacgggaacuguccggcuacugcucuaauaucaaacuucaagucguuaaagacgcccaggcucugcuccacgggcuggauuuuagcgagguguccaacgugcagcgccuuaugagaaagcagaaacgggacgauggagaccugaagcgccucagagaucugaaucaagccgucaacaaucugguggaacucaagucuguucagcagaaaagcauucugcgggugggcacacuuacguccgacgaucugcucacccuggcggcugaccuugagaagcugaaaagcaaggucacacgcaccgaaagaccccucucuuccgggguguauaugggaaaccugagcucucagcaacuggaucagcggcgcgcccuccuguccaugaucggcaugagcgggggaaaucagaacucucagccuaaaggcgacggcguugugagagucugggaugugaagaaugccgaccuucugaacaaucaauucgggacaaugccgucccucacccuggcuugucuuacaaagcagggacagguggaucugaacgacgccguccaagcucucaccgaccugggccugauuuacacggccaaauaucccaauagcuccgaucucgaccggcugucucagagccauccuauccuuaacaugauugauaccaagaaauccagccugaauaucucuggguacaacuuuucccucggagcggccaucaagacaggcgcuugcaugcuggacgggggaaacaugcuugagaccauuaaaguuacaccccagaccauggauggcauccucaagagcauucugaaagugaagcgcucucugggcauguucaucagcgacacgccuggggagagaaaucccuaugaaaacauucuguacaagaucugucucuccggagauggcuggccuuauauugccucucggacagcuaucaucgggcgcgccugggagaauaccguggucgaccuggaaagcgauuccaaaccgcagaagauuggaagcaacggcucuaauaaaucccuucaaagcgcgggguuugcccccggacugacauacucucagcucaugacccugaaggacuccaugcugcagcuugauccuaacgcuaaaaccuggaucgacauugagggcagacccgaggacccuguggaaguugcccucuuccagcccaucagcggcugcuacauucacuuuuuccgggagccgacagaucugaagcaauuuaagcaggacgcuaaauauucccaugggaucgaugugacggaccuguucgccgcccagccuggacucaccucugcugucaucgaagcgcugcccagaaauauggugcuuacaugucagggcagcgaugacauuaagaaacugcucgauucccaagggcgccgggacaucaagcugauugauguuucucugaacaaaaucgacagcagaaaguuugagaaugccgugugggaucaguacaaggaccuuugccacaugcauaccggagucguggucgaaaagaagaaaaagggcgggaaagaggagauuacaccucacugugcucuccuggauugcaucauguucgacgccgccguguccggcggacugaacgcuaccguucuccgcgccgugcugccccgggacauggucuuuagaacgagcucucccaaggugguucuuugaggacuagucccuguucccagagcccacuuuuuuuucuuuuuuugaaauaaaauagccugucuuucagaucucaaaggcucuuuucagagccaccaaaaaaaaaaaaaaaaaaaaaaaaaaaaaaaaaaaaaaaaaaaaaaaaaaaaaaaaaaaaaaaaagaauu

SEQ ID NO: 17124 - RNA, 1970 nt, Artificial Sequence
  mRNA product Design a-2 (hSL-A64-N5) comprising derived and/or modified sequence from LASV(KAK-428;Clade n.d. (VII))__ANH09741__NP (opt5)
aggagaguccgcucagccagguugcagaagcggcuuagcguguguccuaaucuucucucugcguguagguaggccugugccgcaaacaagcuuaccaugagcaacuccaaggaggugaaaucuuuccuguggacccagagccucagacgggaacuguccggcuacugcacaaauaucaaacuucaagucguuaaggacgcccaggcucugcuccacgggcuggauuuuucugaggugagcaacgugcagcgccuuaugagaaagcagaaacgggacgauaaugaccugaagcgccucagagaucugaaccaagccgucaauaaccugguggaacucaaguccguucagcagaaaucugugcugaaggucggaacgcuuaauagcgacgaucugcucacccuggcggcugaccuugagaaacugaaguccaaagugguucggacagaacgcccccucagcucuggcguguauauggggaaccuguccagccagcaacuggaucagagacgggcccuccugaauaugauuggaauggccggcgggucucagggaaaccagccuucccgcgacggcgucgugagagugugggaugucaagaaugcugaccuucugaacaaucaauucggcaccaugccgagccucacacuggccugucuuaccaagcaggggcagguugaucugaacgacguggugcucgcucugacagaccugggacucaucuacaccgccaaauaucccaauucuuccgaucuggaccggcuuagccaaaaccauccuguccugaacaugauugaugugaauaaguccucucucaacaucagcggcuacaauuuuucccugggggcggccguuaaagcuggagccugcaugcuugacggcgggaacaugcuggagacgauuaagaucagcccccagaccguggauggaauccucaaaucuauucugaaggucaaacgcgcucugggcauguucguguccgacacaccuggcgagagaaaucccuaugaaaacauccucuacaagguuugucugagcgggaauggauggccuuauauugccucucggaccagcaucgugggccgcgcgugggagaacacagucguggaucuugaauccaauaagaaccagccgaaagucgggaauaacggaucuaauaagaugcugcagagcuccggcuuugccaccgggcucacguacagccaacugaugacacugagagacucuaugcuucagcucgaucccaccgcuaaaacauggauugacaucgagggacggccugaggaucccguggaacuggcccuguuccagccuuccagcggcugcuacauucacuuuuucagagagcccaccgaccucaagcaguuuaaacaagacgcuaaguauucucauggcaucgauguuaacgaccuguucuccgcccagccggggcuuaccagcgccgugcuggaagcucucccucgcaauaugguccugacaugucagggauccgaugacauccggaagcugcuugauucucaggacagaaaagauauuaagcucaucgacauuagccuguccaaagcggaugcccgcaaguuugagaacgacgugugggaucaauucaaagaccugugccacaugcauacgggcaucguuguggaaaagaagaaaaagggagggaaacaggagaugacaccccacugugcucuccuggauugcauuauguuugacgccgccgucucuggcgggcuuaacgugccuacccugcgggcugugcuccccaccgacaugguuuucagaacaaucaccacgaaggucgugcugugaggacuagucccuguucccagagcccacuuuuuuuucuuuuuuugaaauaaaauagccugucuuucagaucucaaaggcucuuuucagagccaccaaaaaaaaaaaaaaaaaaaaaaaaaaaaaaaaaaaaaaaaaaaaaaaaaaaaaaaaaaaaaaaaagaauu

SEQ ID NO: 17125 - RNA, 1970 nt, Artificial Sequence; identical to SEQ ID NO: 17119
  mRNA product Design a-2 (hSL-A64-N5) comprising derived and/or modified sequence from LASV(Pinneo-NIG-1969;Clade I)__AIT17837__NP (opt5)

SEQ ID NO: 17126 - RNA, 1970 nt, Artificial Sequence
  mRNA product Design a-2 (hSL-A64-N5) comprising derived and/or modified sequence from LASV(ISTH0009-NIG-2011;Clade II)__AIT17405__NP (opt5)
aggagaguccgcucagccagguugcagaagcggcuuagcguguguccuaaucuucucucugcguguagguaggccugugccgcaaacaagcuuaccaugagcguguccaaggaggucaaaucuuuccuguggacccagagccucagacgggaacuguccggcuacugcucuaacaucaaacuucaaguugugaaggacgcccaggcucugcuccacgggcuggauuuuagcgagguguccaauguccagcgccuuaugagaaagcagaaacgggacgauucugaccugaagcgccucagagaucugaaccaagccgugaauaaccugguugaacucaagagcacacagcagaaauccauucugcgggugggaacgcuuaccagcgacgaucugcucacacuggcggcugaccuugagaagcugaaaucuaaggucauccgcaccgaaagaccccucuccagcggcguguauauggggaaucugucuacacagcaacuggagcagcggcgcgcccuccugaacaugauuggaaugguuggcggggcccagggaacccagccuggcagagauggcgugguccgggugugggacgugaaaaauccggaucuucugaacaaucaauucgggacaaugcccucccucacccuggcuugucuuacgaagcagggacaggucgaccugaacgaugccguucucgcucugaccgaccugggccucaucuacacagccaaguauccuaauagcucugaccuggaucgccuuucccaaagccaucccauucugaacaugguggacaucaaaaaguccucucucaauaucagcggguacaacuuuucccugggagcggccgugaaagcuggcgccugcaugcuugaugggggaaauaugcuggagaccauuaaggucacaccucagaccauggacggcauccucaaaagcauucugaaggugaaaagaucucugggcauguucguuuccgauacgcccggggaacggaacccuuaugagaacauccucuacaagauuugucugagcggagacggcuggccguauaucgcuucucgcacaagcauuguggggagagccugggaaaauaccacagucgaucuugaguccgacggaaagccccagaaagugggcucugcggggagcaacaagucccugcagagcgccggauuuccuaccggccucaccuacucucaacugaugacacugaaagauuccaugaugcagcuugaccccagcgcuaagacguggaucgauaucgagggccggccugaagaccccguugagauugcccucuaccagccgaugucugggugcuauauccacuucuuuagagaaccuaccgaccugaaacaguucaagcaagaugcuaaguacucccauggaauugacguggccgaucuguuucccgcccagccuggccucacaagcgcugucaucgaggcgcugccccgcaauauggugcuuaccugucagggguccgacgauauuaaacggcugcucgacucucagggaagacgcgauaucaagcugaucgacauugcccugagcaaagcugauucccggagauucgaaaacgccgucugggaccaaugcaaggaucuuugucacaugcauacaggcgugguuguggagaaaaagaagcgcgggggcaaagaggaaaucacgccccacugcgcccucauggacuguauuauguaugaugcugccgucucuggaggccugaauaucccugugcugcgggcgguucucccgagagacaugguguuucgcaccagcucccccaaggucgugcugugaggacuagucccuguucccagagcccacuuuuuuuucuuuuuuugaaauaaaauagccugucuuucagaucucaaaggcucuuuucagagccaccaaaaaaaaaaaaaaaaaaaaaaaaaaaaaaaaaaaaaaaaaaaaaaaaaaaaaaaaaaaaaaaaagaauu

SEQ ID NO: 17127 - RNA, 1970 nt, Artificial Sequence
  mRNA product Design a-2 (hSL-A64-N5) comprising derived and/or modified sequence from LASV(ISTH2010-NIG-2012;Clade II)__AIT17483__NP (opt5)
aggagaguccgcucagccagguugcagaagcggcuuagcguguguccuaaucuucucucugcguguagguaggccugugccgcaaacaagcuuaccaugagcgccuccaaggaggugaaaucuuuccuguggacccagagccucagacgggaacuguccggcuacugcucuaacaucaaacuucaagucguuaaggacgcucaggcccugcuccacgggcuggauuuuagcgagguguccaaugugcagcgccuuaugagaaagcagaaacgggacgauucugaccugaagcgccucagagaucugaaccaagcggucaauaaccugguggaacucaagagcacacagcagaaauccauucugcggguuggaacgcuuaccagcgacgaucugcucacacuggcugccgaccuugagaagcugaaaucuaaggugauccgcaccgaaagaccccucuccagcggcgucuauauggggaaucugucuacacagcaacuggagcagcggcgcgcccuccugaaccuuauuggaauggugggcggggcucagggaacccagccuggcagagauggcguugugcgggucugggacgugaaaaauccggaucugcucaacaaucaauucgggacaaugcccucccugacccuugccugucugacgaagcagggacagguggaccucaacgaugcuguccuggcccugaccgaccucggccugaucuacacagcgaaguauccuaauagcucugaccuugaucgccugucccaaagccaucccauucucaacaugguugacaccaaaaaguccucucugaauaucagcggguuuaacuucucccuuggagccgcugugaaagccggcgcuugcaugcuggaugggggaaauaugcucgagacaaucaaggugaccccucagacgauggacggcauucugaaaagcauccugaaggucaaaaagucucucggcauguuuguguccgauacacccggggaaagaaacccuuacgagaacauucuguauaagaucugucuuagcggagacggcuggccguacauugccucucggaccagcaucguugggcgcgcgugggaaaauacaaccguggaucuggaguccgacggaaaaccccacaaggucggcaccgccgggucuaacaaaagccuccaguccgcuggauucccuacaggccugacguauagccagcugaugacccuuaaggauucuaugaugcaacucgaccccuccgccaaaacauggauugauaucgagggcagaccugaagaccccguggagaucgcucuguaccagccgaugagcgggugcuacauucacuuuuuccgggaaccuaccgaccugaagcaguuuaagcaggaugccaaauauucucauggaaucgacguugccgaucucuuccccgcucaaccuggccugacauccgcggugauugaggcccuucccagaaauaugguccugaccugucaggggagcgacgauaucaagcgccuccuggacucccagggacggagagauauuaaacugaucgacaucgcucuuucuaaggccgauagccgccgguuugaaaacgccgugugggaccagugcaaagaucucugucauaugcacacgggcgucgugguugagaagaagaaaagagggggcaaggaggaaauuacaccccacugcgcucugauggacuguaucauguacgaugccgcgguguccggaggccugaauauuccuguccuccgcgcugugcugccgcgggacaugguuuucagaaccucuagccccaaagugguccuuugaggacuagucccuguucccagagcccacuuuuuuuucuuuuuuugaaauaaaauagccugucuuucagaucucaaaggcucuuuucagagccaccaaaaaaaaaaaaaaaaaaaaaaaaaaaaaaaaaaaaaaaaaaaaaaaaaaaaaaaaaaaaaaaaagaauu

SEQ ID NO: 17128 - RNA, 1970 nt, Artificial Sequence
  mRNA product Design a-2 (hSL-A64-N5) comprising derived and/or modified sequence from LASV(Lassa virus/H.sapiens-wt/NGA/2015/ISTH_0543;Clade II)__AVO03640__NP (opt5)
aggagaguccgcucagccagguugcagaagcggcuuagcguguguccuaaucuucucucugcguguagguaggccugugccgcaaacaagcuuaccaugagcgccuccaaggaggugaaaucuuuccuguggacccagagccucagacgggaacuguccggcuacugcucuaacaucaaacuucaagucguuaaggacgcucaggcccugcuccacgggcuggauuuuagcgagguguccaaugugcagcgccuuaugagaaagcagaaacgggacgauucugaccugaagcgccucagagaucugaaccaagcggucaauaaccugguggaacucaagagcacacagcagaaauccauucugcggguuggaacgcuuaccagcgacgaucugcucacacuggcugccgaccuugagaagcugaaaucuaaggugauccgcaccgaaagaccccucuccagcggcgucuauauggggaaucugucuacacagcaacuggagcagcggcgcgcccuccugaacaugauuggaauggugggcggggcucagggaacccagccuggcagagauggcguugugcgggucugggacgugaaaaauccggaucuucugaacaaucaauucgggacaaugcccucccucacccuggccugucuuacgaagcagggacagguggaccugaacgaugcuguccucgcccugaccgaccugggccucaucuacacagcgaaguauccuaauagcucugaccuggaucgccuuucccaaagccaucccauucugaacaugguugacaccaaaaaguccucucucaauaucagcggguacaacuuuucccugggagccgcugugaaagccggcgcuugcaugcuugaugggggaaauaugcuggagacaaucaaggugaccccucagacgauggacggcauucucaaaagcauccugaaggucaaaaagucucugggcauguucguguccgauacacccggggaaagaaacccuuaugagaacauucucuacaagaucugucugagcggagacggcuggccguauauugccucucggaccagcaucguugggcgcgcgugggaaaauacaaccguggaucuugaguccgacggaaaaccccagaaggucggcucugccgggagcaacaaaucccugcagagcgcuggauuuccuaccggccucacauacucucaacugaugacgcugaaggauuccaugaugcagcuugaccccagcgccaaaaccuggauugauaucgagggcagaccugaagaccccguggagaucgcucucuaccagccgaugucugggugcuauauucacuucuuucgggaaccuacagaccugaagcaguucaagcaagaugccaaauacucccauggaaucgacguugccgaucuguuucccgcucagccuggccucaccagcgcggugauugaggcccugcccagaaauaugguccuuacaugucagggguccgacgauaucaagcgccugcucgacucucagggacggaaagauauuaagcugaucgacaucgcucugagcaaagccgauuccagacgcuucgaaaacgccgugugggaccaaugcaaggaucuuugucacaugcauaccggcgucgugguugagaagaaaaagagagggggcaaagaggaaauuacgccccacugcgcucucauggacuguaucauguaugaugccgcggugucuggaggccugaauauuccuguccugcgggcugugcucccgcgcgacaugguuuuucggacaagcucccccaaggugguccugugaggacuagucccuguucccagagcccacuuuuuuuucuuuuuuugaaauaaaauagccugucuuucagaucucaaaggcucuuuucagagccaccaaaaaaaaaaaaaaaaaaaaaaaaaaaaaaaaaaaaaaaaaaaaaaaaaaaaaaaaaaaaaaaaagaauu

SEQ ID NO: 17129 - RNA, 1970 nt, Artificial Sequence
  mRNA product Design a-2 (hSL-A64-N5) comprising derived and/or modified sequence from LASV(Lassa virus/H.sapiens-wt/NGA/2016/ISTH_0009;Clade II)__AVO03572__NP (opt5)
aggagaguccgcucagccagguugcagaagcggcuuagcguguguccuaaucuucucucugcguguagguaggccugugccgcaaacaagcuuaccaugagcgccuccaaggaggugaaaucuuuccuguggacccagagccucagacgggaacuguccggcuacugcucuaacaucaaacuucaagucguuaaggacgcucaggcccugcuccacgggcuggauuuuagcgagguguccaaugugcagcgccuuaugagaaagcagaaacgggacgauucugaccugaagcgccucagagaucugaaccaagcggucaauaaccugguggaacucaagagcacacagcagaaauccauucugcggguuggaacgcuuaccagcgacgaucugcucacacuggcugccgaccuugagaagcugaaaucuaaggugauccgcaccgaaagaccccucuccagcggcgucuauauggggaaucugucuacacagcaacuggagcagcggcgcgcccuccugaacaugauuggaauggugggcggggcucagggaacccagccuggcagagauggcguugugcgggucugggacgugaaaaauccggaucuucugaacaaucaauucgggacaaugcccucccucacccuggccugucuuacgaagcagggacagguggaccugaacgaugcuguccucgcccugaccgaccugggccucaucuacacagcgaaguauccuaauagcucugaccuggaucgccuuucccaaagccaucccauucugaacaugguugacaccaaaaaguccucucucaauaucagcggguacaacuuuucccugggagccgcugugaaagccggcgcuugcaugcuugaugggggaaauaugcuggagacaaucaaggugaccccucagacgauggacggcauucucaaaagcauccugaaggucaaaaagucucugggcauguucguguccgauacacccggggaaagaaacccuuaugagaacauucucuacaagaucugucugagcggagacggcuggccguauauugccucucggaccagcaucguugggcgcgcgugggaaaauacaaccguggaucuugaguccgacggaaaaccccagaaggucggcucugccgggagcaacaaaucccugcagagcgcuggauuuccuaccggccucacauacucucaacugaugacgcugaaggauuccaugaugcagcuugaccccagcgccaaaaccuggauugauaucgagggcagaccugaagaccccguggagaucgcucucuaccagccgaugucugggugcuauauucacuucuuucgggaaccuacagaccugaagcaguucaagcaagaugccaaauacucccauggaaucgacguugccgaucuguuucccgcucagccuggccucaccagcgcggugauugaggcccugcccagaaauaugguccuuacaugucagggguccgacgauaucaagcgccugcucgacucucagggacggagagauauuaaacugaucgacaucgcucugagcaaggccgauucccgccgguucgaaaacgccgugugggaccaaugcaaagaucuuugucacaugcauaccggcgucgugguugagaagaagaaaagagggggcaaggaggaaauuacgccccacugcgcucucauggacuguaucauguaugaugccgcggugucuggaggccugaauauuccuguccugcgcgcugugcucccgcgggacaugguuuuuagaacaagcucccccaaagugguccugugaggacuagucccuguucccagagcccacuuuuuuuucuuuuuuugaaauaaaauagccugucuuucagaucucaaaggcucuuuucagagccaccaaaaaaaaaaaaaaaaaaaaaaaaaaaaaaaaaaaaaaaaaaaaaaaaaaaaaaaaaaaaaaaaagaauu

SEQ ID NO: 17130 - RNA, 1970 nt, Artificial Sequence
  mRNA product Design a-2 (hSL-A64-N5) comprising derived and/or modified sequence from LASV(Lassa virus/H.sapiens-wt/NGA/2016/ISTH_0017;Clade II)__AVO03568__NP (opt5)
aggagaguccgcucagccagguugcagaagcggcuuagcguguguccuaaucuucucucugcguguagguaggccugugccgcaaacaagcuuaccaugagcgccuccaaggaggugaaaucuuuccuguggacccagagccucagacgggaacuguccggcuacugcucuagcaucaaacuucaagucguuaaggacgcucaggcccugcuccacgggcuggauuuuuccgaggugucuaacgugcagcgccuuaugagaaagcagaaacgggacgauagcgaccugaagcgccucagagaucugaaucaagcggucaacaaucugguggaacucaaguccacacagcagaaaagcauucugcggguuggaacgcuuaccucugacgaucugcucacacuggcugccgaccuugagaagcugaaauccaaggugauccgcaccgaaagaccccucagcucuggcgucuauauggggaaccuguccacacagcaacuggagcagcggcgcgcccuccugaauaugauuggaauggcuggcggggcccagggaacccagccuggcagagauggcgugguucgggugugggacgucaaaaacccggaucuucugaauaaccaauucgggacaaugcccagccucacccuggcuugucuuacgaagcagggacagguggaccugaaugaugccgugcucgcgcugaccgaccugggccucaucuacacagccaaguauccuaacucuuccgaccuggaucgccuuagccaaucccaucccauucugaauauggucgacaccaaaaagucuagccucaacaucuccggguacaauuuuagccugggagcugccguuaaagcuggcgccugcaugcuugaugggggaaacaugcuggagacaaucaaggugaccccucagacgauggacggcauucucaaaucuauccugaaggugaaaagaucccugggcauguucgucagcgaugcgcccggggaacggaauccuuaugagaacauucucuacaagaucugucugucuggagacggcuggccguauauugccagccgcacauccaucguggggagagcuugggaaaacaccacaguugaucuugagucugacggaaagccccagaaagugggcgccaccgggagcaauaagucccugcagagcgcuggauuuccuaccggccucacauacucucaacugaugacgcugaaagauuccaugaugcagcuugaccccagcgccaagaccuggauugauaucgagggccggccugaagaccccgucgagguggcccucuaccagccgguuucugggugcuauauccacuucuuuagagaaccuacagaccugaaacaguucaagcaagaugcuaaguacucccauggaauugacguggcggaucuguuucccgcccagccuggccucaccagcgcugucaucgaggcccugccccgcaacauggugcuuacaugucagggguccgacgauauuaaaaagcugcucgacucucagggacggaaagauaucaagcugauugacaucgcccugagcaaagcugauuccagacgcuucgaaaaugccgucugggaccaaugcaaggaucuuugucacaugcauaccggcgugguuguggagaagaaaaagagagggggcaaagaggaaaucacgccccacugcgcgcucauggacuguauuauguaugaugcugccgucucuggaggccugaacaucccugugcugcgggccguucucccgcgcgacaugguguuucggacaagcucccccaaggucgugcugugaggacuagucccuguucccagagcccacuuuuuuuucuuuuuuugaaauaaaauagccugucuuucagaucucaaaggcucuuuucagagccaccaaaaaaaaaaaaaaaaaaaaaaaaaaaaaaaaaaaaaaaaaaaaaaaaaaaaaaaaaaaaaaaaagaauu

SEQ ID NO: 17131 - RNA, 1970 nt, Artificial Sequence
  mRNA product Design a-2 (hSL-A64-N5) comprising derived and/or modified sequence from LASV(Lassa virus/H.sapiens-wt/NGA/2018/ISTH_0959;Clade II)__AVV65100__NP (opt5)
aggagaguccgcucagccagguugcagaagcggcuuagcguguguccuaaucuucucucugcguguagguaggccugugccgcaaacaagcuuaccaugagcgccuccaaggaggugaaaucuuuccuguggacccagagccucagacgggaacuguccggcuacugcucuaacaucaaacuucaagucguuaaggacgcucaggcccugcuccacgggcuggauuuuagcgagguguccaaugugcagcgccuuaugagaaagcagaaacgggacgauucugaccugaagcgccucagagaucugaaccaagcggucaauaaccugguggaacucaagagcacccagcagaaauccauucugcggguuggaacgcuuaccagcgacgaucugcucacacuggcugccgaccuugagaagcugaaaucuaaggugauccgcaccgaaagaccccucuccagcggcgucuauauggggaaucugucuacacagcaacuggagcagcggcgcgcccuccugaaccuuauuggaauggugggcggggcucagggaacccagccuggcagagauggcguugugcgggucugggacgugaaaaauccggaucugcucaacaaucaauucgggacaaugcccucccugacccuugccugucugacgaagcagggacagguggaccucaacgaugucguucuggcucugaccgaccucggccugaucuacacagccaaguauccuaauagcucugaccuugaucgccugucccaaagccaucccauucucaacaugguggacaccaaaaaguccucucugaauaucagcggguuuaacuucucccuuggagcggccgugaaagcuggcgccugcaugcuggaugggggaaauaugcucgagacaaucaaggucaccccucagacgauggacggcauucugaaaagcauccugaaggugaaaaagucucucggcauguuuguuuccgauacacccggggaaagaaacccuuacgagaacauucuguauaagaucugucuuagcggagacggcuggccguacauugcuucucggaccagcaucguggggcgcgccugggaaaauacaaccgucgaucuggaguccgacggaaaaccccacaaggugggcaccgcggggucuaacaaaagccuccaguccgccggauucccuacaggccugacguauagccagcugaugacccuuaaggauucuaugaugcaacucgaccccuccgcuaaaacauggauugauaucgagggcagaccugaagaccccguugagaucgcccuguaccagccgaugagcgggugcuacauucacuuuuuccgggaaccuaccgaccugaagcaguuuaagcaggaugcuaaauauucucauggaaucgacguggccgaucucuuccccgcccaaccuggccugacauccgcugucauugaggcgcuucccagaaauauggugcugaccugucaggggagcgacgauaucaagcgccuccuggacucccagggacggaaagauauuaagcugaucgacaucgcccuuucuaaaacggauagcagacgcuuugaaaacgcugucugggaccagugcaaggaucucugucauaugcacacaggcgugguuguggagaagaaaaagagagggggcaaagaggaaauuacaccccacugcgcccugauggacuguaucauguacgaugccgcugucuccggaggccugaauauuccugugcuccgggccguucugccgcgcgacaugguguuccggaccucuagccccaaggucgugcuuugaggacuagucccuguucccagagcccacuuuuuuuucuuuuuuugaaauaaaauagccugucuuucagaucucaaaggcucuuuucagagccaccaaaaaaaaaaaaaaaaaaaaaaaaaaaaaaaaaaaaaaaaaaaaaaaaaaaaaaaaaaaaaaaaagaauu

SEQ ID NO: 17132 - RNA, 1970 nt, Artificial Sequence
  mRNA product Design a-2 (hSL-A64-N5) comprising derived and/or modified sequence from LASV(LASV003-NIG-2008;Clade II)__AIT17581__NP (opt5)
aggagaguccgcucagccagguugcagaagcggcuuagcguguguccuaaucuucucucugcguguagguaggccugugccgcaaacaagcuuaccaugagcgccuccaaggaggugaaaucuuuccuguggacccagagccucagacgggaacuguccggcuacugcucuagcaucaaacuucaagucguuaaggacgcucaggcccugcuccacgggcuggauuuuuccgaggugucuaacgugcagcgccuuaugagaaagcagaaacgggacgauagcgaccugaagcgccucagagaucugaaucaagcggucaacaaucugguggaacucaaguccacccagcagaaaagcguucugcgggugggaacgcuuaccucugacgaucugcucacacuggcugccgaccuugagaagcugaaauccaaggucauucgcaccgaaagaccccucagcucuggcguguauauggggaaccuguccgcccagcaacuggagcagcggcgcacacuccugaauaugaucggaaugguuggcggggcucagggaacccagccuggcagagauggcgugguccgggugugggacgugaaaaacccggaucuucugaauaaccaauucgggacaaugcccagccucacccuggccugucuuacgaagcagggacaggucgaccugaaugauguugugcucgcucugaccgaccugggccucauuuacacagccaaguauccuaacucuuccgaccuggaucgccuuagccaaucccaucccauccugucuaugguggacaccaaaaagagcucccucaauauuagcggguacaacuuuucucugggagcggccgucaaagcuggcgccugcaugcuugaugggggaaauaugcuggagacaaucaaggugaccccucagacgauggacggcauccucaaauccauucugaagguuaaaaagagccugggcauguucgugucugauacacccggggaaagaaacccuuaugagaauauccucuacaagauuugucugagcggagacggcuggccguauaucgcuucccggaccucuauugucgggcgcgccugggaaaacacaaccguggaucuugagagcgacggaaaaccccagaagguuggcaccgcgggguccaacaaaagccugcagucugccggauuuccuacaggccucacguacucccaacugaugacccugaaggauagcaugaugcagcuugaccccucugcuaaaacauggaucgauauugagggcagaccugaagaccccguggagaucgcccucuaccagccgauguccgggugcuauauccacuucuuucgggaaccuaccgaccugaagcaguucaagcaagaugcuaaauacagccauggaauugacgucacagaucuguuucccgcccagccuggccucaccuccgccgugaucgaggcucugcccagaaauaugguccuuacgugucaggggucugacgauauuaagcgccugcucgacagccagggacggagagauaucaaacugauugacaucgcgcuguccaaggccgauucucgccgguucgaaaacgcugugugggaccaaugcaaagaucuuugucacaugcauacaggcguuguggucgagaagaagaaaagagggggcaaggaggaaaucacaccccacugcgcccucauggacuguauuauguaugaugccgcugugagcggaggccugaauaucccuguucugcgcgccgugcucccgcgggacauggucuuuagaaccuccagccccaaaguggugcugugaggacuagucccuguucccagagcccacuuuuuuuucuuuuuuugaaauaaaauagccugucuuucagaucucaaaggcucuuuucagagccaccaaaaaaaaaaaaaaaaaaaaaaaaaaaaaaaaaaaaaaaaaaaaaaaaaaaaaaaaaaaaaaaaagaauu

SEQ ID NO: 17133 - RNA, 1970 nt, Artificial Sequence
  mRNA product Design a-2 (hSL-A64-N5) comprising derived and/or modified sequence from LASV(LASV035-NIG-2009;Clade II)__AIT17589__NP (opt5)
aggagaguccgcucagccagguugcagaagcggcuuagcguguguccuaaucuucucucugcguguagguaggccugugccgcaaacaagcuuaccaugagcgccuccaaggaggugaaaucuuuccuguggacccagagccucagacgggaacuguccggcuacugcucuagcaucaaacuucaagucguuaaagacgcucaggcccugcuccacgggcuggauuuuuccgaggugucuaacgugcagcgccuuaugagaaagcagaaacgggacgauagcgaccugaagcgccucagagaucugaaucaagcggucaacaaucugguggaacucaaguccacacagcagaaaagcauucugcggguuggaacgcuuaccucugacgaucugcucacacuggcugccgaccuugagaagcugaaauccaaggugauccgcaccgaaagaccccucagcucuggcgucuauauggggaaccuguccgcccagcaacuggagcagcggcgcgcucuccugaauaugauuggaauggugggcggggcccagggaacacagccuggcagagauggcguugugcgggucugggacgugaaaaacccggaucuucugaauaaccaauucgggaccaugcccagccucacacuggcuugucuuaccaagcagggacagguggaccugaaugaugccguccucgcgcugacggaccugggccucaucuacaccgccaaguauccuaacucuuccgaccuggaucgccuuagccaaucccaucccauucugaauaugguugacacaaagaagucuagccucaacaucuccggguacaauuuuagccugggagcugccgugaaagcuggcgccugcaugcuugaugggggaaacaugcuggagaccaucaaggugacaccucagaccauggacggcauucucaaaucuauccugaaggucaaaagaucccugggcauguucgugagcgauacgcccggggaacggaauccuuaugagaacauucucuacaagaucugucugucuggagacggcuggccguauauugcgagccgcacauccaucguugggagagccugggaaaacaccacaguggaucuugagucugacggaaagccccagaaagucggcaccaccgggagcaauaagucccugcagagcgcuggauuuccuacaggccucacguacucucaacugaugacccugaaagauuccaugaugcagcuugaccccagcgccaagacauggauugauaucgagggccggccugaagaccccguggagaucgcucucuaccagccgaugucugggugcuauauucacuucuuuagagaaccuaccgaccugaaacaguucaagcaagaugccaaguacucccauggaaucgacguugccgaucuguuucccgcucagccuggccucacaagcgcggugauugaggcccugccccgcaacaugguccuuaccugucagggguccgacgauaucaaaaagcugcucgacucucagggacggagagauauuaaacugaucgacaucgcucugagcaaggccgauucccgcaaauucgaaaaugccgugugggaccaaugcaaggaucuuugucacaugcauacgggcgucgugguugagaagaaaaagagagggggcaaagaggaaauuacaccccacugcgcucucauggacuguaucauguaugaugccgcggugucuggaggccugaacauuccuguccugcgggcugugcucccgcgcgacaugguuuuucggaccagcucccccaaggugguccugugaggacuagucccuguucccagagcccacuuuuuuuucuuuuuuugaaauaaaauagccugucuuucagaucucaaaggcucuuuucagagccaccaaaaaaaaaaaaaaaaaaaaaaaaaaaaaaaaaaaaaaaaaaaaaaaaaaaaaaaaaaaaaaaaagaauu

SEQ ID NO: 17134 - RNA, 1970 nt, Artificial Sequence
  mRNA product Design a-2 (hSL-A64-N5) comprising derived and/or modified sequence from LASV(LASV1000-NIG-2009;Clade II)__AIT17783__NP (opt5)
aggagaguccgcucagccagguugcagaagcggcuuagcguguguccuaaucuucucucugcguguagguaggccugugccgcaaacaagcuuaccaugagcgccuccaaggaggugaaaucuuuccuguggacccagagccucagacgggaacuguccggcuacugcucuaacaucaaacuucaagucguuaaggacgcucaggcccugcuccacgggcuggauuuuagcgagguguccaaugugcagcgccuuaugagaaagcagaaacgggacgauucugaccugaagcgccucagagaucugaaccaagcggucaauaaccugguggaacucaagagcacacagcagaaauccauucugcggguuggaacgcuuaccagcgacgaucugcucacacuggcugccgaccuugagaagcugaaaucuaaggugauccgcaccgaaagaccccucuccagcggcgucuauauggggaaucugucuacacagcaacuggagcagcggcgcgcccuccugaacaugauuggaauggugggcggggcucagggaacccagccuggcagagauggcguugugcgggucugggacgugaaaaauccggaucuucugaacaaucaauucgggacaaugcccucccucacccuggccugucuuacgaagcagggacagguggaccugaacgaugucguucucgcucugaccgaccugggccucaucuacacagccaaguauccuaauagcucugaccuggaucgccuuucccaaagccaucccauucugaacaugguggacaccaaaaaguccucucucaauaucagcggguacaacuuuucccugggagcggccgugaaagcuggcgccugcaugcuugaugggggaaauaugcuggagacaaucaaggucaccccucagacgauggacggcauucucaaaagcauccugaaggugaaaaagucucugggcauguucguuuccgauacacccggggaaagaaacccuuaugagaacauucucuacaagaucugucugagcggagacggcuggccguauauugcuucucggaccagcaucguggggcgcgccugggaaaauacaaccgucgaucuugaguccgacggaaaaccccagaaggugggcaccgcggggucuaacaaaagccugcaguccgccggauuuccuacaggccucacguacagccaacugaugacccugaaggauucuaugaugcagcuugaccccuccgcuaaaacauggauugauaucgagggcagaccugaagaccccguugagaucgcccucuaccagccggugagcgggugcuauauucacuucuuucgggaaccuaccgaccugaagcaguucaagcaagaugcuaaauacucucauggaaucgacgucgccgaucuguuucccgcccagccuggccucacauccgcugugauugaggcgcugcccagaaauaugguccuuaccugucaggggagcgacgauaucaagcgccugcucgacucccagggacggagagauauuaaacugaucgacaucgcccugucuaaggcugauagccgccgguucgaaaacgccgugugggaccaaugcaaagaucuuugucacaugcauacgggcguuguggucgagaagaagaaaagagggggcaaggaggaaauuacaccccacugcgcccucauggacuguaucauguaugaugcugccguguccggaggccugaauauuccuguucugcgcgcggugcucccgcgggacauggucuuuagaaccucuagccccaaaguggugcugugaggacuagucccuguucccagagcccacuuuuuuuucuuuuuuugaaauaaaauagccugucuuucagaucucaaaggcucuuuucagagccaccaaaaaaaaaaaaaaaaaaaaaaaaaaaaaaaaaaaaaaaaaaaaaaaaaaaaaaaaaaaaaaaaagaauu

SEQ ID NO: 17135 - RNA, 1970 nt, Artificial Sequence
  mRNA product Design a-2 (hSL-A64-N5) comprising derived and/or modified sequence from LASV(LASV221-NIG-2010;Clade II)__AIT17625__NP (opt5)
aggagaguccgcucagccagguugcagaagcggcuuagcguguguccuaaucuucucucugcguguagguaggccugugccgcaaacaagcuuaccaugagcgccuccaaggaggugaaaucuuuccuguggacccagagccucagacgggaacuguccggcuacugcucuagcaucaaacuucaagucguuaaggacgcucaggcccugcuccacgggcuggauuuuuccgaggugucuaacgugcagcgccuuaugagaaagcagcggcgcgacgauagcgaccugaaaagacuccgggaucugaaucaagcggucaacaaucugguggaacucaaguccacacagcaaaagagcauucugcgcguuggaacgcuuaccucugacgaucugcucacacuggcugccgaccuugagaaacugaaguccaaagugaucagaaccgaacggccccucagcucuggcgucuauauggggaaccuguccacacagcagcuggagcagcgcagagcccuccugaauaugauuggaauggugggcggggcucagggaacccagccuggccgggauggcguugugcgcgucugggacgugaagaacccggaucuucugaauaaccaauucgggacaaugcccagccucacccuggccugucuuacgaaacagggacagguggaccugaaugaugcuguccucgcccugaccgaccugggccucaucuacacagcgaaguauccuaacucuuccgaccuggauagacuuagccaaucccaucccauucugaauaugguugacaccaagaaaucuagccucaacaucuccggguacaauuuuagccugggagccgcugugaaggccggcgcuugcaugcuugaugggggaaacaugcuggagacaaucaaagugaccccucagacggucgacggcauucucaagucuauccugaaagugaagcggucccugggcauguucguuagcgauacacccggggaacgcaauccuuaugagaacauucucuacaaaaucugucugucuggagacggcuggccguauauugccagcagaaccuccaucguggggcgggcgugggaaaacacaaccgucgaucuugagucugacggaaagccccagaaggugggcaccgccgggagcaauaaaucccugcagagcgcuggauuuccuacaggccucacguacucucaacugaugacccugaaggauuccaugaugcagcuugaccccagcgccaaaacauggauugauaucgagggcagaccugaagaccccguugagaucgcucucuaccagccgaugucugggugcuauauucacuucuuucgcgaaccuaccgaccugaagcaguucaaacaagaugccaaguacucccauggaaucgacguggccgaucuguuucccgcucagccuggccucacaagcgcggucauugaggcccugccccggaacauggugcuuaccugucagggguccgacgauaucaagagacugcucgacucucagggacgccgggauauuaaacugaucgacaucgcucugagcaaggccgauuccagaaaauucgaaaaugccgucugggaccaaugcaaggaucuuugucacaugcauacgggcgugguuguggagaaaaagaagcgcgggggcaaagaggaaauuacaccccacugcgcucucauggacuguaucauguaugaugccgcggucucuggaggccugaacauuccugugcugcgggcuguucucccgagagacaugguguuucgcaccagcucccccaaggucgugcugugaggacuagucccuguucccagagcccacuuuuuuuucuuuuuuugaaauaaaauagccugucuuucagaucucaaaggcucuuuucagagccaccaaaaaaaaaaaaaaaaaaaaaaaaaaaaaaaaaaaaaaaaaaaaaaaaaaaaaaaaaaaaaaaaagaauu

SEQ ID NO: 17136 - RNA, 1970 nt, Artificial Sequence
  mRNA product Design a-2 (hSL-A64-N5) comprising derived and/or modified sequence from LASV(LASV237-NIG-2010;Clade II)__AIT17639__NP (opt5)
aggagaguccgcucagccagguugcagaagcggcuuagcguguguccuaaucuucucucugcguguagguaggccugugccgcaaacaagcuuaccaugagcgccuccaaggaggugaaaucuuuccuguggacccagagccucagacgggaacuguccggcuacugcucuaacaucaaacuucaagucguuaaggacgcucaggcccugcuccacgggcuggauuuuagcgagguguccaaugugcagcgccuuaugagaaagcagaaacgggacgauucugaccugaagcgccucagagaucugaaccaagcggucaauaaccugguggaacucaagagcacacagcagaaauccauucugcggguuggaacgcuuaccagcgacgaucugcucacacuggcugccgaccuugagaagcugaaaucuaaggugauccgcaccgaaagaccccucuccagcggcgucuauauggggaaucugucuacacagcaacuggagcagcggcgcgcccuccugaacaugauuggaauggugggcggggcucagggaacccagccuggcagagauggcguugugcgggucugggacgugaaaaauccggaucuucugaacaaucaauucgggacaaugcccucccucacccuggccugucuuacgaagcagggacagguggaccugaacgaugcuguccucgcccugaccgaccugggccucaucuacacagcgaaguauccuaauagcucugaccuggaucgccuuucccaaagccaucccauucugaacaugguugacaucaaaaaguccucucucaauaucagcggguacaacuuuucccugggagccgcugugaaagccggcgcuugcaugcuugaugggggaaauaugcuggagaccauuaaggugacaccucagaccauggacggcauccucaaaagcauucugaaggucaaaagaucucugggcauguucguguccgauacgcccggggaacggaacccuuaugagaacauccucuacaagauuugucugagcggagacggcuggccguauaucgccucucgcacaagcauuguugggagagcgugggaaaauaccacaguggaucuugaguccgacggaaagccccagaaagucggcucugccgggagcaacaagucccugcagagcgcuggauuuccuaccggccucaccuacucucaacugaugacacugaaagauuccaugaugcagcuugaccccagcgccaagacguggaucgauaucgagggccggccugaagaccccguggagauugcucucuaccagccgaugucugggugcuauauccacuucuuuagagaaccuaccgaccugaaacaguucaagcaagaugccaaguacucccauggaauugacguugccgaucuguuucccgcucagccuggccucacaagcgcggugaucgaggcccugccccgcaauaugguccuuaccugucagggguccgacgauauuaaacggcugcucgacucucagggaagacgcgauaucaagcugaucgacauugcucugagcaaagccgauucccggagauucgaaaacgccgugugggaccaaugcaaggaucuuugucacaugcauacaggcgucgugguugagaaaaagaagcgcgggggcaaagaggaaaucacgccccacugcgcucucauggacuguauuauguaugaugccgcggugucuggaggccugaauaucccuguccugcgggcugugcucccgagagacaugguuuuucgcaccagcucccccaaggugguccugugaggacuagucccuguucccagagcccacuuuuuuuucuuuuuuugaaauaaaauagccugucuuucagaucucaaaggcucuuuucagagccaccaaaaaaaaaaaaaaaaaaaaaaaaaaaaaaaaaaaaaaaaaaaaaaaaaaaaaaaaaaaaaaaaagaauu

SEQ ID NO: 17137 - RNA, 1970 nt, Artificial Sequence
  mRNA product Design a-2 (hSL-A64-N5) comprising derived and/or modified sequence from LASV(LASV253-NIG-2011;Clade II)__AIT17671__NP (opt5)
aggagaguccgcucagccagguugcagaagcggcuuagcguguguccuaaucuucucucugcguguagguaggccugugccgcaaacaagcuuaccaugagcgccuccaaggaggugaaaucuuuccuguggacccagagccucagacgggaacuguccggcuacugcucuagcaucaaacuucaagucguuaaggacgcucaggcccugcuccacgggcuggauuuuuccgaggugucuaacgugcagcgccuuaugagaaagcagaaacgggacgauagcgaccugaagcgccucagagaucugaaucaagcggucaacaaucugguggaacucaaguccacccagcagaaaagcguucugcgggugggaacgcuuaccucugacgaucugcucacacuggcugccgaccuugagaagcugaaauccaaggucauucgcaccgaaagaccccucagcucuggcguguauauggggaaccuguccacacagcaacuggagcagcggcgcgcccuccugaauaugaucggaaugguuggcggggcucagggaacccagccuggcagagauggcgugguccgggugugggacgugaaaaacccggaucuucugaauaaccaauucgggacaaugcccagccucacccuggccugucuuacgaagcagggacaggucgaccugaaugauguugugcucgcucugaccgaccugggccucauuuacacagccaaguauccuaacucuuccgaccuggaucgccuuagccaaucccaucccauccugaauaugguggacaccaaaaagucuagccucaacauuuccggguacaauuuuagccugggagcggccgucaaagcuggcgccugcaugcuugaugggggaaacaugcuggagacaaucaaggugaccccucagacgauggacggcauccucaaaucuauucugaagguuaaaaagucccugggcauguucgugagcgauacacccggggaaagaaauccuuaugagaacauccucuacaagauuugucugucuggagacggcuggccguauaucgcuagccggaccuccauugucgggcgcgccugggaaaacacaaccguggaucuugagucugacggaaaaccccagaagguuggcaccgcggggagcaauaaaucccugcagagcgccggauuuccuacaggccucacguacucucaacugaugacccugaaggauuccaugaugcagcuugaccccagcgcuaaaacauggaucgauauugagggcagaccugaagaccccguggagaucgcccucuaccagccgaugucugggugcuauauccacuucuuucgggaaccuaccgaccugaagcaguucaagcaagaugcuaaauacucccauggaauugacgucacagaucuguuucccgcccagccuggccucaccagcgccgugaucgaggcucugcccagaaacaugguccuuacgugucagggguccgacgauauuaagcgccugcucgacucucagggacggagagauaucaaacugauugacaucgcgcugagcaaggccgauucccgccgguucgaaaaugcugugugggaccaaugcaaagaucuuugucacaugcauacaggcguuguggucgagaagaagaaaagagggggcaaggaggaaaucacaccccacugcgcccucauggacuguauuauguaugaugccgcugugucuggaggccugaacaucccuguucugcgcgccgugcucccgcgggacauggucuuuagaaccagcucccccaaaguggugcugugaggacuagucccuguucccagagcccacuuuuuuuucuuuuuuugaaauaaaauagccugucuuucagaucucaaaggcucuuuucagagccaccaaaaaaaaaaaaaaaaaaaaaaaaaaaaaaaaaaaaaaaaaaaaaaaaaaaaaaaaaaaaaaaaagaauu

SEQ ID NO: 17138 - RNA, 1970 nt, Artificial Sequence
  mRNA product Design a-2 (hSL-A64-N5) comprising derived and/or modified sequence from LASV(LASV254-NIG-2011;Clade II)__AIT17675__NP (opt5)
aggagaguccgcucagccagguugcagaagcggcuuagcguguguccuaaucuucucucugcguguagguaggccugugccgcaaacaagcuuaccaugagcgccuccaaggaggugaaaucuuuccuguggacccagagccucagacgggaacuguccggcuacugcucuagcaucaaacuucaagucguuaaggacgcucaggcccugcuccacgggcuggauuuuuccgaggugucuaacgugcagcgccuuaugagaaagcagaaacgggacgauagcgaccugaagcgccucagagaucugaaucaagcggucaacaaucugguggaacucaaguccacacagcagaaaagcguucugcgggugggaacgcuuaccucugacgaucugcucacacuggcugccgaccuugagaagcugaaauccaaggucauucgcaccgaaagaccccucagcucuggcguguauauggggaaccuguccacacagcaacuggagcagcggcgcgcccuccugaauaugaucggaaugguuggcggggcucagggaacccagccuggcagagauggcgugguccgggugugggacgugaaaaacccggaucuucugaauaaccaauucgggacaaugcccagccucacccuggccugucuuacgaagcagggacaggucgaccugaaugaugcuguucucgcccugaccgaccugggccucauuuacacagcgaaguauccuaacucuuccgaccuggaucgccuuagccaaucccaucccauccugaauaugguggacaccaaaaagucuagccucaacauuuccggguacaauuuuagccugggagccgcugugaaagccggcgcuugcaugcuugaugggggaaacaugcuggagacaaucaaggucaccccucagacgauggacggcauccucaaaucuauucugaaggugaaaaagucccugggcauguucguuagcgauacacccggggaaagaaauccuuaugagaacauccucuacaagauuugucugucuggagacggcuggccguauaucgccagccggaccuccauuguggggcgcgcgugggaaaacacaaucgucgaucuugagucugacggaaaaccccagaaggugggcaccgccgggagcaauaaaucccugcagagcgcuggauuuccuaccggccucacauacucucaacugaugacgcugaaggauuccaugaugcagcuugaccccagcgccaaaaccuggauugauaucgagggcagaccugaagaccccguugagaucgcucucuaccagccgaugucugggugcuauauucacuucuuucgggaaccuacagaccugaagcaguucaagcaagaugccaaauacucccauggaaucgacguggccgaucuguuucccgcucagccuggccucaccagcgcggucauugaggcccugcccagaaacauggugcuuacaugucagggguccgacgauaucaagcgccugcucgacucucagggacggagagauauuaaacugaucgacaucgcucugagcaaggccgauucccgccgguucgaaaaugccgucugggaccaaugcaaagaucuuugucacaugcauaccggcgugguuguggagaagaagaaaagagggggcaaggaggaaauuacgccccacugcgcucucauggacuguaucauguaugaugccgcggucucuggaggccugaacauuccugugcugcgcgcuguucucccgcgggacaugguguuuagaacaagcucccccaaagucgugcugugaggacuagucccuguucccagagcccacuuuuuuuucuuuuuuugaaauaaaauagccugucuuucagaucucaaaggcucuuuucagagccaccaaaaaaaaaaaaaaaaaaaaaaaaaaaaaaaaaaaaaaaaaaaaaaaaaaaaaaaaaaaaaaaaagaauu

SEQ ID NO: 17139 - RNA, 1970 nt, Artificial Sequence
  mRNA product Design a-2 (hSL-A64-N5) comprising derived and/or modified sequence from LASV(Nig08-04;Clade II)__ADU56611__NP (opt5)
aggagaguccgcucagccagguugcagaagcggcuuagcguguguccuaaucuucucucugcguguagguaggccugugccgcaaacaagcuuaccaugagcgccuccaaggaggugaaaucuuuccuguggacccagagccucagacgggaacuguccggcuacugcucuaacaucaaacuucaagucguuaaggacgcucaggcccugcuccacgggcuggauuuuagcgagguguccaaugugcagcgccuuaugagaaagcagaaacgggacgauggagaccugaagcgccucagagaucugaaccaagcggucaauaaccugguggaacucaagucuacccagcagaaaagcguucugcgggugggcacgcuuaccuccgacgaucugcucacacuggcugccgaccuugagaagcugaaaagcaaggucauucgcaccgaaagaccccucucuuccgggguguauaugggaaaucugagcacacagcaacuggagcagcggaaagcccuccugucuaugaucggcaugguugggggagcucagggcacccagccuggccgcgaugggguggucagagugugggacgugaagaacccggaucuucugaauaaccaauucggaacaaugcccucccucacccuggccugucuuacgaagcagggccaggucgaccugaaugaugcuguucucgcccugaccgaccuggggcucauuuacacagcgaaauauccuaacagcucugaccuggaucggcuuucccaaagccaucccauccugaauaugguggacaccaagaaauccucucucaacauuagcggauacaauuuuucccugggcgccgcugugaaggccggggcuugcaugcuugauggaggcaacaugcuggagacaaucaaagucaccccucagacgauggacggcauccucaagagcauucugaaagugaagcgcucucuggggauguucguuuccgauacacccggagaaagaaauccuuaugagaacauccucuacaagauuugucugagcggcgacggguggccguauaucgccucucggaccagcauugugggacgcgcgugggaaaacacaaccgucgaucuugaguccgacggcaaaccccagaagguggggaccgccggaucuaauaaaagccugcaguccgcuggcuuuccuacaggccucacguacagccaacugaugacccugaaggauucuaugaugcagcuugaccccuccgccaaaacauggaucgauauugaggggagaccugaagaccccguugagaucgcucucuaccagccgaugagcggaugcuauauccacuucuuucgggaaccuaccgaccugaagcaguucaagcaagaugccaaauacucucauggcauugacgugacagaucuguuuuccgcccagcccgggcucaccagcgcugucaucgaggcgcugccuagaaacauggugcuuacgugucagggauccgacgauauuaagaaacugcucgacucucagggccgccgggauaucaagcugauugacaucagccugaauaaagccgauuccagacgcuucgaaaacgcugucugggaccaaugcaaggaucuuugucacaugcauacaggggugguuguggagaagaaaaagcggggcggaaaagaggaaaucacaccccacugcgcccucauggacuguauuauguuugaugccgcugucucuggcgggcugaauauccccauucugagagccgugcucccucgcgacaugguuuuccggaccagcuccccgaaggugguccugugaggacuagucccuguucccagagcccacuuuuuuuucuuuuuuugaaauaaaauagccugucuuucagaucucaaaggcucuuuucagagccaccaaaaaaaaaaaaaaaaaaaaaaaaaaaaaaaaaaaaaaaaaaaaaaaaaaaaaaaaaaaaaaaaagaauu

SEQ ID NO: 17140 - RNA, 1973 nt, Artificial Sequence
  mRNA product Design a-2 (hSL-A64-N5) comprising derived and/or modified sequence from LASV(GA391;Clade III)__AAA46284__NP (opt5)
aggagaguccgcucagccagguugcagaagcggcuuagcguguguccuaaucuucucucugcguguagguaggccugugccgcaaacaagcuuaccaugagcgccuccaaggaggugagaucuugccuguggacccagagccuccggcgcgaacuguccggcuacuguucuaacaucaaacuucaagucguuaaggacgcucaggcccugcuccacgggcuggauuucagcgagguguccaaugugcagagacuuaugcggaaacagaagcgcgacgauggagaccugaaaagacuccgggaucugaaccaagcggucaauaaccugguggaacucaagucuacacagcagaaaagcguucugcgcgugggcacgcuuuccagcgacgaucugcucauucuggcugccgaccuugagaaacugaagucuaaagucaccagaacagaacggccccucuccagcgggguguauaugggaaaucugucuucccagcaacuggaucagcgcagagcccuccugaacaugaucggcaugaccgggguuagcggaggcggcaagggggcuucuaauggaauugugcgggucugggacgugaaaaacgccgagcuucugaauaaccaguuuggcacaaugccuucccucacccuggcuugccuuacaaagcaggggcaaguggaucugaaugacgccguccaggcgcucaccgaucugggacugaucuacacggccaaguauccgaacagcuccgaccucgaccgccugucucagagccaucccauucuuaauaugaucgauaccaaaaaguccagccugaacaucucuggcuacaauuucucccucggggcugccguuaaagcuggagccuguaugcuggacggcggcaacaugcuugagacaauuaaggugagcccucaaaccauggaugggauccugaaaucuauucucaaggugaaaaagagccugggaauguuugucuccgacacacccggcgaaagaaacccuuaugagaauauccuguacaagauuugccucucuggggauggauggagcuauaucgcgucccggaccagcauugugggccgcgccugggaaaacacgguuguggaccuggagcaggauaauaaaccccagaagaucgggaacggaggcucuaauaaaucccuucagagcgcuggcuucgccgcugggcugaucuacucucaacucaugacacugaaggacuuuaaauguuucaaccugauuccuaaugccaagaccuggauggauaucgagggaagaccggaagaccccgucgagauugcccuuuaccagccuuccagcggcugcuaugugcacuuuuuccgggaacccacagaucucaagcaguuuaaacaggacgcuaaguacucccaugggagagacguuaccgaucuguucgcggcccaaccuggacugaccucugcugugaucgaggcccucccccgcaacauggucauuacaugucagggcagcgaagacauccggaaacugcuugagucccaggggagacgcgauaucaagcugauugacaucacgcucucuaaagccgauagccggaaguuugagaaugcugugugggaccaguucaaggaucugugccacaugcauaccggcgucgugguugaaaagaagaaaagaggaggcaaggaggaaauuacaccgcacugugcccugauggacugcaucauguuugaugcggcuguguccgggggacuugacgccaaaguccuccgcgugguucugccucgggauaugguguucagaaccagcacacccaaggucgugcugugaggacuagucccuguucccagagcccacuuuuuuuucuuuuuuugaaauaaaauagccugucuuucagaucucaaaggcucuuuucagagccaccaaaaaaaaaaaaaaaaaaaaaaaaaaaaaaaaaaaaaaaaaaaaaaaaaaaaaaaaaaaaaaaaagaauu

SEQ ID NO: 17141 - RNA, 1970 nt, Artificial Sequence
  mRNA product Design a-2 (hSL-A64-N5) comprising derived and/or modified sequence from LASV(Nig08-A19;Clade III)__ADU56619__NP (opt5)
aggagaguccgcucagccagguugcagaagcggcuuagcguguguccuaaucuucucucugcguguagguaggccugugccgcaaacaagcuuaccaugagcgccuccaaggaggugaaaucuuuccuguggacccagagccucagacgggaacuguccggcuacugcucuaacaucaaacuucaagucguuaaggacgcucaggcccugcuccacgggcuggauuuuagcgagguguccaaugugcagcgccuuaugagaaagcagaaacgggacgauggagaccugaagcgccucagagaucugaaccaagcggucaauaaccugguggaacucaagucuacacagcagaaaagcguucugcgggugggcacgcuuuccagcgacgaucugcucguccuggcugccgaccuugagaagcugaaaucuaaggugguucgcaccgaaagaccccucuccagcgggauuuauaugggaaaucugucuucccagcaacuggaucagcggaaagcccuccugaacaugaucggcaugacagggggaaauggcggccgcaacaccacaagcgacgggauugugagagucugggaugugaagaaugcugagcuucugaacaaucaguucggaaccaugccuucucucacacuggccugucuuaccaagcagggccaaguggaccugaacgaugcuguccaggcccucacggaccuggggcugaucuacaccgcgaaauaucccaauuccagcgaccucgaucggcuggcccagucccauccgauucuuaacaugaucgacacaaagaaaucuagccugaauaucuccggauacaacuuuagccucggcgcugccguuaaggcuggggccugcaugcuggauggaggcaacaugcuugagaccauuaaagugucuccucaaacaauggacggcauccugaaguccauucucaaagugaagcgcagccuggggauguucaucucugauacccccggagaaagaaauccuuaugagaacauucuguacaagaucugucucagcggcgacggguggcccuauauugcgucccggacgucuaucgucggacgcgccugggaaaauacagugguugaucuggagagcgacaacaaaccucagaagaccggcaaugggggauccaacaaaagccuucagucugcuggcuuugccgcuggccugacauacucccagcucaugacccugaaggauagcaugcugcaacuugacccgaaugccaaaaccuggauggauaucgaggggagacccgaagacccuguggagauugcccucuaccagcccucuuccggaugcuauauccacuucuuucgggaaccuacagaccugaagcaguucaagcaggaugcuaaauacagccauggcauugacgucacggaucuguuugcggcccaacccgggcucaccuccgcugugaucgaggcccugccgagaaacaugguuauuacaugucagggaucugaagacauccgcaaacuucuggagagccagggccggagagauaucaagcucauugacaucucccugucuaagguggauagccgcaaauucgagaaugccgucugggaccaguuuaaggaucugugccacaugcauaccgggauuguggucgaaaagaaaaagcggggcggaaaagaggaaaucacaccucacugugcucuuauggacugcauuauguucgaugccgcgguguccggcgggguugacgcuaaggugcucagagccguccugccccgcgauaugguguuucggaccagcacgccuaaaguugugcugugaggacuagucccuguucccagagcccacuuuuuuuucuuuuuuugaaauaaaauagccugucuuucagaucucaaaggcucuuuucagagccaccaaaaaaaaaaaaaaaaaaaaaaaaaaaaaaaaaaaaaaaaaaaaaaaaaaaaaaaaaaaaaaaaagaauu

SEQ ID NO: 17142 - RNA, 1970 nt, Artificial Sequence
  mRNA product Design a-2 (hSL-A64-N5) comprising derived and/or modified sequence from LASV(G1180-SLE-2010;Clade IV)__AIT17169__NP (opt5)
aggagaguccgcucagccagguugcagaagcggcuuagcguguguccuaaucuucucucugcguguagguaggccugugccgcaaacaagcuuaccaugagcgccuccaaggagaucaaaucuuuccuguggacccagagccucagacgggaacuguccggcuacugcucuaacauuaagcugcaaguggucaaagacgcucaggcccugcuccacgggcuggauuuuagcgagguuuccaaugugcagcgccuuaugagaaaggaacggcgcgacgauaacgaccugaaaagacuccgggaucugaaucaggcggugaacaaucuggucgagcucaagucuacacaacaaaagagcauccugcgcgugggaacgcuuaccuccgacgaucugcucauucuggcugccgaccuugaaaaacuuaagagcaaaguuaucagaacagagcggccccucucugccggcguguauauggggaaccuguccagccagcagcuggaucagcgcagagcucuccugucuaugauuggaauguccagcggcaaucagcgggcccaggcugggcgcgacggagucgugagaguuugggaugugaagaacgucgagcuucugaauaaccaguucggcaccaugccuucucucacacuggccugucuuaccaaacaaggccagguggaccugaaugaugcggugcaggcccucacagaccuggggcugaucuacaccgcuaaguauccgaacacguccgaccucgaucggcugacccaaagccaucccauccuuaauaugauugacacaaagaaauccucucugaacaucagcggauacaauuuuucccucggcgccgcugucaaggccggggcgugcaugcuggauggaggcaacaugcuugaaaccauuaaaguuagcccucagacaauggacgggauccugaagucuauucucaaagugaagaaagcccugggaauguucaucuccgauacccccggcgagcgcaacccuuaugaaaauauucuguacaagaucugucucagcggcgacggguggcccuauaucgcuucuagaacgagcauuacaggacgggccugggagaacaccguggucgaucuggaguccgacggcaagccucagaaagcugggucuaauaacagcaauaagucccuucagagcgugggauuuacagccggccugaccuacucucaacucaugacccugaaagaugccaugcugcagcuugacccgaacgcuaagacauggauggauaucgaagggagacccgaggacccuguugaaauugcgcucuaccagcccuccagcggaugcuauauccacuucuuucgcgagccuacggaccugaaacaguucaagcaagaugccaaguacucucauggcauugacgugaccgaucuguuugcugcccagcccggccucacauccgccgucaucgacgcucugccgcggaauauggugaucaccugucaggggagcgaugacauuagaaaacuucuggaaucccagggacgcaaggauaucaaacucauugacaucgcccugucuaagacagauagccggaaauaugagaacgcgguuugggaccaauacaaggaucugugccacaugcauaccggcguggucguggagaagaaaaagagagggggaaaagaagagauuacgccucacugugcucuuauggacugcaucauguucgaugccgccgucuccggcgggcucaauacaucugugcugcgcgcuguucugccccgggacaugguguuuagaaccagcaccccucgcgucgugcucugaggacuagucccuguucccagagcccacuuuuuuuucuuuuuuugaaauaaaauagccugucuuucagaucucaaaggcucuuuucagagccaccaaaaaaaaaaaaaaaaaaaaaaaaaaaaaaaaaaaaaaaaaaaaaaaaaaaaaaaaaaaaaaaaagaauu

SEQ ID NO: 17143 - RNA, 1970 nt, Artificial Sequence
  mRNA product Design a-2 (hSL-A64-N5) comprising derived and/or modified sequence from LASV(G1442-SLE-2011;Clade IV)__AIT17181__NP (opt5)
aggagaguccgcucagccagguugcagaagcggcuuagcguguguccuaaucuucucucugcguguagguaggccugugccgcaaacaagcuuaccaugagcgccuccaaggaggugaaaucuuuccuguggacccagagccucagacgggaacuguccggcuacugcucuaacaucaaacuucaagucguuaaggacgcucaggcccugcuccacgggcuggauuuuagcgagguguccaaugugcagcgccuuaugagaaagcagcggcgcgacgauaacgaccugaaaagacuccgggaucugaaucaagcggucaacaaucugguggaacucaagucuacacagcaaaagagcguucugcgcgugggaacgcuuaccuccgacgaucugcucguccuggcugccgaccuugagaaacuuaagagcaaagugauuagaacagaacggccccucucugccggcguuuauauggggaaccuguccagccagcagcuggaucagcgcagagcucuccugaauaugaucggaaugucuggcgggauucagggaacccggacaggccgcgacggcguggucagagugugggaugugaagaacgccgaccuucugaauaaccaguucgggaccaugccuucccucacacuggcuugucuuaccaaacaaggacaggucgaucugaaugacguugugcaggcccucacggaccugggccugaucuacaccgcgaaguauccgaacgccagcgaucucgaccggcugacacaaucucaucccauucuuaauaugaucgauaccaagaaauccagccugaacaucuccggguacaauuuuucucucggagcugccgugaaggcuggcgccugcaugcuggacgggggaaacaugcuugagacaauuaaagucagcccucagaccauggauggcauccugaaguccauucucaaagugaagaaaacgcugggcauguucaucagcgacacacccggggagcgcaacccuuaugaaaauauucuguacaagaucugucucucuggagauggcuggcccuauauugcguccagaaccagcaucacagggcgggccugggagaacaccguuguggaccuggaaucugauggaaagccucagaaagcuggcagcaauaacuccaauaagucucuucagagcgccggguuugcugccggacugaccuacucccaacucaugacacugaaagacgccaugcugcagcuugauccgaacgcuaagacguggauggacaucgagggcagacccgaggacccugucgaaauugcgcucuaccagcccagcucuggcugcuauauccacuucuuucgcgagccuaccgaucugaaacaguucaagcaagacgccaaguacucccaugggauugaugugacagaccuguuugcugcccagcccggacucaccagcgccguuaucgaagcucugccgcggaauauggugauuacaugucagggcucugaugacaucaaaaagcugcuggagucccaggggagaaaagauaucaagcucauugacaucgcccugagcaaaaccgauucccgcaaguaugaaaacgcggucugggaccaauacaaggaucugugccacaugcauacgggaguggucguggagaaaaagaaacggggcgggaaggaggaaauuacaccucacugugcucuuauggacugcaucauguucgaugccgccguuucuggcggacucaauacccuggugcugagagcuguccucccccgcgacaugguguuucggaccagcacaccuagaguugugcugugaggacuagucccuguucccagagcccacuuuuuuuucuuuuuuugaaauaaaauagccugucuuucagaucucaaaggcucuuuucagagccaccaaaaaaaaaaaaaaaaaaaaaaaaaaaaaaaaaaaaaaaaaaaaaaaaaaaaaaaaaaaaaaaaagaauu

SEQ ID NO: 17144 - RNA, 1970 nt, Artificial Sequence
  mRNA product Design a-2 (hSL-A64-N5) comprising derived and/or modified sequence from LASV(G3010-SLE-2013;Clade IV)__AIT17345__NP (opt5)
aggagaguccgcucagccagguugcagaagcggcuuagcguguguccuaaucuucucucugcguguagguaggccugugccgcaaacaagcuuaccaugagcgccuccaaggagaucaaaucuuuccuguggacccagagccucagacgggaacuguccggcuacugcucuaacauuaaacuucaaguggucaaagacgcucaggcccugcuccacgggcuggauuuuagcgagguuuccaaugugcagcgccuuaugagaaaggaacggcgcgacgauaacgaccugaaaagacuccgggaucugaaucaggcggugaacaaucuggucgagcucaagucuacacaacaaaagagcauccugcgcgugggaacgcuuaccuccgacgaucugcucauucuggcugccgaccuugaaaaacuuaagagcaaaguuacaagaaccgagcggccccucucugccggcguguauauggggaaccuguccagccagcagcuggaucagcgcagagcucuccugucuaugaucggaauguccagcggcguccagggggcccgggcuggacgcgacggcgugguuagagugugggaugucaagaaugccgagcuucugaacaaucaguucggcacaaugccuucucucacccuggcgugucuuacaaaacaggggcaaguggaccugaacgaugugguccaggcccucaccgaccugggacugauuuacacggcuaaguauccgaauaccuccgaccucgaucggcugacacagagccaucccauccuuaacaugaucgacaccaagaaauccucucugaauauuagcggcuacaacuuuucccucggggccgcuguuaaggccggagcgugcaugcuggauggcgggaauaugcuugaaacaaucaaagugagcccucaaaccauggacggcauucugaagucuauccucaaagugaagaaagcccugggaauguucauuuccgagacgcccggcgaacgcaacccuuaugagaacauccuguacaagauuugucucagcggggauggauggcccuauaucgcuucuagaacaagcaucaccggccgggccugggagaauacagucguggaccuggaauccgaugggaagccucagaaagcuggaucuaacaauagcaacaagucccuucagagcgccggcuuuaccgccgggcugaccuacucucagcucaugacacugaaagacgcuaugcugcaacuugauccgaaugcgaagacguggauggacauugagggaagacccgaagauccuguugagguggcccucuaccagcccuccagcggcugcuauauccacuucuuucgcgaaccuaccgaccugaaacaguucaagcaggacgcuaaguacucucauggcauugaugucacagaccuguuugccgcccaacccgggcucaccuccgcugugaucgaugcccugccgcggaacaugguuauuacaugucagggaagcgacgauaucaaaaagcugcuggagucccagggcagaaaagacaucaagcucauugauaucgcgcugucuaaaaccgacagccgcaaguaugagaaugcugugugggaucaguacaaggaccugugccacaugcauacgggggucguggucgaaaagaagaaacggggaggcaaggaggaaauuacaccucacugugcccuuauggauugcaucauguucgacgccgcuguguccgggggccucaacaccucuguucugagagccgugcugccccgcgauauggucuuucggaccagcacaccuagagugguucucugaggacuagucccuguucccagagcccacuuuuuuuucuuuuuuugaaauaaaauagccugucuuucagaucucaaaggcucuuuucagagccaccaaaaaaaaaaaaaaaaaaaaaaaaaaaaaaaaaaaaaaaaaaaaaaaaaaaaaaaaaaaaaaaaagaauu

SEQ ID NO: 17145 - RNA, 1970 nt, Artificial Sequence
  mRNA product Design a-2 (hSL-A64-N5) comprising derived and/or modified sequence from LASV(G502-SLE-2009;Clade IV)__AIT17127__NP (opt5)
aggagaguccgcucagccagguugcagaagcggcuuagcguguguccuaaucuucucucugcguguagguaggccugugccgcaaacaagcuuaccaugagcgccuccaaggagaucaaaucuuuccuguggacccagagccucagacgggaacuguccggcuacugcucuaacauuaagcugcaaguggucaaagacgcucaggcccugcuccacgggcuggauuuuagcgagguuuccaaugugcagcgccuuaugagaaaggaacggcgcgacgauaacgaccugaaaagacuccgggaucugaaucaggcggugaacaaucuggucgagcucaagucuacacaacaaaagagcauccugcgcgugggaacgcuuaccuccgacgaucugcucauucuggcugccgaccuugaaaaacuuaagagcaaaguuaucagaacagagcggccccucucugccggcguguauauggggaaccuguccagccagcagcuggaucagcgcagagcucuccugucuaugauuggaauguccggcgggaaucagggaguccgggccggcaaggacggcgugguucgcgugugggaugucaaaaacgcugagcuucugaauaaccaguucgggaccaugccuagccucacacuggccugucuuaccaagcagggacaaguggaccugaaugaugcggugcaggcccucacagaccugggccugaucuacaccgcuaaguauccgaacacgucugaccucgauagacugacccagucccaucccauccuuaauaugauugacaccaaaaagagcucccugaacaucucuggguacaauuuuagccucggagccgcugucaaagccggcgcgugcaugcuggaugggggaaacaugcuugaaacaauuaagguuuccccucaaacaauggacggcauccugaaaagcauucucaaggugaaaaaggcccugggcauguucaucucugauacccccggggagcggaacccuuaugaaaauauucuguacaagaucugucucuccggagacggcuggcccuauaucgcuagccgcacgucuauuacagggagagccugggagaacaccguggucgaucuggagagcgacggaaaaccucagaaggcuggcuccaauaacucuaauaaaagccuucaguccgccggguuuacagccggacugaccuacagccagcucaugacccugaaggaugcuaugcugcaacuugacccgaacacaaaaacguggauggauaucgaaggccggcccgaggacccuguggaaauugcgcucuaccagcccucuuccggcugcuauauccacuucuuuagagagccuaccgaccugaagcaguucaagcaggaugccaaauacagccaugggauugacguuacagaucuguuugcugcccaacccggacucaccucugccgugaucgacgcucugccgcgcaauauggucaucacaugucagggcuccgaugacauucggaaacuucuggaaagccaggggagaaaggauaucaagcucauugacaucgcccugaacaaaaccgauucccgcaaguaugagaaugcggugugggaccaguacaaggaucugugccacaugcauacgggaguuguggucgagaaaaagaaacggggcgggaaggaagagauuacaccucacugugcucuuauggacugcaucauguucgaugccgccgugucuggcggacucaacaccagcguccugagagcugugcugccccgcgacaugguuuuucggaccuccacaccuagagugguccucugaggacuagucccuguucccagagcccacuuuuuuuucuuuuuuugaaauaaaauagccugucuuucagaucucaaaggcucuuuucagagccaccaaaaaaaaaaaaaaaaaaaaaaaaaaaaaaaaaaaaaaaaaaaaaaaaaaaaaaaaaaaaaaaaagaauu

SEQ ID NO: 17146 - RNA, 1970 nt, Artificial Sequence
  mRNA product Design a-2 (hSL-A64-N5) comprising derived and/or modified sequence from LASV(G733-SLE-2010;Clade IV)__AIT17155__NP (opt5)
aggagaguccgcucagccagguugcagaagcggcuuagcguguguccuaaucuucucucugcguguagguaggccugugccgcaaacaagcuuaccaugagcgccuccaaggagaucaaaucuuuccuguggacccagagccucagacgggaacuguccggcuacugcucuaacauuaagcugcaaguggucaaagacgcucaggcccugcuccacgggcuggauuuuagcgagguuuccaaugugcagcgccuuaugagaaaggaacggcgcgacgauaacgaccugaaaagacuccgggaucugaaucaggcggugaacaaucuggucgagcucaagucuacacaacaaaagagcgugcugcgcguuggaacgcuuaccuccgacgaacugcucgugcuggcugccgaucuugagaaacuuaagagcaaagucaucagaacagagcggccccucucugccggcguguauauggggaaccuguccagccagcagcuggaccagcgcagagcucuccugucuaugauuggaauguccggcgggaaucagggagcccggaccggccgcgauggcguugugagagucugggacgugaagaacgcugaacuucugaauaaccaguucgggacaaugccuagccucacccuggccugucuuacaaaacagggacaaguggaucugaaugacgcgguccaggcccucaccgaucugggccugaucuacacggcuaaguauccgaacaccucugaccucgaccggcugacacagucccaucccauucuuaauaugaucgauaccaagaaaagcucccugaacaucucuggguacaauuuuagccucggagccgcuguuaaggccggcgcgugcaugcuggacgggggaaacaugcuugagacaauuaaaguguccccucaaaccauggauggcauccucaagagcauucugaaagugaagaaagcccugggcauguucaucucugacacgcccggggaacgcaacccuuaugagaauauucuguacaagaucugucucuccggagauggcuggcccuauauugcuagcagaacaucuaucaccgggcgggccugggagaacacagucguggaccuggaaagcgauggaaagccucagaaagcuggcuccaauaacucuaauaagagccuucaguccgccggguuuaccgccggacugaccuacagccagcucaugacacugaaagacgcuaugcugcaacuugauccgaacgcgaagacguggauggacaucgagggcagacccgaagauccuguugagauugcccucuaccagcccucuuccggcugcuauauccacuucuuucgcgaaccuaccgaccugaaacaguucaagcaggacgcuaaguacagccaugggauugaugugacagaccuguuugccgcccaacccggacucaccucugcugucaucgaugcccugccgcggaauauggugauuacaugucagggcuccgacgauaucagaaaacuucuggagagccaggggcgcaaggacaucaaacucauugauaucgcgcuguccaagauugacucucggaaauaugagaacgcuguuugggaucaguacaaggaccugugccacaugcauaccggaguggucguggaaaagaaaaagagaggcgggaaagaggaaaucacgccucacugugcccuuauggauugcauuauguucgacgccgcugucagcggcggacucaauucccuggugcugcgcgccguucucccccgggauaugguguuuagaacaucuaccccucgcgucgugcugugaggacuagucccuguucccagagcccacuuuuuuuucuuuuuuugaaauaaaauagccugucuuucagaucucaaaggcucuuuucagagccaccaaaaaaaaaaaaaaaaaaaaaaaaaaaaaaaaaaaaaaaaaaaaaaaaaaaaaaaaaaaaaaaaagaauu

SEQ ID NO: 17147 - RNA, 1970 nt, Artificial Sequence
  mRNA product Design a-2 (hSL-A64-N5) comprising derived and/or modified sequence from MOPV/LASV reassortant(IGS-1;Clade IV)__AFY05578__NP (opt5)
aggagaguccgcucagccagguugcagaagcggcuuagcguguguccuaaucuucucucugcguguagguaggccugugccgcaaacaagcuuaccaugagcgccuccaaggagaucaaaucuuuccuguggacccagagccucagacgggaacuguccggcuacugcucuaacauuaaacuucaaguggucaaggacgcucaggcccugcuccacgggcuggauuuuagcgagguuuccaaugugcagcgccuuaugagaaaggaacggcgcgacgauaacgaccugaaaagacuccgggaucugaaucaggcggugaacaaucuggucgagcucaagucuacacaacaaaagagcauccugcgcgugggaacgcuuaccuccgacgaucugcucauucuggcugccgaccuugaaaaacugagaagcaagguuauccggacagagcgcccccucucugccggcguguauauggggaaccuguccagccagcagcuggaucagagacgggcucuccugaauaugauuggaaugucuggcgggaaccagggagcccgcgcuggcagagacggcgucgugcggguuugggaugugaaaaaugccgagcuucuguccaaccaguucgggaccaugccuagccucacacuggcgugucuuaccaagcagggacaagucgaccugaaugaugccgugcaggcucucacagaccugggccugaucuacaccgccaaauauccgaacacgucugaccucgaucgccugacccagucccaucccauccuuaauaugauugacacaaagaaaagcucccugaacaucucuggguacaauuuuagccucggagcugccgugaaggcgggcgccugcaugcuggaugggggaaacaugcuugaaaccauuaaggucuccccucaaacaauggacggcauccugaaaagcauucucaagguuaaaaaggcucugggcauguucaucucugauacccccggggagagaaacccuuaugaaaauauucuguacaaaaucugucucuccggagacggcuggcccuauaucgccagccggacgucuauuacagggagagcuugggagaacaccgugguggaucuggagagcgacggaaagccucagaaggccgauuccaauaacucuagcaaaucccuucagagcgccggcuuuacagcugggcugaccuacucucagcucaugacccugaaggacgcgaugcugcaacuugauccgaaugccaaaacauggauggacaucgaaggacgccccgaggacccugucgaaauugcucucuaccagcccuccagcggcugcuauauccacuucuuucgggagccuacggaucugaagcaguucaaacaggacgccaaguacucucauggcauugaugugaccgaccuguuugccacacaacccgggcucaccuccgcuguuaucgaugcccugccgagaaacauggugaucacaugucagggaagcgacgauauucgcaaacuucuggaaucccagggccggaaggacaucaagcucauugauaucgaccugucuaaaaccgauagcagaaaguaugagaaugcggucugggaccaguacaaagaucugugccacaugcauacgggggugguuguggagaagaagaaacgcggaggcaaggaagagauuacaccucacugugcucuuauggacugcaucauguucgacgccgccgucuccgggggccucaacaccucugugcugcgggcuguccugcccagagauaugguguuucgcaccagcacaccucggguugugcucugaggacuagucccuguucccagagcccacuuuuuuuucuuuuuuugaaauaaaauagccugucuuucagaucucaaaggcucuuuucagagccaccaaaaaaaaaaaaaaaaaaaaaaaaaaaaaaaaaaaaaaaaaaaaaaaaaaaaaaaaaaaaaaaaagaauu

SEQ ID NO: 17148 - RNA, 1970 nt, Artificial Sequence
  mRNA product Design a-2 (hSL-A64-N5) comprising derived and/or modified sequence from LASV(LM765-SLE-2012;Clade IV)__AIT17815__NP (opt5)
aggagaguccgcucagccagguugcagaagcggcuuagcguguguccuaaucuucucucugcguguagguaggccugugccgcaaacaagcuuaccaugagcgccuccaaggagaucaaaucuuuccuguggacccagagccucagacgggaacuguccggcuacugcucuaacauuaagcugcaaguggucaaagacgcucaggcccugcuccacgggcuggauuuuagcgagguuuccaaugugcagcgccuuaugagaaaggaacggcgcgacgauaacgaccugaaaagacuccgggaucugaaucaggcggugaacaaucuggucgagcucaagucuacacaacaaaagagcauccugcgcgugggaacgcuuaccuccgacgaucugcucauucuggcugccgaccuugaaaaacuuaagagcaaaguuacaagaaccgagcggccccucucugccggcguguauauggggaaccuguccagccagcagcuggaucagcgcagagcucuccuggacaugaucggaaugucuggcuccaaucagggggcccgggcuggacgcgauggcgucgugagaguuugggacgugaagaacgccgagcuucugaauaaccaguucggcacaaugccuagccucacccuggcgugucuuacaaaacaggggcaagucgaucugaaugacgccgugcaggcucucaccgaccugggacugauuuacacggccaaguauccgaacaccucugaucucgaccggcugacacagucccaucccauccuuaauaugaucgauaccaagaaaagcucccugaacauuucuggcuacaauuuuagccucggggcugccgugaaggcgggagccugcaugcuggacggcgggaacaugcuugaaacaaucaaagucuccccucaaaccauggauggcauucucaagagcauccugaaaguuaagaaagcucugggaauguucauuucugacgcccccggcgagcgcaacccuuaugaaaauauccuguacaagauuugucucuccggggauggauggcccuauaucgcuagcagaacgucuaucacaggccgggccugggagaacaccgugguggaccuggagagcgaugggaagccucagaaagccggauccaauggcucuaacaagagccuucaguccgcuggguuuacagcgggacugaccuacagccagcucaugacccugaaagacgccaugcugcaacuugauccgaaugcuaagacauggauggacauugaaggcagacccgaggacccugucgaaaucgcccucuaccagcccucuuccggcugcuauauucacuucuuucgcgagccuacggaucugaaacaguucaagcaggacgccaaguacagccaugggaucgaugugaccgaccuguuugcugcccaacccggacucacaucugcgguuauugaugcucugccgcggaacauggugaucaccugucagggcuccgacgauaucagaaaacuuuucgaaagccaggggcgcaaggacauuaaacugaucgauauugcccucuccaagacagacucucggaaauaugagaaugccgucugggaucaguacaaggaccugugccacaugcauaccggaaucgugguugagaagaaaaagagaggcgggaaagaagagauuacgccucacugugcucugauggauugcaucauguuugacgccgcugugagcggcggacuuaacacauccguccuccgcgccgugcugccccgggacauggucuucagaaccucuaccccucgcgugguucugugaggacuagucccuguucccagagcccacuuuuuuuucuuuuuuugaaauaaaauagccugucuuucagaucucaaaggcucuuuucagagccaccaaaaaaaaaaaaaaaaaaaaaaaaaaaaaaaaaaaaaaaaaaaaaaaaaaaaaaaaaaaaaaaaagaauu

SEQ ID NO: 17149 - RNA, 1970 nt, Artificial Sequence
  mRNA product Design a-2 (hSL-A64-N5) comprising derived and/or modified sequence from LASV(LM776-SLE-2012;Clade IV)__AIT17825__NP (opt5)
aggagaguccgcucagccagguugcagaagcggcuuagcguguguccuaaucuucucucugcguguagguaggccugugccgcaaacaagcuuaccaugagcgccuccaaggagaucaaaucuuuccuguggacccagagccucagacgggaacuguccucuuacugcagcaacauuaaacuucaaguggucaaggacgcucaggcccugcuccacggccuggauuuuuccgagguuucuaaugugcagcgccuuaugagaaaggaacggcgcgacgauaacgaccugaaaagacuccgggaucugaaucaggcggugaacaaucuggucgagcucaagagcacacaacagaaguccauccugcgcguggggacgcuuaccagcgacgaucugcucauucuggcugccgaccuugaaaaacugaagucuaaaguuacaagaaccgagcggccccucuccgccggaguguauaugggcaaccugagcucucagcagcuggaucaacgcagagcucuccuguccaugaucgggaugagcggaucuaaucagggcgcccgggcugggcgcgacggagucgugagaguuugggaugugaagaacgccgagcuucugaauaaccaguucggcacaaugccuucccucacccuggcgugucuuacaaaacagggccaagucgaccugaaugaugccgugcaggcucucaccgaccuggggcugauuuacacggccaaguauccgaacaccagcgaccucgaucggcugacacagucccaucccauccuuaauaugaucgacaccaagaaaucuagccugaacauuuccggauacaauuuuagccucggcgcugccgugaaggcgggggccugcaugcuggauggaggcaacaugcuugaaacaaucaaagucucuccucaaaccauggacgggauucugaaguccauccucaaaguuaagaaagcucugggaauguucauuagcgauacgcccggcgagcgcaacccuuaugaaaauauccuguacaagauuugucucucuggcgacggguggcccuauaucgccagcagaacauccaucaccggacgggcuugggagaacacagugguggaucuggagucugacggcaagccucagaaagccgggagcaauaacuccaauaagagccuucagucugccggauuuaccgcuggccugaccuacucccagcucaugacacugaaagaugcgaugcugcaacuugacccgaacgccaagacguggauggauauugaagggagacccgaggacccugucgaaguggcucucuaccagcccagcucuggaugcuauauccacuucuuucgcgagccuaccgaccugaaacaguucaagcaggaugccaaguacucccauggcauugacguuacagaucuguuugccgcucaacccggccucaccagcgccgugaucgacgcgcugccgcggaauauggucauuacaugucagggguccgaugacaucagaaaacuucuggaaucucagggacgcaaggauaucaaacucauugacaucgcucugagcaagaccgauucccggaaauaugagaacgccgugugggaccaguacaaggaucugugccacaugcauacgggcguuguggucgagaagaaaaagagagggggaaaagaagagauuacaccucacugugcccuuauggacugcaucauguucgaugcugccgugucuggcgggcucaauaccagcguccugcgcgcugugcugccccgggacaugguuuuuagaaccuccacaccucgcgugguccucugaggacuagucccuguucccagagcccacuuuuuuuucuuuuuuugaaauaaaauagccugucuuucagaucucaaaggcucuuuucagagccaccaaaaaaaaaaaaaaaaaaaaaaaaaaaaaaaaaaaaaaaaaaaaaaaaaaaaaaaaaaaaaaaaagaauu

SEQ ID NO: 17150 - RNA, 1970 nt, Artificial Sequence
  mRNA product Design a-2 (hSL-A64-N5) comprising derived and/or modified sequence from LASV(Mad39;Clade IV)__ANH09723__NP (opt5)
aggagaguccgcucagccagguugcagaagcggcuuagcguguguccuaaucuucucucugcguguagguaggccugugccgcaaacaagcuuaccaugagcgccuccaaggagaucaaaucuuuccuguggacccagagccucagacgggaacuguccggcuacugcucuaacauuaagcugcaaguggucaaagacgcucaggcccugcuccacgggcuggauuuuagcgagguuuccaaugugcagcgccuuaugagaaagcagcggcgcgacgauaacgaccugaaaagacuccgggaucugaaucaagcggugaacaaucuggucgaacucaagucuacacagcaaaagagcgugcugcgcguuggaacgcuuaccuccgacgaucugcucacacuggcugccgaccuugagaaacuuaagagcaaagugaccagaacagaacggccccucaccgccggcgucuauauggggaaccugucuucccagcagcuggaucagcgcagagcucuccugaauaugaucggaaugagcggcgggaaccagggagcccggacaggccgcgacggcgugguuagagugugggaugucaagaaugcugagcuucugaacaaucaguucgggaccaugccuucucucacgcuggccugucuuaccaaacaaggacagguggaccugaacgaugugguccaggcgcucacagaccugggccugauuuacaccgccaaguauccgaauacauccgaccucgaucggcugacccaaagccaucccauccuuaacaugauugacacgaauaagucuucccugaacaucagcggguacaacuuuucccucggagcugccguuaaagcuggcgccugcaugcuggaugggggaaauaugcuugagacaaucaaggugucuccucagaccauggacggcauucugaaaagcauccucaaggugaaaaagucccugggcauguucauuagcgauacacccggggaacgcaacccuuaugagaauauccuguacaaaauuugucucucuggagacggcuggcccuauaucgcguccagaaccagcauuaccgggcgggccugggaaaacacagucguggaucuggagucuggaggcaagccucagaaggcugggagcaauaacuccaauaaaucucuucagagcgccggauuugcugccggccugacguacucccaacucaugacccugaaggacgccaugcugcagcuugauccgaacgcuaaaacauggauggacaucgagggcagacccgaagauccuguugagaucgcgcucuaccagcccauuagcgggugcuauauccacuucuuucgcgaaccuaccgaccugaagcaguucaaacaagacgccaaguacucucauggaauugaugugacagaccuguuugcugcccagcccggccucaccuccgccgucaucgaggcucugccgcggaauauggugauuacgugucaggggagcgaugacaucagaaaacuuuucgaaucucagggacgcaaggauaucaagcugauugacaucgcccucuccaaaacagauagccggaaguaugagaacgcgguuugggaccaauacaaagaucugugccacaugcauaccggcguggucguggagaagaagaaaaagggcgggaaagaagagauuaccccucacugugcucugauggacugcaucauguuugaugccgccgucuccggaggccuuaauacacucgugcugagagcuguucugccccgcgacaugguguuccggaccucuacaccuaaggucgugcucugaggacuagucccuguucccagagcccacuuuuuuuucuuuuuuugaaauaaaauagccugucuuucagaucucaaaggcucuuuucagagccaccaaaaaaaaaaaaaaaaaaaaaaaaaaaaaaaaaaaaaaaaaaaaaaaaaaaaaaaaaaaaaaaaagaauu

SEQ ID NO: 17151 - RNA, 1970 nt, Artificial Sequence
  mRNA product Design a-2 (hSL-A64-N5) comprising derived and/or modified sequence from LASV(Z0947-SLE-2011;Clade IV)__AIT17841__NP (opt5)
aggagaguccgcucagccagguugcagaagcggcuuagcguguguccuaaucuucucucugcguguagguaggccugugccgcaaacaagcuuaccaugagcgccuccaaggagaucaaaucuuuccuguggacccagagccucagacgggaacuguccggcuacugcucuaacauuaagcugcaaguggucaaagacgcucaggcccugcuccacgggcuggauuuuagcgagguuuccaaugugcagcgccuuaugagaaaggaacggcgcgacgauaacgaccugaaaagacuccgggaucugaaucaggcggugaacaaucuggucgagcucaagucuacacaacaaaagagcauccugcgcgugggaacgcuuaccuccgacgaucugcucauucuggcugccgaccuugaaaaacuuaagagcaaaguuacaagaaccgagcggccccucucugccggcguguauauggggaaccuguccagccagcagcuggaucagcgcagagcucuccugaauaugaucggaaugucuggcuccaaccagggggcccggacaggacgcgacggcgucgugagaguuugggaugugaagaaugcugagcuucugaacaaucaguucggcaccaugccuagccucacacuggccugucuuaccaaacaggggcaagucgaccugaacgaugcggugcaggcccucacggaccugggacugauuuacaccgcuaaguauccgaauacaucugaccucgaucggcugacccagucccaucccauccuuaacaugaucgacacaaagaaaagcucccugaauauuucuggcuacaacuuuagccucggggccgcugugaaggccggagcgugcaugcuggauggcgggaacaugcuugaaaccaucaaagucuccccucaaacgauggacggcauucucaagagcauccugaaaguuaagaaagcccugggaauguucauuucugaugcucccggcgagcgcaauccuuaugaaaacauccuguacaagauuugucucuccggggacggauggcccuauaucgccagcagaacaucuaucaccggccgggcuugggagaauacagugguggaucuggagagcgacgggaagccucagaaagccggauccaacggcucuaauaagagccuucaguccgccggguuuaccgcuggacugaccuacagccagcucaugacacugaaagaugcgaugcugcaacuugacccgaacgccaagacguggauggauauugaaggcagacccgaggacccugucgaaaucgcucucuaccagcccucuuccggcugcuauauucacuucuuucgcgagccuaccgaccugaaacaguucaagcaggaugccaaguacagccaugggaucgacgugacagaucuguuugccgcucaacccggacucaccucugccguuauugacgcgcugccgcggaauauggugaucacaugucagggcuccgaugacaucagaaaacuuuucgaaagccaggggcgcaaggauauuaaacugaucgacauugcucucuccaagaccgauucucggaaauaugagaacgccgucugggaccaguacaaggaucugugccacaugcauacgggaaucgugguugagaagaaaaagagaggcgggaaagaagagauuacaccucacugugcccugauggacugcaucauguuugaugcugccgugagcggcggacuuaauaccuccguccuccgcgcugugcugccccgggacauggucuucagaaccucuacaccucgcgugguucugugaggacuagucccuguucccagagcccacuuuuuuuucuuuuuuugaaauaaaauagccugucuuucagaucucaaaggcucuuuucagagccaccaaaaaaaaaaaaaaaaaaaaaaaaaaaaaaaaaaaaaaaaaaaaaaaaaaaaaaaaaaaaaaaaagaauu

SEQ ID NO: 17152 - RNA, 2001 nt, Artificial Sequence
  mRNA product Design a-2 (hSL-A100) comprising derived and/or modified sequence from LASV(Josiah;Clade IV)__NP_694869__NP (opt1)
aggagaguccgcucagccagguugcagaagcggcuuagcguguguccuaaucuucucucugcguguagguaggccugugccgcaaacaagcuuaccaugagcgccuccaaggagaucaagagcuuccuguggacccagucccuccgccgggagcugagcggcuacugcuccaacaucaagcuccagguggucaaggacgcccaggcgcugcugcacgggcuggacuucagcgagguguccaacgugcagcgccucaugcggaaggagcgccgggacgacaacgaccugaagcgccugcgggaccucaaccaggccgucaacaaccugguggagcucaagagcacccagcagaaguccauccugcgcgugggcacccugaccagcgacgaccugcucauccuggccgccgaccuggagaagcucaaguccaaggucauccggaccgagcgcccccugagcgccgggguguacaugggcaaccuguccagccagcagcucgaccagcggcgcgcgcugcugaacaugaucgggauguccggcggcaaccagggggcccgggccggccgcgacggggugguccgggugugggacgugaagaacgccgagcuccugaacaaccaguucggcaccaugccgagccugacgcucgcgugccugaccaagcaggggcaggucgaccugaacgacgccgugcaggcccucaccgaccugggccugaucuacaccgccaaguaccccaacacguccgaccucgaccgccugacccagagccaccccauccugaacaugaucgacaccaagaaguccagccucaacaucagcggcuacaacuucucccugggggccgcggugaaggccggcgccugcaugcuggacgggggcaacaugcucgagaccaucaaggucagcccccagacgauggacggcauccugaaguccauccugaaggugaagaaggcccucgggauguucaucagcgacaccccgggcgagcggaaccccuacgagaacauccuguacaagaucugccuguccggggacggcuggcccuacaucgccagccgcaccuccaucaccgggcgggcgugggagaacacgguggucgaccucgagagcgacggcaagccccagaaggccgacuccaacaacagcuccaagagccugcaguccgccggcuucaccgccgggcugaccuacagccagcucaugacccugaaggacgccaugcugcagcuggacccgaacgcgaagacguggauggacaucgagggccgccccgaggaccccguggagaucgcccucuaccagcccuccagcgggugcuacauccacuucuuccgggagccgaccgaccugaagcaguucaagcaggacgccaaguacucccacggcaucgacgugaccgaccuguucgccacccagcccgggcucacgagcgccgucaucgacgcgcugccccgcaacauggugaucacgugccagggcuccgacgacauccgcaagcugcucgagagccagggccggaaggacaucaagcugaucgacaucgcccugagcaagaccgacucccgcaaguacgagaacgccgugugggaccaguacaaggaccucugccacaugcacaccggggucguggucgagaagaagaagcggggcgggaaggaggagaucaccccgcacugcgcccugauggacugcaucauguucgacgcggccgugagcggcgggcugaacaccuccgugcuccgcgccguccugccccgggacaugguguuccgcaccagcacgccccgggugguccugugaggacuagucccuguucccagagcccacuuuuuuuucuuuuuuugaaauaaaauagccugucuuucagaucucaaaggcucuuuucagagccaccaaaaaaaaaaaaaaaaaaaaaaaaaaaaaaaaaaaaaaaaaaaaaaaaaaaaaaaaaaaaaaaaaaaaaaaaaaaaaaaaaaaaaaaaaaaaaaaaaaaaa

SEQ ID NO: 17153 - RNA, 2001 nt, Artificial Sequence
  mRNA product Design a-2 (hSL-A100) comprising derived and/or modified sequence from LASV(LP;Clade I)__AAF86702__NP (opt1)
aggagaguccgcucagccagguugcagaagcggcuuagcguguguccuaaucuucucucugcguguagguaggccugugccgcaaacaagcuuaccaugagcaacuccaaggagaucaagagcuuccuguggacccagucccuccgccgggagcugagcggcuacugcuccaacaucaagcuccagguggucaaggacgcccaggcccugcugcacgggcuggacuucagcgagguguccaacgugcagcgccucaugcggaagcagaagcgcgacgacgcggaccugaagcggcugcgcgaccucaaccaggccgucaacaaccugguggagcucaagagcacccagcagaagaacgugcugcgggucggcacgcuguccagcgacgaccugaucacccucgccgccgaccuggagaagcugaaguccaaggugauccgcaccgagcggccccucagcuccgggguguacaugggcaaccugagcucccagcagcuggaccagcgccgggcccuccugagcaugaucgggauguccggcggcccgcaggggaaccgcaccggcggggacggcgucgugcgggugugggacgucaagaacgcggagcugcucaacaaccaguucgggacgaugcccagccugacccuggccugccucaccaagcagggccagguggaccugaacgacgccgugcaggcccugaccgaccucggccugaucuacacggcgaaguaccccaacuccagcgaccuggacaugcucacccagagccaccccauccuggggauggucgacaccaagaaguccagccugaacaucuccggcuacaacuucagccucggggccgccgugaaggccggcgccugcaugcuggacggcgggaacaugcuggagaccaucaagguguccccgcagacgauggacggcauccucaagagcauccugaaggucaagcgcucccuggggauguucaucagcgacacccccggcgagcggaaccccuacgagaacauccucuacaagaucugccuguccggggagggcuggcccuacaucgcgagccgcaccuccaucaccggccgggccugggagaacacgcugguggaccucgagagcgacaacaagccgcccaagcugaacuccgccgggagcaacaagucccugcaggccgccggccucaacgcggggcugaccuacagccagcugaugacccugaaggacugcaugcuccagcuggaccccuccagcaagaccuggaucgacaucgagggccgccccgaggacccgguggagaucgcccuguuccagcccuccagcgggugcuacauccacuucuuccgggagcccacggaccucaagcaguucaagcaggacgccaaguacagccacggcaucgacgucaccgaccuguucuccacccagcccggccugaccagcgccgugaucgaggcccucccgcgcaacauggugcugacgugccagggguccgacgacaucaagaagcugcucgagagccagggccggcgcgacaucaagcugaucgacaucucccugagcaaggcggacucccgcaaguucgagaacgccgucugggaccaguacaaggaccucugccacaugcacaccgggguggucguggagaagaagaagcggggcgggaaggaggagaucacgccccacugcgcccugcuggacugcaucauguucgacgccgccaccaccggcagccucaacaucaccacccugcgcgcggugcugccccgggacauggucuuccgcaccuccacgcccaagguggugcucugaggacuagucccuguucccagagcccacuuuuuuuucuuuuuuugaaauaaaauagccugucuuucagaucucaaaggcucuuuucagagccaccaaaaaaaaaaaaaaaaaaaaaaaaaaaaaaaaaaaaaaaaaaaaaaaaaaaaaaaaaaaaaaaaaaaaaaaaaaaaaaaaaaaaaaaaaaaaaaaaaaaaa

SEQ ID NO: 17154 - RNA, 2001 nt, Artificial Sequence
  mRNA product Design a-2 (hSL-A100) comprising derived and/or modified sequence from LASV(803213;Clade II)__AAF86704__NP (opt1)
aggagaguccgcucagccagguugcagaagcggcuuagcguguguccuaaucuucucucugcguguagguaggccugugccgcaaacaagcuuaccaugagcgccuccaaggaggugaaguccuuccuguggacccagagccuccgccgggagcugagcggcuacugcuccaacaucaagcugcaggucgugaaggacgcccaggcgcuccugcacgggcuggacuucagcgaggugaacaacguccagcgccucaugcggaagcagaagcgcgacgacggcgaccugaagcggcugcgcgaccucaaccaggccgugaacaaccugguggagcugaaguccacccagcagaaguccauccuccgggucgggacgcugaccagcgacgaccugcucacccuggccgccgaccuggagaagcucaagagcaaggugauccgcaccgagcggccccuguccagcggcguguacauggggaaccuguccacgcagcagcucgagcagcgccgggcccugcugaacaugaucggcauggucggcggggcgcagggcacccagccggggcgcgacggcguggugcgggucugggacgugaagaaccccgaccuccugaacaaccaguucgggaccaugcccagccugacccucgccugccugacgaagcagggccagguggaccugaacgacgccguccucgcccugaccgaccugggccucaucuacaccgcgaaguaccccaacuccagcgaccuggaccgccugucccagagccacccgauccucaacaugguggacaccaagaaguccagccugaacaucagcggguacaacuucucccugggcgccgccgugaaggccggggccugcaugcucgacggcggcaacaugcuggagacgaucaaggucacgccccagaccauggacgggauccucaagagcauccugaaggugaagcggucccugggcauguucgugagcgacacccccggggagcgcaaccccuacgagaacauccuguacaagaucugccucuccggcgacggguggccguacaucgcgagccggaccuccaucgucggccgcgccugggagaacaccaccguggaccuggagagcgacggcaagccccagaagguggggaccgccggcuccaacaagagccugcaguccgccggguuccccacgggccucaccuacagccagcugaugacccugaaggacuccaugaugcagcuggaccccagcgccaagaccuggaucgacaucgaggggcggccggaggaccccgucgagaucgcgcucuaccagcccauguccggcugcuacauccacuucuuccgcgagcccacggaccugaagcaguucaagcaggacgccaaguacagccacggcaucgacguggccgaccuguucccggcccagcccgggcucaccuccgccgucaucgaggcgcugccccggaacauggugcugaccugccagggcagcgacgacaucaagaagcuccuggacucccaggggcgccgcgacaucaagcugaucgacaucagccucagcaagguggacucccggaaguucgagaacgccgucugggaccagugcaaggaccugugccacaugcacaccggcgugguggucgagaagaagaagcgcgggggcaaggaggagaucacgccccacugcgcccugauggacugcaucauguucgacgccgccgugagcggcgggcucaacaucccggugcugcgggcgguccugccccgcgacaugguguuccggaccuccagccccaaggugguccucugaggacuagucccuguucccagagcccacuuuuuuuucuuuuuuugaaauaaaauagccugucuuucagaucucaaaggcucuuuucagagccaccaaaaaaaaaaaaaaaaaaaaaaaaaaaaaaaaaaaaaaaaaaaaaaaaaaaaaaaaaaaaaaaaaaaaaaaaaaaaaaaaaaaaaaaaaaaaaaaaaaaaa

SEQ ID NO: 17155 - RNA, 2004 nt, Artificial Sequence
  mRNA product Design a-2 (hSL-A100) comprising derived and/or modified sequence from LASV(GA391;Clade III)__CAA36646__NP (opt1)
aggagaguccgcucagccagguugcagaagcggcuuagcguguguccuaaucuucucucugcguguagguaggccugugccgcaaacaagcuuaccaugagcgccuccaaggaggugcgcagcuuccuguggacccagucccuccggcgcgagcugagcggcuacugcuccaacaucaagcugcaggucgugaaggacgcccaggcgcuccugcacgggcuggacuucagcgagguguccaacguccagcggcucaugcgcaagcagaagcgggacgacggcgaccugaagcgccugcgggaccucaaccaggccgugaacaaccugguggagcucaagagcacccagcagaaguccguccugcgcguggggacccugagcuccgacgaccugcucauccuggccgccgaccuggagaagcucaagagcaaggugacccggaccgagcgcccccuguccagcggcgucuacauggggaaccuguccagccagcagcucgaccagcggcgcgcccugcugaacaugaucggcaugaccggcguguccgggggcgggaagggcgcgagcgacgggaucgugcgggucugggacgugaagaacgccgagcuccugaacaaccaguucggcacgaugccgucccugacccucgccugccugaccaagcagggccagguggaccugaacgacgccguccaggcgcucaccgaccuggggcugaucuacacggccaaguaccccaacagcagcgaccucgaccgccugucccagagccaccccauccugaacaugaucgacaccaagaaguccagccucaacaucuccggcuacaacuucagccugggggccgccgugaaggccggcgcgugcaugcuggacggcgggaacaugcucgagaccaucaaggugagcccccagaccauggacggcauccucaaguccauccugaaggucaagaagucccuggggauguucgugagcgacacgccgggcgagcggaaccccuacgagaacauccuguacaagaucugccuguccggggacggcuggcccuacaucgccagccgcaccuccaucgugggccgggccugggagaacaccgucguggaccucgagcaggacaacaagccccagaagaucgggaacggcgggagcaacaagucccugcagagcgccggcuucgccgcggggcugaccuacucccagcucaugacgcugaaggacuucaagugcuucaaccugaucccgaacgccaagaccuggauggacaucgagggccgccccgaggaccccguggagaucgcccuguaccagcccagcuccggcugcuacguccacuucuuccgggagccgaccgaccucaagcaguucaagcaggacgccaaguacagccacgggaucgacgugaccgaccuguucgccgcgcagcccggccugacgagcgccgucaucgaggcccucccccgcaacauggugaucacgugccagggguccgaggacauccggaagcugcuggagagccagggccgccgcgacaucaagcucaucgacaucacccuguccaaggccgacagccggaaguucgagaacgccgugugggaccaguucaaggaccugugccacaugcacaccggggucgugguggagaagaagaagcgcggcggcaaggaggagaucacgccccacugcgcgcucauggacugcaucauguucgacgccgccgucuccgggggccuggacgccaaggugcugcgggugguccucccgcgcgacaugguguuccggaccagcacccccaaggugguccugugaggacuagucccuguucccagagcccacuuuuuuuucuuuuuuugaaauaaaauagccugucuuucagaucucaaaggcucuuuucagagccaccaaaaaaaaaaaaaaaaaaaaaaaaaaaaaaaaaaaaaaaaaaaaaaaaaaaaaaaaaaaaaaaaaaaaaaaaaaaaaaaaaaaaaaaaaaaaaaaaaaaaa

SEQ ID NO: 17156 - RNA, 2001 nt, Artificial Sequence
  mRNA product Design a-2 (hSL-A100) comprising derived and/or modified sequence from LASV(AV;Clade V)__CCA30315__NP (opt1)
aggagaguccgcucagccagguugcagaagcggcuuagcguguguccuaaucuucucucugcguguagguaggccugugccgcaaacaagcuuaccaugagcgccuccaaggaggugaaguccuuccuguggacccagagccuccgccgggagcugagcggcuacugcuccaacaucaagcugcaggucgugaaggacgcccaggcgcuccugcacgggcuggacuucagcgagguguccaacguccagcgccucaugcggaagcagcgccgggacgacagcgaccugaagcgccugcgggaccucaaccaggccgugaacaaccugguggagcugaaguccacccagcagaaguccguccuccgcgugggcacgcugagcagcgacgaccugcucacccuggccgccgaccuggagaagcucaaguccaaggugacccggaccgagcgcccccugagcuccggggucuacaugggcaaccugagcucccagcagcucgaccagcggcgcgcccugcugaaccucaucgggaugacgaacggcagccagggcucccaggcggggcgggacggcguggugcgcgucugggacgugaagaacgccgagcugcugaacaaccaguucgggaccaugccgagccucacccuggccugccugaccaagcagggccagguggaccucaacgacgucgugcaggcccugacggaccuggggcucaucuacaccgcgaaguaccccaacaccagcgaccuggaccggcugacccagucccaccccauccucaacaugaucgacacgaagaaguccagccugaacaucagcggcuacaacuucucccugggcgccgccgugaaggccggggccugcaugcucgacggcgggaacaugcuggagaccaucaaggucagcccccaguccauggacggcauccucaagagcauccugaaggugaagcgcgcgcugggcauguucguguccgacaccccgggggagcggaaccccuacgagaacauccuguacaagaucugccucagcggcgacggguggcccuacaucgccucccgcaccagcaucgucggccgggccugggagaacacggugguggaccuggagaccgacgggaagccccagaagaucggcuccggcaacagcaacaagucccugcagagcgccggguucuccgccggccucaccuacagccagcugaugacccugaaggacgcgaugcugcagcucgacccgaacgccaagacguggauggacaucgaggggcgccccgaggaccccgucgagguggcccuguaccagcccaucuccggcugcuacauccacuucuuccgggagccgaccgaccugaagcaguucaagcaggacgccaaguacagccacgggaucgacaucgccgaccucuucgcggcccagcccggccugaccagcgccgucaucgaggcccugccccgcaacauggugaucacgugccagggcuccgaggacaucaagaagcuccuggagagccaggggcgcaaggacaucaagcugaucgacaucgcccucuccaagaucgacagccggaaguucgagaacgcggugugggaccaguacaaggaccugugccacaugcacaccggcgucgugguggagaagaagaagcgcgggggcaaggaggagaucaccccgcacugcgcccugauggacugcaucauguucgacgccgccgucuccgggggccucaacacccuggugcugcgggcggugcucccccgcgacauggucuuccggaccagcacgccccgcguggugcugugaggacuagucccuguucccagagcccacuuuuuuuucuuuuuuugaaauaaaauagccugucuuucagaucucaaaggcucuuuucagagccaccaaaaaaaaaaaaaaaaaaaaaaaaaaaaaaaaaaaaaaaaaaaaaaaaaaaaaaaaaaaaaaaaaaaaaaaaaaaaaaaaaaaaaaaaaaaaaaaaaaaaa

SEQ ID NO: 17157 - RNA, 2001 nt, Artificial Sequence
  mRNA product Design a-2 (hSL-A100) comprising derived and/or modified sequence from LASV(Togo/2016/7082;Clade VI)__AMR44578__NP (opt1)
aggagaguccgcucagccagguugcagaagcggcuuagcguguguccuaaucuucucucugcguguagguaggccugugccgcaaacaagcuuaccaugagcaacuccaaggaggugaaguccuuccuguggacccagagccuccgccgggagcugagcggcuacugcuccaacaucaagcugcaggucgugaaggacgcccaggcccuccugcacgggcuggacuucagcgagguguccaacguccagcgccucaugcggaagcagaagcgcgacgacggcgaccugaagcggcugcgcgaccucaaccaggcggugaacaaccugguggagcucaagagcguccagcagaaguccauccugcggguggggacccugaccagcgacgaccugcucacccuggccgccgaccuggagaagcucaaguccaaggugacccgcaccgagcggccccugagcuccggcgucuacauggggaaccugagcucccagcagcucgaccagcgccgggcccugcugagcaugaucggcauguccggcgggaaccagaacagccagccgaagggcgacgggguggugcgcgucugggacgugaagaacgccgaccuccugaacaaccaguucggcacgaugcccucccugacccucgcgugccugaccaagcagggccagguggaccugaacgacgccguccaggcccucaccgaccuggggcugaucuacacggccaaguaccccaacagcagcgaccucgaccggcugucccagagccaccccauccugaacaugaucgacaccaagaaguccagccucaacaucuccggcuacaacuucagccugggggcggccaucaagaccggcgccugcaugcuggacgggggcaacaugcucgagaccaucaaggugacgccgcagaccauggacggcauccugaaguccauccugaaggugaagcgcagccucgggauguucaucuccgacacccccggcgagcggaaccccuacgagaacauccuguacaagaucugccugagcggggacggcuggcccuacaucgccucccgcaccgccaucaucgggcgggcgugggagaacacggucguggaccucgagagcgacuccaagccgcagaagaucggcagcaacggcuccaacaagagccugcaguccgccggguucgcccccggccugaccuacagccagcucaugacccugaaggacuccaugcugcagcuggaccccaacgccaagaccuggaucgacaucgaggggcgccccgaggacccgguggaggucgcccucuuccagcccaucagcggcugcuacauccacuucuuccgggagcccacggaccugaagcaguucaagcaggacgcgaaguacagccacgggaucgacgugaccgaccuguucgccgcccagcccggccucaccuccgccgugaucgaggcccugccgcgcaacaugguccugaccugccagggcagcgacgacaucaagaagcuccuggacucccaggggcggcgcgacaucaagcugaucgacgugagccucaacaagaucgacucccgcaaguucgagaacgcggucugggaccaguacaaggaccugugccacaugcacacgggcgugguggucgagaagaagaagaagggcgggaaggaggagaucacgccccacugcgcccugcucgacugcaucauguucgacgccgccgugagcgggggccugaacgccaccgugcugcgggcgguccucccccgcgacaugguguuccggaccuccagccccaaggugguccugugaggacuagucccuguucccagagcccacuuuuuuuucuuuuuuugaaauaaaauagccugucuuucagaucucaaaggcucuuuucagagccaccaaaaaaaaaaaaaaaaaaaaaaaaaaaaaaaaaaaaaaaaaaaaaaaaaaaaaaaaaaaaaaaaaaaaaaaaaaaaaaaaaaaaaaaaaaaaaaaaaaaaa

SEQ ID NO: 17158 - RNA, 2001 nt, Artificial Sequence
  mRNA product Design a-2 (hSL-A100) comprising derived and/or modified sequence from LASV(KAK-428;Clade n.d. (VII))__ANH09741__NP (opt1)
aggagaguccgcucagccagguugcagaagcggcuuagcguguguccuaaucuucucucugcguguagguaggccugugccgcaaacaagcuuaccaugagcaacuccaaggaggugaaguccuuccuguggacccagagccuccgccgggagcugagcggcuacugcaccaacaucaagcugcaggucgugaaggacgcccaggcccuccugcacgggcuggacuucuccgaggugagcaacguccagcgccucaugcggaagcagaagcgcgacgacaacgaccugaagcggcugcgcgaccucaaccaggcggugaacaaccugguggagcugaaguccguccagcagaaguccgugcucaaggugggcacgcugaacagcgacgaccugcucacccuggccgccgaccuggagaagcucaagagcaaggucgugcggaccgagcgcccccuguccagcgggguguacaugggcaaccuguccagccagcagcucgaccagcggcgcgcccugcugaacaugaucgggauggccggcggcucccaggggaaccagccgagccgggacggcgucgugcgcgugugggacgucaagaacgcggaccuccugaacaaccaguucgggaccaugcccucccugacgcucgccugccugaccaagcagggccagguggaccugaacgacgugguccucgcccugaccgaccuggggcucaucuacaccgccaaguaccccaacagcuccgaccuggaccggcugagccagaaccaccccgugcucaacaugaucgacgugaacaagagcucccugaacaucagcggcuacaacuucucccugggcgcggccgucaaggccggggccugcaugcucgacggcgggaacaugcuggagacgaucaagaucagcccgcagaccguggacggcauccugaaguccauccucaaggugaagcgcgcccugggcauguucgucagcgacacccccggggagcggaaccccuacgagaacauccuguacaaggugugccucuccggcaacggguggcccuacaucgcgagccgcaccuccaucgucggccgggccugggagaacacggugguggaccuggagagcaacaagaaccagccgaaggucgggaacaacggcuccaacaagaugcugcagagcuccggcuucgccaccgggcucaccuacagccagcugaugacccugcgcgacuccaugcugcagcucgaccccacggccaagaccuggaucgacaucgagggccggcccgaggaccccguggagcuggcccuguuccagccgagcuccgggugcuacauccacuucuuccgcgagcccaccgaccucaagcaguucaagcaggacgcgaaguacagccacggcaucgacgugaacgaccuguucuccgcccagcccgggcugaccagcgccguccucgaggcccugccccggaacauggugcugacgugccagggcagcgacgacauccgcaagcuccuggacucccaggaccgcaaggacaucaagcugaucgacaucagccucuccaaggccgacgcgcggaaguucgagaacgacgugugggaccaguucaaggaccugugccacaugcacaccggcaucgucguggagaagaagaagaagggcgggaagcaggagaugaccccgcacugcgcccugcucgacugcaucauguucgacgccgccgugagcgggggccugaacguccccacccugcgcgccgugcuccccacggacaugguguuccggaccaucaccaccaaggucgugcugugaggacuagucccuguucccagagcccacuuuuuuuucuuuuuuugaaauaaaauagccugucuuucagaucucaaaggcucuuuucagagccaccaaaaaaaaaaaaaaaaaaaaaaaaaaaaaaaaaaaaaaaaaaaaaaaaaaaaaaaaaaaaaaaaaaaaaaaaaaaaaaaaaaaaaaaaaaaaaaaaaaaaa

SEQ ID NO: 17159 - RNA, 2001 nt, Artificial Sequence; identical to SEQ ID NO: 17153
  mRNA product Design a-2 (hSL-A100) comprising derived and/or modified sequence from LASV(Pinneo-NIG-1969;Clade I)__AIT17837__NP (opt1)

SEQ ID NO: 17160 - RNA, 2001 nt, Artificial Sequence
  mRNA product Design a-2 (hSL-A100) comprising derived and/or modified sequence from LASV(ISTH0009-NIG-2011;Clade II)__AIT17405__NP (opt1)
aggagaguccgcucagccagguugcagaagcggcuuagcguguguccuaaucuucucucugcguguagguaggccugugccgcaaacaagcuuaccaugagcguguccaaggaggucaagagcuuccuguggacccagucccuccgccgggagcugagcggcuacugcuccaacaucaagcuccagguggugaaggacgcccaggcccugcugcacgggcuggacuucagcgaggucuccaacgugcagcgccucaugcggaagcagaagcgcgacgacagcgaccugaagcggcugcgcgaccucaaccaggcggugaacaaccuggucgagcugaaguccacccagcagaaguccauccuccgggugggcacccugaccagcgacgaccugcucacccuggccgccgaccuggagaagcucaagagcaaggugauccgcaccgagcggccccuguccagcggggucuacaugggcaaccuguccacgcagcagcucgagcagcgccgggcccugcugaacaugaucgggauggugggcggcgcccaggggacccagccgggccgcgacggggugguccgggugugggacgugaagaaccccgaccuccugaacaaccaguucggcaccaugcccagccugacccucgcgugccugacgaagcaggggcaggucgaccugaacgacgccgugcucgcccugaccgaccugggccucaucuacaccgccaaguaccccaacuccagcgaccuggaccgccugucccagagccacccgauccucaacaugguggacaucaagaaguccagccugaacaucagcggcuacaacuucucccugggggcggccgucaaggccggcgccugcaugcucgacgggggcaacaugcuggagaccaucaaggugacgccccagaccauggacggcauccucaagagcauccugaaggugaagcggucccuggggauguucgucagcgacacccccggcgagcgcaaccccuacgagaacauccuguacaagaucugccucuccggggacggcuggccguacaucgccagccggaccuccaucguggggcgcgcgugggagaacacgaccguggaccuggagagcgacggcaagccccagaaggucggcuccgccgggagcaacaagucccugcagagcgccggcuuccccaccgggcucaccuacucccagcugaugacgcugaaggacagcaugaugcagcuggaccccuccgccaagaccuggaucgacaucgagggccggccggaggaccccguggagaucgcccucuaccagcccaugagcgggugcuacauccacuucuuccgcgagcccaccgaccugaagcaguucaagcaggacgcgaaguacucccacggcaucgacgucgccgaccuguucccggcccagcccggccucaccagcgccgugaucgaggcccugccccggaacauggugcugacgugccaggggagcgacgacaucaagcgccuccuggacucccagggccgccgggacaucaagcugaucgacaucgcgcucagcaaggccgacucccgccgguucgagaacgccgucugggaccagugcaaggaccugugccacaugcacaccggggugguggucgagaagaagaagcgcggcgggaaggaggagaucacgccccacugcgcccugauggacugcaucauguacgacgccgcggugagcggcggccucaacaucccggugcugcgggccguccugccccgcgacaugguguuccggaccuccagccccaaggugguccucugaggacuagucccuguucccagagcccacuuuuuuuucuuuuuuugaaauaaaauagccugucuuucagaucucaaaggcucuuuucagagccaccaaaaaaaaaaaaaaaaaaaaaaaaaaaaaaaaaaaaaaaaaaaaaaaaaaaaaaaaaaaaaaaaaaaaaaaaaaaaaaaaaaaaaaaaaaaaaaaaaaaaa

SEQ ID NO: 17161 - RNA, 2001 nt, Artificial Sequence
  mRNA product Design a-2 (hSL-A100) comprising derived and/or modified sequence from LASV(ISTH2010-NIG-2012;Clade II)__AIT17483__NP (opt1)
aggagaguccgcucagccagguugcagaagcggcuuagcguguguccuaaucuucucucugcguguagguaggccugugccgcaaacaagcuuaccaugagcgccuccaaggaggugaaguccuuccuguggacccagagccuccgccgggagcugagcggcuacugcuccaacaucaagcugcaggucgugaaggacgcccaggcgcuccugcacgggcuggacuucagcgagguguccaacguccagcgccucaugcggaagcagaagcgcgacgacagcgaccugaagcggcugcgcgaccucaaccaggccgugaacaaccugguggagcugaaguccacccagcagaaguccauccuccgggucggcacgcugaccagcgacgaccugcucacccuggccgccgaccuggagaagcucaagagcaaggugauccgcaccgagcggccccuguccagcgggguguacaugggcaaccuguccacgcagcagcucgagcagcgccgggcccugcugaaccucaucgggauggucggcggcgcgcaggggacccagccgggccgcgacgggguggugcgggucugggacgugaagaaccccgaccugcugaacaaccaguucggcaccaugcccagccucacccuggccugccugacgaagcagggccagguggaccucaacgacgccguccuggcccugaccgaccucgggcugaucuacaccgcgaaguaccccaacuccagcgaccuggaccgccucucccagagccacccgauccugaacaugguggacaccaagaaguccagccugaacaucagcggcuucaacuucucccucggggccgccgugaaggccggcgccugcaugcuggacgggggcaacaugcuggagacgaucaaggucacgccccagaccauggacggcauccucaagagcauccugaaggugaagaagucccuggggauguucgugagcgacacccccggcgagcggaaccccuacgagaacauccucuacaagaucugccuguccggggacggcuggccguacaucgcgagccgcaccuccaucgucgggcgggccugggagaacaccaccguggaccuggagagcgacggcaagccccacaaggugggcaccgccggguccaacaagagccuccaguccgccggcuuccccacggggcugaccuacagccagcugaugacccugaaggacuccaugaugcagcucgaccccagcgccaagaccuggaucgacaucgagggccgcccggaggaccccgucgagaucgcgcuguaccagcccauguccgggugcuacauccacuucuuccgggagcccacggaccugaagcaguucaagcaggacgccaaguacagccacggcaucgacguggccgaccucuucccggcccagcccggccugaccuccgccgucaucgaggcgcugccccgcaacauggugcugaccugccaggggagcgacgacaucaagcggcuccuggacagccagggccgccgcgacaucaagcucaucgacaucgcccuguccaaggccgacagccggcgcuucgagaacgccgugugggaccagugcaaggaccugugccacaugcacaccggggucgugguggagaagaagaagcggggcgggaaggaggagaucacgccccacugcgcccucauggacugcaucauguacgacgcggccgucuccggcggccugaacaucccggugcugcgcgccgugcucccccgggacauggucuuccgcaccagcucccccaagguggugcugugaggacuagucccuguucccagagcccacuuuuuuuucuuuuuuugaaauaaaauagccugucuuucagaucucaaaggcucuuuucagagccaccaaaaaaaaaaaaaaaaaaaaaaaaaaaaaaaaaaaaaaaaaaaaaaaaaaaaaaaaaaaaaaaaaaaaaaaaaaaaaaaaaaaaaaaaaaaaaaaaaaaaa

SEQ ID NO: 17162 - RNA, 2001 nt, Artificial Sequence
  mRNA product Design a-2 (hSL-A100) comprising derived and/or modified sequence from LASV(Lassa virus/H.sapiens-wt/NGA/2015/ISTH_0543;Clade II)__AVO03640__NP (opt1)
aggagaguccgcucagccagguugcagaagcggcuuagcguguguccuaaucuucucucugcguguagguaggccugugccgcaaacaagcuuaccaugagcgccuccaaggaggugaaguccuuccuguggacccagagccuccgccgggagcugagcggcuacugcuccaacaucaagcugcaggucgugaaggacgcccaggcgcuccugcacgggcuggacuucagcgagguguccaacguccagcgccucaugcggaagcagaagcgcgacgacagcgaccugaagcggcugcgcgaccucaaccaggccgugaacaaccugguggagcugaaguccacccagcagaaguccauccuccgggucggcacgcugaccagcgacgaccugcucacccuggccgccgaccuggagaagcucaagagcaaggugauccgcaccgagcggccccuguccagcgggguguacaugggcaaccuguccacgcagcagcucgagcagcgccgggcccugcugaacaugaucgggauggucggcggcgcgcaggggacccagccgggccgcgacgggguggugcgggucugggacgugaagaaccccgaccuccugaacaaccaguucggcaccaugcccagccugacccucgccugccugacgaagcagggccagguggaccugaacgacgccguccucgcccugaccgaccuggggcucaucuacaccgcgaaguaccccaacuccagcgaccuggaccgccugucccagagccacccgauccucaacaugguggacaccaagaaguccagccugaacaucagcggcuacaacuucucccugggggccgccgugaaggccggcgccugcaugcucgacgggggcaacaugcuggagacgaucaaggucacgccccagaccauggacggcauccucaagagcauccugaaggugaagaagucccuggggauguucgugagcgacacccccggcgagcggaaccccuacgagaacauccuguacaagaucugccucuccggggacggcuggccguacaucgcgagccgcaccuccaucgucgggcgggccugggagaacaccaccguggaccuggagagcgacggcaagccccagaaggugggcuccgccgggagcaacaagucccugcagagcgccggcuuccccaccgggcucacguacucccagcugaugacccugaaggacagcaugaugcagcuggaccccuccgccaagaccuggaucgacaucgagggccgcccggaggaccccgucgagaucgcgcucuaccagcccaugagcgggugcuacauccacuucuuccgggagcccaccgaccugaagcaguucaagcaggacgccaaguacucccacggcaucgacguggccgaccuguucccggcccagcccggccucacgagcgccgucaucgaggcgcugccccgcaacauggugcugaccugccaggggagcgacgacaucaagcggcuccuggacucccagggccgcaaggacaucaagcugaucgacaucgcccucagcaaggccgacucccgccgguucgagaacgccgugugggaccagugcaaggaccugugccacaugcacaccggggucgugguggagaagaagaagcgcggcgggaaggaggagaucacgccccacugcgcccugauggacugcaucauguacgacgcggccgucagcggcggccucaacaucccggugcugcgggccgugcugccccgcgacauggucuuccggaccuccagccccaagguggugcucugaggacuagucccuguucccagagcccacuuuuuuuucuuuuuuugaaauaaaauagccugucuuucagaucucaaaggcucuuuucagagccaccaaaaaaaaaaaaaaaaaaaaaaaaaaaaaaaaaaaaaaaaaaaaaaaaaaaaaaaaaaaaaaaaaaaaaaaaaaaaaaaaaaaaaaaaaaaaaaaaaaaaa

SEQ ID NO: 17163 - RNA, 2001 nt, Artificial Sequence
  mRNA product Design a-2 (hSL-A100) comprising derived and/or modified sequence from LASV(Lassa virus/H.sapiens-wt/NGA/2016/ISTH_0009;Clade II)__AVO03572__NP (opt1)
aggagaguccgcucagccagguugcagaagcggcuuagcguguguccuaaucuucucucugcguguagguaggccugugccgcaaacaagcuuaccaugagcgccuccaaggaggugaaguccuuccuguggacccagagccuccgccgggagcugagcggcuacugcuccaacaucaagcugcaggucgugaaggacgcccaggcgcuccugcacgggcuggacuucagcgagguguccaacguccagcgccucaugcggaagcagaagcgcgacgacagcgaccugaagcggcugcgcgaccucaaccaggccgugaacaaccugguggagcugaaguccacccagcagaaguccauccuccgggucggcacgcugaccagcgacgaccugcucacccuggccgccgaccuggagaagcucaagagcaaggugauccgcaccgagcggccccuguccagcgggguguacaugggcaaccuguccacgcagcagcucgagcagcgccgggcccugcugaacaugaucgggauggucggcggcgcgcaggggacccagccgggccgcgacgggguggugcgggucugggacgugaagaaccccgaccuccugaacaaccaguucggcaccaugcccagccugacccucgccugccugacgaagcagggccagguggaccugaacgacgccguccucgcccugaccgaccuggggcucaucuacaccgcgaaguaccccaacuccagcgaccuggaccgccugucccagagccacccgauccucaacaugguggacaccaagaaguccagccugaacaucagcggcuacaacuucucccugggggccgccgugaaggccggcgccugcaugcucgacgggggcaacaugcuggagacgaucaaggucacgccccagaccauggacggcauccucaagagcauccugaaggugaagaagucccuggggauguucgugagcgacacccccggcgagcggaaccccuacgagaacauccuguacaagaucugccucuccggggacggcuggccguacaucgcgagccgcaccuccaucgucgggcgggccugggagaacaccaccguggaccuggagagcgacggcaagccccagaaggugggcuccgccgggagcaacaagucccugcagagcgccggcuuccccaccgggcucacguacucccagcugaugacccugaaggacagcaugaugcagcuggaccccuccgccaagaccuggaucgacaucgagggccgcccggaggaccccgucgagaucgcgcucuaccagcccaugagcgggugcuacauccacuucuuccgggagcccaccgaccugaagcaguucaagcaggacgccaaguacucccacggcaucgacguggccgaccuguucccggcccagcccggccucacgagcgccgucaucgaggcgcugccccgcaacauggugcugaccugccaggggagcgacgacaucaagcggcuccuggacucccagggccgccgcgacaucaagcugaucgacaucgcccucagcaaggccgacucccggcgcuucgagaacgccgugugggaccagugcaaggaccugugccacaugcacaccggggucgugguggagaagaagaagcggggcgggaaggaggagaucacgccccacugcgcccugauggacugcaucauguacgacgcggccgucagcggcggccucaacaucccggugcugcgcgccgugcugccccgggacauggucuuccgcaccuccagccccaagguggugcucugaggacuagucccuguucccagagcccacuuuuuuuucuuuuuuugaaauaaaauagccugucuuucagaucucaaaggcucuuuucagagccaccaaaaaaaaaaaaaaaaaaaaaaaaaaaaaaaaaaaaaaaaaaaaaaaaaaaaaaaaaaaaaaaaaaaaaaaaaaaaaaaaaaaaaaaaaaaaaaaaaaaaa

SEQ ID NO: 17164 - RNA, 2001 nt, Artificial Sequence
  mRNA product Design a-2 (hSL-A100) comprising derived and/or modified sequence from LASV(Lassa virus/H.sapiens-wt/NGA/2016/ISTH_0017;Clade II)__AVO03568__NP (opt1)
aggagaguccgcucagccagguugcagaagcggcuuagcguguguccuaaucuucucucugcguguagguaggccugugccgcaaacaagcuuaccaugagcgccuccaaggaggugaaguccuuccuguggacccagagccuccgccgggagcugagcggcuacugcuccagcaucaagcugcaggucgugaaggacgcccaggcgcuccugcacgggcuggacuucuccgaggugagcaacguccagcgccucaugcggaagcagaagcgcgacgacuccgaccugaagcggcugcgcgaccucaaccaggccgugaacaaccugguggagcucaagagcacccagcagaaguccauccugcgggucggcacgcugaccagcgacgaccugcucacccuggccgccgaccuggagaagcucaaguccaaggugauccgcaccgagcggccccugagcuccgggguguacaugggcaaccugagcacgcagcagcucgagcagcgccgggcccugcugaacaugaucgggauggcgggcggcgcccaggggacccagccgggccgcgacggggucgugcgggugugggacgucaagaaccccgaccuccugaacaaccaguucggcaccaugcccucccugacccucgccugccugacgaagcagggccagguggaccugaacgacgccgugcucgcgcugaccgaccuggggcucaucuacaccgccaaguaccccaacagcuccgaccuggaccgccugagccagagccacccgauccucaacauggucgacaccaagaaguccagccugaacaucuccggcuacaacuucagccugggggccgccgugaaggccggcgcgugcaugcucgacgggggcaacaugcuggagacgaucaaggugacgccccagaccauggacggcauccugaaguccauccucaaggucaagcggagccuggggauguucguguccgacgcccccggcgagcgcaaccccuacgagaacauccuguacaagaucugccucagcggggacggcuggccguacaucgccucccggaccagcaucguggggcgcgccugggagaacaccaccgucgaccuggaguccgacggcaagccccagaaggugggcgccaccgggagcaacaagucccugcagagcgcgggcuuccccaccgggcucacguacucccagcugaugacccugaaggacagcaugaugcagcuggaccccuccgccaagaccuggaucgacaucgagggccggccggaggaccccguggaggucgcccucuaccagcccgugagcgggugcuacauccacuucuuccgcgagcccaccgaccugaagcaguucaagcaggacgccaaguacucccacggcaucgacgucgccgaccuguucccggcgcagcccggccucacgagcgccgugaucgaggcccugccccggaacauggugcugaccugccaggggagcgacgacaucaagaagcuccuggacucccagggccgcaaggacaucaagcugaucgacaucgcccucagcaaggccgacucccgccgguucgagaacgcggucugggaccagugcaaggaccugugccacaugcacaccggggugguggucgagaagaagaagcgcggcgggaaggaggagaucacgccccacugcgcccugauggacugcaucauguacgacgccgccgugagcggcggccucaacaucccggugcugcgggcgguccugccccgcgacaugguguuccggaccuccagccccaaggugguccucugaggacuagucccuguucccagagcccacuuuuuuuucuuuuuuugaaauaaaauagccugucuuucagaucucaaaggcucuuuucagagccaccaaaaaaaaaaaaaaaaaaaaaaaaaaaaaaaaaaaaaaaaaaaaaaaaaaaaaaaaaaaaaaaaaaaaaaaaaaaaaaaaaaaaaaaaaaaaaaaaaaaaa

SEQ ID NO: 17165 - RNA, 2001 nt, Artificial Sequence
  mRNA product Design a-2 (hSL-A100) comprising derived and/or modified sequence from LASV(Lassa virus/H.sapiens-wt/NGA/2018/ISTH_0959;Clade II)__AVV65100__NP (opt1)
aggagaguccgcucagccagguugcagaagcggcuuagcguguguccuaaucuucucucugcguguagguaggccugugccgcaaacaagcuuaccaugagcgccuccaaggaggugaaguccuuccuguggacccagagccuccgccgggagcugagcggcuacugcuccaacaucaagcugcaggucgugaaggacgcccaggcgcuccugcacgggcuggacuucagcgagguguccaacguccagcgccucaugcggaagcagaagcgcgacgacagcgaccugaagcggcugcgcgaccucaaccaggccgugaacaaccugguggagcugaaguccacccagcagaaguccauccuccgggucggcacccugaccagcgacgaccugcucacccuggccgccgaccuggagaagcucaagagcaaggugauccgcaccgagcggccccuguccagcgggguguacaugggcaaccuguccacgcagcagcucgagcagcgccgggcccugcugaaccucaucgggauggucggcggcgcgcaggggacccagccgggccgcgacgggguggugcgggucugggacgugaagaaccccgaccugcugaacaaccaguucggcaccaugcccagccucacccuggccugccugacgaagcagggccagguggaccucaacgacgucgugcuggcccugaccgaccucgggcugaucuacaccgccaaguaccccaacuccagcgaccuggaccgccucucccagagccacccgauccugaacaugguggacaccaagaaguccagccugaacaucagcggcuucaacuucucccucggggcggccgucaaggccggcgccugcaugcuggacgggggcaacaugcuggagacgaucaaggugacgccccagaccauggacggcauccucaagagcauccugaaggugaagaagucccuggggauguucgucagcgacacccccggcgagcggaaccccuacgagaacauccucuacaagaucugccuguccggggacggcuggccguacaucgccagccgcaccuccaucguggggcgggcgugggagaacaccaccguggaccuggagagcgacggcaagccccacaaggucggcaccgccggguccaacaagagccuccaguccgccggcuuccccacggggcugaccuacagccagcugaugacccugaaggacuccaugaugcagcucgaccccagcgccaagaccuggaucgacaucgagggccgcccggaggaccccguggagaucgcccuguaccagcccauguccgggugcuacauccacuucuuccgggagcccacggaccugaagcaguucaagcaggacgcgaaguacagccacggcaucgacgucgccgaccucuucccggcccagcccggccugaccuccgccgugaucgaggcccugccccgcaacauggugcugaccugccaggggagcgacgacaucaagcggcuccuggacagccagggccgcaaggacaucaagcucaucgacaucgcgcuguccaagaccgacagccgccgguucgagaacgccgucugggaccagugcaaggaccugugccacaugcacacgggggugguggucgagaagaagaagcgcggcgggaaggaggagaucacgccccacugcgcccucauggacugcaucauguacgacgccgccguguccggcggccugaacaucccggugcugcgggcgguccucccccgcgacaugguguuccggaccagcucccccaaggugguccugugaggacuagucccuguucccagagcccacuuuuuuuucuuuuuuugaaauaaaauagccugucuuucagaucucaaaggcucuuuucagagccaccaaaaaaaaaaaaaaaaaaaaaaaaaaaaaaaaaaaaaaaaaaaaaaaaaaaaaaaaaaaaaaaaaaaaaaaaaaaaaaaaaaaaaaaaaaaaaaaaaaaaa

SEQ ID NO: 17166 - RNA, 2001 nt, Artificial Sequence
  mRNA product Design a-2 (hSL-A100) comprising derived and/or modified sequence from LASV(LASV003-NIG-2008;Clade II)__AIT17581__NP (opt1)
aggagaguccgcucagccagguugcagaagcggcuuagcguguguccuaaucuucucucugcguguagguaggccugugccgcaaacaagcuuaccaugagcgccuccaaggaggugaaguccuuccuguggacccagagccuccgccgggagcugagcggcuacugcuccagcaucaagcugcaggucgugaaggacgcccaggcgcuccugcacgggcuggacuucuccgaggugagcaacguccagcgccucaugcggaagcagaagcgcgacgacuccgaccugaagcggcugcgcgaccucaaccaggccgugaacaaccugguggagcucaagagcacccagcagaaguccguccugcgggugggcacccugaccagcgacgaccugcucacccuggccgccgaccuggagaagcucaaguccaaggugauccgcaccgagcggccccugagcuccggggucuacaugggcaaccugagcgcccagcagcucgagcagcgccggacgcugcugaacaugaucgggauggugggcggcgcgcaggggacccagccgggccgcgacggggugguccgggugugggacgugaagaaccccgaccuccugaacaaccaguucggcaccaugcccucccugacccucgccugccugacgaagcaggggcaggucgaccugaacgacguggugcucgcccugaccgaccugggccucaucuacaccgccaaguaccccaacagcuccgaccuggaccgccugagccagagccacccgauccucuccauggucgacaccaagaaguccagccugaacaucagcggcuacaacuucucccugggggcggccgugaaggccggcgccugcaugcucgacgggggcaacaugcuggagacgaucaaggugacgccccagaccauggacggcauccucaagagcauccugaaggucaagaagucccuggggauguucgugagcgacacccccggcgagcggaaccccuacgagaacauccuguacaagaucugccucuccggggacggcuggccguacaucgccagccgcaccuccaucguggggcgggcgugggagaacaccaccgucgaccuggagagcgacggcaagccccagaaggugggcaccgccggguccaacaagagccugcaguccgccggcuuccccacggggcucaccuacagccagcugaugacccugaaggacuccaugaugcagcuggaccccagcgccaagaccuggaucgacaucgagggccgcccggaggaccccgucgagaucgcccucuaccagcccauguccgggugcuacauccacuucuuccgggagcccacggaccugaagcaguucaagcaggacgcgaaguacagccacggcaucgacgugaccgaccuguucccggcccagcccggccucaccagcgccgugaucgaggcccugccccgcaacaugguccugaccugccagggguccgacgacaucaagcggcuccuggacagccagggccgccgcgacaucaagcugaucgacaucgcccucuccaaggcggacagccggcgcuucgagaacgccgugugggaccagugcaaggaccugugccacaugcacacggggguggucguggagaagaagaagcggggcgggaaggaggagaucacgccccacugcgcccugauggacugcaucauguacgacgccgccguguccggcggccucaacaucccgguccugcgcgcggugcugccccgggacaugguguuccgcaccagcucccccaaggucgugcucugaggacuagucccuguucccagagcccacuuuuuuuucuuuuuuugaaauaaaauagccugucuuucagaucucaaaggcucuuuucagagccaccaaaaaaaaaaaaaaaaaaaaaaaaaaaaaaaaaaaaaaaaaaaaaaaaaaaaaaaaaaaaaaaaaaaaaaaaaaaaaaaaaaaaaaaaaaaaaaaaaaaaa

SEQ ID NO: 17167 - RNA, 2001 nt, Artificial Sequence
  mRNA product Design a-2 (hSL-A100) comprising derived and/or modified sequence from LASV(LASV035-NIG-2009;Clade II)__AIT17589__NP (opt1)
aggagaguccgcucagccagguugcagaagcggcuuagcguguguccuaaucuucucucugcguguagguaggccugugccgcaaacaagcuuaccaugagcgccuccaaggaggugaaguccuuccuguggacccagagccuccgccgggagcugagcggcuacugcuccagcaucaagcugcaggucgugaaggacgcccaggcgcuccugcacgggcuggacuucuccgaggugagcaacguccagcgccucaugcggaagcagaagcgcgacgacuccgaccugaagcggcugcgcgaccucaaccaggccgugaacaaccugguggagcucaagagcacccagcagaaguccauccugcgggucggcacgcugaccagcgacgaccugcucacccuggccgccgaccuggagaagcucaaguccaaggugauccgcaccgagcggccccugagcuccgggguguacaugggcaaccugagcgcccagcagcucgagcagcgccgggcgcugcugaacaugaucgggauggucggcggcgcccaggggacgcagccgggccgcgacgggguggugcgggucugggacgugaagaaccccgaccuccugaacaaccaguucggcaccaugcccucccugacccucgccugccugaccaagcagggccagguggaccugaacgacgccguccucgcgcugacggaccuggggcucaucuacaccgccaaguaccccaacagcuccgaccuggaccgccugagccagagccacccgauccucaacaugguggacaccaagaaguccagccugaacaucuccggcuacaacuucagccugggggccgccgugaaggccggcgcgugcaugcucgacgggggcaacaugcuggagaccaucaaggucacgccccagaccauggacggcauccugaaguccauccucaaggugaagcggagccuggggauguucguguccgacacccccggcgagcgcaaccccuacgagaacauccuguacaagaucugccucagcggggacggcuggccguacaucgccucccggaccagcaucgucgggcgcgccugggagaacacgaccguggaccuggaguccgacggcaagccccagaaggugggcaccaccgggagcaacaagucccugcagagcgccggcuuccccacggggcucaccuacucccagcugaugacccugaaggacagcaugaugcagcuggaccccuccgccaagaccuggaucgacaucgagggccggccggaggaccccgucgagaucgcgcucuaccagcccaugagcgggugcuacauccacuucuuccgcgagcccacggaccugaagcaguucaagcaggacgccaaguacucccacggcaucgacguggccgaccuguucccggcccagcccggccucaccagcgccgucaucgaggcgcugccccggaacauggugcugaccugccaggggagcgacgacaucaagaagcuccuggacucccagggccgccgcgacaucaagcugaucgacaucgcccucagcaaggccgacucccggaaguucgagaacgccgugugggaccagugcaaggaccugugccacaugcacaccggggucgugguggagaagaagaagcgcggcgggaaggaggagaucacgccccacugcgcccugauggacugcaucauguacgacgcggccgucagcggcggccucaacaucccggugcugcgggccgugcugccccgcgacauggucuuccggaccuccagccccaagguggugcucugaggacuagucccuguucccagagcccacuuuuuuuucuuuuuuugaaauaaaauagccugucuuucagaucucaaaggcucuuuucagagccaccaaaaaaaaaaaaaaaaaaaaaaaaaaaaaaaaaaaaaaaaaaaaaaaaaaaaaaaaaaaaaaaaaaaaaaaaaaaaaaaaaaaaaaaaaaaaaaaaaaaaa

SEQ ID NO: 17168 - RNA, 2001 nt, Artificial Sequence
  mRNA product Design a-2 (hSL-A100) comprising derived and/or modified sequence from LASV(LASV1000-NIG-2009;Clade II)__AIT17783__NP (opt1)
aggagaguccgcucagccagguugcagaagcggcuuagcguguguccuaaucuucucucugcguguagguaggccugugccgcaaacaagcuuaccaugagcgccuccaaggaggugaaguccuuccuguggacccagagccuccgccgggagcugagcggcuacugcuccaacaucaagcugcaggucgugaaggacgcccaggcgcuccugcacgggcuggacuucagcgagguguccaacguccagcgccucaugcggaagcagaagcgcgacgacagcgaccugaagcggcugcgcgaccucaaccaggccgugaacaaccugguggagcugaaguccacccagcagaaguccauccuccgggucggcacgcugaccagcgacgaccugcucacccuggccgccgaccuggagaagcucaagagcaaggugauccgcaccgagcggccccuguccagcgggguguacaugggcaaccuguccacgcagcagcucgagcagcgccgggcccugcugaacaugaucgggauggucggcggcgcgcaggggacccagccgggccgcgacgggguggugcgggucugggacgugaagaaccccgaccuccugaacaaccaguucggcaccaugcccagccugacccucgccugccugacgaagcagggccagguggaccugaacgacgucgugcucgcccugaccgaccuggggcucaucuacaccgccaaguaccccaacuccagcgaccuggaccgccugucccagagccacccgauccucaacaugguggacaccaagaaguccagccugaacaucagcggcuacaacuucucccugggggcggccgucaaggccggcgccugcaugcucgacgggggcaacaugcuggagacgaucaaggugacgccccagaccauggacggcauccucaagagcauccugaaggugaagaagucccuggggauguucgucagcgacacccccggcgagcggaaccccuacgagaacauccuguacaagaucugccucuccggggacggcuggccguacaucgccagccgcaccuccaucguggggcgggcgugggagaacaccaccguggaccuggagagcgacggcaagccccagaaggucggcaccgccggguccaacaagagccugcaguccgccggcuuccccacggggcucaccuacagccagcugaugacccugaaggacuccaugaugcagcuggaccccagcgccaagaccuggaucgacaucgagggccgcccggaggaccccguggagaucgcccucuaccagcccgucuccgggugcuacauccacuucuuccgggagcccacggaccugaagcaguucaagcaggacgcgaaguacagccacggcaucgacguggccgaccuguucccggcccagcccggccucaccuccgccgugaucgaggcccugccccgcaacaugguccugaccugccaggggagcgacgacaucaagcggcuccuggacagccagggccgccgcgacaucaagcugaucgacaucgcgcucuccaaggccgacagccggcgcuucgagaacgccgugugggaccagugcaaggaccugugccacaugcacaccgggguggucguggagaagaagaagcggggcgggaaggaggagaucacgccccacugcgcccugauggacugcaucauguacgacgccgcgguguccggcggccucaacaucccgguccugcgcgccgugcugccccgggacaugguguuccgcaccagcucccccaaggucgugcucugaggacuagucccuguucccagagcccacuuuuuuuucuuuuuuugaaauaaaauagccugucuuucagaucucaaaggcucuuuucagagccaccaaaaaaaaaaaaaaaaaaaaaaaaaaaaaaaaaaaaaaaaaaaaaaaaaaaaaaaaaaaaaaaaaaaaaaaaaaaaaaaaaaaaaaaaaaaaaaaaaaaaa

SEQ ID NO: 17169 - RNA, 2001 nt, Artificial Sequence
  mRNA product Design a-2 (hSL-A100) comprising derived and/or modified sequence from LASV(LASV221-NIG-2010;Clade II)__AIT17625__NP (opt1)
aggagaguccgcucagccagguugcagaagcggcuuagcguguguccuaaucuucucucugcguguagguaggccugugccgcaaacaagcuuaccaugagcgccuccaaggaggugaaguccuuccuguggacccagagccuccgccgggagcugagcggcuacugcuccagcaucaagcugcaggucgugaaggacgcccaggcgcuccugcacgggcuggacuucuccgaggugagcaacguccagcgccucaugcggaagcagcgccgggacgacuccgaccugaagcgccugcgggaccucaaccaggccgugaacaaccugguggagcucaagagcacccagcagaaguccauccugcgcgucggcacgcugaccagcgacgaccugcucacccuggccgccgaccuggagaagcucaaguccaaggugauccggaccgagcgcccccugagcuccgggguguacaugggcaaccugagcacgcagcagcucgagcagcggcgcgcccugcugaacaugaucgggauggucggcggcgcgcaggggacccagccgggccgggacgggguggugcgcgucugggacgugaagaaccccgaccuccugaacaaccaguucggcaccaugcccucccugacccucgccugccugacgaagcagggccagguggaccugaacgacgccguccucgcccugaccgaccuggggcucaucuacaccgcgaaguaccccaacagcuccgaccuggaccggcugagccagagccacccgauccucaacaugguggacaccaagaaguccagccugaacaucuccggcuacaacuucagccugggggccgccgugaaggccggcgccugcaugcucgacgggggcaacaugcuggagacgaucaaggucacgccccagaccguggacggcauccugaaguccauccucaaggugaagcgcagccuggggauguucgucuccgacacccccggcgagcggaaccccuacgagaacauccuguacaagaucugccucagcggggacggcuggccguacaucgcgucccgcaccagcaucguggggcgggccugggagaacaccaccguggaccuggaguccgacggcaagccccagaaggucggcaccgccgggagcaacaagucccugcagagcgccggcuuccccacggggcucaccuacucccagcugaugacccugaaggacagcaugaugcagcuggaccccuccgccaagaccuggaucgacaucgagggccgcccggaggaccccguggagaucgcgcucuaccagcccaugagcgggugcuacauccacuucuuccgggagcccacggaccugaagcaguucaagcaggacgccaaguacucccacggcaucgacgucgccgaccuguucccggcccagcccggccucaccagcgccgugaucgaggcgcugccccgcaacauggugcugaccugccaggggagcgacgacaucaagcgccuccuggacucccagggccggcgcgacaucaagcugaucgacaucgcccucagcaaggccgacucccggaaguucgagaacgccgucugggaccagugcaaggaccugugccacaugcacaccggggugguggucgagaagaagaagcgcggcgggaaggaggagaucacgccccacugcgcccugauggacugcaucauguacgacgcggccgugagcggcggccucaacaucccggugcugcgggccguccugccccgcgacaugguguuccggaccuccagccccaaggugguccucugaggacuagucccuguucccagagcccacuuuuuuuucuuuuuuugaaauaaaauagccugucuuucagaucucaaaggcucuuuucagagccaccaaaaaaaaaaaaaaaaaaaaaaaaaaaaaaaaaaaaaaaaaaaaaaaaaaaaaaaaaaaaaaaaaaaaaaaaaaaaaaaaaaaaaaaaaaaaaaaaaaaaa

SEQ ID NO: 17170 - RNA, 2001 nt, Artificial Sequence
  mRNA product Design a-2 (hSL-A100) comprising derived and/or modified sequence from LASV(LASV237-NIG-2010;Clade II)__AIT17639__NP (opt1)
aggagaguccgcucagccagguugcagaagcggcuuagcguguguccuaaucuucucucugcguguagguaggccugugccgcaaacaagcuuaccaugagcgccuccaaggaggugaaguccuuccuguggacccagagccuccgccgggagcugagcggcuacugcuccaacaucaagcugcaggucgugaaggacgcccaggcgcuccugcacgggcuggacuucagcgagguguccaacguccagcgccucaugcggaagcagaagcgcgacgacagcgaccugaagcggcugcgcgaccucaaccaggccgugaacaaccugguggagcugaaguccacccagcagaaguccauccuccgggucggcacccugaccagcgacgaccugcucacccuggccgccgaccuggagaagcucaagagcaaggugauccgcaccgagcggccccuguccagcgggguguacaugggcaaccuguccacgcagcagcucgagcagcgccgggcccugcugaacaugaucgggauggucggcggcgcgcaggggacccagccgggccgcgacgggguggugcgggucugggacgugaagaaccccgaccuccugaacaaccaguucggcaccaugcccagccugacccucgccugccugacgaagcagggccagguggaccugaacgacgccguccucgcccugaccgaccuggggcucaucuacaccgcgaaguaccccaacuccagcgaccuggaccgccugucccagagccacccgauccucaacaugguggacaucaagaaguccagccugaacaucagcggcuacaacuucucccugggggccgccgugaaggccggcgccugcaugcucgacgggggcaacaugcuggagaccaucaaggucacgccccagaccauggacggcauccucaagagcauccugaaggugaagcggucccuggggauguucgugagcgacacccccggcgagcgcaaccccuacgagaacauccuguacaagaucugccucuccggggacggcuggccguacaucgcgagccggaccuccaucgucgggcgcgccugggagaacacgaccguggaccuggagagcgacggcaagccccagaaggugggcuccgccgggagcaacaagucccugcagagcgccggcuuccccaccgggcucaccuacucccagcugaugacgcugaaggacagcaugaugcagcuggaccccuccgccaagaccuggaucgacaucgagggccggccggaggaccccgucgagaucgcgcucuaccagcccaugagcgggugcuacauccacuucuuccgcgagcccaccgaccugaagcaguucaagcaggacgccaaguacucccacggcaucgacguggccgaccuguucccggcccagcccggccucaccagcgccgucaucgaggcgcugccccggaacauggugcugacgugccaggggagcgacgacaucaagcgccuccuggacucccagggccgccgggacaucaagcugaucgacaucgcccucagcaaggccgacucccgccgguucgagaacgccgugugggaccagugcaaggaccugugccacaugcacaccggggucgugguggagaagaagaagcgcggcgggaaggaggagaucacgccccacugcgcccugauggacugcaucauguacgacgcggccgucagcggcggccucaacaucccggugcugcgggccgugcugccccgcgacauggucuuccggaccuccagccccaagguggugcucugaggacuagucccuguucccagagcccacuuuuuuuucuuuuuuugaaauaaaauagccugucuuucagaucucaaaggcucuuuucagagccaccaaaaaaaaaaaaaaaaaaaaaaaaaaaaaaaaaaaaaaaaaaaaaaaaaaaaaaaaaaaaaaaaaaaaaaaaaaaaaaaaaaaaaaaaaaaaaaaaaaaaa

SEQ ID NO: 17171 - RNA, 2001 nt, Artificial Sequence
  mRNA product Design a-2 (hSL-A100) comprising derived and/or modified sequence from LASV(LASV253-NIG-2011;Clade II)__AIT17671__NP (opt1)
aggagaguccgcucagccagguugcagaagcggcuuagcguguguccuaaucuucucucugcguguagguaggccugugccgcaaacaagcuuaccaugagcgccuccaaggaggugaaguccuuccuguggacccagagccuccgccgggagcugagcggcuacugcuccagcaucaagcugcaggucgugaaggacgcccaggcgcuccugcacgggcuggacuucuccgaggugagcaacguccagcgccucaugcggaagcagaagcgcgacgacuccgaccugaagcggcugcgcgaccucaaccaggccgugaacaaccugguggagcucaagagcacccagcagaaguccguccugcgggugggcacccugaccagcgacgaccugcucacccuggccgccgaccuggagaagcucaaguccaaggugauccgcaccgagcggccccugagcuccggggucuacaugggcaaccugagcacgcagcagcucgagcagcgccgggcccugcugaacaugaucgggauggugggcggcgcgcaggggacccagccgggccgcgacggggugguccgggugugggacgugaagaaccccgaccuccugaacaaccaguucggcaccaugcccucccugacccucgccugccugacgaagcaggggcaggucgaccugaacgacguggugcucgcccugaccgaccugggccucaucuacaccgccaaguaccccaacagcuccgaccuggaccgccugagccagagccacccgauccucaacauggucgacaccaagaaguccagccugaacaucuccggcuacaacuucagccugggggcggccgugaaggccggcgccugcaugcucgacgggggcaacaugcuggagacgaucaaggugacgccccagaccauggacggcauccugaaguccauccucaaggucaagaagucccuggggauguucgugagcgacacccccggcgagcggaaccccuacgagaacauccuguacaagaucugccucagcggggacggcuggccguacaucgccucccgcaccagcaucguggggcgggcgugggagaacaccaccgucgaccuggaguccgacggcaagccccagaaggugggcaccgccgggagcaacaagucccugcagagcgccggcuuccccacggggcucaccuacucccagcugaugacccugaaggacagcaugaugcagcuggaccccuccgccaagaccuggaucgacaucgagggccgcccggaggaccccgucgagaucgcccucuaccagcccaugagcgggugcuacauccacuucuuccgggagcccacggaccugaagcaguucaagcaggacgcgaaguacucccacggcaucgacgugaccgaccuguucccggcccagcccggccucaccagcgccgugaucgaggcccugccccgcaacaugguccugaccugccaggggagcgacgacaucaagcggcuccuggacucccagggccgccgcgacaucaagcugaucgacaucgcccucagcaaggcggacucccggcgcuucgagaacgccgugugggaccagugcaaggaccugugccacaugcacacggggguggucguggagaagaagaagcggggcgggaaggaggagaucacgccccacugcgcccugauggacugcaucauguacgacgccgccgugagcggcggccucaacaucccgguccugcgcgcggugcugccccgggacaugguguuccgcaccuccagccccaaggucgugcucugaggacuagucccuguucccagagcccacuuuuuuuucuuuuuuugaaauaaaauagccugucuuucagaucucaaaggcucuuuucagagccaccaaaaaaaaaaaaaaaaaaaaaaaaaaaaaaaaaaaaaaaaaaaaaaaaaaaaaaaaaaaaaaaaaaaaaaaaaaaaaaaaaaaaaaaaaaaaaaaaaaaaa

SEQ ID NO: 17172 - RNA, 2001 nt, Artificial Sequence
  mRNA product Design a-2 (hSL-A100) comprising derived and/or modified sequence from LASV(LASV254-NIG-2011;Clade II)__AIT17675__NP (opt1)
aggagaguccgcucagccagguugcagaagcggcuuagcguguguccuaaucuucucucugcguguagguaggccugugccgcaaacaagcuuaccaugagcgccuccaaggaggugaaguccuuccuguggacccagagccuccgccgggagcugagcggcuacugcuccagcaucaagcugcaggucgugaaggacgcccaggcgcuccugcacgggcuggacuucuccgaggugagcaacguccagcgccucaugcggaagcagaagcgcgacgacuccgaccugaagcggcugcgcgaccucaaccaggccgugaacaaccugguggagcucaagagcacccagcagaaguccguccugcgggugggcacgcugaccagcgacgaccugcucacccuggccgccgaccuggagaagcucaaguccaaggugauccgcaccgagcggccccugagcuccggggucuacaugggcaaccugagcacgcagcagcucgagcagcgccgggcccugcugaacaugaucgggauggugggcggcgcgcaggggacccagccgggccgcgacggggugguccgggugugggacgugaagaaccccgaccuccugaacaaccaguucggcaccaugcccucccugacccucgccugccugacgaagcaggggcaggucgaccugaacgacgccgugcucgcccugaccgaccugggccucaucuacaccgcgaaguaccccaacagcuccgaccuggaccgccugagccagagccacccgauccucaacaugguggacaccaagaaguccagccugaacaucuccggcuacaacuucagccugggggccgccgucaaggccggcgccugcaugcucgacgggggcaacaugcuggagacgaucaaggugacgccccagaccauggacggcauccugaaguccauccucaaggugaagaagucccuggggauguucgucagcgacacccccggcgagcggaaccccuacgagaacauccuguacaagaucugccucagcggggacggcuggccguacaucgcgucccgcaccagcaucguggggcgggccugggagaacaccaucguggaccuggaguccgacggcaagccccagaaggucggcaccgccgggagcaacaagucccugcagagcgccggcuuccccaccgggcucacguacucccagcugaugacccugaaggacagcaugaugcagcuggaccccuccgccaagaccuggaucgacaucgagggccgcccggaggaccccguggagaucgcgcucuaccagcccaugagcgggugcuacauccacuucuuccgggagcccaccgaccugaagcaguucaagcaggacgccaaguacucccacggcaucgacgucgccgaccuguucccggcccagcccggccucacgagcgccgugaucgaggcgcugccccgcaacauggugcugaccugccaggggagcgacgacaucaagcggcuccuggacucccagggccgccgcgacaucaagcugaucgacaucgcccucagcaaggccgacucccggcgcuucgagaacgccgucugggaccagugcaaggaccugugccacaugcacaccggggugguggucgagaagaagaagcggggcgggaaggaggagaucacgccccacugcgcccugauggacugcaucauguacgacgcggccgugagcggcggccucaacaucccggugcugcgcgccguccugccccgggacaugguguuccgcaccuccagccccaaggugguccucugaggacuagucccuguucccagagcccacuuuuuuuucuuuuuuugaaauaaaauagccugucuuucagaucucaaaggcucuuuucagagccaccaaaaaaaaaaaaaaaaaaaaaaaaaaaaaaaaaaaaaaaaaaaaaaaaaaaaaaaaaaaaaaaaaaaaaaaaaaaaaaaaaaaaaaaaaaaaaaaaaaaaa

SEQ ID NO: 17173 - RNA, 2001 nt, Artificial Sequence
  mRNA product Design a-2 (hSL-A100) comprising derived and/or modified sequence from LASV(Nig08-04;Clade II)__ADU56611__NP (opt1)
aggagaguccgcucagccagguugcagaagcggcuuagcguguguccuaaucuucucucugcguguagguaggccugugccgcaaacaagcuuaccaugagcgccuccaaggaggugaaguccuuccuguggacccagagccuccgccgggagcugagcggcuacugcuccaacaucaagcugcaggucgugaaggacgcccaggcgcuccugcacgggcuggacuucagcgagguguccaacguccagcgccucaugcggaagcagaagcgcgacgacggcgaccugaagcggcugcgcgaccucaaccaggccgugaacaaccugguggagcucaagagcacccagcagaaguccguccugcggguggggacccugaccagcgacgaccugcucacccuggccgccgaccuggagaagcucaaguccaaggugauccgcaccgagcggccccugagcuccggcgucuacauggggaaccugagcacgcagcagcucgagcagcgcaaggcccugcuguccaugaucggcauggugggcggggcgcagggcacccagccggggcgggacggcgugguccgcgugugggacgugaagaaccccgaccuccugaacaaccaguucgggaccaugcccagccugacccucgccugccugacgaagcagggccaggucgaccugaacgacgccgugcucgcccugaccgaccugggccucaucuacaccgcgaaguaccccaacuccagcgaccuggaccggcugucccagagccacccgauccucaacaugguggacaccaagaaguccagccugaacaucagcggguacaacuucucccugggcgccgccgucaaggccggggccugcaugcucgacggcggcaacaugcuggagacgaucaaggugacgccccagaccauggacgggauccucaagagcauccugaaggugaagcgcucccugggcauguucgucagcgacacccccggggagcggaaccccuacgagaacauccuguacaagaucugccucuccggcgacggguggccguacaucgcgagccgcaccuccaucgugggccgggccugggagaacaccaccguggaccuggagagcgacggcaagccccagaaggucgggaccgccggcuccaacaagagccugcaguccgccggguuccccacgggccucaccuacagccagcugaugacccugaaggacuccaugaugcagcuggaccccagcgccaagaccuggaucgacaucgaggggcgcccggaggaccccguggagaucgcgcucuaccagcccauguccggcugcuacauccacuucuuccgggagcccacggaccugaagcaguucaagcaggacgccaaguacagccacggcaucgacgucaccgaccuguucuccgcccagccggggcucaccagcgccgugaucgaggcccugccccgcaacauggugcugaccugccagggcagcgacgacaucaagaagcuccuggacucccaggggcggcgcgacaucaagcugaucgacaucagccucaacaaggcggacucccgccgguucgagaacgccgucugggaccagugcaaggaccugugccacaugcacacgggcgugguggucgagaagaagaagcgcgggggcaaggaggagaucacgccccacugcgcccugauggacugcaucauguucgacgccgccgugagcggcgggcucaacauccccauccugcgggcggugcugccgcgcgacauggucuuccggaccuccagccccaagguggugcucugaggacuagucccuguucccagagcccacuuuuuuuucuuuuuuugaaauaaaauagccugucuuucagaucucaaaggcucuuuucagagccaccaaaaaaaaaaaaaaaaaaaaaaaaaaaaaaaaaaaaaaaaaaaaaaaaaaaaaaaaaaaaaaaaaaaaaaaaaaaaaaaaaaaaaaaaaaaaaaaaaaaaa

SEQ ID NO: 17174 - RNA, 2004 nt, Artificial Sequence
  mRNA product Design a-2 (hSL-A100) comprising derived and/or modified sequence from LASV(GA391;Clade III)__AAA46284__NP (opt1)
aggagaguccgcucagccagguugcagaagcggcuuagcguguguccuaaucuucucucugcguguagguaggccugugccgcaaacaagcuuaccaugagcgccuccaaggaggugcgcagcugccuguggacccagucccuccggcgcgagcugagcggcuacugcuccaacaucaagcugcaggucgugaaggacgcccaggcgcuccugcacgggcuggacuucagcgagguguccaacguccagcggcucaugcgcaagcagaagcgggacgacggcgaccugaagcgccugcgggaccucaaccaggccgugaacaaccugguggagcugaaguccacccagcagaaguccguccuccgcguggggacgcugagcuccgacgaccugcucauccuggccgccgaccuggagaagcucaagagcaaggugacccggaccgagcgcccccuguccagcggcgucuacauggggaaccuguccagccagcagcucgaccagcggcgcgcccugcugaacaugaucggcaugaccggcguguccgggggcgggaagggcgcgagcaacgggaucgugcgggucugggacgugaagaacgccgagcuccugaacaaccaguucggcacgaugccgucccugacccucgccugccugaccaagcagggccagguggaccugaacgacgccguccaggcgcucaccgaccuggggcugaucuacacggccaaguaccccaacagcagcgaccucgaccgccugucccagagccaccccauccugaacaugaucgacaccaagaaguccagccucaacaucuccggcuacaacuucagccugggggccgccgugaaggccggcgcgugcaugcuggacggcgggaacaugcucgagaccaucaaggugagcccccagaccauggacggcauccucaagagcauccugaaggucaagaagucccuggggauguucgugagcgacacgccgggcgagcggaaccccuacgagaacauccuguacaagaucugccuguccggggacggcuggagcuacaucgccucccgcaccagcaucgugggccgggccugggagaacaccgucguggaccucgagcaggacaacaagccccagaagaucgggaacggcggguccaacaagagccugcaguccgccggcuucgccgcggggcugaucuacagccagcucaugacccugaaggacuucaagugcuucaaccugauccccaacgccaagacguggauggacaucgagggccgcccggaggaccccguggagaucgcccuguaccagcccuccagcggcugcuacguccacuucuuccgggagcccaccgaccucaagcaguucaagcaggacgccaaguacagccacgggcgcgacgugaccgaccuguucgccgcgcagccgggccugaccuccgccgucaucgaggcccucccccggaacauggugaucacgugccaggggagcgaggacauccgcaagcugcuggagucccagggccgccgggacaucaagcucaucgacaucacccugagcaaggccgacucccgcaaguucgagaacgccgugugggaccaguucaaggaccugugccacaugcacaccggggucgugguggagaagaagaagcggggcggcaaggaggagaucacgccccacugcgcgcucauggacugcaucauguucgacgccgccgucagcgggggccuggacgccaaggugcugcgcgugguccucccccgggacaugguguuccgcaccuccaccccgaaggugguccugugaggacuagucccuguucccagagcccacuuuuuuuucuuuuuuugaaauaaaauagccugucuuucagaucucaaaggcucuuuucagagccaccaaaaaaaaaaaaaaaaaaaaaaaaaaaaaaaaaaaaaaaaaaaaaaaaaaaaaaaaaaaaaaaaaaaaaaaaaaaaaaaaaaaaaaaaaaaaaaaaaaaaa

SEQ ID NO: 17175 - RNA, 2001 nt, Artificial Sequence
  mRNA product Design a-2 (hSL-A100) comprising derived and/or modified sequence from LASV(Nig08-A19;Clade III)__ADU56619__NP (opt1)
aggagaguccgcucagccagguugcagaagcggcuuagcguguguccuaaucuucucucugcguguagguaggccugugccgcaaacaagcuuaccaugagcgccuccaaggaggugaaguccuuccuguggacccagucccuccgccgggagcugagcggcuacugcuccaacaucaagcugcaggucgugaaggacgcccaggcgcuccugcacgggcuggacuucagcgagguguccaacguccagcgccucaugcggaagcagaagcgcgacgacggcgaccugaagcggcugcgcgaccucaaccaggccgugaacaaccugguggagcucaagagcacccagcagaaguccguccugcggguggggacccugagcuccgacgaccugcucgugcuggccgccgaccuggagaagcucaagagcaaggucgugcgcaccgagcggccccuguccagcggcaucuacauggggaaccuguccagccagcagcucgaccagcgcaaggcccugcugaacaugaucggcaugaccggcgggaacggcgggcggaacaccacguccgacggcaucgugcgcgucugggacgugaagaacgcggagcuccugaacaaccaguucgggaccaugccgagccugacccucgccugccugaccaagcagggccagguggaccugaacgacgccguccaggcccucacggaccugggccugaucuacaccgcgaaguaccccaacuccagcgaccucgaccggcuggcccagagccaccccauccugaacaugaucgacaccaagaaguccagccucaacaucuccggguacaacuucagccugggcgccgccgugaaggccggggcgugcaugcuggacggcggcaacaugcucgagaccaucaaggugagcccccagacgauggacgggauccucaagagcauccugaaggucaagcgcucccugggcauguucaucagcgacaccccgggggagcggaaccccuacgagaacauccuguacaagaucugccuguccggcgacggguggcccuacaucgccagccgcaccuccaucgugggccgggccugggagaacaccguggucgaccucgagagcgacaacaagccccagaagacgggcaacgggggcuccaacaagagccugcaguccgccggguucgccgcgggccugaccuacagccagcucaugacccugaaggacuccaugcugcagcuggacccgaacgccaagaccuggauggacaucgaggggcgccccgaggaccccguggagaucgcccucuaccagcccagcuccggcugcuacauccacuucuuccgggagccgacggaccugaagcaguucaagcaggacgccaaguacagccacggcaucgacgugaccgaccuguucgccgcgcagcccgggcucaccagcgccgucaucgaggcccugccccgcaacauggugaucacgugccagggcuccgaggacauccggaagcugcucgagagccaggggcgccgcgacaucaagcugaucgacaucucccugagcaaggucgacucccggaaguucgagaacgccgugugggaccaguucaaggaccucugccacaugcacaccggcaucguggucgagaagaagaagcgcgggggcaaggaggagaucacgccccacugcgcccugauggacugcaucauguucgacgcggccgugagcggcgggguggacgccaagguccugcgggccgugcucccgcgcgacaugguguuccggaccuccacccccaaggucgugcugugaggacuagucccuguucccagagcccacuuuuuuuucuuuuuuugaaauaaaauagccugucuuucagaucucaaaggcucuuuucagagccaccaaaaaaaaaaaaaaaaaaaaaaaaaaaaaaaaaaaaaaaaaaaaaaaaaaaaaaaaaaaaaaaaaaaaaaaaaaaaaaaaaaaaaaaaaaaaaaaaaaaaa

SEQ ID NO: 17176 - RNA, 2001 nt, Artificial Sequence
  mRNA product Design a-2 (hSL-A100) comprising derived and/or modified sequence from LASV(G1180-SLE-2010;Clade IV)__AIT17169__NP (opt1)
aggagaguccgcucagccagguugcagaagcggcuuagcguguguccuaaucuucucucugcguguagguaggccugugccgcaaacaagcuuaccaugagcgccuccaaggagaucaagagcuuccuguggacccagucccuccgccgggagcugagcggcuacugcuccaacaucaagcuccagguggucaaggacgcccaggcgcugcugcacgggcuggacuucagcgagguguccaacgugcagcgccucaugcggaaggagcgccgggacgacaacgaccugaagcgccugcgggaccucaaccaggccgucaacaaccugguggagcucaagagcacccagcagaaguccauccugcgcgugggcacccugaccagcgacgaccugcucauccuggccgccgaccuggagaagcucaaguccaaggucauccggaccgagcgcccccugagcgccgggguguacaugggcaaccuguccagccagcagcucgaccagcggcgcgcgcugcuguccaugaucgggaugagcuccggcaaccagcgggcccaggccggccgcgacggggugguccgggugugggacgugaagaacgucgagcuccugaacaaccaguucggcaccaugccgagccugacgcucgccugccugaccaagcagggccagguggaccugaacgacgcggugcaggcccucaccgaccuggggcugaucuacaccgccaaguaccccaacacguccgaccucgaccgccugacccagagccaccccauccugaacaugaucgacaccaagaaguccagccucaacaucagcggguacaacuucucccugggcgccgccgucaaggcgggcgccugcaugcuggacgggggcaacaugcucgagaccaucaaggugagcccccagacgauggacgggauccugaaguccauccugaaggugaagaaggcccucggcauguucaucagcgacaccccgggcgagcggaaccccuacgagaacauccuguacaagaucugccuguccggggacggcuggcccuacaucgccagccgcaccuccaucaccgggcgggccugggagaacacggucguggaccucgagagcgacggcaagccccagaaggcgggguccaacaacagcaacaagucccugcagagcgugggcuucaccgccggccugaccuacucccagcucaugacccugaaggacgccaugcugcagcuggacccgaacgccaagacguggauggacaucgaggggcgccccgaggaccccgucgagaucgcccucuaccagcccagcuccggcugcuacauccacuucuuccgggagccgaccgaccugaagcaguucaagcaggacgcgaaguacagccacgggaucgacgugaccgaccuguucgccgcccagcccggccucaccuccgccgugaucgacgcccugccccgcaacauggucaucacgugccaggggagcgacgacauccgcaagcugcucgagagccagggccggaaggacaucaagcugaucgacaucgcgcuguccaagaccgacagccgcaaguacgagaacgccgugugggaccaguacaaggaccucugccacaugcacaccggcgucgugguggagaagaagaagcgcgggggcaaggaggagaucacgccccacugcgcccugauggacugcaucauguucgacgccgcggucuccgggggccugaacaccagcgugcuccgggccgugcugccgcgggacauggucuuccgcaccuccacgccccggguggugcugugaggacuagucccuguucccagagcccacuuuuuuuucuuuuuuugaaauaaaauagccugucuuucagaucucaaaggcucuuuucagagccaccaaaaaaaaaaaaaaaaaaaaaaaaaaaaaaaaaaaaaaaaaaaaaaaaaaaaaaaaaaaaaaaaaaaaaaaaaaaaaaaaaaaaaaaaaaaaaaaaaaaaa

SEQ ID NO: 17177 - RNA, 2001 nt, Artificial Sequence
  mRNA product Design a-2 (hSL-A100) comprising derived and/or modified sequence from LASV(G1442-SLE-2011;Clade IV)__AIT17181__NP (opt1)
aggagaguccgcucagccagguugcagaagcggcuuagcguguguccuaaucuucucucugcguguagguaggccugugccgcaaacaagcuuaccaugagcgccuccaaggaggugaaguccuuccuguggacccagagccuccgccgggagcugagcggcuacugcuccaacaucaagcugcaggucgugaaggacgcccaggcgcuccugcacgggcuggacuucagcgagguguccaacguccagcgccucaugcggaagcagcgccgggacgacaacgaccugaagcgccugcgggaccucaaccaggccgugaacaaccugguggagcucaagagcacccagcagaaguccguccugcgcgugggcacccugaccagcgacgaccugcucgugcuggccgccgaccuggagaagcucaaguccaaggucauccggaccgagcgcccccugagcgccgggguguacaugggcaaccuguccagccagcagcucgaccagcggcgcgcgcugcugaacaugaucgggauguccggcggcauccaggggacccggacgggccgcgacggggugguccgggugugggacgugaagaacgccgaccuccugaacaaccaguucggcaccaugccgagccugacccucgccugccugaccaagcaggggcaggucgaccugaacgacguggugcaggcccucacggaccugggccugaucuacaccgcgaaguaccccaacgccuccgaccucgaccgccugacccagagccaccccauccugaacaugaucgacaccaagaaguccagccucaacaucagcggcuacaacuucucccugggggccgccgucaaggccggcgcgugcaugcuggacgggggcaacaugcucgagacgaucaaggugagcccccagaccauggacggcauccugaaguccauccugaaggugaagaagacccucgggauguucaucagcgacaccccgggcgagcggaaccccuacgagaacauccuguacaagaucugccuguccggggacggcuggcccuacaucgccagccgcacguccaucaccgggcgggccugggagaacaccgucguggaccucgagagcgacggcaagccccagaaggccggcuccaacaacagcaacaagucccugcagagcgccggguucgcggccggccugaccuacucccagcucaugacgcugaaggacgccaugcugcagcuggacccgaacgccaagaccuggauggacaucgaggggcgccccgaggaccccguggagaucgcccucuaccagcccagcuccggcugcuacauccacuucuuccgggagccgaccgaccugaagcaguucaagcaggacgcgaaguacagccacgggaucgacgucaccgaccuguucgccgcccagcccggccucacguccgccgugaucgaggcccugccccgcaacauggucaucacgugccagggcagcgacgacaucaagaagcugcucgagucccaggggcgcaaggacaucaagcugaucgacaucgcgcugagcaagaccgacagccggaaguacgagaacgccgugugggaccaguacaaggaccucugccacaugcacaccggcguggucguggagaagaagaagcgcgggggcaaggaggagaucaccccgcacugcgcccugauggacugcaucauguucgacgccgcgguguccgggggccugaacacccucguccugcgggccgugcugccccgcgacaugguguuccggaccagcacgccccgcgucgugcucugaggacuagucccuguucccagagcccacuuuuuuuucuuuuuuugaaauaaaauagccugucuuucagaucucaaaggcucuuuucagagccaccaaaaaaaaaaaaaaaaaaaaaaaaaaaaaaaaaaaaaaaaaaaaaaaaaaaaaaaaaaaaaaaaaaaaaaaaaaaaaaaaaaaaaaaaaaaaaaaaaaaaa

SEQ ID NO: 17178 - RNA, 2001 nt, Artificial Sequence
  mRNA product Design a-2 (hSL-A100) comprising derived and/or modified sequence from LASV(G3010-SLE-2013;Clade IV)__AIT17345__NP (opt1)
aggagaguccgcucagccagguugcagaagcggcuuagcguguguccuaaucuucucucugcguguagguaggccugugccgcaaacaagcuuaccaugagcgccuccaaggagaucaagagcuuccuguggacccagucccuccgccgggagcugagcggcuacugcuccaacaucaagcuccagguggucaaggacgcccaggcgcugcugcacgggcuggacuucagcgagguguccaacgugcagcgccucaugcggaaggagcgccgggacgacaacgaccugaagcgccugcgggaccucaaccaggccgucaacaaccugguggagcucaagagcacccagcagaaguccauccugcgcgugggcacccugaccagcgacgaccugcucauccuggccgccgaccuggagaagcucaaguccaaggucacccggaccgagcgcccccugagcgccgggguguacaugggcaaccuguccagccagcagcucgaccagcggcgcgcgcugcuguccaugaucgggaugagcuccggcgugcagggcgcccgggccgggcgcgacggcgucgugcgggugugggacgucaagaacgccgagcuccugaacaaccaguucgggacgaugccgagccugacccucgcgugccugaccaagcagggccagguggaccugaacgacgugguccaggcccucaccgaccuggggcugaucuacacggccaaguaccccaacaccuccgaccucgaccgccugacccagagccaccccauccugaacaugaucgacaccaagaaguccagccucaacaucagcggcuacaacuucucccugggcgccgccgugaaggcgggggccugcaugcuggacggcgggaacaugcucgagacgaucaaggugagcccccagaccauggacggcauccugaaguccauccugaaggucaagaaggcccucggcauguucaucagcgagaccccgggggagcggaaccccuacgagaacauccuguacaagaucugccuguccggcgacggguggcccuacaucgccagccgcaccuccaucacgggccgggccugggagaacaccgugguggaccucgagagcgacgggaagccccagaaggcgggcuccaacaacagcaacaagucccugcagagcgccggcuucaccgccgggcugaccuacucccagcucaugacgcugaaggacgccaugcugcagcuggacccgaacgccaagaccuggauggacaucgagggccgccccgaggaccccgucgagguggcgcucuaccagcccagcuccgggugcuacauccacuucuuccgggagccgaccgaccugaagcaguucaagcaggacgccaaguacagccacggcaucgacgugaccgaccuguucgccgcccagcccgggcucacguccgccgucaucgacgcgcugccccgcaacauggugaucacgugccagggcagcgacgacaucaagaagcugcucgagagccagggccgcaaggacaucaagcugaucgacaucgcccuguccaagaccgacagccggaaguacgagaacgccgucugggaccaguacaaggaccucugccacaugcacaccggggugguggucgagaagaagaagcgcggcgggaaggaggagaucaccccgcacugcgcccugauggacugcaucauguucgacgcggccguguccggcgggcugaacaccagcgugcuccgggccguccugccccgcgacaugguguuccggaccuccacgccccgcgugguccugugaggacuagucccuguucccagagcccacuuuuuuuucuuuuuuugaaauaaaauagccugucuuucagaucucaaaggcucuuuucagagccaccaaaaaaaaaaaaaaaaaaaaaaaaaaaaaaaaaaaaaaaaaaaaaaaaaaaaaaaaaaaaaaaaaaaaaaaaaaaaaaaaaaaaaaaaaaaaaaaaaaaaa

SEQ ID NO: 17179 - RNA, 2001 nt, Artificial Sequence
  mRNA product Design a-2 (hSL-A100) comprising derived and/or modified sequence from LASV(G502-SLE-2009;Clade IV)__AIT17127__NP (opt1)
aggagaguccgcucagccagguugcagaagcggcuuagcguguguccuaaucuucucucugcguguagguaggccugugccgcaaacaagcuuaccaugagcgccuccaaggagaucaagagcuuccuguggacccagucccuccgccgggagcugagcggcuacugcuccaacaucaagcuccagguggucaaggacgcccaggcgcugcugcacgggcuggacuucagcgagguguccaacgugcagcgccucaugcggaaggagcgccgggacgacaacgaccugaagcgccugcgggaccucaaccaggccgucaacaaccugguggagcucaagagcacccagcagaaguccauccugcgcgugggcacccugaccagcgacgaccugcucauccuggccgccgaccuggagaagcucaaguccaaggucauccggaccgagcgcccccugagcgccgggguguacaugggcaaccuguccagccagcagcucgaccagcggcgcgcgcugcuguccaugaucgggaugagcggcggcaaccagggggugcgggccggcaaggacggggucgugcgcgugugggacgucaagaacgccgagcuccugaacaaccaguucggcaccaugccgucccugacgcucgccugccugaccaagcagggccagguggaccugaacgacgcggugcaggcccucaccgaccuggggcugaucuacaccgccaaguaccccaacacgagcgaccucgaccggcugacccagucccaccccauccugaacaugaucgacaccaagaaguccagccucaacaucuccggcuacaacuucagccugggggccgccgucaaggcgggcgccugcaugcuggacgggggcaacaugcucgagaccaucaaggugagcccccagacgauggacggcauccucaagagcauccugaaggugaagaaggcccuggggauguucaucuccgacaccccgggcgagcgcaaccccuacgagaacauccuguacaagaucugccugagcggggacggcuggcccuacaucgccucccggaccagcaucaccgggcgcgccugggagaacacggucguggaccucgaguccgacggcaagccccagaaggcgggcagcaacaacuccaacaagagccugcaguccgccggguucaccgccggccugaccuacagccagcucaugacccugaaggacgccaugcugcagcuggacccgaacacgaagaccuggauggacaucgaggggcggcccgaggaccccguggagaucgcccucuaccagcccuccagcggcugcuacauccacuucuuccgcgagccgaccgaccugaagcaguucaagcaggacgcgaaguacucccacgggaucgacgucaccgaccuguucgccgcccagcccggccucacgagcgccgugaucgacgcccugccccggaacauggugaucacgugccagggcuccgacgacauccgcaagcugcucgagagccaggggcgcaaggacaucaagcugaucgacaucgcgcugaacaagaccgacagccggaaguacgagaacgccgucugggaccaguacaaggaccucugccacaugcacaccggcguggucguggagaagaagaagcgcgggggcaaggaggagaucaccccgcacugcgcccugauggacugcaucauguucgacgccgcgguguccgggggccugaacaccagcguccuccgggccgugcugccccgcgacaugguguuccggaccuccacgccccgcgucgugcugugaggacuagucccuguucccagagcccacuuuuuuuucuuuuuuugaaauaaaauagccugucuuucagaucucaaaggcucuuuucagagccaccaaaaaaaaaaaaaaaaaaaaaaaaaaaaaaaaaaaaaaaaaaaaaaaaaaaaaaaaaaaaaaaaaaaaaaaaaaaaaaaaaaaaaaaaaaaaaaaaaaaaa

SEQ ID NO: 17180 - RNA, 2001 nt, Artificial Sequence
  mRNA product Design a-2 (hSL-A100) comprising derived and/or modified sequence from LASV(G733-SLE-2010;Clade IV)__AIT17155__NP (opt1)
aggagaguccgcucagccagguugcagaagcggcuuagcguguguccuaaucuucucucugcguguagguaggccugugccgcaaacaagcuuaccaugagcgccuccaaggagaucaagagcuuccuguggacccagucccuccgccgggagcugagcggcuacugcuccaacaucaagcuccagguggucaaggacgcccaggcgcugcugcacgggcuggacuucagcgagguguccaacgugcagcgccucaugcggaaggagcgccgggacgacaacgaccugaagcgccugcgggaccucaaccaggccgucaacaaccugguggagcucaagagcacccagcagaaguccgugcugcgcgucggcacccugaccagcgacgagcugcucgugcuggccgccgaccuggagaagcucaaguccaaggugauccggaccgagcgcccccugagcgccggggucuacaugggcaaccuguccagccagcagcucgaccagcggcgcgcgcugcuguccaugaucgggaugagcggcggcaaccagggggcccggaccggccgcgacgggguggugcgggucugggacgugaagaacgccgagcuccugaacaaccaguucggcaccaugccgucccugacccucgccugccugaccaagcagggccagguggaccugaacgacgcgguccaggcccucaccgaccuggggcugaucuacacggccaaguaccccaacaccagcgaccucgaccgccugacccagucccaccccauccugaacaugaucgacaccaagaaguccagccucaacaucuccggcuacaacuucagccugggggccgccgugaaggcgggcgccugcaugcuggacgggggcaacaugcucgagacgaucaaggugagcccccagaccauggacggcauccucaagagcauccugaaggucaagaaggcccuggggauguucaucuccgacaccccgggcgagcggaaccccuacgagaacauccuguacaagaucugccugagcggggacggcuggcccuacaucgccucccgcaccagcaucacggggcgggccugggagaacaccgugguggaccucgaguccgacggcaagccccagaaggcgggcagcaacaacuccaacaagagccugcaguccgccggguucaccgccggccugaccuacagccagcucaugacgcugaaggacgccaugcugcagcuggacccgaacgccaagaccuggauggacaucgaggggcgccccgaggaccccgucgagaucgcgcucuaccagcccuccagcggcugcuacauccacuucuuccgggagccgaccgaccugaagcaguucaagcaggacgccaaguacucccacgggaucgacgugaccgaccuguucgccgcccagcccggccucacgagcgccgugaucgacgcgcugccccgcaacauggucaucacgugccagggcuccgacgacauccgcaagcugcucgagagccaggggcggaaggacaucaagcugaucgacaucgcccugagcaagaucgacucccgcaaguacgagaacgccgugugggaccaguacaaggaccucugccacaugcacaccggcgucgugguggagaagaagaagcgcgggggcaaggaggagaucacgccccacugcgcccugauggacugcaucauguucgacgcggccgucagcgggggccugaacucccucgugcugcgggccgugcugccgcgggacauggucuuccgcaccagcacgccccggguggugcucugaggacuagucccuguucccagagcccacuuuuuuuucuuuuuuugaaauaaaauagccugucuuucagaucucaaaggcucuuuucagagccaccaaaaaaaaaaaaaaaaaaaaaaaaaaaaaaaaaaaaaaaaaaaaaaaaaaaaaaaaaaaaaaaaaaaaaaaaaaaaaaaaaaaaaaaaaaaaaaaaaaaaa

SEQ ID NO: 17181 - RNA, 2001 nt, Artificial Sequence
  mRNA product Design a-2 (hSL-A100) comprising derived and/or modified sequence from MOPV/LASV reassortant(IGS-1;Clade IV)__AFY05578__NP (opt1)
aggagaguccgcucagccagguugcagaagcggcuuagcguguguccuaaucuucucucugcguguagguaggccugugccgcaaacaagcuuaccaugagcgccuccaaggagaucaagagcuuccuguggacccagucccuccgccgggagcugagcggcuacugcuccaacaucaagcuccagguggucaaggacgcccaggcgcugcugcacgggcuggacuucagcgagguguccaacgugcagcgccucaugcggaaggagcgccgggacgacaacgaccugaagcgccugcgggaccucaaccaggccgucaacaaccugguggagcucaagagcacccagcagaaguccauccugcgcgugggcacccugaccagcgacgaccugcucauccuggccgccgaccuggagaagcuccgguccaaggucauccgcaccgagcggccccugagcgccgggguguacaugggcaaccuguccagccagcagcucgaccagcgccgggcgcugcugaacaugaucgggauguccggcggcaaccagggggcccgcgccggccgggacggggugguccgcgugugggacgugaagaacgccgagcuccugagcaaccaguucggcaccaugccgucccugacgcucgcgugccugaccaagcaggggcaggucgaccugaacgacgccgugcaggcccucaccgaccugggccugaucuacaccgccaaguaccccaacacgagcgaccucgaccggcugacccagucccaccccauccugaacaugaucgacaccaagaaguccagccucaacaucuccggcuacaacuucagccugggggccgcggugaaggccggcgccugcaugcuggacgggggcaacaugcucgagaccaucaaggucagcccccagacgauggacggcauccucaagagcauccugaaggugaagaaggcccuggggauguucaucuccgacaccccgggcgagcgcaaccccuacgagaacauccuguacaagaucugccugagcggggacggcuggcccuacaucgccucccggaccagcaucaccgggcgcgcgugggagaacacgguggucgaccucgaguccgacggcaagccccagaaggccgacagcaacaacuccagcaagucccugcagagcgccggcuucaccgccgggcugaccuacucccagcucaugacccugaaggacgccaugcugcagcuggacccgaacgcgaagacguggauggacaucgagggccggcccgaggaccccguggagaucgcccucuaccagcccagcuccgggugcuacauccacuucuuccgcgagccgaccgaccugaagcaguucaagcaggacgccaaguacagccacggcaucgacgugaccgaccuguucgccacccagcccgggcucacguccgccgucaucgacgcgcugccccgcaacauggugaucacgugccagggcagcgacgacauccggaagcugcucgagagccagggccgcaaggacaucaagcugaucgacaucgaccuguccaagaccgacagccggaaguacgagaacgccgugugggaccaguacaaggaccucugccacaugcacaccggggucguggucgagaagaagaagcgcggcgggaaggaggagaucaccccgcacugcgcccugauggacugcaucauguucgacgccgcgguguccggcgggcugaacaccagcgugcuccgggccguccugccccgcgacaugguguuccggaccuccacgccccgcgugguccugugaggacuagucccuguucccagagcccacuuuuuuuucuuuuuuugaaauaaaauagccugucuuucagaucucaaaggcucuuuucagagccaccaaaaaaaaaaaaaaaaaaaaaaaaaaaaaaaaaaaaaaaaaaaaaaaaaaaaaaaaaaaaaaaaaaaaaaaaaaaaaaaaaaaaaaaaaaaaaaaaaaaaa

SEQ ID NO: 17182 - RNA, 2001 nt, Artificial Sequence
  mRNA product Design a-2 (hSL-A100) comprising derived and/or modified sequence from LASV(LM765-SLE-2012;Clade IV)__AIT17815__NP (opt1)
aggagaguccgcucagccagguugcagaagcggcuuagcguguguccuaaucuucucucugcguguagguaggccugugccgcaaacaagcuuaccaugagcgccuccaaggagaucaagagcuuccuguggacccagucccuccgccgggagcugagcggcuacugcuccaacaucaagcuccagguggucaaggacgcccaggcgcugcugcacgggcuggacuucagcgagguguccaacgugcagcgccucaugcggaaggagcgccgggacgacaacgaccugaagcgccugcgggaccucaaccaggccgucaacaaccugguggagcucaagagcacccagcagaaguccauccugcgcgugggcacccugaccagcgacgaccugcucauccuggccgccgaccuggagaagcucaaguccaaggucacccggaccgagcgcccccugagcgccgggguguacaugggcaaccuguccagccagcagcucgaccagcggcgcgcgcugcuggacaugaucgggauguccggcagcaaccagggcgcccgggccgggcgcgacggcgugguccgggugugggacgugaagaacgccgagcuccugaacaaccaguucgggacgaugccgucccugacccucgcgugccugaccaagcagggccaggucgaccugaacgacgccgugcaggcccucaccgaccuggggcugaucuacacggccaaguaccccaacaccagcgaccucgaccgccugacccagucccaccccauccugaacaugaucgacaccaagaaguccagccucaacaucuccggcuacaacuucagccugggcgccgcggugaaggccggggccugcaugcuggacggcgggaacaugcucgagacgaucaaggucagcccccagaccauggacggcauccucaagagcauccugaaggugaagaaggcccugggcauguucaucuccgacgccccgggggagcggaaccccuacgagaacauccuguacaagaucugccugagcggcgacggguggcccuacaucgcgucccgcaccagcaucaccggccgggccugggagaacacgguggucgaccucgaguccgacgggaagccccagaaggccggcagcaacggcuccaacaagagccugcaguccgccggguucaccgccggccugaccuacagccagcucaugacccugaaggacgcgaugcugcagcuggacccgaacgccaagacguggauggacaucgaggggcgccccgaggaccccguggagaucgcccucuaccagcccuccagcggcugcuacauccacuucuuccgggagccgaccgaccugaagcaguucaagcaggacgccaaguacucccacgggaucgacgugaccgaccuguucgccgcgcagcccggccucaccagcgccgucaucgacgcccugccccgcaacauggugaucacgugccagggcuccgacgacauccgcaagcuguucgagagccaggggcggaaggacaucaagcucaucgacaucgcccugagcaagaccgacucccgcaaguacgagaacgcggugugggaccaguacaaggaccugugccacaugcacaccggcaucgucguggagaagaagaagcgcgggggcaaggaggagaucacgccccacugcgcccucauggacugcaucauguucgacgccgccgucagcgggggccugaacaccuccgugcugcgggccgugcucccgcgggacauggucuuccgcaccagcacgccccggguggugcugugaggacuagucccuguucccagagcccacuuuuuuuucuuuuuuugaaauaaaauagccugucuuucagaucucaaaggcucuuuucagagccaccaaaaaaaaaaaaaaaaaaaaaaaaaaaaaaaaaaaaaaaaaaaaaaaaaaaaaaaaaaaaaaaaaaaaaaaaaaaaaaaaaaaaaaaaaaaaaaaaaaaaa

SEQ ID NO: 17183 - RNA, 2001 nt, Artificial Sequence
  mRNA product Design a-2 (hSL-A100) comprising derived and/or modified sequence from LASV(LM776-SLE-2012;Clade IV)__AIT17825__NP (opt1)
aggagaguccgcucagccagguugcagaagcggcuuagcguguguccuaaucuucucucugcguguagguaggccugugccgcaaacaagcuuaccaugagcgccuccaaggagaucaagagcuuccuguggacccagucccuccgccgggagcugagcuccuacugcagcaacaucaagcuccagguggucaaggacgcccaggcgcugcugcacggccuggacuucuccgaggugagcaacgugcagcgccucaugcggaaggagcgccgggacgacaacgaccugaagcgccugcgggaccucaaccaggccgucaacaaccugguggagcugaaguccacccagcagaaguccauccuccgcguggggacccugaccuccgacgaccugcucauccuggccgccgaccuggagaagcucaagagcaaggucacccggaccgagcgcccccuguccgccggcguguacauggggaaccugagcucccagcagcucgaccagcggcgcgcgcugcugagcaugaucggcauguccgggagcaaccagggcgcccgggccggccgcgacggggugguccgggugugggacgugaagaacgccgagcuccugaacaaccaguucggcacgaugccgucccugacccucgcgugccugaccaagcaggggcaggucgaccugaacgacgccgugcaggcccucaccgaccugggccugaucuacacggccaaguaccccaacaccagcgaccucgaccgccugacccagagccaccccauccugaacaugaucgacaccaagaaguccagccucaacaucuccggguacaacuucagccugggcgccgcggugaaggccggcgccugcaugcuggacgggggcaacaugcucgagacgaucaaggucagcccccagaccauggacgggauccucaagagcauccugaaggugaagaaggcccugggcauguucaucuccgacaccccgggcgagcggaaccccuacgagaacauccuguacaagaucugccugagcggggacggcuggcccuacaucgccucccgcaccagcaucacggggcgggcgugggagaacaccguggucgaccucgaguccgacggcaagccccagaaggccgggagcaacaacuccaacaagagccugcaguccgccggcuucaccgccggccugaccuacagccagcucaugacgcugaaggacgccaugcugcagcuggacccgaacgcgaagaccuggauggacaucgaggggcgccccgaggaccccguggagguggcccucuaccagcccuccagcggcugcuacauccacuucuuccgggagccgaccgaccugaagcaguucaagcaggacgccaaguacucccacgggaucgacgucaccgaccuguucgccgcccagcccggccucacgagcgcggugaucgacgcccugccccgcaacauggugaucacgugccaggggagcgacgacauccgcaagcugcucgagucccagggccggaaggacaucaagcugaucgacaucgcccugagcaagaccgacucccgcaaguacgagaacgccgucugggaccaguacaaggaccucugccacaugcacaccggcguggucguggagaagaagaagcgcgggggcaaggaggagaucaccccgcacugcgcgcugauggacugcaucauguucgacgccgccgugagcgggggccugaacaccuccguccuccgggccgugcugccccgggacaugguguuccgcaccagcacgccccgggucgugcugugaggacuagucccuguucccagagcccacuuuuuuuucuuuuuuugaaauaaaauagccugucuuucagaucucaaaggcucuuuucagagccaccaaaaaaaaaaaaaaaaaaaaaaaaaaaaaaaaaaaaaaaaaaaaaaaaaaaaaaaaaaaaaaaaaaaaaaaaaaaaaaaaaaaaaaaaaaaaaaaaaaaaa

SEQ ID NO: 17184 - RNA, 2001 nt, Artificial Sequence
  mRNA product Design a-2 (hSL-A100) comprising derived and/or modified sequence from LASV(Mad39;Clade IV)__ANH09723__NP (opt1)
aggagaguccgcucagccagguugcagaagcggcuuagcguguguccuaaucuucucucugcguguagguaggccugugccgcaaacaagcuuaccaugagcgccuccaaggagaucaagagcuuccuguggacccagucccuccgccgggagcugagcggcuacugcuccaacaucaagcuccagguggucaaggacgcccaggcgcugcugcacgggcuggacuucagcgagguguccaacgugcagcgccucaugcggaagcagcgccgggacgacaacgaccugaagcgccugcgggaccucaaccaggccgucaacaaccugguggagcugaaguccacccagcagaaguccgugcuccgcgucggcacgcugaccagcgacgaccugcucacccuggccgccgaccuggagaagcucaaguccaaggugacccggacggagcgcccccugaccgccgggguguacaugggcaaccugagcucccagcagcucgaccagcggcgcgcgcugcugaacaugaucgggaugagcggcggcaaccagggggcccggaccggccgcgacggggucgugcgggugugggacgucaagaacgccgagcuccugaacaaccaguucggcaccaugccgucccugacgcucgccugccugaccaagcagggccagguggaccugaacgacgugguccaggcgcucaccgaccuggggcugaucuacaccgccaaguaccccaacacgagcgaccucgaccgccugacccagucccaccccauccugaacaugaucgacaccaacaagagcucccucaacaucagcggcuacaacuucagccugggggccgccgugaaggccggcgcgugcaugcuggacgggggcaacaugcucgagaccaucaaggugagcccccagacgauggacggcauccucaagagcauccugaaggucaagaagucccuggggauguucaucagcgacaccccgggcgagcggaaccccuacgagaacauccuguacaagaucugccuguccggggacggcuggcccuacaucgccagccgcaccuccaucaccgggcgggccugggagaacacggugguggaccucgagagcggcggcaagccccagaaggccggguccaacaacagcaacaagucccugcagagcgccggcuucgcggccgggcugaccuacucccagcucaugacccugaaggacgccaugcugcagcuggacccgaacgccaagaccuggauggacaucgagggccgccccgaggaccccgucgagaucgcccucuaccagcccaucagcgggugcuacauccacuucuuccgggagccgacggaccugaagcaguucaagcaggacgcgaaguacucccacggcaucgacgugaccgaccuguucgccgcccagcccggccucaccagcgccgugaucgaggcccugccccgcaacauggucaucacgugccagggguccgacgacauccgcaagcuguucgagagccagggccggaaggacaucaagcucaucgacaucgcgcuguccaagaccgacagccgcaaguacgagaacgccgugugggaccaguacaaggaccugugccacaugcacaccggggucgugguggagaagaagaagaagggcgggaaggaggagaucacgccccacugcgcccucauggacugcaucauguucgacgccgcggucagcggcggccugaacacccuggugcuccgggccgugcugccgcgcgacauggucuuccggaccuccacccccaagguggugcugugaggacuagucccuguucccagagcccacuuuuuuuucuuuuuuugaaauaaaauagccugucuuucagaucucaaaggcucuuuucagagccaccaaaaaaaaaaaaaaaaaaaaaaaaaaaaaaaaaaaaaaaaaaaaaaaaaaaaaaaaaaaaaaaaaaaaaaaaaaaaaaaaaaaaaaaaaaaaaaaaaaaaa

SEQ ID NO: 17185 - RNA, 2001 nt, Artificial Sequence
  mRNA product Design a-2 (hSL-A100) comprising derived and/or modified sequence from LASV(Z0947-SLE-2011;Clade IV)__AIT17841__NP (opt1)
aggagaguccgcucagccagguugcagaagcggcuuagcguguguccuaaucuucucucugcguguagguaggccugugccgcaaacaagcuuaccaugagcgccuccaaggagaucaagagcuuccuguggacccagucccuccgccgggagcugagcggcuacugcuccaacaucaagcuccagguggucaaggacgcccaggcgcugcugcacgggcuggacuucagcgagguguccaacgugcagcgccucaugcggaaggagcgccgggacgacaacgaccugaagcgccugcgggaccucaaccaggccgucaacaaccugguggagcucaagagcacccagcagaaguccauccugcgcgugggcacccugaccagcgacgaccugcucauccuggccgccgaccuggagaagcucaaguccaaggucacccggaccgagcgcccccugagcgccgggguguacaugggcaaccuguccagccagcagcucgaccagcggcgcgcgcugcugaacaugaucgggauguccggcagcaaccagggcgcccggacggggcgcgacggcgugguccgggugugggacgugaagaacgccgagcuccugaacaaccaguucgggaccaugccgucccugacccucgccugccugaccaagcagggccaggucgaccugaacgacgcggugcaggcccucacggaccuggggcugaucuacaccgccaaguaccccaacaccagcgaccucgaccgccugacccagucccaccccauccugaacaugaucgacacgaagaaguccagccucaacaucuccggcuacaacuucagccugggcgccgccgugaaggcgggggccugcaugcuggacggcgggaacaugcucgagaccaucaaggucagcccccagaccauggacggcauccucaagagcauccugaaggugaagaaggcccugggcauguucaucuccgacgccccgggggagcggaaccccuacgagaacauccuguacaagaucugccugagcggcgacggguggcccuacaucgccucccgcaccagcaucacgggccgggcgugggagaacaccguggucgaccucgaguccgacgggaagccccagaaggccggcagcaacggcuccaacaagagccugcaguccgccggguucaccgccggccugaccuacagccagcucaugacgcugaaggacgccaugcugcagcuggacccgaacgcgaagaccuggauggacaucgaggggcgccccgaggaccccguggagaucgcccucuaccagcccuccagcggcugcuacauccacuucuuccgggagccgaccgaccugaagcaguucaagcaggacgccaaguacucccacgggaucgacgugaccgaccuguucgccgcccagcccggccucacgagcgcggucaucgacgcccugccccgcaacauggugaucacgugccagggcuccgacgacauccgcaagcuguucgagagccaggggcggaaggacaucaagcucaucgacaucgcccugagcaagaccgacucccgcaaguacgagaacgccgugugggaccaguacaaggaccugugccacaugcacaccggcaucgucguggagaagaagaagcgcgggggcaaggaggagaucaccccgcacugcgcgcucauggacugcaucauguucgacgccgccgucagcgggggccugaacaccuccgugcugcgggccgugcucccccgggacauggucuuccgcaccagcacgccccggguggugcugugaggacuagucccuguucccagagcccacuuuuuuuucuuuuuuugaaauaaaauagccugucuuucagaucucaaaggcucuuuucagagccaccaaaaaaaaaaaaaaaaaaaaaaaaaaaaaaaaaaaaaaaaaaaaaaaaaaaaaaaaaaaaaaaaaaaaaaaaaaaaaaaaaaaaaaaaaaaaaaaaaaaaa

SEQ ID NO: 17186 - RNA, 2001 nt, Artificial Sequence
  mRNA product Design a-2 (hSL-A100) comprising derived and/or modified sequence from LASV(Josiah;Clade IV)__NP_694869__NP (opt4)
aggagaguccgcucagccagguugcagaagcggcuuagcguguguccuaaucuucucucugcguguagguaggccugugccgcaaacaagcuuaccaugagcgccagcaaggagaucaagagcuuccuguggacccagagccugagaagagagcugagcggcuacugcagcaacaucaagcugcagguggugaaggacgcccaggcccugcugcacggccuggacuucagcgaggugagcaacgugcagagacugaugagaaaggagagaagagacgacaacgaccugaagagacugagagaccugaaccaggccgugaacaaccugguggagcugaagagcacccagcagaagagcauccugagagugggcacccugaccagcgacgaccugcugauccuggccgccgaccuggagaagcugaagagcaaggugaucagaaccgagagaccccugagcgccggcguguacaugggcaaccugagcagccagcagcuggaccagagaagagcccugcugaacaugaucggcaugagcggcggcaaccagggcgccagagccggcagagacggcguggugagagugugggacgugaagaacgccgagcugcugaacaaccaguucggcaccaugcccagccugacccuggccugccugaccaagcagggccagguggaccugaacgacgccgugcaggcccugaccgaccugggccugaucuacaccgccaaguaccccaacaccagcgaccuggacagacugacccagagccaccccauccugaacaugaucgacaccaagaagagcagccugaacaucagcggcuacaacuucagccugggcgccgccgugaaggccggcgccugcaugcuggacggcggcaacaugcuggagaccaucaaggugagcccccagaccauggacggcauccugaagagcauccugaaggugaagaaggcccugggcauguucaucagcgacacccccggcgagagaaaccccuacgagaacauccuguacaagaucugccugagcggcgacggcuggcccuacaucgccagcagaaccagcaucaccggcagagccugggagaacaccgugguggaccuggagagcgacggcaagccccagaaggccgacagcaacaacagcagcaagagccugcagagcgccggcuucaccgccggccugaccuacagccagcugaugacccugaaggacgccaugcugcagcuggaccccaacgccaagaccuggauggacaucgagggcagacccgaggaccccguggagaucgcccuguaccagcccagcagcggcugcuacauccacuucuucagagagcccaccgaccugaagcaguucaagcaggacgccaaguacagccacggcaucgacgugaccgaccuguucgccacccagcccggccugaccagcgccgugaucgacgcccugcccagaaacauggugaucaccugccagggcagcgacgacaucagaaagcugcuggagagccagggcagaaaggacaucaagcugaucgacaucgcccugagcaagaccgacagcagaaaguacgagaacgccgugugggaccaguacaaggaccugugccacaugcacaccggcguggugguggagaagaagaagagaggcggcaaggaggagaucaccccccacugcgcccugauggacugcaucauguucgacgccgccgugagcggcggccugaacaccagcgugcugagagccgugcugcccagagacaugguguucagaaccagcacccccagaguggugcugugaggacuagucccuguucccagagcccacuuuuuuuucuuuuuuugaaauaaaauagccugucuuucagaucucaaaggcucuuuucagagccaccaaaaaaaaaaaaaaaaaaaaaaaaaaaaaaaaaaaaaaaaaaaaaaaaaaaaaaaaaaaaaaaaaaaaaaaaaaaaaaaaaaaaaaaaaaaaaaaaaaaaa

SEQ ID NO: 17187 - RNA, 2001 nt, Artificial Sequence
  mRNA product Design a-2 (hSL-A100) comprising derived and/or modified sequence from LASV(LP;Clade I)__AAF86702__NP (opt4)
aggagaguccgcucagccagguugcagaagcggcuuagcguguguccuaaucuucucucugcguguagguaggccugugccgcaaacaagcuuaccaugagcaacagcaaggagaucaagagcuuccuguggacccagagccugagaagagagcugagcggcuacugcagcaacaucaagcugcagguggugaaggacgcccaggcccugcugcacggccuggacuucagcgaggugagcaacgugcagagacugaugagaaagcagaagagagacgacgccgaccugaagagacugagagaccugaaccaggccgugaacaaccugguggagcugaagagcacccagcagaagaacgugcugagagugggcacccugagcagcgacgaccugaucacccuggccgccgaccuggagaagcugaagagcaaggugaucagaaccgagagaccccugagcagcggcguguacaugggcaaccugagcagccagcagcuggaccagagaagagcccugcugagcaugaucggcaugagcggcggcccccagggcaacagaaccggcggcgacggcguggugagagugugggacgugaagaacgccgagcugcugaacaaccaguucggcaccaugcccagccugacccuggccugccugaccaagcagggccagguggaccugaacgacgccgugcaggcccugaccgaccugggccugaucuacaccgccaaguaccccaacagcagcgaccuggacaugcugacccagagccaccccauccugggcaugguggacaccaagaagagcagccugaacaucagcggcuacaacuucagccugggcgccgccgugaaggccggcgccugcaugcuggacggcggcaacaugcuggagaccaucaaggugagcccccagaccauggacggcauccugaagagcauccugaaggugaagagaagccugggcauguucaucagcgacacccccggcgagagaaaccccuacgagaacauccuguacaagaucugccugagcggcgagggcuggcccuacaucgccagcagaaccagcaucaccggcagagccugggagaacacccugguggaccuggagagcgacaacaagccccccaagcugaacagcgccggcagcaacaagagccugcaggccgccggccugaacgccggccugaccuacagccagcugaugacccugaaggacugcaugcugcagcuggaccccagcagcaagaccuggaucgacaucgagggcagacccgaggaccccguggagaucgcccuguuccagcccagcagcggcugcuacauccacuucuucagagagcccaccgaccugaagcaguucaagcaggacgccaaguacagccacggcaucgacgugaccgaccuguucagcacccagcccggccugaccagcgccgugaucgaggcccugcccagaaacauggugcugaccugccagggcagcgacgacaucaagaagcugcuggagagccagggcagaagagacaucaagcugaucgacaucagccugagcaaggccgacagcagaaaguucgagaacgccgugugggaccaguacaaggaccugugccacaugcacaccggcguggugguggagaagaagaagagaggcggcaaggaggagaucaccccccacugcgcccugcuggacugcaucauguucgacgccgccaccaccggcagccugaacaucaccacccugagagccgugcugcccagagacaugguguucagaaccagcacccccaagguggugcugugaggacuagucccuguucccagagcccacuuuuuuuucuuuuuuugaaauaaaauagccugucuuucagaucucaaaggcucuuuucagagccaccaaaaaaaaaaaaaaaaaaaaaaaaaaaaaaaaaaaaaaaaaaaaaaaaaaaaaaaaaaaaaaaaaaaaaaaaaaaaaaaaaaaaaaaaaaaaaaaaaaaaa

SEQ ID NO: 17188 - RNA, 2001 nt, Artificial Sequence
  mRNA product Design a-2 (hSL-A100) comprising derived and/or modified sequence from LASV(803213;Clade II)__AAF86704__NP (opt4)
aggagaguccgcucagccagguugcagaagcggcuuagcguguguccuaaucuucucucugcguguagguaggccugugccgcaaacaagcuuaccaugagcgccagcaaggaggugaagagcuuccuguggacccagagccugagaagagagcugagcggcuacugcagcaacaucaagcugcagguggugaaggacgcccaggcccugcugcacggccuggacuucagcgaggugaacaacgugcagagacugaugagaaagcagaagagagacgacggcgaccugaagagacugagagaccugaaccaggccgugaacaaccugguggagcugaagagcacccagcagaagagcauccugagagugggcacccugaccagcgacgaccugcugacccuggccgccgaccuggagaagcugaagagcaaggugaucagaaccgagagaccccugagcagcggcguguacaugggcaaccugagcacccagcagcuggagcagagaagagcccugcugaacaugaucggcauggugggcggcgcccagggcacccagcccggcagagacggcguggugagagugugggacgugaagaaccccgaccugcugaacaaccaguucggcaccaugcccagccugacccuggccugccugaccaagcagggccagguggaccugaacgacgccgugcuggcccugaccgaccugggccugaucuacaccgccaaguaccccaacagcagcgaccuggacagacugagccagagccaccccauccugaacaugguggacaccaagaagagcagccugaacaucagcggcuacaacuucagccugggcgccgccgugaaggccggcgccugcaugcuggacggcggcaacaugcuggagaccaucaaggugaccccccagaccauggacggcauccugaagagcauccugaaggugaagagaagccugggcauguucgugagcgacacccccggcgagagaaaccccuacgagaacauccuguacaagaucugccugagcggcgacggcuggcccuacaucgccagcagaaccagcaucgugggcagagccugggagaacaccaccguggaccuggagagcgacggcaagccccagaaggugggcaccgccggcagcaacaagagccugcagagcgccggcuuccccaccggccugaccuacagccagcugaugacccugaaggacagcaugaugcagcuggaccccagcgccaagaccuggaucgacaucgagggcagacccgaggaccccguggagaucgcccuguaccagcccaugagcggcugcuacauccacuucuucagagagcccaccgaccugaagcaguucaagcaggacgccaaguacagccacggcaucgacguggccgaccuguuccccgcccagcccggccugaccagcgccgugaucgaggcccugcccagaaacauggugcugaccugccagggcagcgacgacaucaagaagcugcuggacagccagggcagaagagacaucaagcugaucgacaucagccugagcaagguggacagcagaaaguucgagaacgccgugugggaccagugcaaggaccugugccacaugcacaccggcguggugguggagaagaagaagagaggcggcaaggaggagaucaccccccacugcgcccugauggacugcaucauguucgacgccgccgugagcggcggccugaacauccccgugcugagagccgugcugcccagagacaugguguucagaaccagcagccccaagguggugcugugaggacuagucccuguucccagagcccacuuuuuuuucuuuuuuugaaauaaaauagccugucuuucagaucucaaaggcucuuuucagagccaccaaaaaaaaaaaaaaaaaaaaaaaaaaaaaaaaaaaaaaaaaaaaaaaaaaaaaaaaaaaaaaaaaaaaaaaaaaaaaaaaaaaaaaaaaaaaaaaaaaaaa

SEQ ID NO: 17189 - RNA, 2004 nt, Artificial Sequence
  mRNA product Design a-2 (hSL-A100) comprising derived and/or modified sequence from LASV(GA391;Clade III)__CAA36646__NP (opt4)
aggagaguccgcucagccagguugcagaagcggcuuagcguguguccuaaucuucucucugcguguagguaggccugugccgcaaacaagcuuaccaugagcgccagcaaggaggugagaagcuuccuguggacccagagccugagaagagagcugagcggcuacugcagcaacaucaagcugcagguggugaaggacgcccaggcccugcugcacggccuggacuucagcgaggugagcaacgugcagagacugaugagaaagcagaagagagacgacggcgaccugaagagacugagagaccugaaccaggccgugaacaaccugguggagcugaagagcacccagcagaagagcgugcugagagugggcacccugagcagcgacgaccugcugauccuggccgccgaccuggagaagcugaagagcaaggugaccagaaccgagagaccccugagcagcggcguguacaugggcaaccugagcagccagcagcuggaccagagaagagcccugcugaacaugaucggcaugaccggcgugagcggcggcggcaagggcgccagcgacggcaucgugagagugugggacgugaagaacgccgagcugcugaacaaccaguucggcaccaugcccagccugacccuggccugccugaccaagcagggccagguggaccugaacgacgccgugcaggcccugaccgaccugggccugaucuacaccgccaaguaccccaacagcagcgaccuggacagacugagccagagccaccccauccugaacaugaucgacaccaagaagagcagccugaacaucagcggcuacaacuucagccugggcgccgccgugaaggccggcgccugcaugcuggacggcggcaacaugcuggagaccaucaaggugagcccccagaccauggacggcauccugaagagcauccugaaggugaagaagagccugggcauguucgugagcgacacccccggcgagagaaaccccuacgagaacauccuguacaagaucugccugagcggcgacggcuggcccuacaucgccagcagaaccagcaucgugggcagagccugggagaacaccgugguggaccuggagcaggacaacaagccccagaagaucggcaacggcggcagcaacaagagccugcagagcgccggcuucgccgccggccugaccuacagccagcugaugacccugaaggacuucaagugcuucaaccugauccccaacgccaagaccuggauggacaucgagggcagacccgaggaccccguggagaucgcccuguaccagcccagcagcggcugcuacgugcacuucuucagagagcccaccgaccugaagcaguucaagcaggacgccaaguacagccacggcaucgacgugaccgaccuguucgccgcccagcccggccugaccagcgccgugaucgaggcccugcccagaaacauggugaucaccugccagggcagcgaggacaucagaaagcugcuggagagccagggcagaagagacaucaagcugaucgacaucacccugagcaaggccgacagcagaaaguucgagaacgccgugugggaccaguucaaggaccugugccacaugcacaccggcguggugguggagaagaagaagagaggcggcaaggaggagaucaccccccacugcgcccugauggacugcaucauguucgacgccgccgugagcggcggccuggacgccaaggugcugagaguggugcugcccagagacaugguguucagaaccagcacccccaagguggugcugugaggacuagucccuguucccagagcccacuuuuuuuucuuuuuuugaaauaaaauagccugucuuucagaucucaaaggcucuuuucagagccaccaaaaaaaaaaaaaaaaaaaaaaaaaaaaaaaaaaaaaaaaaaaaaaaaaaaaaaaaaaaaaaaaaaaaaaaaaaaaaaaaaaaaaaaaaaaaaaaaaaaaa

SEQ ID NO: 17190 - RNA, 2001 nt, Artificial Sequence
  mRNA product Design a-2 (hSL-A100) comprising derived and/or modified sequence from LASV(AV;Clade V)__CCA30315__NP (opt4)
aggagaguccgcucagccagguugcagaagcggcuuagcguguguccuaaucuucucucugcguguagguaggccugugccgcaaacaagcuuaccaugagcgccagcaaggaggugaagagcuuccuguggacccagagccugagaagagagcugagcggcuacugcagcaacaucaagcugcagguggugaaggacgcccaggcccugcugcacggccuggacuucagcgaggugagcaacgugcagagacugaugagaaagcagagaagagacgacagcgaccugaagagacugagagaccugaaccaggccgugaacaaccugguggagcugaagagcacccagcagaagagcgugcugagagugggcacccugagcagcgacgaccugcugacccuggccgccgaccuggagaagcugaagagcaaggugaccagaaccgagagaccccugagcagcggcguguacaugggcaaccugagcagccagcagcuggaccagagaagagcccugcugaaccugaucggcaugaccaacggcagccagggcagccaggccggcagagacggcguggugagagugugggacgugaagaacgccgagcugcugaacaaccaguucggcaccaugcccagccugacccuggccugccugaccaagcagggccagguggaccugaacgacguggugcaggcccugaccgaccugggccugaucuacaccgccaaguaccccaacaccagcgaccuggacagacugacccagagccaccccauccugaacaugaucgacaccaagaagagcagccugaacaucagcggcuacaacuucagccugggcgccgccgugaaggccggcgccugcaugcuggacggcggcaacaugcuggagaccaucaaggugagcccccagagcauggacggcauccugaagagcauccugaaggugaagagagcccugggcauguucgugagcgacacccccggcgagagaaaccccuacgagaacauccuguacaagaucugccugagcggcgacggcuggcccuacaucgccagcagaaccagcaucgugggcagagccugggagaacaccgugguggaccuggagaccgacggcaagccccagaagaucggcagcggcaacagcaacaagagccugcagagcgccggcuucagcgccggccugaccuacagccagcugaugacccugaaggacgccaugcugcagcuggaccccaacgccaagaccuggauggacaucgagggcagacccgaggaccccguggagguggcccuguaccagcccaucagcggcugcuacauccacuucuucagagagcccaccgaccugaagcaguucaagcaggacgccaaguacagccacggcaucgacaucgccgaccuguucgccgcccagcccggccugaccagcgccgugaucgaggcccugcccagaaacauggugaucaccugccagggcagcgaggacaucaagaagcugcuggagagccagggcagaaaggacaucaagcugaucgacaucgcccugagcaagaucgacagcagaaaguucgagaacgccgugugggaccaguacaaggaccugugccacaugcacaccggcguggugguggagaagaagaagagaggcggcaaggaggagaucaccccccacugcgcccugauggacugcaucauguucgacgccgccgugagcggcggccugaacacccuggugcugagagccgugcugcccagagacaugguguucagaaccagcacccccagaguggugcugugaggacuagucccuguucccagagcccacuuuuuuuucuuuuuuugaaauaaaauagccugucuuucagaucucaaaggcucuuuucagagccaccaaaaaaaaaaaaaaaaaaaaaaaaaaaaaaaaaaaaaaaaaaaaaaaaaaaaaaaaaaaaaaaaaaaaaaaaaaaaaaaaaaaaaaaaaaaaaaaaaaaaa

SEQ ID NO: 17191 - RNA, 2001 nt, Artificial Sequence
  mRNA product Design a-2 (hSL-A100) comprising derived and/or modified sequence from LASV(Togo/2016/7082;Clade VI)__AMR44578__NP (opt4)
aggagaguccgcucagccagguugcagaagcggcuuagcguguguccuaaucuucucucugcguguagguaggccugugccgcaaacaagcuuaccaugagcaacagcaaggaggugaagagcuuccuguggacccagagccugagaagagagcugagcggcuacugcagcaacaucaagcugcagguggugaaggacgcccaggcccugcugcacggccuggacuucagcgaggugagcaacgugcagagacugaugagaaagcagaagagagacgacggcgaccugaagagacugagagaccugaaccaggccgugaacaaccugguggagcugaagagcgugcagcagaagagcauccugagagugggcacccugaccagcgacgaccugcugacccuggccgccgaccuggagaagcugaagagcaaggugaccagaaccgagagaccccugagcagcggcguguacaugggcaaccugagcagccagcagcuggaccagagaagagcccugcugagcaugaucggcaugagcggcggcaaccagaacagccagcccaagggcgacggcguggugagagugugggacgugaagaacgccgaccugcugaacaaccaguucggcaccaugcccagccugacccuggccugccugaccaagcagggccagguggaccugaacgacgccgugcaggcccugaccgaccugggccugaucuacaccgccaaguaccccaacagcagcgaccuggacagacugagccagagccaccccauccugaacaugaucgacaccaagaagagcagccugaacaucagcggcuacaacuucagccugggcgccgccaucaagaccggcgccugcaugcuggacggcggcaacaugcuggagaccaucaaggugaccccccagaccauggacggcauccugaagagcauccugaaggugaagagaagccugggcauguucaucagcgacacccccggcgagagaaaccccuacgagaacauccuguacaagaucugccugagcggcgacggcuggcccuacaucgccagcagaaccgccaucaucggcagagccugggagaacaccgugguggaccuggagagcgacagcaagccccagaagaucggcagcaacggcagcaacaagagccugcagagcgccggcuucgcccccggccugaccuacagccagcugaugacccugaaggacagcaugcugcagcuggaccccaacgccaagaccuggaucgacaucgagggcagacccgaggaccccguggagguggcccuguuccagcccaucagcggcugcuacauccacuucuucagagagcccaccgaccugaagcaguucaagcaggacgccaaguacagccacggcaucgacgugaccgaccuguucgccgcccagcccggccugaccagcgccgugaucgaggcccugcccagaaacauggugcugaccugccagggcagcgacgacaucaagaagcugcuggacagccagggcagaagagacaucaagcugaucgacgugagccugaacaagaucgacagcagaaaguucgagaacgccgugugggaccaguacaaggaccugugccacaugcacaccggcguggugguggagaagaagaagaagggcggcaaggaggagaucaccccccacugcgcccugcuggacugcaucauguucgacgccgccgugagcggcggccugaacgccaccgugcugagagccgugcugcccagagacaugguguucagaaccagcagccccaagguggugcugugaggacuagucccuguucccagagcccacuuuuuuuucuuuuuuugaaauaaaauagccugucuuucagaucucaaaggcucuuuucagagccaccaaaaaaaaaaaaaaaaaaaaaaaaaaaaaaaaaaaaaaaaaaaaaaaaaaaaaaaaaaaaaaaaaaaaaaaaaaaaaaaaaaaaaaaaaaaaaaaaaaaaa

SEQ ID NO: 17192 - RNA, 2001 nt, Artificial Sequence
  mRNA product Design a-2 (hSL-A100) comprising derived and/or modified sequence from LASV(KAK-428;Clade n.d. (VII))__ANH09741__NP (opt4)
aggagaguccgcucagccagguugcagaagcggcuuagcguguguccuaaucuucucucugcguguagguaggccugugccgcaaacaagcuuaccaugagcaacagcaaggaggugaagagcuuccuguggacccagagccugagaagagagcugagcggcuacugcaccaacaucaagcugcagguggugaaggacgcccaggcccugcugcacggccuggacuucagcgaggugagcaacgugcagagacugaugagaaagcagaagagagacgacaacgaccugaagagacugagagaccugaaccaggccgugaacaaccugguggagcugaagagcgugcagcagaagagcgugcugaaggugggcacccugaacagcgacgaccugcugacccuggccgccgaccuggagaagcugaagagcaagguggugagaaccgagagaccccugagcagcggcguguacaugggcaaccugagcagccagcagcuggaccagagaagagcccugcugaacaugaucggcauggccggcggcagccagggcaaccagcccagcagagacggcguggugagagugugggacgugaagaacgccgaccugcugaacaaccaguucggcaccaugcccagccugacccuggccugccugaccaagcagggccagguggaccugaacgacguggugcuggcccugaccgaccugggccugaucuacaccgccaaguaccccaacagcagcgaccuggacagacugagccagaaccaccccgugcugaacaugaucgacgugaacaagagcagccugaacaucagcggcuacaacuucagccugggcgccgccgugaaggccggcgccugcaugcuggacggcggcaacaugcuggagaccaucaagaucagcccccagaccguggacggcauccugaagagcauccugaaggugaagagagcccugggcauguucgugagcgacacccccggcgagagaaaccccuacgagaacauccuguacaaggugugccugagcggcaacggcuggcccuacaucgccagcagaaccagcaucgugggcagagccugggagaacaccgugguggaccuggagagcaacaagaaccagcccaaggugggcaacaacggcagcaacaagaugcugcagagcagcggcuucgccaccggccugaccuacagccagcugaugacccugagagacagcaugcugcagcuggaccccaccgccaagaccuggaucgacaucgagggcagacccgaggaccccguggagcuggcccuguuccagcccagcagcggcugcuacauccacuucuucagagagcccaccgaccugaagcaguucaagcaggacgccaaguacagccacggcaucgacgugaacgaccuguucagcgcccagcccggccugaccagcgccgugcuggaggcccugcccagaaacauggugcugaccugccagggcagcgacgacaucagaaagcugcuggacagccaggacagaaaggacaucaagcugaucgacaucagccugagcaaggccgacgccagaaaguucgagaacgacgugugggaccaguucaaggaccugugccacaugcacaccggcaucgugguggagaagaagaagaagggcggcaagcaggagaugaccccccacugcgcccugcuggacugcaucauguucgacgccgccgugagcggcggccugaacgugcccacccugagagccgugcugcccaccgacaugguguucagaaccaucaccaccaagguggugcugugaggacuagucccuguucccagagcccacuuuuuuuucuuuuuuugaaauaaaauagccugucuuucagaucucaaaggcucuuuucagagccaccaaaaaaaaaaaaaaaaaaaaaaaaaaaaaaaaaaaaaaaaaaaaaaaaaaaaaaaaaaaaaaaaaaaaaaaaaaaaaaaaaaaaaaaaaaaaaaaaaaaaa

SEQ ID NO: 17193 - RNA, 2001 nt, Artificial Sequence; identical to SEQ ID NO: 17187
  mRNA product Design a-2 (hSL-A100) comprising derived and/or modified sequence from LASV(Pinneo-NIG-1969;Clade I)__AIT17837__NP (opt4)

SEQ ID NO: 17194 - RNA, 2001 nt, Artificial Sequence
  mRNA product Design a-2 (hSL-A100) comprising derived and/or modified sequence from LASV(ISTH0009-NIG-2011;Clade II)__AIT17405__NP (opt4)
aggagaguccgcucagccagguugcagaagcggcuuagcguguguccuaaucuucucucugcguguagguaggccugugccgcaaacaagcuuaccaugagcgugagcaaggaggugaagagcuuccuguggacccagagccugagaagagagcugagcggcuacugcagcaacaucaagcugcagguggugaaggacgcccaggcccugcugcacggccuggacuucagcgaggugagcaacgugcagagacugaugagaaagcagaagagagacgacagcgaccugaagagacugagagaccugaaccaggccgugaacaaccugguggagcugaagagcacccagcagaagagcauccugagagugggcacccugaccagcgacgaccugcugacccuggccgccgaccuggagaagcugaagagcaaggugaucagaaccgagagaccccugagcagcggcguguacaugggcaaccugagcacccagcagcuggagcagagaagagcccugcugaacaugaucggcauggugggcggcgcccagggcacccagcccggcagagacggcguggugagagugugggacgugaagaaccccgaccugcugaacaaccaguucggcaccaugcccagccugacccuggccugccugaccaagcagggccagguggaccugaacgacgccgugcuggcccugaccgaccugggccugaucuacaccgccaaguaccccaacagcagcgaccuggacagacugagccagagccaccccauccugaacaugguggacaucaagaagagcagccugaacaucagcggcuacaacuucagccugggcgccgccgugaaggccggcgccugcaugcuggacggcggcaacaugcuggagaccaucaaggugaccccccagaccauggacggcauccugaagagcauccugaaggugaagagaagccugggcauguucgugagcgacacccccggcgagagaaaccccuacgagaacauccuguacaagaucugccugagcggcgacggcuggcccuacaucgccagcagaaccagcaucgugggcagagccugggagaacaccaccguggaccuggagagcgacggcaagccccagaaggugggcagcgccggcagcaacaagagccugcagagcgccggcuuccccaccggccugaccuacagccagcugaugacccugaaggacagcaugaugcagcuggaccccagcgccaagaccuggaucgacaucgagggcagacccgaggaccccguggagaucgcccuguaccagcccaugagcggcugcuacauccacuucuucagagagcccaccgaccugaagcaguucaagcaggacgccaaguacagccacggcaucgacguggccgaccuguuccccgcccagcccggccugaccagcgccgugaucgaggcccugcccagaaacauggugcugaccugccagggcagcgacgacaucaagagacugcuggacagccagggcagaagagacaucaagcugaucgacaucgcccugagcaaggccgacagcagaagauucgagaacgccgugugggaccagugcaaggaccugugccacaugcacaccggcguggugguggagaagaagaagagaggcggcaaggaggagaucaccccccacugcgcccugauggacugcaucauguacgacgccgccgugagcggcggccugaacauccccgugcugagagccgugcugcccagagacaugguguucagaaccagcagccccaagguggugcugugaggacuagucccuguucccagagcccacuuuuuuuucuuuuuuugaaauaaaauagccugucuuucagaucucaaaggcucuuuucagagccaccaaaaaaaaaaaaaaaaaaaaaaaaaaaaaaaaaaaaaaaaaaaaaaaaaaaaaaaaaaaaaaaaaaaaaaaaaaaaaaaaaaaaaaaaaaaaaaaaaaaaa

SEQ ID NO: 17195 - RNA, 2001 nt, Artificial Sequence
  mRNA product Design a-2 (hSL-A100) comprising derived and/or modified sequence from LASV(ISTH2010-NIG-2012;Clade II)__AIT17483__NP (opt4)
aggagaguccgcucagccagguugcagaagcggcuuagcguguguccuaaucuucucucugcguguagguaggccugugccgcaaacaagcuuaccaugagcgccagcaaggaggugaagagcuuccuguggacccagagccugagaagagagcugagcggcuacugcagcaacaucaagcugcagguggugaaggacgcccaggcccugcugcacggccuggacuucagcgaggugagcaacgugcagagacugaugagaaagcagaagagagacgacagcgaccugaagagacugagagaccugaaccaggccgugaacaaccugguggagcugaagagcacccagcagaagagcauccugagagugggcacccugaccagcgacgaccugcugacccuggccgccgaccuggagaagcugaagagcaaggugaucagaaccgagagaccccugagcagcggcguguacaugggcaaccugagcacccagcagcuggagcagagaagagcccugcugaaccugaucggcauggugggcggcgcccagggcacccagcccggcagagacggcguggugagagugugggacgugaagaaccccgaccugcugaacaaccaguucggcaccaugcccagccugacccuggccugccugaccaagcagggccagguggaccugaacgacgccgugcuggcccugaccgaccugggccugaucuacaccgccaaguaccccaacagcagcgaccuggacagacugagccagagccaccccauccugaacaugguggacaccaagaagagcagccugaacaucagcggcuucaacuucagccugggcgccgccgugaaggccggcgccugcaugcuggacggcggcaacaugcuggagaccaucaaggugaccccccagaccauggacggcauccugaagagcauccugaaggugaagaagagccugggcauguucgugagcgacacccccggcgagagaaaccccuacgagaacauccuguacaagaucugccugagcggcgacggcuggcccuacaucgccagcagaaccagcaucgugggcagagccugggagaacaccaccguggaccuggagagcgacggcaagccccacaaggugggcaccgccggcagcaacaagagccugcagagcgccggcuuccccaccggccugaccuacagccagcugaugacccugaaggacagcaugaugcagcuggaccccagcgccaagaccuggaucgacaucgagggcagacccgaggaccccguggagaucgcccuguaccagcccaugagcggcugcuacauccacuucuucagagagcccaccgaccugaagcaguucaagcaggacgccaaguacagccacggcaucgacguggccgaccuguuccccgcccagcccggccugaccagcgccgugaucgaggcccugcccagaaacauggugcugaccugccagggcagcgacgacaucaagagacugcuggacagccagggcagaagagacaucaagcugaucgacaucgcccugagcaaggccgacagcagaagauucgagaacgccgugugggaccagugcaaggaccugugccacaugcacaccggcguggugguggagaagaagaagagaggcggcaaggaggagaucaccccccacugcgcccugauggacugcaucauguacgacgccgccgugagcggcggccugaacauccccgugcugagagccgugcugcccagagacaugguguucagaaccagcagccccaagguggugcugugaggacuagucccuguucccagagcccacuuuuuuuucuuuuuuugaaauaaaauagccugucuuucagaucucaaaggcucuuuucagagccaccaaaaaaaaaaaaaaaaaaaaaaaaaaaaaaaaaaaaaaaaaaaaaaaaaaaaaaaaaaaaaaaaaaaaaaaaaaaaaaaaaaaaaaaaaaaaaaaaaaaaa

SEQ ID NO: 17196 - RNA, 2001 nt, Artificial Sequence
  mRNA product Design a-2 (hSL-A100) comprising derived and/or modified sequence from LASV(Lassa virus/H.sapiens-wt/NGA/2015/ISTH_0543;Clade II)__AVO03640__NP (opt4)
aggagaguccgcucagccagguugcagaagcggcuuagcguguguccuaaucuucucucugcguguagguaggccugugccgcaaacaagcuuaccaugagcgccagcaaggaggugaagagcuuccuguggacccagagccugagaagagagcugagcggcuacugcagcaacaucaagcugcagguggugaaggacgcccaggcccugcugcacggccuggacuucagcgaggugagcaacgugcagagacugaugagaaagcagaagagagacgacagcgaccugaagagacugagagaccugaaccaggccgugaacaaccugguggagcugaagagcacccagcagaagagcauccugagagugggcacccugaccagcgacgaccugcugacccuggccgccgaccuggagaagcugaagagcaaggugaucagaaccgagagaccccugagcagcggcguguacaugggcaaccugagcacccagcagcuggagcagagaagagcccugcugaacaugaucggcauggugggcggcgcccagggcacccagcccggcagagacggcguggugagagugugggacgugaagaaccccgaccugcugaacaaccaguucggcaccaugcccagccugacccuggccugccugaccaagcagggccagguggaccugaacgacgccgugcuggcccugaccgaccugggccugaucuacaccgccaaguaccccaacagcagcgaccuggacagacugagccagagccaccccauccugaacaugguggacaccaagaagagcagccugaacaucagcggcuacaacuucagccugggcgccgccgugaaggccggcgccugcaugcuggacggcggcaacaugcuggagaccaucaaggugaccccccagaccauggacggcauccugaagagcauccugaaggugaagaagagccugggcauguucgugagcgacacccccggcgagagaaaccccuacgagaacauccuguacaagaucugccugagcggcgacggcuggcccuacaucgccagcagaaccagcaucgugggcagagccugggagaacaccaccguggaccuggagagcgacggcaagccccagaaggugggcagcgccggcagcaacaagagccugcagagcgccggcuuccccaccggccugaccuacagccagcugaugacccugaaggacagcaugaugcagcuggaccccagcgccaagaccuggaucgacaucgagggcagacccgaggaccccguggagaucgcccuguaccagcccaugagcggcugcuacauccacuucuucagagagcccaccgaccugaagcaguucaagcaggacgccaaguacagccacggcaucgacguggccgaccuguuccccgcccagcccggccugaccagcgccgugaucgaggcccugcccagaaacauggugcugaccugccagggcagcgacgacaucaagagacugcuggacagccagggcagaaaggacaucaagcugaucgacaucgcccugagcaaggccgacagcagaagauucgagaacgccgugugggaccagugcaaggaccugugccacaugcacaccggcguggugguggagaagaagaagagaggcggcaaggaggagaucaccccccacugcgcccugauggacugcaucauguacgacgccgccgugagcggcggccugaacauccccgugcugagagccgugcugcccagagacaugguguucagaaccagcagccccaagguggugcugugaggacuagucccuguucccagagcccacuuuuuuuucuuuuuuugaaauaaaauagccugucuuucagaucucaaaggcucuuuucagagccaccaaaaaaaaaaaaaaaaaaaaaaaaaaaaaaaaaaaaaaaaaaaaaaaaaaaaaaaaaaaaaaaaaaaaaaaaaaaaaaaaaaaaaaaaaaaaaaaaaaaaa

SEQ ID NO: 17197 - RNA, 2001 nt, Artificial Sequence
  mRNA product Design a-2 (hSL-A100) comprising derived and/or modified sequence from LASV(Lassa virus/H.sapiens-wt/NGA/2016/ISTH_0009;Clade II)__AVO03572__NP (opt4)
aggagaguccgcucagccagguugcagaagcggcuuagcguguguccuaaucuucucucugcguguagguaggccugugccgcaaacaagcuuaccaugagcgccagcaaggaggugaagagcuuccuguggacccagagccugagaagagagcugagcggcuacugcagcaacaucaagcugcagguggugaaggacgcccaggcccugcugcacggccuggacuucagcgaggugagcaacgugcagagacugaugagaaagcagaagagagacgacagcgaccugaagagacugagagaccugaaccaggccgugaacaaccugguggagcugaagagcacccagcagaagagcauccugagagugggcacccugaccagcgacgaccugcugacccuggccgccgaccuggagaagcugaagagcaaggugaucagaaccgagagaccccugagcagcggcguguacaugggcaaccugagcacccagcagcuggagcagagaagagcccugcugaacaugaucggcauggugggcggcgcccagggcacccagcccggcagagacggcguggugagagugugggacgugaagaaccccgaccugcugaacaaccaguucggcaccaugcccagccugacccuggccugccugaccaagcagggccagguggaccugaacgacgccgugcuggcccugaccgaccugggccugaucuacaccgccaaguaccccaacagcagcgaccuggacagacugagccagagccaccccauccugaacaugguggacaccaagaagagcagccugaacaucagcggcuacaacuucagccugggcgccgccgugaaggccggcgccugcaugcuggacggcggcaacaugcuggagaccaucaaggugaccccccagaccauggacggcauccugaagagcauccugaaggugaagaagagccugggcauguucgugagcgacacccccggcgagagaaaccccuacgagaacauccuguacaagaucugccugagcggcgacggcuggcccuacaucgccagcagaaccagcaucgugggcagagccugggagaacaccaccguggaccuggagagcgacggcaagccccagaaggugggcagcgccggcagcaacaagagccugcagagcgccggcuuccccaccggccugaccuacagccagcugaugacccugaaggacagcaugaugcagcuggaccccagcgccaagaccuggaucgacaucgagggcagacccgaggaccccguggagaucgcccuguaccagcccaugagcggcugcuacauccacuucuucagagagcccaccgaccugaagcaguucaagcaggacgccaaguacagccacggcaucgacguggccgaccuguuccccgcccagcccggccugaccagcgccgugaucgaggcccugcccagaaacauggugcugaccugccagggcagcgacgacaucaagagacugcuggacagccagggcagaagagacaucaagcugaucgacaucgcccugagcaaggccgacagcagaagauucgagaacgccgugugggaccagugcaaggaccugugccacaugcacaccggcguggugguggagaagaagaagagaggcggcaaggaggagaucaccccccacugcgcccugauggacugcaucauguacgacgccgccgugagcggcggccugaacauccccgugcugagagccgugcugcccagagacaugguguucagaaccagcagccccaagguggugcugugaggacuagucccuguucccagagcccacuuuuuuuucuuuuuuugaaauaaaauagccugucuuucagaucucaaaggcucuuuucagagccaccaaaaaaaaaaaaaaaaaaaaaaaaaaaaaaaaaaaaaaaaaaaaaaaaaaaaaaaaaaaaaaaaaaaaaaaaaaaaaaaaaaaaaaaaaaaaaaaaaaaaa

SEQ ID NO: 17198 - RNA, 2001 nt, Artificial Sequence
  mRNA product Design a-2 (hSL-A100) comprising derived and/or modified sequence from LASV(Lassa virus/H.sapiens-wt/NGA/2016/ISTH_0017;Clade II)__AVO03568__NP (opt4)
aggagaguccgcucagccagguugcagaagcggcuuagcguguguccuaaucuucucucugcguguagguaggccugugccgcaaacaagcuuaccaugagcgccagcaaggaggugaagagcuuccuguggacccagagccugagaagagagcugagcggcuacugcagcagcaucaagcugcagguggugaaggacgcccaggcccugcugcacggccuggacuucagcgaggugagcaacgugcagagacugaugagaaagcagaagagagacgacagcgaccugaagagacugagagaccugaaccaggccgugaacaaccugguggagcugaagagcacccagcagaagagcauccugagagugggcacccugaccagcgacgaccugcugacccuggccgccgaccuggagaagcugaagagcaaggugaucagaaccgagagaccccugagcagcggcguguacaugggcaaccugagcacccagcagcuggagcagagaagagcccugcugaacaugaucggcauggccggcggcgcccagggcacccagcccggcagagacggcguggugagagugugggacgugaagaaccccgaccugcugaacaaccaguucggcaccaugcccagccugacccuggccugccugaccaagcagggccagguggaccugaacgacgccgugcuggcccugaccgaccugggccugaucuacaccgccaaguaccccaacagcagcgaccuggacagacugagccagagccaccccauccugaacaugguggacaccaagaagagcagccugaacaucagcggcuacaacuucagccugggcgccgccgugaaggccggcgccugcaugcuggacggcggcaacaugcuggagaccaucaaggugaccccccagaccauggacggcauccugaagagcauccugaaggugaagagaagccugggcauguucgugagcgacgcccccggcgagagaaaccccuacgagaacauccuguacaagaucugccugagcggcgacggcuggcccuacaucgccagcagaaccagcaucgugggcagagccugggagaacaccaccguggaccuggagagcgacggcaagccccagaaggugggcgccaccggcagcaacaagagccugcagagcgccggcuuccccaccggccugaccuacagccagcugaugacccugaaggacagcaugaugcagcuggaccccagcgccaagaccuggaucgacaucgagggcagacccgaggaccccguggagguggcccuguaccagcccgugagcggcugcuacauccacuucuucagagagcccaccgaccugaagcaguucaagcaggacgccaaguacagccacggcaucgacguggccgaccuguuccccgcccagcccggccugaccagcgccgugaucgaggcccugcccagaaacauggugcugaccugccagggcagcgacgacaucaagaagcugcuggacagccagggcagaaaggacaucaagcugaucgacaucgcccugagcaaggccgacagcagaagauucgagaacgccgugugggaccagugcaaggaccugugccacaugcacaccggcguggugguggagaagaagaagagaggcggcaaggaggagaucaccccccacugcgcccugauggacugcaucauguacgacgccgccgugagcggcggccugaacauccccgugcugagagccgugcugcccagagacaugguguucagaaccagcagccccaagguggugcugugaggacuagucccuguucccagagcccacuuuuuuuucuuuuuuugaaauaaaauagccugucuuucagaucucaaaggcucuuuucagagccaccaaaaaaaaaaaaaaaaaaaaaaaaaaaaaaaaaaaaaaaaaaaaaaaaaaaaaaaaaaaaaaaaaaaaaaaaaaaaaaaaaaaaaaaaaaaaaaaaaaaaa

SEQ ID NO: 17199 - RNA, 2001 nt, Artificial Sequence
  mRNA product Design a-2 (hSL-A100) comprising derived and/or modified sequence from LASV(Lassa virus/H.sapiens-wt/NGA/2018/ISTH_0959;Clade II)__AVV65100__NP (opt4)
aggagaguccgcucagccagguugcagaagcggcuuagcguguguccuaaucuucucucugcguguagguaggccugugccgcaaacaagcuuaccaugagcgccagcaaggaggugaagagcuuccuguggacccagagccugagaagagagcugagcggcuacugcagcaacaucaagcugcagguggugaaggacgcccaggcccugcugcacggccuggacuucagcgaggugagcaacgugcagagacugaugagaaagcagaagagagacgacagcgaccugaagagacugagagaccugaaccaggccgugaacaaccugguggagcugaagagcacccagcagaagagcauccugagagugggcacccugaccagcgacgaccugcugacccuggccgccgaccuggagaagcugaagagcaaggugaucagaaccgagagaccccugagcagcggcguguacaugggcaaccugagcacccagcagcuggagcagagaagagcccugcugaaccugaucggcauggugggcggcgcccagggcacccagcccggcagagacggcguggugagagugugggacgugaagaaccccgaccugcugaacaaccaguucggcaccaugcccagccugacccuggccugccugaccaagcagggccagguggaccugaacgacguggugcuggcccugaccgaccugggccugaucuacaccgccaaguaccccaacagcagcgaccuggacagacugagccagagccaccccauccugaacaugguggacaccaagaagagcagccugaacaucagcggcuucaacuucagccugggcgccgccgugaaggccggcgccugcaugcuggacggcggcaacaugcuggagaccaucaaggugaccccccagaccauggacggcauccugaagagcauccugaaggugaagaagagccugggcauguucgugagcgacacccccggcgagagaaaccccuacgagaacauccuguacaagaucugccugagcggcgacggcuggcccuacaucgccagcagaaccagcaucgugggcagagccugggagaacaccaccguggaccuggagagcgacggcaagccccacaaggugggcaccgccggcagcaacaagagccugcagagcgccggcuuccccaccggccugaccuacagccagcugaugacccugaaggacagcaugaugcagcuggaccccagcgccaagaccuggaucgacaucgagggcagacccgaggaccccguggagaucgcccuguaccagcccaugagcggcugcuacauccacuucuucagagagcccaccgaccugaagcaguucaagcaggacgccaaguacagccacggcaucgacguggccgaccuguuccccgcccagcccggccugaccagcgccgugaucgaggcccugcccagaaacauggugcugaccugccagggcagcgacgacaucaagagacugcuggacagccagggcagaaaggacaucaagcugaucgacaucgcccugagcaagaccgacagcagaagauucgagaacgccgugugggaccagugcaaggaccugugccacaugcacaccggcguggugguggagaagaagaagagaggcggcaaggaggagaucaccccccacugcgcccugauggacugcaucauguacgacgccgccgugagcggcggccugaacauccccgugcugagagccgugcugcccagagacaugguguucagaaccagcagccccaagguggugcugugaggacuagucccuguucccagagcccacuuuuuuuucuuuuuuugaaauaaaauagccugucuuucagaucucaaaggcucuuuucagagccaccaaaaaaaaaaaaaaaaaaaaaaaaaaaaaaaaaaaaaaaaaaaaaaaaaaaaaaaaaaaaaaaaaaaaaaaaaaaaaaaaaaaaaaaaaaaaaaaaaaaaa

SEQ ID NO: 17200 - RNA, 2001 nt, Artificial Sequence
  mRNA product Design a-2 (hSL-A100) comprising derived and/or modified sequence from LASV(LASV003-NIG-2008;Clade II)__AIT17581__NP (opt4)
aggagaguccgcucagccagguugcagaagcggcuuagcguguguccuaaucuucucucugcguguagguaggccugugccgcaaacaagcuuaccaugagcgccagcaaggaggugaagagcuuccuguggacccagagccugagaagagagcugagcggcuacugcagcagcaucaagcugcagguggugaaggacgcccaggcccugcugcacggccuggacuucagcgaggugagcaacgugcagagacugaugagaaagcagaagagagacgacagcgaccugaagagacugagagaccugaaccaggccgugaacaaccugguggagcugaagagcacccagcagaagagcgugcugagagugggcacccugaccagcgacgaccugcugacccuggccgccgaccuggagaagcugaagagcaaggugaucagaaccgagagaccccugagcagcggcguguacaugggcaaccugagcgcccagcagcuggagcagagaagaacccugcugaacaugaucggcauggugggcggcgcccagggcacccagcccggcagagacggcguggugagagugugggacgugaagaaccccgaccugcugaacaaccaguucggcaccaugcccagccugacccuggccugccugaccaagcagggccagguggaccugaacgacguggugcuggcccugaccgaccugggccugaucuacaccgccaaguaccccaacagcagcgaccuggacagacugagccagagccaccccauccugagcaugguggacaccaagaagagcagccugaacaucagcggcuacaacuucagccugggcgccgccgugaaggccggcgccugcaugcuggacggcggcaacaugcuggagaccaucaaggugaccccccagaccauggacggcauccugaagagcauccugaaggugaagaagagccugggcauguucgugagcgacacccccggcgagagaaaccccuacgagaacauccuguacaagaucugccugagcggcgacggcuggcccuacaucgccagcagaaccagcaucgugggcagagccugggagaacaccaccguggaccuggagagcgacggcaagccccagaaggugggcaccgccggcagcaacaagagccugcagagcgccggcuuccccaccggccugaccuacagccagcugaugacccugaaggacagcaugaugcagcuggaccccagcgccaagaccuggaucgacaucgagggcagacccgaggaccccguggagaucgcccuguaccagcccaugagcggcugcuacauccacuucuucagagagcccaccgaccugaagcaguucaagcaggacgccaaguacagccacggcaucgacgugaccgaccuguuccccgcccagcccggccugaccagcgccgugaucgaggcccugcccagaaacauggugcugaccugccagggcagcgacgacaucaagagacugcuggacagccagggcagaagagacaucaagcugaucgacaucgcccugagcaaggccgacagcagaagauucgagaacgccgugugggaccagugcaaggaccugugccacaugcacaccggcguggugguggagaagaagaagagaggcggcaaggaggagaucaccccccacugcgcccugauggacugcaucauguacgacgccgccgugagcggcggccugaacauccccgugcugagagccgugcugcccagagacaugguguucagaaccagcagccccaagguggugcugugaggacuagucccuguucccagagcccacuuuuuuuucuuuuuuugaaauaaaauagccugucuuucagaucucaaaggcucuuuucagagccaccaaaaaaaaaaaaaaaaaaaaaaaaaaaaaaaaaaaaaaaaaaaaaaaaaaaaaaaaaaaaaaaaaaaaaaaaaaaaaaaaaaaaaaaaaaaaaaaaaaaaa

SEQ ID NO: 17201 - RNA, 2001 nt, Artificial Sequence
  mRNA product Design a-2 (hSL-A100) comprising derived and/or modified sequence from LASV(LASV035-NIG-2009;Clade II)__AIT17589__NP (opt4)
aggagaguccgcucagccagguugcagaagcggcuuagcguguguccuaaucuucucucugcguguagguaggccugugccgcaaacaagcuuaccaugagcgccagcaaggaggugaagagcuuccuguggacccagagccugagaagagagcugagcggcuacugcagcagcaucaagcugcagguggugaaggacgcccaggcccugcugcacggccuggacuucagcgaggugagcaacgugcagagacugaugagaaagcagaagagagacgacagcgaccugaagagacugagagaccugaaccaggccgugaacaaccugguggagcugaagagcacccagcagaagagcauccugagagugggcacccugaccagcgacgaccugcugacccuggccgccgaccuggagaagcugaagagcaaggugaucagaaccgagagaccccugagcagcggcguguacaugggcaaccugagcgcccagcagcuggagcagagaagagcccugcugaacaugaucggcauggugggcggcgcccagggcacccagcccggcagagacggcguggugagagugugggacgugaagaaccccgaccugcugaacaaccaguucggcaccaugcccagccugacccuggccugccugaccaagcagggccagguggaccugaacgacgccgugcuggcccugaccgaccugggccugaucuacaccgccaaguaccccaacagcagcgaccuggacagacugagccagagccaccccauccugaacaugguggacaccaagaagagcagccugaacaucagcggcuacaacuucagccugggcgccgccgugaaggccggcgccugcaugcuggacggcggcaacaugcuggagaccaucaaggugaccccccagaccauggacggcauccugaagagcauccugaaggugaagagaagccugggcauguucgugagcgacacccccggcgagagaaaccccuacgagaacauccuguacaagaucugccugagcggcgacggcuggcccuacaucgccagcagaaccagcaucgugggcagagccugggagaacaccaccguggaccuggagagcgacggcaagccccagaaggugggcaccaccggcagcaacaagagccugcagagcgccggcuuccccaccggccugaccuacagccagcugaugacccugaaggacagcaugaugcagcuggaccccagcgccaagaccuggaucgacaucgagggcagacccgaggaccccguggagaucgcccuguaccagcccaugagcggcugcuacauccacuucuucagagagcccaccgaccugaagcaguucaagcaggacgccaaguacagccacggcaucgacguggccgaccuguuccccgcccagcccggccugaccagcgccgugaucgaggcccugcccagaaacauggugcugaccugccagggcagcgacgacaucaagaagcugcuggacagccagggcagaagagacaucaagcugaucgacaucgcccugagcaaggccgacagcagaaaguucgagaacgccgugugggaccagugcaaggaccugugccacaugcacaccggcguggugguggagaagaagaagagaggcggcaaggaggagaucaccccccacugcgcccugauggacugcaucauguacgacgccgccgugagcggcggccugaacauccccgugcugagagccgugcugcccagagacaugguguucagaaccagcagccccaagguggugcugugaggacuagucccuguucccagagcccacuuuuuuuucuuuuuuugaaauaaaauagccugucuuucagaucucaaaggcucuuuucagagccaccaaaaaaaaaaaaaaaaaaaaaaaaaaaaaaaaaaaaaaaaaaaaaaaaaaaaaaaaaaaaaaaaaaaaaaaaaaaaaaaaaaaaaaaaaaaaaaaaaaaaa

SEQ ID NO: 17202 - RNA, 2001 nt, Artificial Sequence
  mRNA product Design a-2 (hSL-A100) comprising derived and/or modified sequence from LASV(LASV1000-NIG-2009;Clade II)__AIT17783__NP (opt4)
aggagaguccgcucagccagguugcagaagcggcuuagcguguguccuaaucuucucucugcguguagguaggccugugccgcaaacaagcuuaccaugagcgccagcaaggaggugaagagcuuccuguggacccagagccugagaagagagcugagcggcuacugcagcaacaucaagcugcagguggugaaggacgcccaggcccugcugcacggccuggacuucagcgaggugagcaacgugcagagacugaugagaaagcagaagagagacgacagcgaccugaagagacugagagaccugaaccaggccgugaacaaccugguggagcugaagagcacccagcagaagagcauccugagagugggcacccugaccagcgacgaccugcugacccuggccgccgaccuggagaagcugaagagcaaggugaucagaaccgagagaccccugagcagcggcguguacaugggcaaccugagcacccagcagcuggagcagagaagagcccugcugaacaugaucggcauggugggcggcgcccagggcacccagcccggcagagacggcguggugagagugugggacgugaagaaccccgaccugcugaacaaccaguucggcaccaugcccagccugacccuggccugccugaccaagcagggccagguggaccugaacgacguggugcuggcccugaccgaccugggccugaucuacaccgccaaguaccccaacagcagcgaccuggacagacugagccagagccaccccauccugaacaugguggacaccaagaagagcagccugaacaucagcggcuacaacuucagccugggcgccgccgugaaggccggcgccugcaugcuggacggcggcaacaugcuggagaccaucaaggugaccccccagaccauggacggcauccugaagagcauccugaaggugaagaagagccugggcauguucgugagcgacacccccggcgagagaaaccccuacgagaacauccuguacaagaucugccugagcggcgacggcuggcccuacaucgccagcagaaccagcaucgugggcagagccugggagaacaccaccguggaccuggagagcgacggcaagccccagaaggugggcaccgccggcagcaacaagagccugcagagcgccggcuuccccaccggccugaccuacagccagcugaugacccugaaggacagcaugaugcagcuggaccccagcgccaagaccuggaucgacaucgagggcagacccgaggaccccguggagaucgcccuguaccagcccgugagcggcugcuacauccacuucuucagagagcccaccgaccugaagcaguucaagcaggacgccaaguacagccacggcaucgacguggccgaccuguuccccgcccagcccggccugaccagcgccgugaucgaggcccugcccagaaacauggugcugaccugccagggcagcgacgacaucaagagacugcuggacagccagggcagaagagacaucaagcugaucgacaucgcccugagcaaggccgacagcagaagauucgagaacgccgugugggaccagugcaaggaccugugccacaugcacaccggcguggugguggagaagaagaagagaggcggcaaggaggagaucaccccccacugcgcccugauggacugcaucauguacgacgccgccgugagcggcggccugaacauccccgugcugagagccgugcugcccagagacaugguguucagaaccagcagccccaagguggugcugugaggacuagucccuguucccagagcccacuuuuuuuucuuuuuuugaaauaaaauagccugucuuucagaucucaaaggcucuuuucagagccaccaaaaaaaaaaaaaaaaaaaaaaaaaaaaaaaaaaaaaaaaaaaaaaaaaaaaaaaaaaaaaaaaaaaaaaaaaaaaaaaaaaaaaaaaaaaaaaaaaaaaa

SEQ ID NO: 17203 - RNA, 2001 nt, Artificial Sequence
  mRNA product Design a-2 (hSL-A100) comprising derived and/or modified sequence from LASV(LASV221-NIG-2010;Clade II)__AIT17625__NP (opt4)
aggagaguccgcucagccagguugcagaagcggcuuagcguguguccuaaucuucucucugcguguagguaggccugugccgcaaacaagcuuaccaugagcgccagcaaggaggugaagagcuuccuguggacccagagccugagaagagagcugagcggcuacugcagcagcaucaagcugcagguggugaaggacgcccaggcccugcugcacggccuggacuucagcgaggugagcaacgugcagagacugaugagaaagcagagaagagacgacagcgaccugaagagacugagagaccugaaccaggccgugaacaaccugguggagcugaagagcacccagcagaagagcauccugagagugggcacccugaccagcgacgaccugcugacccuggccgccgaccuggagaagcugaagagcaaggugaucagaaccgagagaccccugagcagcggcguguacaugggcaaccugagcacccagcagcuggagcagagaagagcccugcugaacaugaucggcauggugggcggcgcccagggcacccagcccggcagagacggcguggugagagugugggacgugaagaaccccgaccugcugaacaaccaguucggcaccaugcccagccugacccuggccugccugaccaagcagggccagguggaccugaacgacgccgugcuggcccugaccgaccugggccugaucuacaccgccaaguaccccaacagcagcgaccuggacagacugagccagagccaccccauccugaacaugguggacaccaagaagagcagccugaacaucagcggcuacaacuucagccugggcgccgccgugaaggccggcgccugcaugcuggacggcggcaacaugcuggagaccaucaaggugaccccccagaccguggacggcauccugaagagcauccugaaggugaagagaagccugggcauguucgugagcgacacccccggcgagagaaaccccuacgagaacauccuguacaagaucugccugagcggcgacggcuggcccuacaucgccagcagaaccagcaucgugggcagagccugggagaacaccaccguggaccuggagagcgacggcaagccccagaaggugggcaccgccggcagcaacaagagccugcagagcgccggcuuccccaccggccugaccuacagccagcugaugacccugaaggacagcaugaugcagcuggaccccagcgccaagaccuggaucgacaucgagggcagacccgaggaccccguggagaucgcccuguaccagcccaugagcggcugcuacauccacuucuucagagagcccaccgaccugaagcaguucaagcaggacgccaaguacagccacggcaucgacguggccgaccuguuccccgcccagcccggccugaccagcgccgugaucgaggcccugcccagaaacauggugcugaccugccagggcagcgacgacaucaagagacugcuggacagccagggcagaagagacaucaagcugaucgacaucgcccugagcaaggccgacagcagaaaguucgagaacgccgugugggaccagugcaaggaccugugccacaugcacaccggcguggugguggagaagaagaagagaggcggcaaggaggagaucaccccccacugcgcccugauggacugcaucauguacgacgccgccgugagcggcggccugaacauccccgugcugagagccgugcugcccagagacaugguguucagaaccagcagccccaagguggugcugugaggacuagucccuguucccagagcccacuuuuuuuucuuuuuuugaaauaaaauagccugucuuucagaucucaaaggcucuuuucagagccaccaaaaaaaaaaaaaaaaaaaaaaaaaaaaaaaaaaaaaaaaaaaaaaaaaaaaaaaaaaaaaaaaaaaaaaaaaaaaaaaaaaaaaaaaaaaaaaaaaaaaa

SEQ ID NO: 17204 - RNA, 2001 nt, Artificial Sequence
  mRNA product Design a-2 (hSL-A100) comprising derived and/or modified sequence from LASV(LASV237-NIG-2010;Clade II)__AIT17639__NP (opt4)
aggagaguccgcucagccagguugcagaagcggcuuagcguguguccuaaucuucucucugcguguagguaggccugugccgcaaacaagcuuaccaugagcgccagcaaggaggugaagagcuuccuguggacccagagccugagaagagagcugagcggcuacugcagcaacaucaagcugcagguggugaaggacgcccaggcccugcugcacggccuggacuucagcgaggugagcaacgugcagagacugaugagaaagcagaagagagacgacagcgaccugaagagacugagagaccugaaccaggccgugaacaaccugguggagcugaagagcacccagcagaagagcauccugagagugggcacccugaccagcgacgaccugcugacccuggccgccgaccuggagaagcugaagagcaaggugaucagaaccgagagaccccugagcagcggcguguacaugggcaaccugagcacccagcagcuggagcagagaagagcccugcugaacaugaucggcauggugggcggcgcccagggcacccagcccggcagagacggcguggugagagugugggacgugaagaaccccgaccugcugaacaaccaguucggcaccaugcccagccugacccuggccugccugaccaagcagggccagguggaccugaacgacgccgugcuggcccugaccgaccugggccugaucuacaccgccaaguaccccaacagcagcgaccuggacagacugagccagagccaccccauccugaacaugguggacaucaagaagagcagccugaacaucagcggcuacaacuucagccugggcgccgccgugaaggccggcgccugcaugcuggacggcggcaacaugcuggagaccaucaaggugaccccccagaccauggacggcauccugaagagcauccugaaggugaagagaagccugggcauguucgugagcgacacccccggcgagagaaaccccuacgagaacauccuguacaagaucugccugagcggcgacggcuggcccuacaucgccagcagaaccagcaucgugggcagagccugggagaacaccaccguggaccuggagagcgacggcaagccccagaaggugggcagcgccggcagcaacaagagccugcagagcgccggcuuccccaccggccugaccuacagccagcugaugacccugaaggacagcaugaugcagcuggaccccagcgccaagaccuggaucgacaucgagggcagacccgaggaccccguggagaucgcccuguaccagcccaugagcggcugcuacauccacuucuucagagagcccaccgaccugaagcaguucaagcaggacgccaaguacagccacggcaucgacguggccgaccuguuccccgcccagcccggccugaccagcgccgugaucgaggcccugcccagaaacauggugcugaccugccagggcagcgacgacaucaagagacugcuggacagccagggcagaagagacaucaagcugaucgacaucgcccugagcaaggccgacagcagaagauucgagaacgccgugugggaccagugcaaggaccugugccacaugcacaccggcguggugguggagaagaagaagagaggcggcaaggaggagaucaccccccacugcgcccugauggacugcaucauguacgacgccgccgugagcggcggccugaacauccccgugcugagagccgugcugcccagagacaugguguucagaaccagcagccccaagguggugcugugaggacuagucccuguucccagagcccacuuuuuuuucuuuuuuugaaauaaaauagccugucuuucagaucucaaaggcucuuuucagagccaccaaaaaaaaaaaaaaaaaaaaaaaaaaaaaaaaaaaaaaaaaaaaaaaaaaaaaaaaaaaaaaaaaaaaaaaaaaaaaaaaaaaaaaaaaaaaaaaaaaaaa

SEQ ID NO: 17205 - RNA, 2001 nt, Artificial Sequence
  mRNA product Design a-2 (hSL-A100) comprising derived and/or modified sequence from LASV(LASV253-NIG-2011;Clade II)__AIT17671__NP (opt4)
aggagaguccgcucagccagguugcagaagcggcuuagcguguguccuaaucuucucucugcguguagguaggccugugccgcaaacaagcuuaccaugagcgccagcaaggaggugaagagcuuccuguggacccagagccugagaagagagcugagcggcuacugcagcagcaucaagcugcagguggugaaggacgcccaggcccugcugcacggccuggacuucagcgaggugagcaacgugcagagacugaugagaaagcagaagagagacgacagcgaccugaagagacugagagaccugaaccaggccgugaacaaccugguggagcugaagagcacccagcagaagagcgugcugagagugggcacccugaccagcgacgaccugcugacccuggccgccgaccuggagaagcugaagagcaaggugaucagaaccgagagaccccugagcagcggcguguacaugggcaaccugagcacccagcagcuggagcagagaagagcccugcugaacaugaucggcauggugggcggcgcccagggcacccagcccggcagagacggcguggugagagugugggacgugaagaaccccgaccugcugaacaaccaguucggcaccaugcccagccugacccuggccugccugaccaagcagggccagguggaccugaacgacguggugcuggcccugaccgaccugggccugaucuacaccgccaaguaccccaacagcagcgaccuggacagacugagccagagccaccccauccugaacaugguggacaccaagaagagcagccugaacaucagcggcuacaacuucagccugggcgccgccgugaaggccggcgccugcaugcuggacggcggcaacaugcuggagaccaucaaggugaccccccagaccauggacggcauccugaagagcauccugaaggugaagaagagccugggcauguucgugagcgacacccccggcgagagaaaccccuacgagaacauccuguacaagaucugccugagcggcgacggcuggcccuacaucgccagcagaaccagcaucgugggcagagccugggagaacaccaccguggaccuggagagcgacggcaagccccagaaggugggcaccgccggcagcaacaagagccugcagagcgccggcuuccccaccggccugaccuacagccagcugaugacccugaaggacagcaugaugcagcuggaccccagcgccaagaccuggaucgacaucgagggcagacccgaggaccccguggagaucgcccuguaccagcccaugagcggcugcuacauccacuucuucagagagcccaccgaccugaagcaguucaagcaggacgccaaguacagccacggcaucgacgugaccgaccuguuccccgcccagcccggccugaccagcgccgugaucgaggcccugcccagaaacauggugcugaccugccagggcagcgacgacaucaagagacugcuggacagccagggcagaagagacaucaagcugaucgacaucgcccugagcaaggccgacagcagaagauucgagaacgccgugugggaccagugcaaggaccugugccacaugcacaccggcguggugguggagaagaagaagagaggcggcaaggaggagaucaccccccacugcgcccugauggacugcaucauguacgacgccgccgugagcggcggccugaacauccccgugcugagagccgugcugcccagagacaugguguucagaaccagcagccccaagguggugcugugaggacuagucccuguucccagagcccacuuuuuuuucuuuuuuugaaauaaaauagccugucuuucagaucucaaaggcucuuuucagagccaccaaaaaaaaaaaaaaaaaaaaaaaaaaaaaaaaaaaaaaaaaaaaaaaaaaaaaaaaaaaaaaaaaaaaaaaaaaaaaaaaaaaaaaaaaaaaaaaaaaaaa

SEQ ID NO: 17206 - RNA, 2001 nt, Artificial Sequence
  mRNA product Design a-2 (hSL-A100) comprising derived and/or modified sequence from LASV(LASV254-NIG-2011;Clade II)__AIT17675__NP (opt4)
aggagaguccgcucagccagguugcagaagcggcuuagcguguguccuaaucuucucucugcguguagguaggccugugccgcaaacaagcuuaccaugagcgccagcaaggaggugaagagcuuccuguggacccagagccugagaagagagcugagcggcuacugcagcagcaucaagcugcagguggugaaggacgcccaggcccugcugcacggccuggacuucagcgaggugagcaacgugcagagacugaugagaaagcagaagagagacgacagcgaccugaagagacugagagaccugaaccaggccgugaacaaccugguggagcugaagagcacccagcagaagagcgugcugagagugggcacccugaccagcgacgaccugcugacccuggccgccgaccuggagaagcugaagagcaaggugaucagaaccgagagaccccugagcagcggcguguacaugggcaaccugagcacccagcagcuggagcagagaagagcccugcugaacaugaucggcauggugggcggcgcccagggcacccagcccggcagagacggcguggugagagugugggacgugaagaaccccgaccugcugaacaaccaguucggcaccaugcccagccugacccuggccugccugaccaagcagggccagguggaccugaacgacgccgugcuggcccugaccgaccugggccugaucuacaccgccaaguaccccaacagcagcgaccuggacagacugagccagagccaccccauccugaacaugguggacaccaagaagagcagccugaacaucagcggcuacaacuucagccugggcgccgccgugaaggccggcgccugcaugcuggacggcggcaacaugcuggagaccaucaaggugaccccccagaccauggacggcauccugaagagcauccugaaggugaagaagagccugggcauguucgugagcgacacccccggcgagagaaaccccuacgagaacauccuguacaagaucugccugagcggcgacggcuggcccuacaucgccagcagaaccagcaucgugggcagagccugggagaacaccaucguggaccuggagagcgacggcaagccccagaaggugggcaccgccggcagcaacaagagccugcagagcgccggcuuccccaccggccugaccuacagccagcugaugacccugaaggacagcaugaugcagcuggaccccagcgccaagaccuggaucgacaucgagggcagacccgaggaccccguggagaucgcccuguaccagcccaugagcggcugcuacauccacuucuucagagagcccaccgaccugaagcaguucaagcaggacgccaaguacagccacggcaucgacguggccgaccuguuccccgcccagcccggccugaccagcgccgugaucgaggcccugcccagaaacauggugcugaccugccagggcagcgacgacaucaagagacugcuggacagccagggcagaagagacaucaagcugaucgacaucgcccugagcaaggccgacagcagaagauucgagaacgccgugugggaccagugcaaggaccugugccacaugcacaccggcguggugguggagaagaagaagagaggcggcaaggaggagaucaccccccacugcgcccugauggacugcaucauguacgacgccgccgugagcggcggccugaacauccccgugcugagagccgugcugcccagagacaugguguucagaaccagcagccccaagguggugcugugaggacuagucccuguucccagagcccacuuuuuuuucuuuuuuugaaauaaaauagccugucuuucagaucucaaaggcucuuuucagagccaccaaaaaaaaaaaaaaaaaaaaaaaaaaaaaaaaaaaaaaaaaaaaaaaaaaaaaaaaaaaaaaaaaaaaaaaaaaaaaaaaaaaaaaaaaaaaaaaaaaaaa

SEQ ID NO: 17207 - RNA, 2001 nt, Artificial Sequence
  mRNA product Design a-2 (hSL-A100) comprising derived and/or modified sequence from LASV(Nig08-04;Clade II)__ADU56611__NP (opt4)
aggagaguccgcucagccagguugcagaagcggcuuagcguguguccuaaucuucucucugcguguagguaggccugugccgcaaacaagcuuaccaugagcgccagcaaggaggugaagagcuuccuguggacccagagccugagaagagagcugagcggcuacugcagcaacaucaagcugcagguggugaaggacgcccaggcccugcugcacggccuggacuucagcgaggugagcaacgugcagagacugaugagaaagcagaagagagacgacggcgaccugaagagacugagagaccugaaccaggccgugaacaaccugguggagcugaagagcacccagcagaagagcgugcugagagugggcacccugaccagcgacgaccugcugacccuggccgccgaccuggagaagcugaagagcaaggugaucagaaccgagagaccccugagcagcggcguguacaugggcaaccugagcacccagcagcuggagcagagaaaggcccugcugagcaugaucggcauggugggcggcgcccagggcacccagcccggcagagacggcguggugagagugugggacgugaagaaccccgaccugcugaacaaccaguucggcaccaugcccagccugacccuggccugccugaccaagcagggccagguggaccugaacgacgccgugcuggcccugaccgaccugggccugaucuacaccgccaaguaccccaacagcagcgaccuggacagacugagccagagccaccccauccugaacaugguggacaccaagaagagcagccugaacaucagcggcuacaacuucagccugggcgccgccgugaaggccggcgccugcaugcuggacggcggcaacaugcuggagaccaucaaggugaccccccagaccauggacggcauccugaagagcauccugaaggugaagagaagccugggcauguucgugagcgacacccccggcgagagaaaccccuacgagaacauccuguacaagaucugccugagcggcgacggcuggcccuacaucgccagcagaaccagcaucgugggcagagccugggagaacaccaccguggaccuggagagcgacggcaagccccagaaggugggcaccgccggcagcaacaagagccugcagagcgccggcuuccccaccggccugaccuacagccagcugaugacccugaaggacagcaugaugcagcuggaccccagcgccaagaccuggaucgacaucgagggcagacccgaggaccccguggagaucgcccuguaccagcccaugagcggcugcuacauccacuucuucagagagcccaccgaccugaagcaguucaagcaggacgccaaguacagccacggcaucgacgugaccgaccuguucagcgcccagcccggccugaccagcgccgugaucgaggcccugcccagaaacauggugcugaccugccagggcagcgacgacaucaagaagcugcuggacagccagggcagaagagacaucaagcugaucgacaucagccugaacaaggccgacagcagaagauucgagaacgccgugugggaccagugcaaggaccugugccacaugcacaccggcguggugguggagaagaagaagagaggcggcaaggaggagaucaccccccacugcgcccugauggacugcaucauguucgacgccgccgugagcggcggccugaacauccccauccugagagccgugcugcccagagacaugguguucagaaccagcagccccaagguggugcugugaggacuagucccuguucccagagcccacuuuuuuuucuuuuuuugaaauaaaauagccugucuuucagaucucaaaggcucuuuucagagccaccaaaaaaaaaaaaaaaaaaaaaaaaaaaaaaaaaaaaaaaaaaaaaaaaaaaaaaaaaaaaaaaaaaaaaaaaaaaaaaaaaaaaaaaaaaaaaaaaaaaaa

SEQ ID NO: 17208 - RNA, 2004 nt, Artificial Sequence
  mRNA product Design a-2 (hSL-A100) comprising derived and/or modified sequence from LASV(GA391;Clade III)__AAA46284__NP (opt4)
aggagaguccgcucagccagguugcagaagcggcuuagcguguguccuaaucuucucucugcguguagguaggccugugccgcaaacaagcuuaccaugagcgccagcaaggaggugagaagcugccuguggacccagagccugagaagagagcugagcggcuacugcagcaacaucaagcugcagguggugaaggacgcccaggcccugcugcacggccuggacuucagcgaggugagcaacgugcagagacugaugagaaagcagaagagagacgacggcgaccugaagagacugagagaccugaaccaggccgugaacaaccugguggagcugaagagcacccagcagaagagcgugcugagagugggcacccugagcagcgacgaccugcugauccuggccgccgaccuggagaagcugaagagcaaggugaccagaaccgagagaccccugagcagcggcguguacaugggcaaccugagcagccagcagcuggaccagagaagagcccugcugaacaugaucggcaugaccggcgugagcggcggcggcaagggcgccagcaacggcaucgugagagugugggacgugaagaacgccgagcugcugaacaaccaguucggcaccaugcccagccugacccuggccugccugaccaagcagggccagguggaccugaacgacgccgugcaggcccugaccgaccugggccugaucuacaccgccaaguaccccaacagcagcgaccuggacagacugagccagagccaccccauccugaacaugaucgacaccaagaagagcagccugaacaucagcggcuacaacuucagccugggcgccgccgugaaggccggcgccugcaugcuggacggcggcaacaugcuggagaccaucaaggugagcccccagaccauggacggcauccugaagagcauccugaaggugaagaagagccugggcauguucgugagcgacacccccggcgagagaaaccccuacgagaacauccuguacaagaucugccugagcggcgacggcuggagcuacaucgccagcagaaccagcaucgugggcagagccugggagaacaccgugguggaccuggagcaggacaacaagccccagaagaucggcaacggcggcagcaacaagagccugcagagcgccggcuucgccgccggccugaucuacagccagcugaugacccugaaggacuucaagugcuucaaccugauccccaacgccaagaccuggauggacaucgagggcagacccgaggaccccguggagaucgcccuguaccagcccagcagcggcugcuacgugcacuucuucagagagcccaccgaccugaagcaguucaagcaggacgccaaguacagccacggcagagacgugaccgaccuguucgccgcccagcccggccugaccagcgccgugaucgaggcccugcccagaaacauggugaucaccugccagggcagcgaggacaucagaaagcugcuggagagccagggcagaagagacaucaagcugaucgacaucacccugagcaaggccgacagcagaaaguucgagaacgccgugugggaccaguucaaggaccugugccacaugcacaccggcguggugguggagaagaagaagagaggcggcaaggaggagaucaccccccacugcgcccugauggacugcaucauguucgacgccgccgugagcggcggccuggacgccaaggugcugagaguggugcugcccagagacaugguguucagaaccagcacccccaagguggugcugugaggacuagucccuguucccagagcccacuuuuuuuucuuuuuuugaaauaaaauagccugucuuucagaucucaaaggcucuuuucagagccaccaaaaaaaaaaaaaaaaaaaaaaaaaaaaaaaaaaaaaaaaaaaaaaaaaaaaaaaaaaaaaaaaaaaaaaaaaaaaaaaaaaaaaaaaaaaaaaaaaaaaa

SEQ ID NO: 17209 - RNA, 2001 nt, Artificial Sequence
  mRNA product Design a-2 (hSL-A100) comprising derived and/or modified sequence from LASV(Nig08-A19;Clade III)__ADU56619__NP (opt4)
aggagaguccgcucagccagguugcagaagcggcuuagcguguguccuaaucuucucucugcguguagguaggccugugccgcaaacaagcuuaccaugagcgccagcaaggaggugaagagcuuccuguggacccagagccugagaagagagcugagcggcuacugcagcaacaucaagcugcagguggugaaggacgcccaggcccugcugcacggccuggacuucagcgaggugagcaacgugcagagacugaugagaaagcagaagagagacgacggcgaccugaagagacugagagaccugaaccaggccgugaacaaccugguggagcugaagagcacccagcagaagagcgugcugagagugggcacccugagcagcgacgaccugcuggugcuggccgccgaccuggagaagcugaagagcaagguggugagaaccgagagaccccugagcagcggcaucuacaugggcaaccugagcagccagcagcuggaccagagaaaggcccugcugaacaugaucggcaugaccggcggcaacggcggcagaaacaccaccagcgacggcaucgugagagugugggacgugaagaacgccgagcugcugaacaaccaguucggcaccaugcccagccugacccuggccugccugaccaagcagggccagguggaccugaacgacgccgugcaggcccugaccgaccugggccugaucuacaccgccaaguaccccaacagcagcgaccuggacagacuggcccagagccaccccauccugaacaugaucgacaccaagaagagcagccugaacaucagcggcuacaacuucagccugggcgccgccgugaaggccggcgccugcaugcuggacggcggcaacaugcuggagaccaucaaggugagcccccagaccauggacggcauccugaagagcauccugaaggugaagagaagccugggcauguucaucagcgacacccccggcgagagaaaccccuacgagaacauccuguacaagaucugccugagcggcgacggcuggcccuacaucgccagcagaaccagcaucgugggcagagccugggagaacaccgugguggaccuggagagcgacaacaagccccagaagaccggcaacggcggcagcaacaagagccugcagagcgccggcuucgccgccggccugaccuacagccagcugaugacccugaaggacagcaugcugcagcuggaccccaacgccaagaccuggauggacaucgagggcagacccgaggaccccguggagaucgcccuguaccagcccagcagcggcugcuacauccacuucuucagagagcccaccgaccugaagcaguucaagcaggacgccaaguacagccacggcaucgacgugaccgaccuguucgccgcccagcccggccugaccagcgccgugaucgaggcccugcccagaaacauggugaucaccugccagggcagcgaggacaucagaaagcugcuggagagccagggcagaagagacaucaagcugaucgacaucagccugagcaagguggacagcagaaaguucgagaacgccgugugggaccaguucaaggaccugugccacaugcacaccggcaucgugguggagaagaagaagagaggcggcaaggaggagaucaccccccacugcgcccugauggacugcaucauguucgacgccgccgugagcggcggcguggacgccaaggugcugagagccgugcugcccagagacaugguguucagaaccagcacccccaagguggugcugugaggacuagucccuguucccagagcccacuuuuuuuucuuuuuuugaaauaaaauagccugucuuucagaucucaaaggcucuuuucagagccaccaaaaaaaaaaaaaaaaaaaaaaaaaaaaaaaaaaaaaaaaaaaaaaaaaaaaaaaaaaaaaaaaaaaaaaaaaaaaaaaaaaaaaaaaaaaaaaaaaaaaa

SEQ ID NO: 17210 - RNA, 2001 nt, Artificial Sequence
  mRNA product Design a-2 (hSL-A100) comprising derived and/or modified sequence from LASV(G1180-SLE-2010;Clade IV)__AIT17169__NP (opt4)
aggagaguccgcucagccagguugcagaagcggcuuagcguguguccuaaucuucucucugcguguagguaggccugugccgcaaacaagcuuaccaugagcgccagcaaggagaucaagagcuuccuguggacccagagccugagaagagagcugagcggcuacugcagcaacaucaagcugcagguggugaaggacgcccaggcccugcugcacggccuggacuucagcgaggugagcaacgugcagagacugaugagaaaggagagaagagacgacaacgaccugaagagacugagagaccugaaccaggccgugaacaaccugguggagcugaagagcacccagcagaagagcauccugagagugggcacccugaccagcgacgaccugcugauccuggccgccgaccuggagaagcugaagagcaaggugaucagaaccgagagaccccugagcgccggcguguacaugggcaaccugagcagccagcagcuggaccagagaagagcccugcugagcaugaucggcaugagcagcggcaaccagagagcccaggccggcagagacggcguggugagagugugggacgugaagaacguggagcugcugaacaaccaguucggcaccaugcccagccugacccuggccugccugaccaagcagggccagguggaccugaacgacgccgugcaggcccugaccgaccugggccugaucuacaccgccaaguaccccaacaccagcgaccuggacagacugacccagagccaccccauccugaacaugaucgacaccaagaagagcagccugaacaucagcggcuacaacuucagccugggcgccgccgugaaggccggcgccugcaugcuggacggcggcaacaugcuggagaccaucaaggugagcccccagaccauggacggcauccugaagagcauccugaaggugaagaaggcccugggcauguucaucagcgacacccccggcgagagaaaccccuacgagaacauccuguacaagaucugccugagcggcgacggcuggcccuacaucgccagcagaaccagcaucaccggcagagccugggagaacaccgugguggaccuggagagcgacggcaagccccagaaggccggcagcaacaacagcaacaagagccugcagagcgugggcuucaccgccggccugaccuacagccagcugaugacccugaaggacgccaugcugcagcuggaccccaacgccaagaccuggauggacaucgagggcagacccgaggaccccguggagaucgcccuguaccagcccagcagcggcugcuacauccacuucuucagagagcccaccgaccugaagcaguucaagcaggacgccaaguacagccacggcaucgacgugaccgaccuguucgccgcccagcccggccugaccagcgccgugaucgacgcccugcccagaaacauggugaucaccugccagggcagcgacgacaucagaaagcugcuggagagccagggcagaaaggacaucaagcugaucgacaucgcccugagcaagaccgacagcagaaaguacgagaacgccgugugggaccaguacaaggaccugugccacaugcacaccggcguggugguggagaagaagaagagaggcggcaaggaggagaucaccccccacugcgcccugauggacugcaucauguucgacgccgccgugagcggcggccugaacaccagcgugcugagagccgugcugcccagagacaugguguucagaaccagcacccccagaguggugcugugaggacuagucccuguucccagagcccacuuuuuuuucuuuuuuugaaauaaaauagccugucuuucagaucucaaaggcucuuuucagagccaccaaaaaaaaaaaaaaaaaaaaaaaaaaaaaaaaaaaaaaaaaaaaaaaaaaaaaaaaaaaaaaaaaaaaaaaaaaaaaaaaaaaaaaaaaaaaaaaaaaaaa

SEQ ID NO: 17211 - RNA, 2001 nt, Artificial Sequence
  mRNA product Design a-2 (hSL-A100) comprising derived and/or modified sequence from LASV(G1442-SLE-2011;Clade IV)__AIT17181__NP (opt4)
aggagaguccgcucagccagguugcagaagcggcuuagcguguguccuaaucuucucucugcguguagguaggccugugccgcaaacaagcuuaccaugagcgccagcaaggaggugaagagcuuccuguggacccagagccugagaagagagcugagcggcuacugcagcaacaucaagcugcagguggugaaggacgcccaggcccugcugcacggccuggacuucagcgaggugagcaacgugcagagacugaugagaaagcagagaagagacgacaacgaccugaagagacugagagaccugaaccaggccgugaacaaccugguggagcugaagagcacccagcagaagagcgugcugagagugggcacccugaccagcgacgaccugcuggugcuggccgccgaccuggagaagcugaagagcaaggugaucagaaccgagagaccccugagcgccggcguguacaugggcaaccugagcagccagcagcuggaccagagaagagcccugcugaacaugaucggcaugagcggcggcauccagggcaccagaaccggcagagacggcguggugagagugugggacgugaagaacgccgaccugcugaacaaccaguucggcaccaugcccagccugacccuggccugccugaccaagcagggccagguggaccugaacgacguggugcaggcccugaccgaccugggccugaucuacaccgccaaguaccccaacgccagcgaccuggacagacugacccagagccaccccauccugaacaugaucgacaccaagaagagcagccugaacaucagcggcuacaacuucagccugggcgccgccgugaaggccggcgccugcaugcuggacggcggcaacaugcuggagaccaucaaggugagcccccagaccauggacggcauccugaagagcauccugaaggugaagaagacccugggcauguucaucagcgacacccccggcgagagaaaccccuacgagaacauccuguacaagaucugccugagcggcgacggcuggcccuacaucgccagcagaaccagcaucaccggcagagccugggagaacaccgugguggaccuggagagcgacggcaagccccagaaggccggcagcaacaacagcaacaagagccugcagagcgccggcuucgccgccggccugaccuacagccagcugaugacccugaaggacgccaugcugcagcuggaccccaacgccaagaccuggauggacaucgagggcagacccgaggaccccguggagaucgcccuguaccagcccagcagcggcugcuacauccacuucuucagagagcccaccgaccugaagcaguucaagcaggacgccaaguacagccacggcaucgacgugaccgaccuguucgccgcccagcccggccugaccagcgccgugaucgaggcccugcccagaaacauggugaucaccugccagggcagcgacgacaucaagaagcugcuggagagccagggcagaaaggacaucaagcugaucgacaucgcccugagcaagaccgacagcagaaaguacgagaacgccgugugggaccaguacaaggaccugugccacaugcacaccggcguggugguggagaagaagaagagaggcggcaaggaggagaucaccccccacugcgcccugauggacugcaucauguucgacgccgccgugagcggcggccugaacacccuggugcugagagccgugcugcccagagacaugguguucagaaccagcacccccagaguggugcugugaggacuagucccuguucccagagcccacuuuuuuuucuuuuuuugaaauaaaauagccugucuuucagaucucaaaggcucuuuucagagccaccaaaaaaaaaaaaaaaaaaaaaaaaaaaaaaaaaaaaaaaaaaaaaaaaaaaaaaaaaaaaaaaaaaaaaaaaaaaaaaaaaaaaaaaaaaaaaaaaaaaaa

SEQ ID NO: 17212 - RNA, 2001 nt, Artificial Sequence
  mRNA product Design a-2 (hSL-A100) comprising derived and/or modified sequence from LASV(G3010-SLE-2013;Clade IV)__AIT17345__NP (opt4)
aggagaguccgcucagccagguugcagaagcggcuuagcguguguccuaaucuucucucugcguguagguaggccugugccgcaaacaagcuuaccaugagcgccagcaaggagaucaagagcuuccuguggacccagagccugagaagagagcugagcggcuacugcagcaacaucaagcugcagguggugaaggacgcccaggcccugcugcacggccuggacuucagcgaggugagcaacgugcagagacugaugagaaaggagagaagagacgacaacgaccugaagagacugagagaccugaaccaggccgugaacaaccugguggagcugaagagcacccagcagaagagcauccugagagugggcacccugaccagcgacgaccugcugauccuggccgccgaccuggagaagcugaagagcaaggugaccagaaccgagagaccccugagcgccggcguguacaugggcaaccugagcagccagcagcuggaccagagaagagcccugcugagcaugaucggcaugagcagcggcgugcagggcgccagagccggcagagacggcguggugagagugugggacgugaagaacgccgagcugcugaacaaccaguucggcaccaugcccagccugacccuggccugccugaccaagcagggccagguggaccugaacgacguggugcaggcccugaccgaccugggccugaucuacaccgccaaguaccccaacaccagcgaccuggacagacugacccagagccaccccauccugaacaugaucgacaccaagaagagcagccugaacaucagcggcuacaacuucagccugggcgccgccgugaaggccggcgccugcaugcuggacggcggcaacaugcuggagaccaucaaggugagcccccagaccauggacggcauccugaagagcauccugaaggugaagaaggcccugggcauguucaucagcgagacccccggcgagagaaaccccuacgagaacauccuguacaagaucugccugagcggcgacggcuggcccuacaucgccagcagaaccagcaucaccggcagagccugggagaacaccgugguggaccuggagagcgacggcaagccccagaaggccggcagcaacaacagcaacaagagccugcagagcgccggcuucaccgccggccugaccuacagccagcugaugacccugaaggacgccaugcugcagcuggaccccaacgccaagaccuggauggacaucgagggcagacccgaggaccccguggagguggcccuguaccagcccagcagcggcugcuacauccacuucuucagagagcccaccgaccugaagcaguucaagcaggacgccaaguacagccacggcaucgacgugaccgaccuguucgccgcccagcccggccugaccagcgccgugaucgacgcccugcccagaaacauggugaucaccugccagggcagcgacgacaucaagaagcugcuggagagccagggcagaaaggacaucaagcugaucgacaucgcccugagcaagaccgacagcagaaaguacgagaacgccgugugggaccaguacaaggaccugugccacaugcacaccggcguggugguggagaagaagaagagaggcggcaaggaggagaucaccccccacugcgcccugauggacugcaucauguucgacgccgccgugagcggcggccugaacaccagcgugcugagagccgugcugcccagagacaugguguucagaaccagcacccccagaguggugcugugaggacuagucccuguucccagagcccacuuuuuuuucuuuuuuugaaauaaaauagccugucuuucagaucucaaaggcucuuuucagagccaccaaaaaaaaaaaaaaaaaaaaaaaaaaaaaaaaaaaaaaaaaaaaaaaaaaaaaaaaaaaaaaaaaaaaaaaaaaaaaaaaaaaaaaaaaaaaaaaaaaaaa

SEQ ID NO: 17213 - RNA, 2001 nt, Artificial Sequence
  mRNA product Design a-2 (hSL-A100) comprising derived and/or modified sequence from LASV(G502-SLE-2009;Clade IV)__AIT17127__NP (opt4)
aggagaguccgcucagccagguugcagaagcggcuuagcguguguccuaaucuucucucugcguguagguaggccugugccgcaaacaagcuuaccaugagcgccagcaaggagaucaagagcuuccuguggacccagagccugagaagagagcugagcggcuacugcagcaacaucaagcugcagguggugaaggacgcccaggcccugcugcacggccuggacuucagcgaggugagcaacgugcagagacugaugagaaaggagagaagagacgacaacgaccugaagagacugagagaccugaaccaggccgugaacaaccugguggagcugaagagcacccagcagaagagcauccugagagugggcacccugaccagcgacgaccugcugauccuggccgccgaccuggagaagcugaagagcaaggugaucagaaccgagagaccccugagcgccggcguguacaugggcaaccugagcagccagcagcuggaccagagaagagcccugcugagcaugaucggcaugagcggcggcaaccagggcgugagagccggcaaggacggcguggugagagugugggacgugaagaacgccgagcugcugaacaaccaguucggcaccaugcccagccugacccuggccugccugaccaagcagggccagguggaccugaacgacgccgugcaggcccugaccgaccugggccugaucuacaccgccaaguaccccaacaccagcgaccuggacagacugacccagagccaccccauccugaacaugaucgacaccaagaagagcagccugaacaucagcggcuacaacuucagccugggcgccgccgugaaggccggcgccugcaugcuggacggcggcaacaugcuggagaccaucaaggugagcccccagaccauggacggcauccugaagagcauccugaaggugaagaaggcccugggcauguucaucagcgacacccccggcgagagaaaccccuacgagaacauccuguacaagaucugccugagcggcgacggcuggcccuacaucgccagcagaaccagcaucaccggcagagccugggagaacaccgugguggaccuggagagcgacggcaagccccagaaggccggcagcaacaacagcaacaagagccugcagagcgccggcuucaccgccggccugaccuacagccagcugaugacccugaaggacgccaugcugcagcuggaccccaacaccaagaccuggauggacaucgagggcagacccgaggaccccguggagaucgcccuguaccagcccagcagcggcugcuacauccacuucuucagagagcccaccgaccugaagcaguucaagcaggacgccaaguacagccacggcaucgacgugaccgaccuguucgccgcccagcccggccugaccagcgccgugaucgacgcccugcccagaaacauggugaucaccugccagggcagcgacgacaucagaaagcugcuggagagccagggcagaaaggacaucaagcugaucgacaucgcccugaacaagaccgacagcagaaaguacgagaacgccgugugggaccaguacaaggaccugugccacaugcacaccggcguggugguggagaagaagaagagaggcggcaaggaggagaucaccccccacugcgcccugauggacugcaucauguucgacgccgccgugagcggcggccugaacaccagcgugcugagagccgugcugcccagagacaugguguucagaaccagcacccccagaguggugcugugaggacuagucccuguucccagagcccacuuuuuuuucuuuuuuugaaauaaaauagccugucuuucagaucucaaaggcucuuuucagagccaccaaaaaaaaaaaaaaaaaaaaaaaaaaaaaaaaaaaaaaaaaaaaaaaaaaaaaaaaaaaaaaaaaaaaaaaaaaaaaaaaaaaaaaaaaaaaaaaaaaaaa

SEQ ID NO: 17214 - RNA, 2001 nt, Artificial Sequence
  mRNA product Design a-2 (hSL-A100) comprising derived and/or modified sequence from LASV(G733-SLE-2010;Clade IV)__AIT17155__NP (opt4)
aggagaguccgcucagccagguugcagaagcggcuuagcguguguccuaaucuucucucugcguguagguaggccugugccgcaaacaagcuuaccaugagcgccagcaaggagaucaagagcuuccuguggacccagagccugagaagagagcugagcggcuacugcagcaacaucaagcugcagguggugaaggacgcccaggcccugcugcacggccuggacuucagcgaggugagcaacgugcagagacugaugagaaaggagagaagagacgacaacgaccugaagagacugagagaccugaaccaggccgugaacaaccugguggagcugaagagcacccagcagaagagcgugcugagagugggcacccugaccagcgacgagcugcuggugcuggccgccgaccuggagaagcugaagagcaaggugaucagaaccgagagaccccugagcgccggcguguacaugggcaaccugagcagccagcagcuggaccagagaagagcccugcugagcaugaucggcaugagcggcggcaaccagggcgccagaaccggcagagacggcguggugagagugugggacgugaagaacgccgagcugcugaacaaccaguucggcaccaugcccagccugacccuggccugccugaccaagcagggccagguggaccugaacgacgccgugcaggcccugaccgaccugggccugaucuacaccgccaaguaccccaacaccagcgaccuggacagacugacccagagccaccccauccugaacaugaucgacaccaagaagagcagccugaacaucagcggcuacaacuucagccugggcgccgccgugaaggccggcgccugcaugcuggacggcggcaacaugcuggagaccaucaaggugagcccccagaccauggacggcauccugaagagcauccugaaggugaagaaggcccugggcauguucaucagcgacacccccggcgagagaaaccccuacgagaacauccuguacaagaucugccugagcggcgacggcuggcccuacaucgccagcagaaccagcaucaccggcagagccugggagaacaccgugguggaccuggagagcgacggcaagccccagaaggccggcagcaacaacagcaacaagagccugcagagcgccggcuucaccgccggccugaccuacagccagcugaugacccugaaggacgccaugcugcagcuggaccccaacgccaagaccuggauggacaucgagggcagacccgaggaccccguggagaucgcccuguaccagcccagcagcggcugcuacauccacuucuucagagagcccaccgaccugaagcaguucaagcaggacgccaaguacagccacggcaucgacgugaccgaccuguucgccgcccagcccggccugaccagcgccgugaucgacgcccugcccagaaacauggugaucaccugccagggcagcgacgacaucagaaagcugcuggagagccagggcagaaaggacaucaagcugaucgacaucgcccugagcaagaucgacagcagaaaguacgagaacgccgugugggaccaguacaaggaccugugccacaugcacaccggcguggugguggagaagaagaagagaggcggcaaggaggagaucaccccccacugcgcccugauggacugcaucauguucgacgccgccgugagcggcggccugaacagccuggugcugagagccgugcugcccagagacaugguguucagaaccagcacccccagaguggugcugugaggacuagucccuguucccagagcccacuuuuuuuucuuuuuuugaaauaaaauagccugucuuucagaucucaaaggcucuuuucagagccaccaaaaaaaaaaaaaaaaaaaaaaaaaaaaaaaaaaaaaaaaaaaaaaaaaaaaaaaaaaaaaaaaaaaaaaaaaaaaaaaaaaaaaaaaaaaaaaaaaaaaa

SEQ ID NO: 17215 - RNA, 2001 nt, Artificial Sequence
  mRNA product Design a-2 (hSL-A100) comprising derived and/or modified sequence from MOPV/LASV reassortant(IGS-1;Clade IV)__AFY05578__NP (opt4)
aggagaguccgcucagccagguugcagaagcggcuuagcguguguccuaaucuucucucugcguguagguaggccugugccgcaaacaagcuuaccaugagcgccagcaaggagaucaagagcuuccuguggacccagagccugagaagagagcugagcggcuacugcagcaacaucaagcugcagguggugaaggacgcccaggcccugcugcacggccuggacuucagcgaggugagcaacgugcagagacugaugagaaaggagagaagagacgacaacgaccugaagagacugagagaccugaaccaggccgugaacaaccugguggagcugaagagcacccagcagaagagcauccugagagugggcacccugaccagcgacgaccugcugauccuggccgccgaccuggagaagcugagaagcaaggugaucagaaccgagagaccccugagcgccggcguguacaugggcaaccugagcagccagcagcuggaccagagaagagcccugcugaacaugaucggcaugagcggcggcaaccagggcgccagagccggcagagacggcguggugagagugugggacgugaagaacgccgagcugcugagcaaccaguucggcaccaugcccagccugacccuggccugccugaccaagcagggccagguggaccugaacgacgccgugcaggcccugaccgaccugggccugaucuacaccgccaaguaccccaacaccagcgaccuggacagacugacccagagccaccccauccugaacaugaucgacaccaagaagagcagccugaacaucagcggcuacaacuucagccugggcgccgccgugaaggccggcgccugcaugcuggacggcggcaacaugcuggagaccaucaaggugagcccccagaccauggacggcauccugaagagcauccugaaggugaagaaggcccugggcauguucaucagcgacacccccggcgagagaaaccccuacgagaacauccuguacaagaucugccugagcggcgacggcuggcccuacaucgccagcagaaccagcaucaccggcagagccugggagaacaccgugguggaccuggagagcgacggcaagccccagaaggccgacagcaacaacagcagcaagagccugcagagcgccggcuucaccgccggccugaccuacagccagcugaugacccugaaggacgccaugcugcagcuggaccccaacgccaagaccuggauggacaucgagggcagacccgaggaccccguggagaucgcccuguaccagcccagcagcggcugcuacauccacuucuucagagagcccaccgaccugaagcaguucaagcaggacgccaaguacagccacggcaucgacgugaccgaccuguucgccacccagcccggccugaccagcgccgugaucgacgcccugcccagaaacauggugaucaccugccagggcagcgacgacaucagaaagcugcuggagagccagggcagaaaggacaucaagcugaucgacaucgaccugagcaagaccgacagcagaaaguacgagaacgccgugugggaccaguacaaggaccugugccacaugcacaccggcguggugguggagaagaagaagagaggcggcaaggaggagaucaccccccacugcgcccugauggacugcaucauguucgacgccgccgugagcggcggccugaacaccagcgugcugagagccgugcugcccagagacaugguguucagaaccagcacccccagaguggugcugugaggacuagucccuguucccagagcccacuuuuuuuucuuuuuuugaaauaaaauagccugucuuucagaucucaaaggcucuuuucagagccaccaaaaaaaaaaaaaaaaaaaaaaaaaaaaaaaaaaaaaaaaaaaaaaaaaaaaaaaaaaaaaaaaaaaaaaaaaaaaaaaaaaaaaaaaaaaaaaaaaaaaa

SEQ ID NO: 17216 - RNA, 2001 nt, Artificial Sequence
  mRNA product Design a-2 (hSL-A100) comprising derived and/or modified sequence from LASV(LM765-SLE-2012;Clade IV)__AIT17815__NP (opt4)
aggagaguccgcucagccagguugcagaagcggcuuagcguguguccuaaucuucucucugcguguagguaggccugugccgcaaacaagcuuaccaugagcgccagcaaggagaucaagagcuuccuguggacccagagccugagaagagagcugagcggcuacugcagcaacaucaagcugcagguggugaaggacgcccaggcccugcugcacggccuggacuucagcgaggugagcaacgugcagagacugaugagaaaggagagaagagacgacaacgaccugaagagacugagagaccugaaccaggccgugaacaaccugguggagcugaagagcacccagcagaagagcauccugagagugggcacccugaccagcgacgaccugcugauccuggccgccgaccuggagaagcugaagagcaaggugaccagaaccgagagaccccugagcgccggcguguacaugggcaaccugagcagccagcagcuggaccagagaagagcccugcuggacaugaucggcaugagcggcagcaaccagggcgccagagccggcagagacggcguggugagagugugggacgugaagaacgccgagcugcugaacaaccaguucggcaccaugcccagccugacccuggccugccugaccaagcagggccagguggaccugaacgacgccgugcaggcccugaccgaccugggccugaucuacaccgccaaguaccccaacaccagcgaccuggacagacugacccagagccaccccauccugaacaugaucgacaccaagaagagcagccugaacaucagcggcuacaacuucagccugggcgccgccgugaaggccggcgccugcaugcuggacggcggcaacaugcuggagaccaucaaggugagcccccagaccauggacggcauccugaagagcauccugaaggugaagaaggcccugggcauguucaucagcgacgcccccggcgagagaaaccccuacgagaacauccuguacaagaucugccugagcggcgacggcuggcccuacaucgccagcagaaccagcaucaccggcagagccugggagaacaccgugguggaccuggagagcgacggcaagccccagaaggccggcagcaacggcagcaacaagagccugcagagcgccggcuucaccgccggccugaccuacagccagcugaugacccugaaggacgccaugcugcagcuggaccccaacgccaagaccuggauggacaucgagggcagacccgaggaccccguggagaucgcccuguaccagcccagcagcggcugcuacauccacuucuucagagagcccaccgaccugaagcaguucaagcaggacgccaaguacagccacggcaucgacgugaccgaccuguucgccgcccagcccggccugaccagcgccgugaucgacgcccugcccagaaacauggugaucaccugccagggcagcgacgacaucagaaagcuguucgagagccagggcagaaaggacaucaagcugaucgacaucgcccugagcaagaccgacagcagaaaguacgagaacgccgugugggaccaguacaaggaccugugccacaugcacaccggcaucgugguggagaagaagaagagaggcggcaaggaggagaucaccccccacugcgcccugauggacugcaucauguucgacgccgccgugagcggcggccugaacaccagcgugcugagagccgugcugcccagagacaugguguucagaaccagcacccccagaguggugcugugaggacuagucccuguucccagagcccacuuuuuuuucuuuuuuugaaauaaaauagccugucuuucagaucucaaaggcucuuuucagagccaccaaaaaaaaaaaaaaaaaaaaaaaaaaaaaaaaaaaaaaaaaaaaaaaaaaaaaaaaaaaaaaaaaaaaaaaaaaaaaaaaaaaaaaaaaaaaaaaaaaaaa

SEQ ID NO: 17217 - RNA, 2001 nt, Artificial Sequence
  mRNA product Design a-2 (hSL-A100) comprising derived and/or modified sequence from LASV(LM776-SLE-2012;Clade IV)__AIT17825__NP (opt4)
aggagaguccgcucagccagguugcagaagcggcuuagcguguguccuaaucuucucucugcguguagguaggccugugccgcaaacaagcuuaccaugagcgccagcaaggagaucaagagcuuccuguggacccagagccugagaagagagcugagcagcuacugcagcaacaucaagcugcagguggugaaggacgcccaggcccugcugcacggccuggacuucagcgaggugagcaacgugcagagacugaugagaaaggagagaagagacgacaacgaccugaagagacugagagaccugaaccaggccgugaacaaccugguggagcugaagagcacccagcagaagagcauccugagagugggcacccugaccagcgacgaccugcugauccuggccgccgaccuggagaagcugaagagcaaggugaccagaaccgagagaccccugagcgccggcguguacaugggcaaccugagcagccagcagcuggaccagagaagagcccugcugagcaugaucggcaugagcggcagcaaccagggcgccagagccggcagagacggcguggugagagugugggacgugaagaacgccgagcugcugaacaaccaguucggcaccaugcccagccugacccuggccugccugaccaagcagggccagguggaccugaacgacgccgugcaggcccugaccgaccugggccugaucuacaccgccaaguaccccaacaccagcgaccuggacagacugacccagagccaccccauccugaacaugaucgacaccaagaagagcagccugaacaucagcggcuacaacuucagccugggcgccgccgugaaggccggcgccugcaugcuggacggcggcaacaugcuggagaccaucaaggugagcccccagaccauggacggcauccugaagagcauccugaaggugaagaaggcccugggcauguucaucagcgacacccccggcgagagaaaccccuacgagaacauccuguacaagaucugccugagcggcgacggcuggcccuacaucgccagcagaaccagcaucaccggcagagccugggagaacaccgugguggaccuggagagcgacggcaagccccagaaggccggcagcaacaacagcaacaagagccugcagagcgccggcuucaccgccggccugaccuacagccagcugaugacccugaaggacgccaugcugcagcuggaccccaacgccaagaccuggauggacaucgagggcagacccgaggaccccguggagguggcccuguaccagcccagcagcggcugcuacauccacuucuucagagagcccaccgaccugaagcaguucaagcaggacgccaaguacagccacggcaucgacgugaccgaccuguucgccgcccagcccggccugaccagcgccgugaucgacgcccugcccagaaacauggugaucaccugccagggcagcgacgacaucagaaagcugcuggagagccagggcagaaaggacaucaagcugaucgacaucgcccugagcaagaccgacagcagaaaguacgagaacgccgugugggaccaguacaaggaccugugccacaugcacaccggcguggugguggagaagaagaagagaggcggcaaggaggagaucaccccccacugcgcccugauggacugcaucauguucgacgccgccgugagcggcggccugaacaccagcgugcugagagccgugcugcccagagacaugguguucagaaccagcacccccagaguggugcugugaggacuagucccuguucccagagcccacuuuuuuuucuuuuuuugaaauaaaauagccugucuuucagaucucaaaggcucuuuucagagccaccaaaaaaaaaaaaaaaaaaaaaaaaaaaaaaaaaaaaaaaaaaaaaaaaaaaaaaaaaaaaaaaaaaaaaaaaaaaaaaaaaaaaaaaaaaaaaaaaaaaaa

SEQ ID NO: 17218 - RNA, 2001 nt, Artificial Sequence
  mRNA product Design a-2 (hSL-A100) comprising derived and/or modified sequence from LASV(Mad39;Clade IV)__ANH09723__NP (opt4)
aggagaguccgcucagccagguugcagaagcggcuuagcguguguccuaaucuucucucugcguguagguaggccugugccgcaaacaagcuuaccaugagcgccagcaaggagaucaagagcuuccuguggacccagagccugagaagagagcugagcggcuacugcagcaacaucaagcugcagguggugaaggacgcccaggcccugcugcacggccuggacuucagcgaggugagcaacgugcagagacugaugagaaagcagagaagagacgacaacgaccugaagagacugagagaccugaaccaggccgugaacaaccugguggagcugaagagcacccagcagaagagcgugcugagagugggcacccugaccagcgacgaccugcugacccuggccgccgaccuggagaagcugaagagcaaggugaccagaaccgagagaccccugaccgccggcguguacaugggcaaccugagcagccagcagcuggaccagagaagagcccugcugaacaugaucggcaugagcggcggcaaccagggcgccagaaccggcagagacggcguggugagagugugggacgugaagaacgccgagcugcugaacaaccaguucggcaccaugcccagccugacccuggccugccugaccaagcagggccagguggaccugaacgacguggugcaggcccugaccgaccugggccugaucuacaccgccaaguaccccaacaccagcgaccuggacagacugacccagagccaccccauccugaacaugaucgacaccaacaagagcagccugaacaucagcggcuacaacuucagccugggcgccgccgugaaggccggcgccugcaugcuggacggcggcaacaugcuggagaccaucaaggugagcccccagaccauggacggcauccugaagagcauccugaaggugaagaagagccugggcauguucaucagcgacacccccggcgagagaaaccccuacgagaacauccuguacaagaucugccugagcggcgacggcuggcccuacaucgccagcagaaccagcaucaccggcagagccugggagaacaccgugguggaccuggagagcggcggcaagccccagaaggccggcagcaacaacagcaacaagagccugcagagcgccggcuucgccgccggccugaccuacagccagcugaugacccugaaggacgccaugcugcagcuggaccccaacgccaagaccuggauggacaucgagggcagacccgaggaccccguggagaucgcccuguaccagcccaucagcggcugcuacauccacuucuucagagagcccaccgaccugaagcaguucaagcaggacgccaaguacagccacggcaucgacgugaccgaccuguucgccgcccagcccggccugaccagcgccgugaucgaggcccugcccagaaacauggugaucaccugccagggcagcgacgacaucagaaagcuguucgagagccagggcagaaaggacaucaagcugaucgacaucgcccugagcaagaccgacagcagaaaguacgagaacgccgugugggaccaguacaaggaccugugccacaugcacaccggcguggugguggagaagaagaagaagggcggcaaggaggagaucaccccccacugcgcccugauggacugcaucauguucgacgccgccgugagcggcggccugaacacccuggugcugagagccgugcugcccagagacaugguguucagaaccagcacccccaagguggugcugugaggacuagucccuguucccagagcccacuuuuuuuucuuuuuuugaaauaaaauagccugucuuucagaucucaaaggcucuuuucagagccaccaaaaaaaaaaaaaaaaaaaaaaaaaaaaaaaaaaaaaaaaaaaaaaaaaaaaaaaaaaaaaaaaaaaaaaaaaaaaaaaaaaaaaaaaaaaaaaaaaaaaa

SEQ ID NO: 17219 - RNA, 2001 nt, Artificial Sequence
  mRNA product Design a-2 (hSL-A100) comprising derived and/or modified sequence from LASV(Z0947-SLE-2011;Clade IV)__AIT17841__NP (opt4)
aggagaguccgcucagccagguugcagaagcggcuuagcguguguccuaaucuucucucugcguguagguaggccugugccgcaaacaagcuuaccaugagcgccagcaaggagaucaagagcuuccuguggacccagagccugagaagagagcugagcggcuacugcagcaacaucaagcugcagguggugaaggacgcccaggcccugcugcacggccuggacuucagcgaggugagcaacgugcagagacugaugagaaaggagagaagagacgacaacgaccugaagagacugagagaccugaaccaggccgugaacaaccugguggagcugaagagcacccagcagaagagcauccugagagugggcacccugaccagcgacgaccugcugauccuggccgccgaccuggagaagcugaagagcaaggugaccagaaccgagagaccccugagcgccggcguguacaugggcaaccugagcagccagcagcuggaccagagaagagcccugcugaacaugaucggcaugagcggcagcaaccagggcgccagaaccggcagagacggcguggugagagugugggacgugaagaacgccgagcugcugaacaaccaguucggcaccaugcccagccugacccuggccugccugaccaagcagggccagguggaccugaacgacgccgugcaggcccugaccgaccugggccugaucuacaccgccaaguaccccaacaccagcgaccuggacagacugacccagagccaccccauccugaacaugaucgacaccaagaagagcagccugaacaucagcggcuacaacuucagccugggcgccgccgugaaggccggcgccugcaugcuggacggcggcaacaugcuggagaccaucaaggugagcccccagaccauggacggcauccugaagagcauccugaaggugaagaaggcccugggcauguucaucagcgacgcccccggcgagagaaaccccuacgagaacauccuguacaagaucugccugagcggcgacggcuggcccuacaucgccagcagaaccagcaucaccggcagagccugggagaacaccgugguggaccuggagagcgacggcaagccccagaaggccggcagcaacggcagcaacaagagccugcagagcgccggcuucaccgccggccugaccuacagccagcugaugacccugaaggacgccaugcugcagcuggaccccaacgccaagaccuggauggacaucgagggcagacccgaggaccccguggagaucgcccuguaccagcccagcagcggcugcuacauccacuucuucagagagcccaccgaccugaagcaguucaagcaggacgccaaguacagccacggcaucgacgugaccgaccuguucgccgcccagcccggccugaccagcgccgugaucgacgcccugcccagaaacauggugaucaccugccagggcagcgacgacaucagaaagcuguucgagagccagggcagaaaggacaucaagcugaucgacaucgcccugagcaagaccgacagcagaaaguacgagaacgccgugugggaccaguacaaggaccugugccacaugcacaccggcaucgugguggagaagaagaagagaggcggcaaggaggagaucaccccccacugcgcccugauggacugcaucauguucgacgccgccgugagcggcggccugaacaccagcgugcugagagccgugcugcccagagacaugguguucagaaccagcacccccagaguggugcugugaggacuagucccuguucccagagcccacuuuuuuuucuuuuuuugaaauaaaauagccugucuuucagaucucaaaggcucuuuucagagccaccaaaaaaaaaaaaaaaaaaaaaaaaaaaaaaaaaaaaaaaaaaaaaaaaaaaaaaaaaaaaaaaaaaaaaaaaaaaaaaaaaaaaaaaaaaaaaaaaaaaaa

SEQ ID NO: 17220 - RNA, 2001 nt, Artificial Sequence
  mRNA product Design a-2 (hSL-A100) comprising derived and/or modified sequence from LASV(Josiah;Clade IV)__NP_694869__NP (opt5)
aggagaguccgcucagccagguugcagaagcggcuuagcguguguccuaaucuucucucugcguguagguaggccugugccgcaaacaagcuuaccaugagcgccuccaaggagaucaaaucuuuccuguggacccagagccucagacgggaacuguccggcuacugcucuaacauuaagcugcaaguggucaaagacgcucaggcccugcuccacgggcuggauuuuagcgagguuuccaaugugcagcgccuuaugagaaaggaacggcgcgacgauaacgaccugaaaagacuccgggaucugaaucaggcggugaacaaucuggucgagcucaagucuacacaacaaaagagcauccugcgcgugggaacgcuuaccuccgacgaucugcucauucuggcugccgaccuugaaaaacuuaagagcaaaguuaucagaacagagcggccccucucugccggcguguauauggggaaccuguccagccagcagcuggaucagcgcagagcucuccugaauaugauuggaaugucuggcgggaaccagggagcccgggcuggccgcgacggcgucgugagaguuugggaugugaagaaugccgagcuucugaacaaucaguucgggaccaugccuucccucacacuggcgugucuuaccaaacagggacaagucgaccugaacgaugccgugcaggcucucacagaccugggccugaucuacaccgccaaguauccgaauacgagcgaccucgaucggcugacccagucucaucccauccuuaacaugauugacacaaagaaauccagccugaauaucuccggguacaacuuuucucucggagcugccgugaaggcgggcgccugcaugcuggaugggggaaacaugcuugaaaccauuaaagucagcccucaaacaauggacggcauccugaaguccauucucaaaguuaagaaagcucugggcauguucaucagcgauacccccggggagcgcaauccuuaugaaaacauucuguacaagaucugucucucuggagacggcuggcccuauaucgccuccagaacgagcauuacagggcgggcuugggagaauaccgugguggaucuggagucugacggaaagccucagaaagccgauagcaacaauuccucuaagagccuucaguccgccggcuuuacagcugggcugaccuacagccagcucaugacccugaaagacgcgaugcugcaacuugauccgaacgccaagacauggauggacaucgaaggaagacccgaggacccugucgaaauugcucucuaccagcccucuuccggcugcuauauccacuucuuucgcgagccuacggaucugaaacaguucaagcaggacgccaaguacagccauggcauugaugugaccgaccuguuugccacacaacccgggcucaccucugcuguuaucgaugcccugccgcggaauauggugaucacaugucagggauccgacgauauuagaaaacuucuggaaagccagggccgcaaggacaucaaacucauugauaucgcgcuguccaagaccgacucucggaaauaugagaacgcugucugggaucaguacaaggaccugugccacaugcauacgggggugguuguggagaagaaaaagagaggaggcaaagaagagauuacaccucacugugcccuuauggauugcaucauguucgacgccgcugucagcgggggccucaauaccuccgugcugcgcgccguccugccccgggacaugguguuuagaaccucuacaccucgcguugugcucugaggacuagucccuguucccagagcccacuuuuuuuucuuuuuuugaaauaaaauagccugucuuucagaucucaaaggcucuuuucagagccaccaaaaaaaaaaaaaaaaaaaaaaaaaaaaaaaaaaaaaaaaaaaaaaaaaaaaaaaaaaaaaaaaaaaaaaaaaaaaaaaaaaaaaaaaaaaaaaaaaaaaa

SEQ ID NO: 17221 - RNA, 2001 nt, Artificial Sequence
  mRNA product Design a-2 (hSL-A100) comprising derived and/or modified sequence from LASV(LP;Clade I)__AAF86702__NP (opt5)
aggagaguccgcucagccagguugcagaagcggcuuagcguguguccuaaucuucucucugcguguagguaggccugugccgcaaacaagcuuaccaugagcaacuccaaggagaucaaaucuuuccuguggacccagagccucagacgggaacuguccggcuacugcucuaauauuaagcuccaaguggucaaagacgcccaggcucugcuccacgggcuggauuuuagcgagguuuccaacgugcagcgccuuaugagaaagcagaaacgggacgaugccgaccugaagcgccucagagaucugaaucaagcggugaacaaucuggucgaacucaagucuacacagcagaaaaacgugcugcggguuggaacgcuuagcuccgacgaucugaucacccucgcugccgaccuggagaaacuuaaaagcaaggugauucgcacagaaagaccccugucuuccggcgucuauauggggaaucucagcucucagcaacuggaucagcggcgcgcccugcucuccaugaucggaaugagcggcgggccucagggaaacagaaccggcggcgacggggugguucgggugugggaugucaaaaaugcugagcugcuuaacaaucaguucggaacaaugccgucucugacccucgccugucugacaaagcaaggccagguggaccuuaacgaugcugugcaggcccugaccgaccucgggcugauuuacacggcgaaguaucccaauuccagcgaccuggauaugcucacccaaucccauccuauccugggaauggucgacacaaagaagucuagccuuaacaucuccggcuacaauuuuagccugggggccgcuguuaaagccggagcuugcaugcucgauggcggcaacaugcuggagaccauuaaggugucuccccagacaauggacgggauccuuaaauccauucugaaggugaaacgcagccucggaauguucaucucugauaccccuggcgaaagaaaccccuaugagaauauucuguacaagaucugucugagcggggaaggauggccuuauauugccucccggacgucuaucacaggccgcgcgugggagaacacccucgucgaccuggagagcgauaauaagccgcccaaacuuaacuccgccgggagcaauaagucucugcaggcugccggacucaacgcuggccugacauacucccagcugaugacccuuaaagacugcaugcuccaacuggauccuagcucuaagaccuggaucgacauugaaggcagacccgaggauccuguggaaaucgcccuguuucagcccuccagcggguguuacauucacuucuuucgggagccgacagaccucaaacaguucaagcaggacgccaaguauucccauggaaucgauguuacggaccuguuuucuacccaaccuggccuuacaagcgcugugauugaagcgcugcccagaaauaugguccuuaccugccagggguccgaugacaucaaaaagcugcuggagucucagggacgccgggauaucaaacuuauugacaucagccucuccaaggccgauagcagaaaauucgagaacgcugugugggaccaguacaaggaucugugucacaugcauacaggcguuguggucgaaaagaaaaagcgcgggggcaaagaggaaauuaccccucacugcgcccugcucgacuguaucauguuugaugccgcuacgacaggaucucugaauauuaccacccuucgggccgugcugcccagagacauggucuuccgcacauccacccccaaggugguucucugaggacuagucccuguucccagagcccacuuuuuuuucuuuuuuugaaauaaaauagccugucuuucagaucucaaaggcucuuuucagagccaccaaaaaaaaaaaaaaaaaaaaaaaaaaaaaaaaaaaaaaaaaaaaaaaaaaaaaaaaaaaaaaaaaaaaaaaaaaaaaaaaaaaaaaaaaaaaaaaaaaaaa

SEQ ID NO: 17222 - RNA, 2001 nt, Artificial Sequence
  mRNA product Design a-2 (hSL-A100) comprising derived and/or modified sequence from LASV(803213;Clade II)__AAF86704__NP (opt5)
aggagaguccgcucagccagguugcagaagcggcuuagcguguguccuaaucuucucucugcguguagguaggccugugccgcaaacaagcuuaccaugagcgccuccaaggaggugaaaucuuuccuguggacccagagccucagacgggaacuguccggcuacugcucuaacaucaaacuucaagucguuaaggacgcucaggcccugcuccacgggcuggauuuuagcgaggugaauaacgugcagcgccuuaugagaaagcagaaacgggacgauggagaccugaagcgccucagagaucugaaucaagcggucaacaaucugguggaacucaaguccacacagcagaaaucuauucugcggguuggcacgcuuaccagcgacgaucugcucacacuggcugccgaccuugagaagcugaaauccaaggugauccgcaccgaaagaccccucagcucuggggucuauaugggaaaccuguccacacagcaacuggagcagcggcgcgcccuccugaauaugauuggcauggugggaggagcucagggcacccagccuggcagagaugggguugugcgggucugggacgugaaaaacccggaucuucugaauaaccaauucggaacaaugcccagccucacccuggccugucuuacgaagcagggccagguggaccugaaugaugcuguccucgcccugaccgaccuggggcucaucuacacagcgaaguauccuaacucuuccgaccuggaucgccuuagccaaucucaucccauucugaauaugguugacaccaaaaaguccagccucaacaucuccggauacaauuuuucucugggcgccgcugugaaagccggggcuugcaugcuugauggaggcaacaugcuggagacaaucaaggugaccccucagacgauggacggcauucucaaaagcauccugaaggucaaaagaucccuggggauguucgugagcgauacacccggagaacggaacccuuaugagaauauucucuacaagaucugucugucuggcgacggguggccguauauugccucccgcaccagcaucguugggagagcgugggaaaacacaaccguggaucuugagucugacggcaagccccagaaagucgggaccgccggaagcaauaagucccugcagucugcuggcuuuccuacaggccucacguacagccaacugaugacccugaaagauuccaugaugcagcuugaccccagcgccaagacauggauugauaucgaggggcggccugaagaccccguggagaucgcucucuaccagccgaugucuggaugcuauauucacuucuuuagagaaccuaccgaccugaaacaguucaagcaagaugccaaguacucccauggcaucgacguugccgaucuguuucccgcucagccugggcucacaagcgcggugauugaggcccugccccgcaacaugguccuuaccugucagggaucugacgauaucaaaaagcugcucgacucccagggccggagagauauuaaacugaucgacaucagccuguccaagguggauucucgcaaauucgaaaaugcugucugggaccaaugcaaggaucuuugucacaugcauacgggggugguuguggagaagaaaaagcggggcggaaaagaggaaauuacaccccacugcgcccucauggacuguaucauguuugaugccgcugucagcggcgggcugaacauuccugugcugagagccguucucccgcgcgacaugguguuccggaccuccucucccaaggucgugcugugaggacuagucccuguucccagagcccacuuuuuuuucuuuuuuugaaauaaaauagccugucuuucagaucucaaaggcucuuuucagagccaccaaaaaaaaaaaaaaaaaaaaaaaaaaaaaaaaaaaaaaaaaaaaaaaaaaaaaaaaaaaaaaaaaaaaaaaaaaaaaaaaaaaaaaaaaaaaaaaaaaaaa

SEQ ID NO: 17223 - RNA, 2004 nt, Artificial Sequence
  mRNA product Design a-2 (hSL-A100) comprising derived and/or modified sequence from LASV(GA391;Clade III)__CAA36646__NP (opt5)
aggagaguccgcucagccagguugcagaagcggcuuagcguguguccuaaucuucucucugcguguagguaggccugugccgcaaacaagcuuaccaugagcgccuccaaggaggugagaucuuuccuguggacccagagccuccggcgcgaacuguccggcuacugcucuaacaucaaacuucaagucguuaaggacgcucaggcccugcuccacgggcuggauuuuagcgagguguccaaugugcagagacuuaugcggaaacagaagcgcgacgauggagaccugaaaagacuccgggaucugaaccaagcggucaauaaccugguggaacucaagucuacacagcagaaaagcguucugcgcgugggcacgcuuuccagcgacgaucugcucauucuggcugccgaccuugagaaacugaagucuaaagucaccagaacagaacggccccucuccagcgggguguauaugggaaaucugucuucccagcaacuggaucagcgcagagcccuccugaacaugaucggcaugaccgggguuagcggaggcggcaagggggcuucugacggaauugugcgggucugggaugugaaaaaugccgagcuucugaacaaucaguucggcacaaugccuucccucacccuggcuugucuuacaaagcaggggcaaguggaccugaacgaugccguccaggcgcucaccgaccugggacugaucuacacggccaaguauccgaauagcuccgaccucgaucgccugucucagagccaucccauucuuaacaugaucgacaccaaaaaguccagccugaauaucucuggcuacaacuuuucccucggggcugccguuaaagcuggagccugcaugcuggauggcggcaauaugcuugagacaauuaaggugagcccucaaaccauggacgggauccugaaaucuauucucaaggugaaaaagagccugggaauguucgucuccgauacacccggcgaaagaaacccuuaugagaacauccuguacaagauuugucucucuggggacggauggcccuauaucgcgagccggaccuccauugugggccgcgccugggaaaauacgguuguggaucuggagcaggacaacaaaccucagaagaucgggaauggaggcagcaacaaaucucuucaguccgcuggcuuugccgcugggcugacauacagccaacucaugacccugaaggauuucaaaugcuuuaaucugaucccgaacgccaagacauggauggacauugagggaagacccgaagauccugucgagaucgcccuuuaccagcccucuuccggcuguuaugugcacuucuuucgggaaccuaccgaccucaagcaguucaaacaggacgcuaaguacagccaugggauugauguuaccgaccuguuugcggcccaacccggacugacauccgcugugaucgaggcccucccgagaaauauggucauuacgugccagggcucugaagauauccgcaaacugcuugagagccaggggcggagagacaucaagcugauugauaucacccucuccaaagccgacucucgcaaguucgagaacgcugugugggaucaguuuaaggaccugugucacaugcauacaggcgucgugguugaaaagaagaaacggggaggcaaggaggaaauuaccccucacugcgcccugauggauuguaucauguucgacgcggcugugagcgggggacuugaugccaaaguccucagagugguucugccccgcgacaugguguuccggacauccaccccuaaggucgugcugugaggacuagucccuguucccagagcccacuuuuuuuucuuuuuuugaaauaaaauagccugucuuucagaucucaaaggcucuuuucagagccaccaaaaaaaaaaaaaaaaaaaaaaaaaaaaaaaaaaaaaaaaaaaaaaaaaaaaaaaaaaaaaaaaaaaaaaaaaaaaaaaaaaaaaaaaaaaaaaaaaaaaa

SEQ ID NO: 17224 - RNA, 2001 nt, Artificial Sequence
  mRNA product Design a-2 (hSL-A100) comprising derived and/or modified sequence from LASV(AV;Clade V)__CCA30315__NP (opt5)
aggagaguccgcucagccagguugcagaagcggcuuagcguguguccuaaucuucucucugcguguagguaggccugugccgcaaacaagcuuaccaugagcgccuccaaggaggugaaaucuuuccuguggacccagagccucagacgggaacuguccggcuacugcucuaacaucaaacuucaagucguuaaggacgcucaggcccugcuccacgggcuggauuuuagcgagguguccaaugugcagcgccuuaugagaaagcagcggcgcgacgauucugaccugaaaagacuccgggaucugaaccaagcggucaauaaccugguggaacucaagagcacacagcagaaguccguucugcgcgugggaacgcuuagcucugacgaucugcucacccuggcugccgaccuugagaaacugaaguccaaagucacaagaaccgaacggccccucagcucuggcguguauauggggaaucuguccagccagcaacuggaucagcgcagagcccuccugaaccuuauuggaaugacaaauggcucucaggggucccaggcuggacgggacggcguugugcgcgucugggaugugaagaacgccgagcugcucaauaaccaauucggcaccaugccuagccugacacuugcuugucugaccaaacagggacagguggaccucaaugaugucguucaagcccugacggaccuggggcucaucuacaccgcgaaguauccgaacacauccgaccuggauagacuuacccagucucaucccauucugaauaugaucgacacaaagaaaagcucccucaacauuagcggcuacaauuuuucucugggggccgcugugaaggccggagcuugcaugcuugauggcgggaacaugcuggagaccaucaaaguguccccucagagcauggacggaauccucaagucuauucugaaagucaagcgggcccugggcauguucgugagcgauacgcccggcgaacgcaacccuuaugagaauauccucuacaaaauuugucuguccggggacggauggcccuauaucgcgucuagaacaagcauuguuggccgggccugggaaaacaccguggucgaucuugagacagacgggaagccucagaagaucggauccggcaauagcaacaaaucucugcaauccgcuggguuuagcgccggacucaccuacucucagcugaugacccugaaggaugcuaugcuucagcucgacccgaaugccaaaacauggauggauauugagggcagacccgaagacccuguggagguugcccuguaccagcccaucuccggcugcuauauccacuucuuucgcgaaccuacggaccugaagcaauucaaacaggaugcuaaguacagccaugggauugacaucgcggaucucuuugccgcucagcccggacugaccuccgccgugauugaggcccuuccgcggaacauggucaucacaugucagggcucugaagacauuaagaaacugcucgagagccaagggagaaaggauaucaaacugaucgacauugcucuguccaagaucgauucucgcaaauucgagaaugccgugugggaccaguauaaggaucuuugccacaugcauaccggagucgugguugaaaagaaaaagcggggcgggaaagaggaaauuacaccucacugugcgcucauggacugcaucauguuugaugcugccgugagcggcggacugaacacccugguccucagagccgugcugccccgcgacaugguuuuccggacguccacaccuagagugguccuuugaggacuagucccuguucccagagcccacuuuuuuuucuuuuuuugaaauaaaauagccugucuuucagaucucaaaggcucuuuucagagccaccaaaaaaaaaaaaaaaaaaaaaaaaaaaaaaaaaaaaaaaaaaaaaaaaaaaaaaaaaaaaaaaaaaaaaaaaaaaaaaaaaaaaaaaaaaaaaaaaaaaaa

SEQ ID NO: 17225 - RNA, 2001 nt, Artificial Sequence
  mRNA product Design a-2 (hSL-A100) comprising derived and/or modified sequence from LASV(Togo/2016/7082;Clade VI)__AMR44578__NP (opt5)
aggagaguccgcucagccagguugcagaagcggcuuagcguguguccuaaucuucucucugcguguagguaggccugugccgcaaacaagcuuaccaugagcaacuccaaggaggugaaaucuuuccuguggacccagagccucagacgggaacuguccggcuacugcucuaauaucaaacuucaagucguuaaagacgcccaggcucugcuccacgggcuggauuuuagcgagguguccaacgugcagcgccuuaugagaaagcagaaacgggacgauggagaccugaagcgccucagagaucugaaucaagccgucaacaaucugguggaacucaagucuguucagcagaaaagcauucugcgggugggcacacuuacguccgacgaucugcucacccuggcggcugaccuugagaagcugaaaagcaaggucacacgcaccgaaagaccccucucuuccgggguguauaugggaaaccugagcucucagcaacuggaucagcggcgcgcccuccuguccaugaucggcaugagcgggggaaaucagaacucucagccuaaaggcgacggcguugugagagucugggaugugaagaaugccgaccuucugaacaaucaauucgggacaaugccgucccucacccuggcuugucuuacaaagcagggacagguggaucugaacgacgccguccaagcucucaccgaccugggccugauuuacacggccaaauaucccaauagcuccgaucucgaccggcugucucagagccauccuauccuuaacaugauugauaccaagaaauccagccugaauaucucuggguacaacuuuucccucggagcggccaucaagacaggcgcuugcaugcuggacgggggaaacaugcuugagaccauuaaaguuacaccccagaccauggauggcauccucaagagcauucugaaagugaagcgcucucugggcauguucaucagcgacacgccuggggagagaaaucccuaugaaaacauucuguacaagaucugucucuccggagauggcuggccuuauauugccucucggacagcuaucaucgggcgcgccugggagaauaccguggucgaccuggaaagcgauuccaaaccgcagaagauuggaagcaacggcucuaauaaaucccuucaaagcgcgggguuugcccccggacugacauacucucagcucaugacccugaaggacuccaugcugcagcuugauccuaacgcuaaaaccuggaucgacauugagggcagacccgaggacccuguggaaguugcccucuuccagcccaucagcggcugcuacauucacuuuuuccgggagccgacagaucugaagcaauuuaagcaggacgcuaaauauucccaugggaucgaugugacggaccuguucgccgcccagccuggacucaccucugcugucaucgaagcgcugcccagaaauauggugcuuacaugucagggcagcgaugacauuaagaaacugcucgauucccaagggcgccgggacaucaagcugauugauguuucucugaacaaaaucgacagcagaaaguuugagaaugccgugugggaucaguacaaggaccuuugccacaugcauaccggagucguggucgaaaagaagaaaaagggcgggaaagaggagauuacaccucacugugcucuccuggauugcaucauguucgacgccgccguguccggcggacugaacgcuaccguucuccgcgccgugcugccccgggacauggucuuuagaacgagcucucccaaggugguucuuugaggacuagucccuguucccagagcccacuuuuuuuucuuuuuuugaaauaaaauagccugucuuucagaucucaaaggcucuuuucagagccaccaaaaaaaaaaaaaaaaaaaaaaaaaaaaaaaaaaaaaaaaaaaaaaaaaaaaaaaaaaaaaaaaaaaaaaaaaaaaaaaaaaaaaaaaaaaaaaaaaaaaa

SEQ ID NO: 17226 - RNA, 2001 nt, Artificial Sequence
  mRNA product Design a-2 (hSL-A100) comprising derived and/or modified sequence from LASV(KAK-428;Clade n.d. (VII))__ANH09741__NP (opt5)
aggagaguccgcucagccagguugcagaagcggcuuagcguguguccuaaucuucucucugcguguagguaggccugugccgcaaacaagcuuaccaugagcaacuccaaggaggugaaaucuuuccuguggacccagagccucagacgggaacuguccggcuacugcacaaauaucaaacuucaagucguuaaggacgcccaggcucugcuccacgggcuggauuuuucugaggugagcaacgugcagcgccuuaugagaaagcagaaacgggacgauaaugaccugaagcgccucagagaucugaaccaagccgucaauaaccugguggaacucaaguccguucagcagaaaucugugcugaaggucggaacgcuuaauagcgacgaucugcucacccuggcggcugaccuugagaaacugaaguccaaagugguucggacagaacgcccccucagcucuggcguguauauggggaaccuguccagccagcaacuggaucagagacgggcccuccugaauaugauuggaauggccggcgggucucagggaaaccagccuucccgcgacggcgucgugagagugugggaugucaagaaugcugaccuucugaacaaucaauucggcaccaugccgagccucacacuggccugucuuaccaagcaggggcagguugaucugaacgacguggugcucgcucugacagaccugggacucaucuacaccgccaaauaucccaauucuuccgaucuggaccggcuuagccaaaaccauccuguccugaacaugauugaugugaauaaguccucucucaacaucagcggcuacaauuuuucccugggggcggccguuaaagcuggagccugcaugcuugacggcgggaacaugcuggagacgauuaagaucagcccccagaccguggauggaauccucaaaucuauucugaaggucaaacgcgcucugggcauguucguguccgacacaccuggcgagagaaaucccuaugaaaacauccucuacaagguuugucugagcgggaauggauggccuuauauugccucucggaccagcaucgugggccgcgcgugggagaacacagucguggaucuugaauccaauaagaaccagccgaaagucgggaauaacggaucuaauaagaugcugcagagcuccggcuuugccaccgggcucacguacagccaacugaugacacugagagacucuaugcuucagcucgaucccaccgcuaaaacauggauugacaucgagggacggccugaggaucccguggaacuggcccuguuccagccuuccagcggcugcuacauucacuuuuucagagagcccaccgaccucaagcaguuuaaacaagacgcuaaguauucucauggcaucgauguuaacgaccuguucuccgcccagccggggcuuaccagcgccgugcuggaagcucucccucgcaauaugguccugacaugucagggauccgaugacauccggaagcugcuugauucucaggacagaaaagauauuaagcucaucgacauuagccuguccaaagcggaugcccgcaaguuugagaacgacgugugggaucaauucaaagaccugugccacaugcauacgggcaucguuguggaaaagaagaaaaagggagggaaacaggagaugacaccccacugugcucuccuggauugcauuauguuugacgccgccgucucuggcgggcuuaacgugccuacccugcgggcugugcuccccaccgacaugguuuucagaacaaucaccacgaaggucgugcugugaggacuagucccuguucccagagcccacuuuuuuuucuuuuuuugaaauaaaauagccugucuuucagaucucaaaggcucuuuucagagccaccaaaaaaaaaaaaaaaaaaaaaaaaaaaaaaaaaaaaaaaaaaaaaaaaaaaaaaaaaaaaaaaaaaaaaaaaaaaaaaaaaaaaaaaaaaaaaaaaaaaaa

SEQ ID NO: 17227 - RNA, 2001 nt, Artificial Sequence; identical to SEQ ID NO: 17221
  mRNA product Design a-2 (hSL-A100) comprising derived and/or modified sequence from LASV(Pinneo-NIG-1969;Clade I)__AIT17837__NP (opt5)

SEQ ID NO: 17228 - RNA, 2001 nt, Artificial Sequence
  mRNA product Design a-2 (hSL-A100) comprising derived and/or modified sequence from LASV(ISTH0009-NIG-2011;Clade II)__AIT17405__NP (opt5)
aggagaguccgcucagccagguugcagaagcggcuuagcguguguccuaaucuucucucugcguguagguaggccugugccgcaaacaagcuuaccaugagcguguccaaggaggucaaaucuuuccuguggacccagagccucagacgggaacuguccggcuacugcucuaacaucaaacuucaaguugugaaggacgcccaggcucugcuccacgggcuggauuuuagcgagguguccaauguccagcgccuuaugagaaagcagaaacgggacgauucugaccugaagcgccucagagaucugaaccaagccgugaauaaccugguugaacucaagagcacacagcagaaauccauucugcgggugggaacgcuuaccagcgacgaucugcucacacuggcggcugaccuugagaagcugaaaucuaaggucauccgcaccgaaagaccccucuccagcggcguguauauggggaaucugucuacacagcaacuggagcagcggcgcgcccuccugaacaugauuggaaugguuggcggggcccagggaacccagccuggcagagauggcgugguccgggugugggacgugaaaaauccggaucuucugaacaaucaauucgggacaaugcccucccucacccuggcuugucuuacgaagcagggacaggucgaccugaacgaugccguucucgcucugaccgaccugggccucaucuacacagccaaguauccuaauagcucugaccuggaucgccuuucccaaagccaucccauucugaacaugguggacaucaaaaaguccucucucaauaucagcggguacaacuuuucccugggagcggccgugaaagcuggcgccugcaugcuugaugggggaaauaugcuggagaccauuaaggucacaccucagaccauggacggcauccucaaaagcauucugaaggugaaaagaucucugggcauguucguuuccgauacgcccggggaacggaacccuuaugagaacauccucuacaagauuugucugagcggagacggcuggccguauaucgcuucucgcacaagcauuguggggagagccugggaaaauaccacagucgaucuugaguccgacggaaagccccagaaagugggcucugcggggagcaacaagucccugcagagcgccggauuuccuaccggccucaccuacucucaacugaugacacugaaagauuccaugaugcagcuugaccccagcgcuaagacguggaucgauaucgagggccggccugaagaccccguugagauugcccucuaccagccgaugucugggugcuauauccacuucuuuagagaaccuaccgaccugaaacaguucaagcaagaugcuaaguacucccauggaauugacguggccgaucuguuucccgcccagccuggccucacaagcgcugucaucgaggcgcugccccgcaauauggugcuuaccugucagggguccgacgauauuaaacggcugcucgacucucagggaagacgcgauaucaagcugaucgacauugcccugagcaaagcugauucccggagauucgaaaacgccgucugggaccaaugcaaggaucuuugucacaugcauacaggcgugguuguggagaaaaagaagcgcgggggcaaagaggaaaucacgccccacugcgcccucauggacuguauuauguaugaugcugccgucucuggaggccugaauaucccugugcugcgggcgguucucccgagagacaugguguuucgcaccagcucccccaaggucgugcugugaggacuagucccuguucccagagcccacuuuuuuuucuuuuuuugaaauaaaauagccugucuuucagaucucaaaggcucuuuucagagccaccaaaaaaaaaaaaaaaaaaaaaaaaaaaaaaaaaaaaaaaaaaaaaaaaaaaaaaaaaaaaaaaaaaaaaaaaaaaaaaaaaaaaaaaaaaaaaaaaaaaaa

SEQ ID NO: 17229 - RNA, 2001 nt, Artificial Sequence
  mRNA product Design a-2 (hSL-A100) comprising derived and/or modified sequence from LASV(ISTH2010-NIG-2012;Clade II)__AIT17483__NP (opt5)
aggagaguccgcucagccagguugcagaagcggcuuagcguguguccuaaucuucucucugcguguagguaggccugugccgcaaacaagcuuaccaugagcgccuccaaggaggugaaaucuuuccuguggacccagagccucagacgggaacuguccggcuacugcucuaacaucaaacuucaagucguuaaggacgcucaggcccugcuccacgggcuggauuuuagcgagguguccaaugugcagcgccuuaugagaaagcagaaacgggacgauucugaccugaagcgccucagagaucugaaccaagcggucaauaaccugguggaacucaagagcacacagcagaaauccauucugcggguuggaacgcuuaccagcgacgaucugcucacacuggcugccgaccuugagaagcugaaaucuaaggugauccgcaccgaaagaccccucuccagcggcgucuauauggggaaucugucuacacagcaacuggagcagcggcgcgcccuccugaaccuuauuggaauggugggcggggcucagggaacccagccuggcagagauggcguugugcgggucugggacgugaaaaauccggaucugcucaacaaucaauucgggacaaugcccucccugacccuugccugucugacgaagcagggacagguggaccucaacgaugcuguccuggcccugaccgaccucggccugaucuacacagcgaaguauccuaauagcucugaccuugaucgccugucccaaagccaucccauucucaacaugguugacaccaaaaaguccucucugaauaucagcggguuuaacuucucccuuggagccgcugugaaagccggcgcuugcaugcuggaugggggaaauaugcucgagacaaucaaggugaccccucagacgauggacggcauucugaaaagcauccugaaggucaaaaagucucucggcauguuuguguccgauacacccggggaaagaaacccuuacgagaacauucuguauaagaucugucuuagcggagacggcuggccguacauugccucucggaccagcaucguugggcgcgcgugggaaaauacaaccguggaucuggaguccgacggaaaaccccacaaggucggcaccgccgggucuaacaaaagccuccaguccgcuggauucccuacaggccugacguauagccagcugaugacccuuaaggauucuaugaugcaacucgaccccuccgccaaaacauggauugauaucgagggcagaccugaagaccccguggagaucgcucuguaccagccgaugagcgggugcuacauucacuuuuuccgggaaccuaccgaccugaagcaguuuaagcaggaugccaaauauucucauggaaucgacguugccgaucucuuccccgcucaaccuggccugacauccgcggugauugaggcccuucccagaaauaugguccugaccugucaggggagcgacgauaucaagcgccuccuggacucccagggacggagagauauuaaacugaucgacaucgcucuuucuaaggccgauagccgccgguuugaaaacgccgugugggaccagugcaaagaucucugucauaugcacacgggcgucgugguugagaagaagaaaagagggggcaaggaggaaauuacaccccacugcgcucugauggacuguaucauguacgaugccgcgguguccggaggccugaauauuccuguccuccgcgcugugcugccgcgggacaugguuuucagaaccucuagccccaaagugguccuuugaggacuagucccuguucccagagcccacuuuuuuuucuuuuuuugaaauaaaauagccugucuuucagaucucaaaggcucuuuucagagccaccaaaaaaaaaaaaaaaaaaaaaaaaaaaaaaaaaaaaaaaaaaaaaaaaaaaaaaaaaaaaaaaaaaaaaaaaaaaaaaaaaaaaaaaaaaaaaaaaaaaaa

SEQ ID NO: 17230 - RNA, 2001 nt, Artificial Sequence
  mRNA product Design a-2 (hSL-A100) comprising derived and/or modified sequence from LASV(Lassa virus/H.sapiens-wt/NGA/2015/ISTH_0543;Clade II)__AVO03640__NP (opt5)
aggagaguccgcucagccagguugcagaagcggcuuagcguguguccuaaucuucucucugcguguagguaggccugugccgcaaacaagcuuaccaugagcgccuccaaggaggugaaaucuuuccuguggacccagagccucagacgggaacuguccggcuacugcucuaacaucaaacuucaagucguuaaggacgcucaggcccugcuccacgggcuggauuuuagcgagguguccaaugugcagcgccuuaugagaaagcagaaacgggacgauucugaccugaagcgccucagagaucugaaccaagcggucaauaaccugguggaacucaagagcacacagcagaaauccauucugcggguuggaacgcuuaccagcgacgaucugcucacacuggcugccgaccuugagaagcugaaaucuaaggugauccgcaccgaaagaccccucuccagcggcgucuauauggggaaucugucuacacagcaacuggagcagcggcgcgcccuccugaacaugauuggaauggugggcggggcucagggaacccagccuggcagagauggcguugugcgggucugggacgugaaaaauccggaucuucugaacaaucaauucgggacaaugcccucccucacccuggccugucuuacgaagcagggacagguggaccugaacgaugcuguccucgcccugaccgaccugggccucaucuacacagcgaaguauccuaauagcucugaccuggaucgccuuucccaaagccaucccauucugaacaugguugacaccaaaaaguccucucucaauaucagcggguacaacuuuucccugggagccgcugugaaagccggcgcuugcaugcuugaugggggaaauaugcuggagacaaucaaggugaccccucagacgauggacggcauucucaaaagcauccugaaggucaaaaagucucugggcauguucguguccgauacacccggggaaagaaacccuuaugagaacauucucuacaagaucugucugagcggagacggcuggccguauauugccucucggaccagcaucguugggcgcgcgugggaaaauacaaccguggaucuugaguccgacggaaaaccccagaaggucggcucugccgggagcaacaaaucccugcagagcgcuggauuuccuaccggccucacauacucucaacugaugacgcugaaggauuccaugaugcagcuugaccccagcgccaaaaccuggauugauaucgagggcagaccugaagaccccguggagaucgcucucuaccagccgaugucugggugcuauauucacuucuuucgggaaccuacagaccugaagcaguucaagcaagaugccaaauacucccauggaaucgacguugccgaucuguuucccgcucagccuggccucaccagcgcggugauugaggcccugcccagaaauaugguccuuacaugucagggguccgacgauaucaagcgccugcucgacucucagggacggaaagauauuaagcugaucgacaucgcucugagcaaagccgauuccagacgcuucgaaaacgccgugugggaccaaugcaaggaucuuugucacaugcauaccggcgucgugguugagaagaaaaagagagggggcaaagaggaaauuacgccccacugcgcucucauggacuguaucauguaugaugccgcggugucuggaggccugaauauuccuguccugcgggcugugcucccgcgcgacaugguuuuucggacaagcucccccaaggugguccugugaggacuagucccuguucccagagcccacuuuuuuuucuuuuuuugaaauaaaauagccugucuuucagaucucaaaggcucuuuucagagccaccaaaaaaaaaaaaaaaaaaaaaaaaaaaaaaaaaaaaaaaaaaaaaaaaaaaaaaaaaaaaaaaaaaaaaaaaaaaaaaaaaaaaaaaaaaaaaaaaaaaaa

SEQ ID NO: 17231 - RNA, 2001 nt, Artificial Sequence
  mRNA product Design a-2 (hSL-A100) comprising derived and/or modified sequence from LASV(Lassa virus/H.sapiens-wt/NGA/2016/ISTH_0009;Clade II)__AVO03572__NP (opt5)
aggagaguccgcucagccagguugcagaagcggcuuagcguguguccuaaucuucucucugcguguagguaggccugugccgcaaacaagcuuaccaugagcgccuccaaggaggugaaaucuuuccuguggacccagagccucagacgggaacuguccggcuacugcucuaacaucaaacuucaagucguuaaggacgcucaggcccugcuccacgggcuggauuuuagcgagguguccaaugugcagcgccuuaugagaaagcagaaacgggacgauucugaccugaagcgccucagagaucugaaccaagcggucaauaaccugguggaacucaagagcacacagcagaaauccauucugcggguuggaacgcuuaccagcgacgaucugcucacacuggcugccgaccuugagaagcugaaaucuaaggugauccgcaccgaaagaccccucuccagcggcgucuauauggggaaucugucuacacagcaacuggagcagcggcgcgcccuccugaacaugauuggaauggugggcggggcucagggaacccagccuggcagagauggcguugugcgggucugggacgugaaaaauccggaucuucugaacaaucaauucgggacaaugcccucccucacccuggccugucuuacgaagcagggacagguggaccugaacgaugcuguccucgcccugaccgaccugggccucaucuacacagcgaaguauccuaauagcucugaccuggaucgccuuucccaaagccaucccauucugaacaugguugacaccaaaaaguccucucucaauaucagcggguacaacuuuucccugggagccgcugugaaagccggcgcuugcaugcuugaugggggaaauaugcuggagacaaucaaggugaccccucagacgauggacggcauucucaaaagcauccugaaggucaaaaagucucugggcauguucguguccgauacacccggggaaagaaacccuuaugagaacauucucuacaagaucugucugagcggagacggcuggccguauauugccucucggaccagcaucguugggcgcgcgugggaaaauacaaccguggaucuugaguccgacggaaaaccccagaaggucggcucugccgggagcaacaaaucccugcagagcgcuggauuuccuaccggccucacauacucucaacugaugacgcugaaggauuccaugaugcagcuugaccccagcgccaaaaccuggauugauaucgagggcagaccugaagaccccguggagaucgcucucuaccagccgaugucugggugcuauauucacuucuuucgggaaccuacagaccugaagcaguucaagcaagaugccaaauacucccauggaaucgacguugccgaucuguuucccgcucagccuggccucaccagcgcggugauugaggcccugcccagaaauaugguccuuacaugucagggguccgacgauaucaagcgccugcucgacucucagggacggagagauauuaaacugaucgacaucgcucugagcaaggccgauucccgccgguucgaaaacgccgugugggaccaaugcaaagaucuuugucacaugcauaccggcgucgugguugagaagaagaaaagagggggcaaggaggaaauuacgccccacugcgcucucauggacuguaucauguaugaugccgcggugucuggaggccugaauauuccuguccugcgcgcugugcucccgcgggacaugguuuuuagaacaagcucccccaaagugguccugugaggacuagucccuguucccagagcccacuuuuuuuucuuuuuuugaaauaaaauagccugucuuucagaucucaaaggcucuuuucagagccaccaaaaaaaaaaaaaaaaaaaaaaaaaaaaaaaaaaaaaaaaaaaaaaaaaaaaaaaaaaaaaaaaaaaaaaaaaaaaaaaaaaaaaaaaaaaaaaaaaaaaa

SEQ ID NO: 17232 - RNA, 2001 nt, Artificial Sequence
  mRNA product Design a-2 (hSL-A100) comprising derived and/or modified sequence from LASV(Lassa virus/H.sapiens-wt/NGA/2016/ISTH_0017;Clade II)__AVO03568__NP (opt5)
aggagaguccgcucagccagguugcagaagcggcuuagcguguguccuaaucuucucucugcguguagguaggccugugccgcaaacaagcuuaccaugagcgccuccaaggaggugaaaucuuuccuguggacccagagccucagacgggaacuguccggcuacugcucuagcaucaaacuucaagucguuaaggacgcucaggcccugcuccacgggcuggauuuuuccgaggugucuaacgugcagcgccuuaugagaaagcagaaacgggacgauagcgaccugaagcgccucagagaucugaaucaagcggucaacaaucugguggaacucaaguccacacagcagaaaagcauucugcggguuggaacgcuuaccucugacgaucugcucacacuggcugccgaccuugagaagcugaaauccaaggugauccgcaccgaaagaccccucagcucuggcgucuauauggggaaccuguccacacagcaacuggagcagcggcgcgcccuccugaauaugauuggaauggcuggcggggcccagggaacccagccuggcagagauggcgugguucgggugugggacgucaaaaacccggaucuucugaauaaccaauucgggacaaugcccagccucacccuggcuugucuuacgaagcagggacagguggaccugaaugaugccgugcucgcgcugaccgaccugggccucaucuacacagccaaguauccuaacucuuccgaccuggaucgccuuagccaaucccaucccauucugaauauggucgacaccaaaaagucuagccucaacaucuccggguacaauuuuagccugggagcugccguuaaagcuggcgccugcaugcuugaugggggaaacaugcuggagacaaucaaggugaccccucagacgauggacggcauucucaaaucuauccugaaggugaaaagaucccugggcauguucgucagcgaugcgcccggggaacggaauccuuaugagaacauucucuacaagaucugucugucuggagacggcuggccguauauugccagccgcacauccaucguggggagagcuugggaaaacaccacaguugaucuugagucugacggaaagccccagaaagugggcgccaccgggagcaauaagucccugcagagcgcuggauuuccuaccggccucacauacucucaacugaugacgcugaaagauuccaugaugcagcuugaccccagcgccaagaccuggauugauaucgagggccggccugaagaccccgucgagguggcccucuaccagccgguuucugggugcuauauccacuucuuuagagaaccuacagaccugaaacaguucaagcaagaugcuaaguacucccauggaauugacguggcggaucuguuucccgcccagccuggccucaccagcgcugucaucgaggcccugccccgcaacauggugcuuacaugucagggguccgacgauauuaaaaagcugcucgacucucagggacggaaagauaucaagcugauugacaucgcccugagcaaagcugauuccagacgcuucgaaaaugccgucugggaccaaugcaaggaucuuugucacaugcauaccggcgugguuguggagaagaaaaagagagggggcaaagaggaaaucacgccccacugcgcgcucauggacuguauuauguaugaugcugccgucucuggaggccugaacaucccugugcugcgggccguucucccgcgcgacaugguguuucggacaagcucccccaaggucgugcugugaggacuagucccuguucccagagcccacuuuuuuuucuuuuuuugaaauaaaauagccugucuuucagaucucaaaggcucuuuucagagccaccaaaaaaaaaaaaaaaaaaaaaaaaaaaaaaaaaaaaaaaaaaaaaaaaaaaaaaaaaaaaaaaaaaaaaaaaaaaaaaaaaaaaaaaaaaaaaaaaaaaaa

SEQ ID NO: 17233 - RNA, 2001 nt, Artificial Sequence
  mRNA product Design a-2 (hSL-A100) comprising derived and/or modified sequence from LASV(Lassa virus/H.sapiens-wt/NGA/2018/ISTH_0959;Clade II)__AVV65100__NP (opt5)
aggagaguccgcucagccagguugcagaagcggcuuagcguguguccuaaucuucucucugcguguagguaggccugugccgcaaacaagcuuaccaugagcgccuccaaggaggugaaaucuuuccuguggacccagagccucagacgggaacuguccggcuacugcucuaacaucaaacuucaagucguuaaggacgcucaggcccugcuccacgggcuggauuuuagcgagguguccaaugugcagcgccuuaugagaaagcagaaacgggacgauucugaccugaagcgccucagagaucugaaccaagcggucaauaaccugguggaacucaagagcacccagcagaaauccauucugcggguuggaacgcuuaccagcgacgaucugcucacacuggcugccgaccuugagaagcugaaaucuaaggugauccgcaccgaaagaccccucuccagcggcgucuauauggggaaucugucuacacagcaacuggagcagcggcgcgcccuccugaaccuuauuggaauggugggcggggcucagggaacccagccuggcagagauggcguugugcgggucugggacgugaaaaauccggaucugcucaacaaucaauucgggacaaugcccucccugacccuugccugucugacgaagcagggacagguggaccucaacgaugucguucuggcucugaccgaccucggccugaucuacacagccaaguauccuaauagcucugaccuugaucgccugucccaaagccaucccauucucaacaugguggacaccaaaaaguccucucugaauaucagcggguuuaacuucucccuuggagcggccgugaaagcuggcgccugcaugcuggaugggggaaauaugcucgagacaaucaaggucaccccucagacgauggacggcauucugaaaagcauccugaaggugaaaaagucucucggcauguuuguuuccgauacacccggggaaagaaacccuuacgagaacauucuguauaagaucugucuuagcggagacggcuggccguacauugcuucucggaccagcaucguggggcgcgccugggaaaauacaaccgucgaucuggaguccgacggaaaaccccacaaggugggcaccgcggggucuaacaaaagccuccaguccgccggauucccuacaggccugacguauagccagcugaugacccuuaaggauucuaugaugcaacucgaccccuccgcuaaaacauggauugauaucgagggcagaccugaagaccccguugagaucgcccuguaccagccgaugagcgggugcuacauucacuuuuuccgggaaccuaccgaccugaagcaguuuaagcaggaugcuaaauauucucauggaaucgacguggccgaucucuuccccgcccaaccuggccugacauccgcugucauugaggcgcuucccagaaauauggugcugaccugucaggggagcgacgauaucaagcgccuccuggacucccagggacggaaagauauuaagcugaucgacaucgcccuuucuaaaacggauagcagacgcuuugaaaacgcugucugggaccagugcaaggaucucugucauaugcacacaggcgugguuguggagaagaaaaagagagggggcaaagaggaaauuacaccccacugcgcccugauggacuguaucauguacgaugccgcugucuccggaggccugaauauuccugugcuccgggccguucugccgcgcgacaugguguuccggaccucuagccccaaggucgugcuuugaggacuagucccuguucccagagcccacuuuuuuuucuuuuuuugaaauaaaauagccugucuuucagaucucaaaggcucuuuucagagccaccaaaaaaaaaaaaaaaaaaaaaaaaaaaaaaaaaaaaaaaaaaaaaaaaaaaaaaaaaaaaaaaaaaaaaaaaaaaaaaaaaaaaaaaaaaaaaaaaaaaaa

SEQ ID NO: 17234 - RNA, 2001 nt, Artificial Sequence
  mRNA product Design a-2 (hSL-A100) comprising derived and/or modified sequence from LASV(LASV003-NIG-2008;Clade II)__AIT17581__NP (opt5)
aggagaguccgcucagccagguugcagaagcggcuuagcguguguccuaaucuucucucugcguguagguaggccugugccgcaaacaagcuuaccaugagcgccuccaaggaggugaaaucuuuccuguggacccagagccucagacgggaacuguccggcuacugcucuagcaucaaacuucaagucguuaaggacgcucaggcccugcuccacgggcuggauuuuuccgaggugucuaacgugcagcgccuuaugagaaagcagaaacgggacgauagcgaccugaagcgccucagagaucugaaucaagcggucaacaaucugguggaacucaaguccacccagcagaaaagcguucugcgggugggaacgcuuaccucugacgaucugcucacacuggcugccgaccuugagaagcugaaauccaaggucauucgcaccgaaagaccccucagcucuggcguguauauggggaaccuguccgcccagcaacuggagcagcggcgcacacuccugaauaugaucggaaugguuggcggggcucagggaacccagccuggcagagauggcgugguccgggugugggacgugaaaaacccggaucuucugaauaaccaauucgggacaaugcccagccucacccuggccugucuuacgaagcagggacaggucgaccugaaugauguugugcucgcucugaccgaccugggccucauuuacacagccaaguauccuaacucuuccgaccuggaucgccuuagccaaucccaucccauccugucuaugguggacaccaaaaagagcucccucaauauuagcggguacaacuuuucucugggagcggccgucaaagcuggcgccugcaugcuugaugggggaaauaugcuggagacaaucaaggugaccccucagacgauggacggcauccucaaauccauucugaagguuaaaaagagccugggcauguucgugucugauacacccggggaaagaaacccuuaugagaauauccucuacaagauuugucugagcggagacggcuggccguauaucgcuucccggaccucuauugucgggcgcgccugggaaaacacaaccguggaucuugagagcgacggaaaaccccagaagguuggcaccgcgggguccaacaaaagccugcagucugccggauuuccuacaggccucacguacucccaacugaugacccugaaggauagcaugaugcagcuugaccccucugcuaaaacauggaucgauauugagggcagaccugaagaccccguggagaucgcccucuaccagccgauguccgggugcuauauccacuucuuucgggaaccuaccgaccugaagcaguucaagcaagaugcuaaauacagccauggaauugacgucacagaucuguuucccgcccagccuggccucaccuccgccgugaucgaggcucugcccagaaauaugguccuuacgugucaggggucugacgauauuaagcgccugcucgacagccagggacggagagauaucaaacugauugacaucgcgcuguccaaggccgauucucgccgguucgaaaacgcugugugggaccaaugcaaagaucuuugucacaugcauacaggcguuguggucgagaagaagaaaagagggggcaaggaggaaaucacaccccacugcgcccucauggacuguauuauguaugaugccgcugugagcggaggccugaauaucccuguucugcgcgccgugcucccgcgggacauggucuuuagaaccuccagccccaaaguggugcugugaggacuagucccuguucccagagcccacuuuuuuuucuuuuuuugaaauaaaauagccugucuuucagaucucaaaggcucuuuucagagccaccaaaaaaaaaaaaaaaaaaaaaaaaaaaaaaaaaaaaaaaaaaaaaaaaaaaaaaaaaaaaaaaaaaaaaaaaaaaaaaaaaaaaaaaaaaaaaaaaaaaaa

SEQ ID NO: 17235 - RNA, 2001 nt, Artificial Sequence
  mRNA product Design a-2 (hSL-A100) comprising derived and/or modified sequence from LASV(LASV035-NIG-2009;Clade II)__AIT17589__NP (opt5)
aggagaguccgcucagccagguugcagaagcggcuuagcguguguccuaaucuucucucugcguguagguaggccugugccgcaaacaagcuuaccaugagcgccuccaaggaggugaaaucuuuccuguggacccagagccucagacgggaacuguccggcuacugcucuagcaucaaacuucaagucguuaaagacgcucaggcccugcuccacgggcuggauuuuuccgaggugucuaacgugcagcgccuuaugagaaagcagaaacgggacgauagcgaccugaagcgccucagagaucugaaucaagcggucaacaaucugguggaacucaaguccacacagcagaaaagcauucugcggguuggaacgcuuaccucugacgaucugcucacacuggcugccgaccuugagaagcugaaauccaaggugauccgcaccgaaagaccccucagcucuggcgucuauauggggaaccuguccgcccagcaacuggagcagcggcgcgcucuccugaauaugauuggaauggugggcggggcccagggaacacagccuggcagagauggcguugugcgggucugggacgugaaaaacccggaucuucugaauaaccaauucgggaccaugcccagccucacacuggcuugucuuaccaagcagggacagguggaccugaaugaugccguccucgcgcugacggaccugggccucaucuacaccgccaaguauccuaacucuuccgaccuggaucgccuuagccaaucccaucccauucugaauaugguugacacaaagaagucuagccucaacaucuccggguacaauuuuagccugggagcugccgugaaagcuggcgccugcaugcuugaugggggaaacaugcuggagaccaucaaggugacaccucagaccauggacggcauucucaaaucuauccugaaggucaaaagaucccugggcauguucgugagcgauacgcccggggaacggaauccuuaugagaacauucucuacaagaucugucugucuggagacggcuggccguauauugcgagccgcacauccaucguugggagagccugggaaaacaccacaguggaucuugagucugacggaaagccccagaaagucggcaccaccgggagcaauaagucccugcagagcgcuggauuuccuacaggccucacguacucucaacugaugacccugaaagauuccaugaugcagcuugaccccagcgccaagacauggauugauaucgagggccggccugaagaccccguggagaucgcucucuaccagccgaugucugggugcuauauucacuucuuuagagaaccuaccgaccugaaacaguucaagcaagaugccaaguacucccauggaaucgacguugccgaucuguuucccgcucagccuggccucacaagcgcggugauugaggcccugccccgcaacaugguccuuaccugucagggguccgacgauaucaaaaagcugcucgacucucagggacggagagauauuaaacugaucgacaucgcucugagcaaggccgauucccgcaaauucgaaaaugccgugugggaccaaugcaaggaucuuugucacaugcauacgggcgucgugguugagaagaaaaagagagggggcaaagaggaaauuacaccccacugcgcucucauggacuguaucauguaugaugccgcggugucuggaggccugaacauuccuguccugcgggcugugcucccgcgcgacaugguuuuucggaccagcucccccaaggugguccugugaggacuagucccuguucccagagcccacuuuuuuuucuuuuuuugaaauaaaauagccugucuuucagaucucaaaggcucuuuucagagccaccaaaaaaaaaaaaaaaaaaaaaaaaaaaaaaaaaaaaaaaaaaaaaaaaaaaaaaaaaaaaaaaaaaaaaaaaaaaaaaaaaaaaaaaaaaaaaaaaaaaaa

SEQ ID NO: 17236 - RNA, 2001 nt, Artificial Sequence
  mRNA product Design a-2 (hSL-A100) comprising derived and/or modified sequence from LASV(LASV1000-NIG-2009;Clade II)__AIT17783__NP (opt5)
aggagaguccgcucagccagguugcagaagcggcuuagcguguguccuaaucuucucucugcguguagguaggccugugccgcaaacaagcuuaccaugagcgccuccaaggaggugaaaucuuuccuguggacccagagccucagacgggaacuguccggcuacugcucuaacaucaaacuucaagucguuaaggacgcucaggcccugcuccacgggcuggauuuuagcgagguguccaaugugcagcgccuuaugagaaagcagaaacgggacgauucugaccugaagcgccucagagaucugaaccaagcggucaauaaccugguggaacucaagagcacacagcagaaauccauucugcggguuggaacgcuuaccagcgacgaucugcucacacuggcugccgaccuugagaagcugaaaucuaaggugauccgcaccgaaagaccccucuccagcggcgucuauauggggaaucugucuacacagcaacuggagcagcggcgcgcccuccugaacaugauuggaauggugggcggggcucagggaacccagccuggcagagauggcguugugcgggucugggacgugaaaaauccggaucuucugaacaaucaauucgggacaaugcccucccucacccuggccugucuuacgaagcagggacagguggaccugaacgaugucguucucgcucugaccgaccugggccucaucuacacagccaaguauccuaauagcucugaccuggaucgccuuucccaaagccaucccauucugaacaugguggacaccaaaaaguccucucucaauaucagcggguacaacuuuucccugggagcggccgugaaagcuggcgccugcaugcuugaugggggaaauaugcuggagacaaucaaggucaccccucagacgauggacggcauucucaaaagcauccugaaggugaaaaagucucugggcauguucguuuccgauacacccggggaaagaaacccuuaugagaacauucucuacaagaucugucugagcggagacggcuggccguauauugcuucucggaccagcaucguggggcgcgccugggaaaauacaaccgucgaucuugaguccgacggaaaaccccagaaggugggcaccgcggggucuaacaaaagccugcaguccgccggauuuccuacaggccucacguacagccaacugaugacccugaaggauucuaugaugcagcuugaccccuccgcuaaaacauggauugauaucgagggcagaccugaagaccccguugagaucgcccucuaccagccggugagcgggugcuauauucacuucuuucgggaaccuaccgaccugaagcaguucaagcaagaugcuaaauacucucauggaaucgacgucgccgaucuguuucccgcccagccuggccucacauccgcugugauugaggcgcugcccagaaauaugguccuuaccugucaggggagcgacgauaucaagcgccugcucgacucccagggacggagagauauuaaacugaucgacaucgcccugucuaaggcugauagccgccgguucgaaaacgccgugugggaccaaugcaaagaucuuugucacaugcauacgggcguuguggucgagaagaagaaaagagggggcaaggaggaaauuacaccccacugcgcccucauggacuguaucauguaugaugcugccguguccggaggccugaauauuccuguucugcgcgcggugcucccgcgggacauggucuuuagaaccucuagccccaaaguggugcugugaggacuagucccuguucccagagcccacuuuuuuuucuuuuuuugaaauaaaauagccugucuuucagaucucaaaggcucuuuucagagccaccaaaaaaaaaaaaaaaaaaaaaaaaaaaaaaaaaaaaaaaaaaaaaaaaaaaaaaaaaaaaaaaaaaaaaaaaaaaaaaaaaaaaaaaaaaaaaaaaaaaaa

SEQ ID NO: 17237 - RNA, 2001 nt, Artificial Sequence
  mRNA product Design a-2 (hSL-A100) comprising derived and/or modified sequence from LASV(LASV221-NIG-2010;Clade II)__AIT17625__NP (opt5)
aggagaguccgcucagccagguugcagaagcggcuuagcguguguccuaaucuucucucugcguguagguaggccugugccgcaaacaagcuuaccaugagcgccuccaaggaggugaaaucuuuccuguggacccagagccucagacgggaacuguccggcuacugcucuagcaucaaacuucaagucguuaaggacgcucaggcccugcuccacgggcuggauuuuuccgaggugucuaacgugcagcgccuuaugagaaagcagcggcgcgacgauagcgaccugaaaagacuccgggaucugaaucaagcggucaacaaucugguggaacucaaguccacacagcaaaagagcauucugcgcguuggaacgcuuaccucugacgaucugcucacacuggcugccgaccuugagaaacugaaguccaaagugaucagaaccgaacggccccucagcucuggcgucuauauggggaaccuguccacacagcagcuggagcagcgcagagcccuccugaauaugauuggaauggugggcggggcucagggaacccagccuggccgggauggcguugugcgcgucugggacgugaagaacccggaucuucugaauaaccaauucgggacaaugcccagccucacccuggccugucuuacgaaacagggacagguggaccugaaugaugcuguccucgcccugaccgaccugggccucaucuacacagcgaaguauccuaacucuuccgaccuggauagacuuagccaaucccaucccauucugaauaugguugacaccaagaaaucuagccucaacaucuccggguacaauuuuagccugggagccgcugugaaggccggcgcuugcaugcuugaugggggaaacaugcuggagacaaucaaagugaccccucagacggucgacggcauucucaagucuauccugaaagugaagcggucccugggcauguucguuagcgauacacccggggaacgcaauccuuaugagaacauucucuacaaaaucugucugucuggagacggcuggccguauauugccagcagaaccuccaucguggggcgggcgugggaaaacacaaccgucgaucuugagucugacggaaagccccagaaggugggcaccgccgggagcaauaaaucccugcagagcgcuggauuuccuacaggccucacguacucucaacugaugacccugaaggauuccaugaugcagcuugaccccagcgccaaaacauggauugauaucgagggcagaccugaagaccccguugagaucgcucucuaccagccgaugucugggugcuauauucacuucuuucgcgaaccuaccgaccugaagcaguucaaacaagaugccaaguacucccauggaaucgacguggccgaucuguuucccgcucagccuggccucacaagcgcggucauugaggcccugccccggaacauggugcuuaccugucagggguccgacgauaucaagagacugcucgacucucagggacgccgggauauuaaacugaucgacaucgcucugagcaaggccgauuccagaaaauucgaaaaugccgucugggaccaaugcaaggaucuuugucacaugcauacgggcgugguuguggagaaaaagaagcgcgggggcaaagaggaaauuacaccccacugcgcucucauggacuguaucauguaugaugccgcggucucuggaggccugaacauuccugugcugcgggcuguucucccgagagacaugguguuucgcaccagcucccccaaggucgugcugugaggacuagucccuguucccagagcccacuuuuuuuucuuuuuuugaaauaaaauagccugucuuucagaucucaaaggcucuuuucagagccaccaaaaaaaaaaaaaaaaaaaaaaaaaaaaaaaaaaaaaaaaaaaaaaaaaaaaaaaaaaaaaaaaaaaaaaaaaaaaaaaaaaaaaaaaaaaaaaaaaaaaa

SEQ ID NO: 17238 - RNA, 2001 nt, Artificial Sequence
  mRNA product Design a-2 (hSL-A100) comprising derived and/or modified sequence from LASV(LASV237-NIG-2010;Clade II)__AIT17639__NP (opt5)
aggagaguccgcucagccagguugcagaagcggcuuagcguguguccuaaucuucucucugcguguagguaggccugugccgcaaacaagcuuaccaugagcgccuccaaggaggugaaaucuuuccuguggacccagagccucagacgggaacuguccggcuacugcucuaacaucaaacuucaagucguuaaggacgcucaggcccugcuccacgggcuggauuuuagcgagguguccaaugugcagcgccuuaugagaaagcagaaacgggacgauucugaccugaagcgccucagagaucugaaccaagcggucaauaaccugguggaacucaagagcacacagcagaaauccauucugcggguuggaacgcuuaccagcgacgaucugcucacacuggcugccgaccuugagaagcugaaaucuaaggugauccgcaccgaaagaccccucuccagcggcgucuauauggggaaucugucuacacagcaacuggagcagcggcgcgcccuccugaacaugauuggaauggugggcggggcucagggaacccagccuggcagagauggcguugugcgggucugggacgugaaaaauccggaucuucugaacaaucaauucgggacaaugcccucccucacccuggccugucuuacgaagcagggacagguggaccugaacgaugcuguccucgcccugaccgaccugggccucaucuacacagcgaaguauccuaauagcucugaccuggaucgccuuucccaaagccaucccauucugaacaugguugacaucaaaaaguccucucucaauaucagcggguacaacuuuucccugggagccgcugugaaagccggcgcuugcaugcuugaugggggaaauaugcuggagaccauuaaggugacaccucagaccauggacggcauccucaaaagcauucugaaggucaaaagaucucugggcauguucguguccgauacgcccggggaacggaacccuuaugagaacauccucuacaagauuugucugagcggagacggcuggccguauaucgccucucgcacaagcauuguugggagagcgugggaaaauaccacaguggaucuugaguccgacggaaagccccagaaagucggcucugccgggagcaacaagucccugcagagcgcuggauuuccuaccggccucaccuacucucaacugaugacacugaaagauuccaugaugcagcuugaccccagcgccaagacguggaucgauaucgagggccggccugaagaccccguggagauugcucucuaccagccgaugucugggugcuauauccacuucuuuagagaaccuaccgaccugaaacaguucaagcaagaugccaaguacucccauggaauugacguugccgaucuguuucccgcucagccuggccucacaagcgcggugaucgaggcccugccccgcaauaugguccuuaccugucagggguccgacgauauuaaacggcugcucgacucucagggaagacgcgauaucaagcugaucgacauugcucugagcaaagccgauucccggagauucgaaaacgccgugugggaccaaugcaaggaucuuugucacaugcauacaggcgucgugguugagaaaaagaagcgcgggggcaaagaggaaaucacgccccacugcgcucucauggacuguauuauguaugaugccgcggugucuggaggccugaauaucccuguccugcgggcugugcucccgagagacaugguuuuucgcaccagcucccccaaggugguccugugaggacuagucccuguucccagagcccacuuuuuuuucuuuuuuugaaauaaaauagccugucuuucagaucucaaaggcucuuuucagagccaccaaaaaaaaaaaaaaaaaaaaaaaaaaaaaaaaaaaaaaaaaaaaaaaaaaaaaaaaaaaaaaaaaaaaaaaaaaaaaaaaaaaaaaaaaaaaaaaaaaaaa

SEQ ID NO: 17239 - RNA, 2001 nt, Artificial Sequence
  mRNA product Design a-2 (hSL-A100) comprising derived and/or modified sequence from LASV(LASV253-NIG-2011;Clade II)__AIT17671__NP (opt5)
aggagaguccgcucagccagguugcagaagcggcuuagcguguguccuaaucuucucucugcguguagguaggccugugccgcaaacaagcuuaccaugagcgccuccaaggaggugaaaucuuuccuguggacccagagccucagacgggaacuguccggcuacugcucuagcaucaaacuucaagucguuaaggacgcucaggcccugcuccacgggcuggauuuuuccgaggugucuaacgugcagcgccuuaugagaaagcagaaacgggacgauagcgaccugaagcgccucagagaucugaaucaagcggucaacaaucugguggaacucaaguccacccagcagaaaagcguucugcgggugggaacgcuuaccucugacgaucugcucacacuggcugccgaccuugagaagcugaaauccaaggucauucgcaccgaaagaccccucagcucuggcguguauauggggaaccuguccacacagcaacuggagcagcggcgcgcccuccugaauaugaucggaaugguuggcggggcucagggaacccagccuggcagagauggcgugguccgggugugggacgugaaaaacccggaucuucugaauaaccaauucgggacaaugcccagccucacccuggccugucuuacgaagcagggacaggucgaccugaaugauguugugcucgcucugaccgaccugggccucauuuacacagccaaguauccuaacucuuccgaccuggaucgccuuagccaaucccaucccauccugaauaugguggacaccaaaaagucuagccucaacauuuccggguacaauuuuagccugggagcggccgucaaagcuggcgccugcaugcuugaugggggaaacaugcuggagacaaucaaggugaccccucagacgauggacggcauccucaaaucuauucugaagguuaaaaagucccugggcauguucgugagcgauacacccggggaaagaaauccuuaugagaacauccucuacaagauuugucugucuggagacggcuggccguauaucgcuagccggaccuccauugucgggcgcgccugggaaaacacaaccguggaucuugagucugacggaaaaccccagaagguuggcaccgcggggagcaauaaaucccugcagagcgccggauuuccuacaggccucacguacucucaacugaugacccugaaggauuccaugaugcagcuugaccccagcgcuaaaacauggaucgauauugagggcagaccugaagaccccguggagaucgcccucuaccagccgaugucugggugcuauauccacuucuuucgggaaccuaccgaccugaagcaguucaagcaagaugcuaaauacucccauggaauugacgucacagaucuguuucccgcccagccuggccucaccagcgccgugaucgaggcucugcccagaaacaugguccuuacgugucagggguccgacgauauuaagcgccugcucgacucucagggacggagagauaucaaacugauugacaucgcgcugagcaaggccgauucccgccgguucgaaaaugcugugugggaccaaugcaaagaucuuugucacaugcauacaggcguuguggucgagaagaagaaaagagggggcaaggaggaaaucacaccccacugcgcccucauggacuguauuauguaugaugccgcugugucuggaggccugaacaucccuguucugcgcgccgugcucccgcgggacauggucuuuagaaccagcucccccaaaguggugcugugaggacuagucccuguucccagagcccacuuuuuuuucuuuuuuugaaauaaaauagccugucuuucagaucucaaaggcucuuuucagagccaccaaaaaaaaaaaaaaaaaaaaaaaaaaaaaaaaaaaaaaaaaaaaaaaaaaaaaaaaaaaaaaaaaaaaaaaaaaaaaaaaaaaaaaaaaaaaaaaaaaaaa

SEQ ID NO: 17240 - RNA, 2001 nt, Artificial Sequence
  mRNA product Design a-2 (hSL-A100) comprising derived and/or modified sequence from LASV(LASV254-NIG-2011;Clade II)__AIT17675__NP (opt5)
aggagaguccgcucagccagguugcagaagcggcuuagcguguguccuaaucuucucucugcguguagguaggccugugccgcaaacaagcuuaccaugagcgccuccaaggaggugaaaucuuuccuguggacccagagccucagacgggaacuguccggcuacugcucuagcaucaaacuucaagucguuaaggacgcucaggcccugcuccacgggcuggauuuuuccgaggugucuaacgugcagcgccuuaugagaaagcagaaacgggacgauagcgaccugaagcgccucagagaucugaaucaagcggucaacaaucugguggaacucaaguccacacagcagaaaagcguucugcgggugggaacgcuuaccucugacgaucugcucacacuggcugccgaccuugagaagcugaaauccaaggucauucgcaccgaaagaccccucagcucuggcguguauauggggaaccuguccacacagcaacuggagcagcggcgcgcccuccugaauaugaucggaaugguuggcggggcucagggaacccagccuggcagagauggcgugguccgggugugggacgugaaaaacccggaucuucugaauaaccaauucgggacaaugcccagccucacccuggccugucuuacgaagcagggacaggucgaccugaaugaugcuguucucgcccugaccgaccugggccucauuuacacagcgaaguauccuaacucuuccgaccuggaucgccuuagccaaucccaucccauccugaauaugguggacaccaaaaagucuagccucaacauuuccggguacaauuuuagccugggagccgcugugaaagccggcgcuugcaugcuugaugggggaaacaugcuggagacaaucaaggucaccccucagacgauggacggcauccucaaaucuauucugaaggugaaaaagucccugggcauguucguuagcgauacacccggggaaagaaauccuuaugagaacauccucuacaagauuugucugucuggagacggcuggccguauaucgccagccggaccuccauuguggggcgcgcgugggaaaacacaaucgucgaucuugagucugacggaaaaccccagaaggugggcaccgccgggagcaauaaaucccugcagagcgcuggauuuccuaccggccucacauacucucaacugaugacgcugaaggauuccaugaugcagcuugaccccagcgccaaaaccuggauugauaucgagggcagaccugaagaccccguugagaucgcucucuaccagccgaugucugggugcuauauucacuucuuucgggaaccuacagaccugaagcaguucaagcaagaugccaaauacucccauggaaucgacguggccgaucuguuucccgcucagccuggccucaccagcgcggucauugaggcccugcccagaaacauggugcuuacaugucagggguccgacgauaucaagcgccugcucgacucucagggacggagagauauuaaacugaucgacaucgcucugagcaaggccgauucccgccgguucgaaaaugccgucugggaccaaugcaaagaucuuugucacaugcauaccggcgugguuguggagaagaagaaaagagggggcaaggaggaaauuacgccccacugcgcucucauggacuguaucauguaugaugccgcggucucuggaggccugaacauuccugugcugcgcgcuguucucccgcgggacaugguguuuagaacaagcucccccaaagucgugcugugaggacuagucccuguucccagagcccacuuuuuuuucuuuuuuugaaauaaaauagccugucuuucagaucucaaaggcucuuuucagagccaccaaaaaaaaaaaaaaaaaaaaaaaaaaaaaaaaaaaaaaaaaaaaaaaaaaaaaaaaaaaaaaaaaaaaaaaaaaaaaaaaaaaaaaaaaaaaaaaaaaaaa

SEQ ID NO: 17241 - RNA, 2001 nt, Artificial Sequence
  mRNA product Design a-2 (hSL-A100) comprising derived and/or modified sequence from LASV(Nig08-04;Clade II)__ADU56611__NP (opt5)
aggagaguccgcucagccagguugcagaagcggcuuagcguguguccuaaucuucucucugcguguagguaggccugugccgcaaacaagcuuaccaugagcgccuccaaggaggugaaaucuuuccuguggacccagagccucagacgggaacuguccggcuacugcucuaacaucaaacuucaagucguuaaggacgcucaggcccugcuccacgggcuggauuuuagcgagguguccaaugugcagcgccuuaugagaaagcagaaacgggacgauggagaccugaagcgccucagagaucugaaccaagcggucaauaaccugguggaacucaagucuacccagcagaaaagcguucugcgggugggcacgcuuaccuccgacgaucugcucacacuggcugccgaccuugagaagcugaaaagcaaggucauucgcaccgaaagaccccucucuuccgggguguauaugggaaaucugagcacacagcaacuggagcagcggaaagcccuccugucuaugaucggcaugguugggggagcucagggcacccagccuggccgcgaugggguggucagagugugggacgugaagaacccggaucuucugaauaaccaauucggaacaaugcccucccucacccuggccugucuuacgaagcagggccaggucgaccugaaugaugcuguucucgcccugaccgaccuggggcucauuuacacagcgaaauauccuaacagcucugaccuggaucggcuuucccaaagccaucccauccugaauaugguggacaccaagaaauccucucucaacauuagcggauacaauuuuucccugggcgccgcugugaaggccggggcuugcaugcuugauggaggcaacaugcuggagacaaucaaagucaccccucagacgauggacggcauccucaagagcauucugaaagugaagcgcucucuggggauguucguuuccgauacacccggagaaagaaauccuuaugagaacauccucuacaagauuugucugagcggcgacggguggccguauaucgccucucggaccagcauugugggacgcgcgugggaaaacacaaccgucgaucuugaguccgacggcaaaccccagaagguggggaccgccggaucuaauaaaagccugcaguccgcuggcuuuccuacaggccucacguacagccaacugaugacccugaaggauucuaugaugcagcuugaccccuccgccaaaacauggaucgauauugaggggagaccugaagaccccguugagaucgcucucuaccagccgaugagcggaugcuauauccacuucuuucgggaaccuaccgaccugaagcaguucaagcaagaugccaaauacucucauggcauugacgugacagaucuguuuuccgcccagcccgggcucaccagcgcugucaucgaggcgcugccuagaaacauggugcuuacgugucagggauccgacgauauuaagaaacugcucgacucucagggccgccgggauaucaagcugauugacaucagccugaauaaagccgauuccagacgcuucgaaaacgcugucugggaccaaugcaaggaucuuugucacaugcauacaggggugguuguggagaagaaaaagcggggcggaaaagaggaaaucacaccccacugcgcccucauggacuguauuauguuugaugccgcugucucuggcgggcugaauauccccauucugagagccgugcucccucgcgacaugguuuuccggaccagcuccccgaaggugguccugugaggacuagucccuguucccagagcccacuuuuuuuucuuuuuuugaaauaaaauagccugucuuucagaucucaaaggcucuuuucagagccaccaaaaaaaaaaaaaaaaaaaaaaaaaaaaaaaaaaaaaaaaaaaaaaaaaaaaaaaaaaaaaaaaaaaaaaaaaaaaaaaaaaaaaaaaaaaaaaaaaaaaa

SEQ ID NO: 17242 - RNA, 2004 nt, Artificial Sequence
  mRNA product Design a-2 (hSL-A100) comprising derived and/or modified sequence from LASV(GA391;Clade III)__AAA46284__NP (opt5)
aggagaguccgcucagccagguugcagaagcggcuuagcguguguccuaaucuucucucugcguguagguaggccugugccgcaaacaagcuuaccaugagcgccuccaaggaggugagaucuugccuguggacccagagccuccggcgcgaacuguccggcuacuguucuaacaucaaacuucaagucguuaaggacgcucaggcccugcuccacgggcuggauuucagcgagguguccaaugugcagagacuuaugcggaaacagaagcgcgacgauggagaccugaaaagacuccgggaucugaaccaagcggucaauaaccugguggaacucaagucuacacagcagaaaagcguucugcgcgugggcacgcuuuccagcgacgaucugcucauucuggcugccgaccuugagaaacugaagucuaaagucaccagaacagaacggccccucuccagcgggguguauaugggaaaucugucuucccagcaacuggaucagcgcagagcccuccugaacaugaucggcaugaccgggguuagcggaggcggcaagggggcuucuaauggaauugugcgggucugggacgugaaaaacgccgagcuucugaauaaccaguuuggcacaaugccuucccucacccuggcuugccuuacaaagcaggggcaaguggaucugaaugacgccguccaggcgcucaccgaucugggacugaucuacacggccaaguauccgaacagcuccgaccucgaccgccugucucagagccaucccauucuuaauaugaucgauaccaaaaaguccagccugaacaucucuggcuacaauuucucccucggggcugccguuaaagcuggagccuguaugcuggacggcggcaacaugcuugagacaauuaaggugagcccucaaaccauggaugggauccugaaaucuauucucaaggugaaaaagagccugggaauguuugucuccgacacacccggcgaaagaaacccuuaugagaauauccuguacaagauuugccucucuggggauggauggagcuauaucgcgucccggaccagcauugugggccgcgccugggaaaacacgguuguggaccuggagcaggauaauaaaccccagaagaucgggaacggaggcucuaauaaaucccuucagagcgcuggcuucgccgcugggcugaucuacucucaacucaugacacugaaggacuuuaaauguuucaaccugauuccuaaugccaagaccuggauggauaucgagggaagaccggaagaccccgucgagauugcccuuuaccagccuuccagcggcugcuaugugcacuuuuuccgggaacccacagaucucaagcaguuuaaacaggacgcuaaguacucccaugggagagacguuaccgaucuguucgcggcccaaccuggacugaccucugcugugaucgaggcccucccccgcaacauggucauuacaugucagggcagcgaagacauccggaaacugcuugagucccaggggagacgcgauaucaagcugauugacaucacgcucucuaaagccgauagccggaaguuugagaaugcugugugggaccaguucaaggaucugugccacaugcauaccggcgucgugguugaaaagaagaaaagaggaggcaaggaggaaauuacaccgcacugugcccugauggacugcaucauguuugaugcggcuguguccgggggacuugacgccaaaguccuccgcgugguucugccucgggauaugguguucagaaccagcacacccaaggucgugcugugaggacuagucccuguucccagagcccacuuuuuuuucuuuuuuugaaauaaaauagccugucuuucagaucucaaaggcucuuuucagagccaccaaaaaaaaaaaaaaaaaaaaaaaaaaaaaaaaaaaaaaaaaaaaaaaaaaaaaaaaaaaaaaaaaaaaaaaaaaaaaaaaaaaaaaaaaaaaaaaaaaaaa

SEQ ID NO: 17243 - RNA, 2001 nt, Artificial Sequence
  mRNA product Design a-2 (hSL-A100) comprising derived and/or modified sequence from LASV(Nig08-A19;Clade III)__ADU56619__NP (opt5)
aggagaguccgcucagccagguugcagaagcggcuuagcguguguccuaaucuucucucugcguguagguaggccugugccgcaaacaagcuuaccaugagcgccuccaaggaggugaaaucuuuccuguggacccagagccucagacgggaacuguccggcuacugcucuaacaucaaacuucaagucguuaaggacgcucaggcccugcuccacgggcuggauuuuagcgagguguccaaugugcagcgccuuaugagaaagcagaaacgggacgauggagaccugaagcgccucagagaucugaaccaagcggucaauaaccugguggaacucaagucuacacagcagaaaagcguucugcgggugggcacgcuuuccagcgacgaucugcucguccuggcugccgaccuugagaagcugaaaucuaaggugguucgcaccgaaagaccccucuccagcgggauuuauaugggaaaucugucuucccagcaacuggaucagcggaaagcccuccugaacaugaucggcaugacagggggaaauggcggccgcaacaccacaagcgacgggauugugagagucugggaugugaagaaugcugagcuucugaacaaucaguucggaaccaugccuucucucacacuggccugucuuaccaagcagggccaaguggaccugaacgaugcuguccaggcccucacggaccuggggcugaucuacaccgcgaaauaucccaauuccagcgaccucgaucggcuggcccagucccauccgauucuuaacaugaucgacacaaagaaaucuagccugaauaucuccggauacaacuuuagccucggcgcugccguuaaggcuggggccugcaugcuggauggaggcaacaugcuugagaccauuaaagugucuccucaaacaauggacggcauccugaaguccauucucaaagugaagcgcagccuggggauguucaucucugauacccccggagaaagaaauccuuaugagaacauucuguacaagaucugucucagcggcgacggguggcccuauauugcgucccggacgucuaucgucggacgcgccugggaaaauacagugguugaucuggagagcgacaacaaaccucagaagaccggcaaugggggauccaacaaaagccuucagucugcuggcuuugccgcuggccugacauacucccagcucaugacccugaaggauagcaugcugcaacuugacccgaaugccaaaaccuggauggauaucgaggggagacccgaagacccuguggagauugcccucuaccagcccucuuccggaugcuauauccacuucuuucgggaaccuacagaccugaagcaguucaagcaggaugcuaaauacagccauggcauugacgucacggaucuguuugcggcccaacccgggcucaccuccgcugugaucgaggcccugccgagaaacaugguuauuacaugucagggaucugaagacauccgcaaacuucuggagagccagggccggagagauaucaagcucauugacaucucccugucuaagguggauagccgcaaauucgagaaugccgucugggaccaguuuaaggaucugugccacaugcauaccgggauuguggucgaaaagaaaaagcggggcggaaaagaggaaaucacaccucacugugcucuuauggacugcauuauguucgaugccgcgguguccggcgggguugacgcuaaggugcucagagccguccugccccgcgauaugguguuucggaccagcacgccuaaaguugugcugugaggacuagucccuguucccagagcccacuuuuuuuucuuuuuuugaaauaaaauagccugucuuucagaucucaaaggcucuuuucagagccaccaaaaaaaaaaaaaaaaaaaaaaaaaaaaaaaaaaaaaaaaaaaaaaaaaaaaaaaaaaaaaaaaaaaaaaaaaaaaaaaaaaaaaaaaaaaaaaaaaaaaa

SEQ ID NO: 17244 - RNA, 2001 nt, Artificial Sequence
  mRNA product Design a-2 (hSL-A100) comprising derived and/or modified sequence from LASV(G1180-SLE-2010;Clade IV)__AIT17169__NP (opt5)
aggagaguccgcucagccagguugcagaagcggcuuagcguguguccuaaucuucucucugcguguagguaggccugugccgcaaacaagcuuaccaugagcgccuccaaggagaucaaaucuuuccuguggacccagagccucagacgggaacuguccggcuacugcucuaacauuaagcugcaaguggucaaagacgcucaggcccugcuccacgggcuggauuuuagcgagguuuccaaugugcagcgccuuaugagaaaggaacggcgcgacgauaacgaccugaaaagacuccgggaucugaaucaggcggugaacaaucuggucgagcucaagucuacacaacaaaagagcauccugcgcgugggaacgcuuaccuccgacgaucugcucauucuggcugccgaccuugaaaaacuuaagagcaaaguuaucagaacagagcggccccucucugccggcguguauauggggaaccuguccagccagcagcuggaucagcgcagagcucuccugucuaugauuggaauguccagcggcaaucagcgggcccaggcugggcgcgacggagucgugagaguuugggaugugaagaacgucgagcuucugaauaaccaguucggcaccaugccuucucucacacuggccugucuuaccaaacaaggccagguggaccugaaugaugcggugcaggcccucacagaccuggggcugaucuacaccgcuaaguauccgaacacguccgaccucgaucggcugacccaaagccaucccauccuuaauaugauugacacaaagaaauccucucugaacaucagcggauacaauuuuucccucggcgccgcugucaaggccggggcgugcaugcuggauggaggcaacaugcuugaaaccauuaaaguuagcccucagacaauggacgggauccugaagucuauucucaaagugaagaaagcccugggaauguucaucuccgauacccccggcgagcgcaacccuuaugaaaauauucuguacaagaucugucucagcggcgacggguggcccuauaucgcuucuagaacgagcauuacaggacgggccugggagaacaccguggucgaucuggaguccgacggcaagccucagaaagcugggucuaauaacagcaauaagucccuucagagcgugggauuuacagccggccugaccuacucucaacucaugacccugaaagaugccaugcugcagcuugacccgaacgcuaagacauggauggauaucgaagggagacccgaggacccuguugaaauugcgcucuaccagcccuccagcggaugcuauauccacuucuuucgcgagccuacggaccugaaacaguucaagcaagaugccaaguacucucauggcauugacgugaccgaucuguuugcugcccagcccggccucacauccgccgucaucgacgcucugccgcggaauauggugaucaccugucaggggagcgaugacauuagaaaacuucuggaaucccagggacgcaaggauaucaaacucauugacaucgcccugucuaagacagauagccggaaauaugagaacgcgguuugggaccaauacaaggaucugugccacaugcauaccggcguggucguggagaagaaaaagagagggggaaaagaagagauuacgccucacugugcucuuauggacugcaucauguucgaugccgccgucuccggcgggcucaauacaucugugcugcgcgcuguucugccccgggacaugguguuuagaaccagcaccccucgcgucgugcucugaggacuagucccuguucccagagcccacuuuuuuuucuuuuuuugaaauaaaauagccugucuuucagaucucaaaggcucuuuucagagccaccaaaaaaaaaaaaaaaaaaaaaaaaaaaaaaaaaaaaaaaaaaaaaaaaaaaaaaaaaaaaaaaaaaaaaaaaaaaaaaaaaaaaaaaaaaaaaaaaaaaaa

SEQ ID NO: 17245 - RNA, 2001 nt, Artificial Sequence
  mRNA product Design a-2 (hSL-A100) comprising derived and/or modified sequence from LASV(G1442-SLE-2011;Clade IV)__AIT17181__NP (opt5)
aggagaguccgcucagccagguugcagaagcggcuuagcguguguccuaaucuucucucugcguguagguaggccugugccgcaaacaagcuuaccaugagcgccuccaaggaggugaaaucuuuccuguggacccagagccucagacgggaacuguccggcuacugcucuaacaucaaacuucaagucguuaaggacgcucaggcccugcuccacgggcuggauuuuagcgagguguccaaugugcagcgccuuaugagaaagcagcggcgcgacgauaacgaccugaaaagacuccgggaucugaaucaagcggucaacaaucugguggaacucaagucuacacagcaaaagagcguucugcgcgugggaacgcuuaccuccgacgaucugcucguccuggcugccgaccuugagaaacuuaagagcaaagugauuagaacagaacggccccucucugccggcguuuauauggggaaccuguccagccagcagcuggaucagcgcagagcucuccugaauaugaucggaaugucuggcgggauucagggaacccggacaggccgcgacggcguggucagagugugggaugugaagaacgccgaccuucugaauaaccaguucgggaccaugccuucccucacacuggcuugucuuaccaaacaaggacaggucgaucugaaugacguugugcaggcccucacggaccugggccugaucuacaccgcgaaguauccgaacgccagcgaucucgaccggcugacacaaucucaucccauucuuaauaugaucgauaccaagaaauccagccugaacaucuccggguacaauuuuucucucggagcugccgugaaggcuggcgccugcaugcuggacgggggaaacaugcuugagacaauuaaagucagcccucagaccauggauggcauccugaaguccauucucaaagugaagaaaacgcugggcauguucaucagcgacacacccggggagcgcaacccuuaugaaaauauucuguacaagaucugucucucuggagauggcuggcccuauauugcguccagaaccagcaucacagggcgggccugggagaacaccguuguggaccuggaaucugauggaaagccucagaaagcuggcagcaauaacuccaauaagucucuucagagcgccggguuugcugccggacugaccuacucccaacucaugacacugaaagacgccaugcugcagcuugauccgaacgcuaagacguggauggacaucgagggcagacccgaggacccugucgaaauugcgcucuaccagcccagcucuggcugcuauauccacuucuuucgcgagccuaccgaucugaaacaguucaagcaagacgccaaguacucccaugggauugaugugacagaccuguuugcugcccagcccggacucaccagcgccguuaucgaagcucugccgcggaauauggugauuacaugucagggcucugaugacaucaaaaagcugcuggagucccaggggagaaaagauaucaagcucauugacaucgcccugagcaaaaccgauucccgcaaguaugaaaacgcggucugggaccaauacaaggaucugugccacaugcauacgggaguggucguggagaaaaagaaacggggcgggaaggaggaaauuacaccucacugugcucuuauggacugcaucauguucgaugccgccguuucuggcggacucaauacccuggugcugagagcuguccucccccgcgacaugguguuucggaccagcacaccuagaguugugcugugaggacuagucccuguucccagagcccacuuuuuuuucuuuuuuugaaauaaaauagccugucuuucagaucucaaaggcucuuuucagagccaccaaaaaaaaaaaaaaaaaaaaaaaaaaaaaaaaaaaaaaaaaaaaaaaaaaaaaaaaaaaaaaaaaaaaaaaaaaaaaaaaaaaaaaaaaaaaaaaaaaaaa

SEQ ID NO: 17246 - RNA, 2001 nt, Artificial Sequence
  mRNA product Design a-2 (hSL-A100) comprising derived and/or modified sequence from LASV(G3010-SLE-2013;Clade IV)__AIT17345__NP (opt5)
aggagaguccgcucagccagguugcagaagcggcuuagcguguguccuaaucuucucucugcguguagguaggccugugccgcaaacaagcuuaccaugagcgccuccaaggagaucaaaucuuuccuguggacccagagccucagacgggaacuguccggcuacugcucuaacauuaaacuucaaguggucaaagacgcucaggcccugcuccacgggcuggauuuuagcgagguuuccaaugugcagcgccuuaugagaaaggaacggcgcgacgauaacgaccugaaaagacuccgggaucugaaucaggcggugaacaaucuggucgagcucaagucuacacaacaaaagagcauccugcgcgugggaacgcuuaccuccgacgaucugcucauucuggcugccgaccuugaaaaacuuaagagcaaaguuacaagaaccgagcggccccucucugccggcguguauauggggaaccuguccagccagcagcuggaucagcgcagagcucuccugucuaugaucggaauguccagcggcguccagggggcccgggcuggacgcgacggcgugguuagagugugggaugucaagaaugccgagcuucugaacaaucaguucggcacaaugccuucucucacccuggcgugucuuacaaaacaggggcaaguggaccugaacgaugugguccaggcccucaccgaccugggacugauuuacacggcuaaguauccgaauaccuccgaccucgaucggcugacacagagccaucccauccuuaacaugaucgacaccaagaaauccucucugaauauuagcggcuacaacuuuucccucggggccgcuguuaaggccggagcgugcaugcuggauggcgggaauaugcuugaaacaaucaaagugagcccucaaaccauggacggcauucugaagucuauccucaaagugaagaaagcccugggaauguucauuuccgagacgcccggcgaacgcaacccuuaugagaacauccuguacaagauuugucucagcggggauggauggcccuauaucgcuucuagaacaagcaucaccggccgggccugggagaauacagucguggaccuggaauccgaugggaagccucagaaagcuggaucuaacaauagcaacaagucccuucagagcgccggcuuuaccgccgggcugaccuacucucagcucaugacacugaaagacgcuaugcugcaacuugauccgaaugcgaagacguggauggacauugagggaagacccgaagauccuguugagguggcccucuaccagcccuccagcggcugcuauauccacuucuuucgcgaaccuaccgaccugaaacaguucaagcaggacgcuaaguacucucauggcauugaugucacagaccuguuugccgcccaacccgggcucaccuccgcugugaucgaugcccugccgcggaacaugguuauuacaugucagggaagcgacgauaucaaaaagcugcuggagucccagggcagaaaagacaucaagcucauugauaucgcgcugucuaaaaccgacagccgcaaguaugagaaugcugugugggaucaguacaaggaccugugccacaugcauacgggggucguggucgaaaagaagaaacggggaggcaaggaggaaauuacaccucacugugcccuuauggauugcaucauguucgacgccgcuguguccgggggccucaacaccucuguucugagagccgugcugccccgcgauauggucuuucggaccagcacaccuagagugguucucugaggacuagucccuguucccagagcccacuuuuuuuucuuuuuuugaaauaaaauagccugucuuucagaucucaaaggcucuuuucagagccaccaaaaaaaaaaaaaaaaaaaaaaaaaaaaaaaaaaaaaaaaaaaaaaaaaaaaaaaaaaaaaaaaaaaaaaaaaaaaaaaaaaaaaaaaaaaaaaaaaaaaa

SEQ ID NO: 17247 - RNA, 2001 nt, Artificial Sequence
  mRNA product Design a-2 (hSL-A100) comprising derived and/or modified sequence from LASV(G502-SLE-2009;Clade IV)__AIT17127__NP (opt5)
aggagaguccgcucagccagguugcagaagcggcuuagcguguguccuaaucuucucucugcguguagguaggccugugccgcaaacaagcuuaccaugagcgccuccaaggagaucaaaucuuuccuguggacccagagccucagacgggaacuguccggcuacugcucuaacauuaagcugcaaguggucaaagacgcucaggcccugcuccacgggcuggauuuuagcgagguuuccaaugugcagcgccuuaugagaaaggaacggcgcgacgauaacgaccugaaaagacuccgggaucugaaucaggcggugaacaaucuggucgagcucaagucuacacaacaaaagagcauccugcgcgugggaacgcuuaccuccgacgaucugcucauucuggcugccgaccuugaaaaacuuaagagcaaaguuaucagaacagagcggccccucucugccggcguguauauggggaaccuguccagccagcagcuggaucagcgcagagcucuccugucuaugauuggaauguccggcgggaaucagggaguccgggccggcaaggacggcgugguucgcgugugggaugucaaaaacgcugagcuucugaauaaccaguucgggaccaugccuagccucacacuggccugucuuaccaagcagggacaaguggaccugaaugaugcggugcaggcccucacagaccugggccugaucuacaccgcuaaguauccgaacacgucugaccucgauagacugacccagucccaucccauccuuaauaugauugacaccaaaaagagcucccugaacaucucuggguacaauuuuagccucggagccgcugucaaagccggcgcgugcaugcuggaugggggaaacaugcuugaaacaauuaagguuuccccucaaacaauggacggcauccugaaaagcauucucaaggugaaaaaggcccugggcauguucaucucugauacccccggggagcggaacccuuaugaaaauauucuguacaagaucugucucuccggagacggcuggcccuauaucgcuagccgcacgucuauuacagggagagccugggagaacaccguggucgaucuggagagcgacggaaaaccucagaaggcuggcuccaauaacucuaauaaaagccuucaguccgccggguuuacagccggacugaccuacagccagcucaugacccugaaggaugcuaugcugcaacuugacccgaacacaaaaacguggauggauaucgaaggccggcccgaggacccuguggaaauugcgcucuaccagcccucuuccggcugcuauauccacuucuuuagagagccuaccgaccugaagcaguucaagcaggaugccaaauacagccaugggauugacguuacagaucuguuugcugcccaacccggacucaccucugccgugaucgacgcucugccgcgcaauauggucaucacaugucagggcuccgaugacauucggaaacuucuggaaagccaggggagaaaggauaucaagcucauugacaucgcccugaacaaaaccgauucccgcaaguaugagaaugcggugugggaccaguacaaggaucugugccacaugcauacgggaguuguggucgagaaaaagaaacggggcgggaaggaagagauuacaccucacugugcucuuauggacugcaucauguucgaugccgccgugucuggcggacucaacaccagcguccugagagcugugcugccccgcgacaugguuuuucggaccuccacaccuagagugguccucugaggacuagucccuguucccagagcccacuuuuuuuucuuuuuuugaaauaaaauagccugucuuucagaucucaaaggcucuuuucagagccaccaaaaaaaaaaaaaaaaaaaaaaaaaaaaaaaaaaaaaaaaaaaaaaaaaaaaaaaaaaaaaaaaaaaaaaaaaaaaaaaaaaaaaaaaaaaaaaaaaaaaa

SEQ ID NO: 17248 - RNA, 2001 nt, Artificial Sequence
  mRNA product Design a-2 (hSL-A100) comprising derived and/or modified sequence from LASV(G733-SLE-2010;Clade IV)__AIT17155__NP (opt5)
aggagaguccgcucagccagguugcagaagcggcuuagcguguguccuaaucuucucucugcguguagguaggccugugccgcaaacaagcuuaccaugagcgccuccaaggagaucaaaucuuuccuguggacccagagccucagacgggaacuguccggcuacugcucuaacauuaagcugcaaguggucaaagacgcucaggcccugcuccacgggcuggauuuuagcgagguuuccaaugugcagcgccuuaugagaaaggaacggcgcgacgauaacgaccugaaaagacuccgggaucugaaucaggcggugaacaaucuggucgagcucaagucuacacaacaaaagagcgugcugcgcguuggaacgcuuaccuccgacgaacugcucgugcuggcugccgaucuugagaaacuuaagagcaaagucaucagaacagagcggccccucucugccggcguguauauggggaaccuguccagccagcagcuggaccagcgcagagcucuccugucuaugauuggaauguccggcgggaaucagggagcccggaccggccgcgauggcguugugagagucugggacgugaagaacgcugaacuucugaauaaccaguucgggacaaugccuagccucacccuggccugucuuacaaaacagggacaaguggaucugaaugacgcgguccaggcccucaccgaucugggccugaucuacacggcuaaguauccgaacaccucugaccucgaccggcugacacagucccaucccauucuuaauaugaucgauaccaagaaaagcucccugaacaucucuggguacaauuuuagccucggagccgcuguuaaggccggcgcgugcaugcuggacgggggaaacaugcuugagacaauuaaaguguccccucaaaccauggauggcauccucaagagcauucugaaagugaagaaagcccugggcauguucaucucugacacgcccggggaacgcaacccuuaugagaauauucuguacaagaucugucucuccggagauggcuggcccuauauugcuagcagaacaucuaucaccgggcgggccugggagaacacagucguggaccuggaaagcgauggaaagccucagaaagcuggcuccaauaacucuaauaagagccuucaguccgccggguuuaccgccggacugaccuacagccagcucaugacacugaaagacgcuaugcugcaacuugauccgaacgcgaagacguggauggacaucgagggcagacccgaagauccuguugagauugcccucuaccagcccucuuccggcugcuauauccacuucuuucgcgaaccuaccgaccugaaacaguucaagcaggacgcuaaguacagccaugggauugaugugacagaccuguuugccgcccaacccggacucaccucugcugucaucgaugcccugccgcggaauauggugauuacaugucagggcuccgacgauaucagaaaacuucuggagagccaggggcgcaaggacaucaaacucauugauaucgcgcuguccaagauugacucucggaaauaugagaacgcuguuugggaucaguacaaggaccugugccacaugcauaccggaguggucguggaaaagaaaaagagaggcgggaaagaggaaaucacgccucacugugcccuuauggauugcauuauguucgacgccgcugucagcggcggacucaauucccuggugcugcgcgccguucucccccgggauaugguguuuagaacaucuaccccucgcgucgugcugugaggacuagucccuguucccagagcccacuuuuuuuucuuuuuuugaaauaaaauagccugucuuucagaucucaaaggcucuuuucagagccaccaaaaaaaaaaaaaaaaaaaaaaaaaaaaaaaaaaaaaaaaaaaaaaaaaaaaaaaaaaaaaaaaaaaaaaaaaaaaaaaaaaaaaaaaaaaaaaaaaaaaa

SEQ ID NO: 17249 - RNA, 2001 nt, Artificial Sequence
  mRNA product Design a-2 (hSL-A100) comprising derived and/or modified sequence from MOPV/LASV reassortant(IGS-1;Clade IV)__AFY05578__NP (opt5)
aggagaguccgcucagccagguugcagaagcggcuuagcguguguccuaaucuucucucugcguguagguaggccugugccgcaaacaagcuuaccaugagcgccuccaaggagaucaaaucuuuccuguggacccagagccucagacgggaacuguccggcuacugcucuaacauuaaacuucaaguggucaaggacgcucaggcccugcuccacgggcuggauuuuagcgagguuuccaaugugcagcgccuuaugagaaaggaacggcgcgacgauaacgaccugaaaagacuccgggaucugaaucaggcggugaacaaucuggucgagcucaagucuacacaacaaaagagcauccugcgcgugggaacgcuuaccuccgacgaucugcucauucuggcugccgaccuugaaaaacugagaagcaagguuauccggacagagcgcccccucucugccggcguguauauggggaaccuguccagccagcagcuggaucagagacgggcucuccugaauaugauuggaaugucuggcgggaaccagggagcccgcgcuggcagagacggcgucgugcggguuugggaugugaaaaaugccgagcuucuguccaaccaguucgggaccaugccuagccucacacuggcgugucuuaccaagcagggacaagucgaccugaaugaugccgugcaggcucucacagaccugggccugaucuacaccgccaaauauccgaacacgucugaccucgaucgccugacccagucccaucccauccuuaauaugauugacacaaagaaaagcucccugaacaucucuggguacaauuuuagccucggagcugccgugaaggcgggcgccugcaugcuggaugggggaaacaugcuugaaaccauuaaggucuccccucaaacaauggacggcauccugaaaagcauucucaagguuaaaaaggcucugggcauguucaucucugauacccccggggagagaaacccuuaugaaaauauucuguacaaaaucugucucuccggagacggcuggcccuauaucgccagccggacgucuauuacagggagagcuugggagaacaccgugguggaucuggagagcgacggaaagccucagaaggccgauuccaauaacucuagcaaaucccuucagagcgccggcuuuacagcugggcugaccuacucucagcucaugacccugaaggacgcgaugcugcaacuugauccgaaugccaaaacauggauggacaucgaaggacgccccgaggacccugucgaaauugcucucuaccagcccuccagcggcugcuauauccacuucuuucgggagccuacggaucugaagcaguucaaacaggacgccaaguacucucauggcauugaugugaccgaccuguuugccacacaacccgggcucaccuccgcuguuaucgaugcccugccgagaaacauggugaucacaugucagggaagcgacgauauucgcaaacuucuggaaucccagggccggaaggacaucaagcucauugauaucgaccugucuaaaaccgauagcagaaaguaugagaaugcggucugggaccaguacaaagaucugugccacaugcauacgggggugguuguggagaagaagaaacgcggaggcaaggaagagauuacaccucacugugcucuuauggacugcaucauguucgacgccgccgucuccgggggccucaacaccucugugcugcgggcuguccugcccagagauaugguguuucgcaccagcacaccucggguugugcucugaggacuagucccuguucccagagcccacuuuuuuuucuuuuuuugaaauaaaauagccugucuuucagaucucaaaggcucuuuucagagccaccaaaaaaaaaaaaaaaaaaaaaaaaaaaaaaaaaaaaaaaaaaaaaaaaaaaaaaaaaaaaaaaaaaaaaaaaaaaaaaaaaaaaaaaaaaaaaaaaaaaaa

SEQ ID NO: 17250 - RNA, 2001 nt, Artificial Sequence
  mRNA product Design a-2 (hSL-A100) comprising derived and/or modified sequence from LASV(LM765-SLE-2012;Clade IV)__AIT17815__NP (opt5)
aggagaguccgcucagccagguugcagaagcggcuuagcguguguccuaaucuucucucugcguguagguaggccugugccgcaaacaagcuuaccaugagcgccuccaaggagaucaaaucuuuccuguggacccagagccucagacgggaacuguccggcuacugcucuaacauuaagcugcaaguggucaaagacgcucaggcccugcuccacgggcuggauuuuagcgagguuuccaaugugcagcgccuuaugagaaaggaacggcgcgacgauaacgaccugaaaagacuccgggaucugaaucaggcggugaacaaucuggucgagcucaagucuacacaacaaaagagcauccugcgcgugggaacgcuuaccuccgacgaucugcucauucuggcugccgaccuugaaaaacuuaagagcaaaguuacaagaaccgagcggccccucucugccggcguguauauggggaaccuguccagccagcagcuggaucagcgcagagcucuccuggacaugaucggaaugucuggcuccaaucagggggcccgggcuggacgcgauggcgucgugagaguuugggacgugaagaacgccgagcuucugaauaaccaguucggcacaaugccuagccucacccuggcgugucuuacaaaacaggggcaagucgaucugaaugacgccgugcaggcucucaccgaccugggacugauuuacacggccaaguauccgaacaccucugaucucgaccggcugacacagucccaucccauccuuaauaugaucgauaccaagaaaagcucccugaacauuucuggcuacaauuuuagccucggggcugccgugaaggcgggagccugcaugcuggacggcgggaacaugcuugaaacaaucaaagucuccccucaaaccauggauggcauucucaagagcauccugaaaguuaagaaagcucugggaauguucauuucugacgcccccggcgagcgcaacccuuaugaaaauauccuguacaagauuugucucuccggggauggauggcccuauaucgcuagcagaacgucuaucacaggccgggccugggagaacaccgugguggaccuggagagcgaugggaagccucagaaagccggauccaauggcucuaacaagagccuucaguccgcuggguuuacagcgggacugaccuacagccagcucaugacccugaaagacgccaugcugcaacuugauccgaaugcuaagacauggauggacauugaaggcagacccgaggacccugucgaaaucgcccucuaccagcccucuuccggcugcuauauucacuucuuucgcgagccuacggaucugaaacaguucaagcaggacgccaaguacagccaugggaucgaugugaccgaccuguuugcugcccaacccggacucacaucugcgguuauugaugcucugccgcggaacauggugaucaccugucagggcuccgacgauaucagaaaacuuuucgaaagccaggggcgcaaggacauuaaacugaucgauauugcccucuccaagacagacucucggaaauaugagaaugccgucugggaucaguacaaggaccugugccacaugcauaccggaaucgugguugagaagaaaaagagaggcgggaaagaagagauuacgccucacugugcucugauggauugcaucauguuugacgccgcugugagcggcggacuuaacacauccguccuccgcgccgugcugccccgggacauggucuucagaaccucuaccccucgcgugguucugugaggacuagucccuguucccagagcccacuuuuuuuucuuuuuuugaaauaaaauagccugucuuucagaucucaaaggcucuuuucagagccaccaaaaaaaaaaaaaaaaaaaaaaaaaaaaaaaaaaaaaaaaaaaaaaaaaaaaaaaaaaaaaaaaaaaaaaaaaaaaaaaaaaaaaaaaaaaaaaaaaaaaa

SEQ ID NO: 17251 - RNA, 2001 nt, Artificial Sequence
  mRNA product Design a-2 (hSL-A100) comprising derived and/or modified sequence from LASV(LM776-SLE-2012;Clade IV)__AIT17825__NP (opt5)
aggagaguccgcucagccagguugcagaagcggcuuagcguguguccuaaucuucucucugcguguagguaggccugugccgcaaacaagcuuaccaugagcgccuccaaggagaucaaaucuuuccuguggacccagagccucagacgggaacuguccucuuacugcagcaacauuaaacuucaaguggucaaggacgcucaggcccugcuccacggccuggauuuuuccgagguuucuaaugugcagcgccuuaugagaaaggaacggcgcgacgauaacgaccugaaaagacuccgggaucugaaucaggcggugaacaaucuggucgagcucaagagcacacaacagaaguccauccugcgcguggggacgcuuaccagcgacgaucugcucauucuggcugccgaccuugaaaaacugaagucuaaaguuacaagaaccgagcggccccucuccgccggaguguauaugggcaaccugagcucucagcagcuggaucaacgcagagcucuccuguccaugaucgggaugagcggaucuaaucagggcgcccgggcugggcgcgacggagucgugagaguuugggaugugaagaacgccgagcuucugaauaaccaguucggcacaaugccuucccucacccuggcgugucuuacaaaacagggccaagucgaccugaaugaugccgugcaggcucucaccgaccuggggcugauuuacacggccaaguauccgaacaccagcgaccucgaucggcugacacagucccaucccauccuuaauaugaucgacaccaagaaaucuagccugaacauuuccggauacaauuuuagccucggcgcugccgugaaggcgggggccugcaugcuggauggaggcaacaugcuugaaacaaucaaagucucuccucaaaccauggacgggauucugaaguccauccucaaaguuaagaaagcucugggaauguucauuagcgauacgcccggcgagcgcaacccuuaugaaaauauccuguacaagauuugucucucuggcgacggguggcccuauaucgccagcagaacauccaucaccggacgggcuugggagaacacagugguggaucuggagucugacggcaagccucagaaagccgggagcaauaacuccaauaagagccuucagucugccggauuuaccgcuggccugaccuacucccagcucaugacacugaaagaugcgaugcugcaacuugacccgaacgccaagacguggauggauauugaagggagacccgaggacccugucgaaguggcucucuaccagcccagcucuggaugcuauauccacuucuuucgcgagccuaccgaccugaaacaguucaagcaggaugccaaguacucccauggcauugacguuacagaucuguuugccgcucaacccggccucaccagcgccgugaucgacgcgcugccgcggaauauggucauuacaugucagggguccgaugacaucagaaaacuucuggaaucucagggacgcaaggauaucaaacucauugacaucgcucugagcaagaccgauucccggaaauaugagaacgccgugugggaccaguacaaggaucugugccacaugcauacgggcguuguggucgagaagaaaaagagagggggaaaagaagagauuacaccucacugugcccuuauggacugcaucauguucgaugcugccgugucuggcgggcucaauaccagcguccugcgcgcugugcugccccgggacaugguuuuuagaaccuccacaccucgcgugguccucugaggacuagucccuguucccagagcccacuuuuuuuucuuuuuuugaaauaaaauagccugucuuucagaucucaaaggcucuuuucagagccaccaaaaaaaaaaaaaaaaaaaaaaaaaaaaaaaaaaaaaaaaaaaaaaaaaaaaaaaaaaaaaaaaaaaaaaaaaaaaaaaaaaaaaaaaaaaaaaaaaaaaa

SEQ ID NO: 17252 - RNA, 2001 nt, Artificial Sequence
  mRNA product Design a-2 (hSL-A100) comprising derived and/or modified sequence from LASV(Mad39;Clade IV)__ANH09723__NP (opt5)
aggagaguccgcucagccagguugcagaagcggcuuagcguguguccuaaucuucucucugcguguagguaggccugugccgcaaacaagcuuaccaugagcgccuccaaggagaucaaaucuuuccuguggacccagagccucagacgggaacuguccggcuacugcucuaacauuaagcugcaaguggucaaagacgcucaggcccugcuccacgggcuggauuuuagcgagguuuccaaugugcagcgccuuaugagaaagcagcggcgcgacgauaacgaccugaaaagacuccgggaucugaaucaagcggugaacaaucuggucgaacucaagucuacacagcaaaagagcgugcugcgcguuggaacgcuuaccuccgacgaucugcucacacuggcugccgaccuugagaaacuuaagagcaaagugaccagaacagaacggccccucaccgccggcgucuauauggggaaccugucuucccagcagcuggaucagcgcagagcucuccugaauaugaucggaaugagcggcgggaaccagggagcccggacaggccgcgacggcgugguuagagugugggaugucaagaaugcugagcuucugaacaaucaguucgggaccaugccuucucucacgcuggccugucuuaccaaacaaggacagguggaccugaacgaugugguccaggcgcucacagaccugggccugauuuacaccgccaaguauccgaauacauccgaccucgaucggcugacccaaagccaucccauccuuaacaugauugacacgaauaagucuucccugaacaucagcggguacaacuuuucccucggagcugccguuaaagcuggcgccugcaugcuggaugggggaaauaugcuugagacaaucaaggugucuccucagaccauggacggcauucugaaaagcauccucaaggugaaaaagucccugggcauguucauuagcgauacacccggggaacgcaacccuuaugagaauauccuguacaaaauuugucucucuggagacggcuggcccuauaucgcguccagaaccagcauuaccgggcgggccugggaaaacacagucguggaucuggagucuggaggcaagccucagaaggcugggagcaauaacuccaauaaaucucuucagagcgccggauuugcugccggccugacguacucccaacucaugacccugaaggacgccaugcugcagcuugauccgaacgcuaaaacauggauggacaucgagggcagacccgaagauccuguugagaucgcgcucuaccagcccauuagcgggugcuauauccacuucuuucgcgaaccuaccgaccugaagcaguucaaacaagacgccaaguacucucauggaauugaugugacagaccuguuugcugcccagcccggccucaccuccgccgucaucgaggcucugccgcggaauauggugauuacgugucaggggagcgaugacaucagaaaacuuuucgaaucucagggacgcaaggauaucaagcugauugacaucgcccucuccaaaacagauagccggaaguaugagaacgcgguuugggaccaauacaaagaucugugccacaugcauaccggcguggucguggagaagaagaaaaagggcgggaaagaagagauuaccccucacugugcucugauggacugcaucauguuugaugccgccgucuccggaggccuuaauacacucgugcugagagcuguucugccccgcgacaugguguuccggaccucuacaccuaaggucgugcucugaggacuagucccuguucccagagcccacuuuuuuuucuuuuuuugaaauaaaauagccugucuuucagaucucaaaggcucuuuucagagccaccaaaaaaaaaaaaaaaaaaaaaaaaaaaaaaaaaaaaaaaaaaaaaaaaaaaaaaaaaaaaaaaaaaaaaaaaaaaaaaaaaaaaaaaaaaaaaaaaaaaaa

SEQ ID NO: 17253 - RNA, 2001 nt, Artificial Sequence
  mRNA product Design a-2 (hSL-A100) comprising derived and/or modified sequence from LASV(Z0947-SLE-2011;Clade IV)__AIT17841__NP (opt5)
aggagaguccgcucagccagguugcagaagcggcuuagcguguguccuaaucuucucucugcguguagguaggccugugccgcaaacaagcuuaccaugagcgccuccaaggagaucaaaucuuuccuguggacccagagccucagacgggaacuguccggcuacugcucuaacauuaagcugcaaguggucaaagacgcucaggcccugcuccacgggcuggauuuuagcgagguuuccaaugugcagcgccuuaugagaaaggaacggcgcgacgauaacgaccugaaaagacuccgggaucugaaucaggcggugaacaaucuggucgagcucaagucuacacaacaaaagagcauccugcgcgugggaacgcuuaccuccgacgaucugcucauucuggcugccgaccuugaaaaacuuaagagcaaaguuacaagaaccgagcggccccucucugccggcguguauauggggaaccuguccagccagcagcuggaucagcgcagagcucuccugaauaugaucggaaugucuggcuccaaccagggggcccggacaggacgcgacggcgucgugagaguuugggaugugaagaaugcugagcuucugaacaaucaguucggcaccaugccuagccucacacuggccugucuuaccaaacaggggcaagucgaccugaacgaugcggugcaggcccucacggaccugggacugauuuacaccgcuaaguauccgaauacaucugaccucgaucggcugacccagucccaucccauccuuaacaugaucgacacaaagaaaagcucccugaauauuucuggcuacaacuuuagccucggggccgcugugaaggccggagcgugcaugcuggauggcgggaacaugcuugaaaccaucaaagucuccccucaaacgauggacggcauucucaagagcauccugaaaguuaagaaagcccugggaauguucauuucugaugcucccggcgagcgcaauccuuaugaaaacauccuguacaagauuugucucuccggggacggauggcccuauaucgccagcagaacaucuaucaccggccgggcuugggagaauacagugguggaucuggagagcgacgggaagccucagaaagccggauccaacggcucuaauaagagccuucaguccgccggguuuaccgcuggacugaccuacagccagcucaugacacugaaagaugcgaugcugcaacuugacccgaacgccaagacguggauggauauugaaggcagacccgaggacccugucgaaaucgcucucuaccagcccucuuccggcugcuauauucacuucuuucgcgagccuaccgaccugaaacaguucaagcaggaugccaaguacagccaugggaucgacgugacagaucuguuugccgcucaacccggacucaccucugccguuauugacgcgcugccgcggaauauggugaucacaugucagggcuccgaugacaucagaaaacuuuucgaaagccaggggcgcaaggauauuaaacugaucgacauugcucucuccaagaccgauucucggaaauaugagaacgccgucugggaccaguacaaggaucugugccacaugcauacgggaaucgugguugagaagaaaaagagaggcgggaaagaagagauuacaccucacugugcccugauggacugcaucauguuugaugcugccgugagcggcggacuuaauaccuccguccuccgcgcugugcugccccgggacauggucuucagaaccucuacaccucgcgugguucugugaggacuagucccuguucccagagcccacuuuuuuuucuuuuuuugaaauaaaauagccugucuuucagaucucaaaggcucuuuucagagccaccaaaaaaaaaaaaaaaaaaaaaaaaaaaaaaaaaaaaaaaaaaaaaaaaaaaaaaaaaaaaaaaaaaaaaaaaaaaaaaaaaaaaaaaaaaaaaaaaaaaaa

SEQ ID NO: 17254 - RNA, 1977 nt, Artificial Sequence
  mRNA product Design a-2 (A100) comprising derived and/or modified sequence from LASV(Josiah;Clade IV)__NP_694869__NP (opt1)
aggagaguccgcucagccagguugcagaagcggcuuagcguguguccuaaucuucucucugcguguagguaggccugugccgcaaacaagcuuaccaugagcgccuccaaggagaucaagagcuuccuguggacccagucccuccgccgggagcugagcggcuacugcuccaacaucaagcuccagguggucaaggacgcccaggcgcugcugcacgggcuggacuucagcgagguguccaacgugcagcgccucaugcggaaggagcgccgggacgacaacgaccugaagcgccugcgggaccucaaccaggccgucaacaaccugguggagcucaagagcacccagcagaaguccauccugcgcgugggcacccugaccagcgacgaccugcucauccuggccgccgaccuggagaagcucaaguccaaggucauccggaccgagcgcccccugagcgccgggguguacaugggcaaccuguccagccagcagcucgaccagcggcgcgcgcugcugaacaugaucgggauguccggcggcaaccagggggcccgggccggccgcgacggggugguccgggugugggacgugaagaacgccgagcuccugaacaaccaguucggcaccaugccgagccugacgcucgcgugccugaccaagcaggggcaggucgaccugaacgacgccgugcaggcccucaccgaccugggccugaucuacaccgccaaguaccccaacacguccgaccucgaccgccugacccagagccaccccauccugaacaugaucgacaccaagaaguccagccucaacaucagcggcuacaacuucucccugggggccgcggugaaggccggcgccugcaugcuggacgggggcaacaugcucgagaccaucaaggucagcccccagacgauggacggcauccugaaguccauccugaaggugaagaaggcccucgggauguucaucagcgacaccccgggcgagcggaaccccuacgagaacauccuguacaagaucugccuguccggggacggcuggcccuacaucgccagccgcaccuccaucaccgggcgggcgugggagaacacgguggucgaccucgagagcgacggcaagccccagaaggccgacuccaacaacagcuccaagagccugcaguccgccggcuucaccgccgggcugaccuacagccagcucaugacccugaaggacgccaugcugcagcuggacccgaacgcgaagacguggauggacaucgagggccgccccgaggaccccguggagaucgcccucuaccagcccuccagcgggugcuacauccacuucuuccgggagccgaccgaccugaagcaguucaagcaggacgccaaguacucccacggcaucgacgugaccgaccuguucgccacccagcccgggcucacgagcgccgucaucgacgcgcugccccgcaacauggugaucacgugccagggcuccgacgacauccgcaagcugcucgagagccagggccggaaggacaucaagcugaucgacaucgcccugagcaagaccgacucccgcaaguacgagaacgccgugugggaccaguacaaggaccucugccacaugcacaccggggucguggucgagaagaagaagcggggcgggaaggaggagaucaccccgcacugcgcccugauggacugcaucauguucgacgcggccgugagcggcgggcugaacaccuccgugcuccgcgccguccugccccgggacaugguguuccgcaccagcacgccccgggugguccugugaggacuagucccuguucccagagcccacuuuuuuuucuuuuuuugaaauaaaauagccugucuuucagaucuaaaaaaaaaaaaaaaaaaaaaaaaaaaaaaaaaaaaaaaaaaaaaaaaaaaaaaaaaaaaaaaaaaaaaaaaaaaaaaaaaaaaaaaaaaaaaaaaaaaa

SEQ ID NO: 17255 - RNA, 1977 nt, Artificial Sequence
  mRNA product Design a-2 (A100) comprising derived and/or modified sequence from LASV(LP;Clade I)__AAF86702__NP (opt1)
aggagaguccgcucagccagguugcagaagcggcuuagcguguguccuaaucuucucucugcguguagguaggccugugccgcaaacaagcuuaccaugagcaacuccaaggagaucaagagcuuccuguggacccagucccuccgccgggagcugagcggcuacugcuccaacaucaagcuccagguggucaaggacgcccaggcccugcugcacgggcuggacuucagcgagguguccaacgugcagcgccucaugcggaagcagaagcgcgacgacgcggaccugaagcggcugcgcgaccucaaccaggccgucaacaaccugguggagcucaagagcacccagcagaagaacgugcugcgggucggcacgcuguccagcgacgaccugaucacccucgccgccgaccuggagaagcugaaguccaaggugauccgcaccgagcggccccucagcuccgggguguacaugggcaaccugagcucccagcagcuggaccagcgccgggcccuccugagcaugaucgggauguccggcggcccgcaggggaaccgcaccggcggggacggcgucgugcgggugugggacgucaagaacgcggagcugcucaacaaccaguucgggacgaugcccagccugacccuggccugccucaccaagcagggccagguggaccugaacgacgccgugcaggcccugaccgaccucggccugaucuacacggcgaaguaccccaacuccagcgaccuggacaugcucacccagagccaccccauccuggggauggucgacaccaagaaguccagccugaacaucuccggcuacaacuucagccucggggccgccgugaaggccggcgccugcaugcuggacggcgggaacaugcuggagaccaucaagguguccccgcagacgauggacggcauccucaagagcauccugaaggucaagcgcucccuggggauguucaucagcgacacccccggcgagcggaaccccuacgagaacauccucuacaagaucugccuguccggggagggcuggcccuacaucgcgagccgcaccuccaucaccggccgggccugggagaacacgcugguggaccucgagagcgacaacaagccgcccaagcugaacuccgccgggagcaacaagucccugcaggccgccggccucaacgcggggcugaccuacagccagcugaugacccugaaggacugcaugcuccagcuggaccccuccagcaagaccuggaucgacaucgagggccgccccgaggacccgguggagaucgcccuguuccagcccuccagcgggugcuacauccacuucuuccgggagcccacggaccucaagcaguucaagcaggacgccaaguacagccacggcaucgacgucaccgaccuguucuccacccagcccggccugaccagcgccgugaucgaggcccucccgcgcaacauggugcugacgugccagggguccgacgacaucaagaagcugcucgagagccagggccggcgcgacaucaagcugaucgacaucucccugagcaaggcggacucccgcaaguucgagaacgccgucugggaccaguacaaggaccucugccacaugcacaccgggguggucguggagaagaagaagcggggcgggaaggaggagaucacgccccacugcgcccugcuggacugcaucauguucgacgccgccaccaccggcagccucaacaucaccacccugcgcgcggugcugccccgggacauggucuuccgcaccuccacgcccaagguggugcucugaggacuagucccuguucccagagcccacuuuuuuuucuuuuuuugaaauaaaauagccugucuuucagaucuaaaaaaaaaaaaaaaaaaaaaaaaaaaaaaaaaaaaaaaaaaaaaaaaaaaaaaaaaaaaaaaaaaaaaaaaaaaaaaaaaaaaaaaaaaaaaaaaaaaa

SEQ ID NO: 17256 - RNA, 1977 nt, Artificial Sequence
  mRNA product Design a-2 (A100) comprising derived and/or modified sequence from LASV(803213;Clade II)__AAF86704__NP (opt1)
aggagaguccgcucagccagguugcagaagcggcuuagcguguguccuaaucuucucucugcguguagguaggccugugccgcaaacaagcuuaccaugagcgccuccaaggaggugaaguccuuccuguggacccagagccuccgccgggagcugagcggcuacugcuccaacaucaagcugcaggucgugaaggacgcccaggcgcuccugcacgggcuggacuucagcgaggugaacaacguccagcgccucaugcggaagcagaagcgcgacgacggcgaccugaagcggcugcgcgaccucaaccaggccgugaacaaccugguggagcugaaguccacccagcagaaguccauccuccgggucgggacgcugaccagcgacgaccugcucacccuggccgccgaccuggagaagcucaagagcaaggugauccgcaccgagcggccccuguccagcggcguguacauggggaaccuguccacgcagcagcucgagcagcgccgggcccugcugaacaugaucggcauggucggcggggcgcagggcacccagccggggcgcgacggcguggugcgggucugggacgugaagaaccccgaccuccugaacaaccaguucgggaccaugcccagccugacccucgccugccugacgaagcagggccagguggaccugaacgacgccguccucgcccugaccgaccugggccucaucuacaccgcgaaguaccccaacuccagcgaccuggaccgccugucccagagccacccgauccucaacaugguggacaccaagaaguccagccugaacaucagcggguacaacuucucccugggcgccgccgugaaggccggggccugcaugcucgacggcggcaacaugcuggagacgaucaaggucacgccccagaccauggacgggauccucaagagcauccugaaggugaagcggucccugggcauguucgugagcgacacccccggggagcgcaaccccuacgagaacauccuguacaagaucugccucuccggcgacggguggccguacaucgcgagccggaccuccaucgucggccgcgccugggagaacaccaccguggaccuggagagcgacggcaagccccagaagguggggaccgccggcuccaacaagagccugcaguccgccggguuccccacgggccucaccuacagccagcugaugacccugaaggacuccaugaugcagcuggaccccagcgccaagaccuggaucgacaucgaggggcggccggaggaccccgucgagaucgcgcucuaccagcccauguccggcugcuacauccacuucuuccgcgagcccacggaccugaagcaguucaagcaggacgccaaguacagccacggcaucgacguggccgaccuguucccggcccagcccgggcucaccuccgccgucaucgaggcgcugccccggaacauggugcugaccugccagggcagcgacgacaucaagaagcuccuggacucccaggggcgccgcgacaucaagcugaucgacaucagccucagcaagguggacucccggaaguucgagaacgccgucugggaccagugcaaggaccugugccacaugcacaccggcgugguggucgagaagaagaagcgcgggggcaaggaggagaucacgccccacugcgcccugauggacugcaucauguucgacgccgccgugagcggcgggcucaacaucccggugcugcgggcgguccugccccgcgacaugguguuccggaccuccagccccaaggugguccucugaggacuagucccuguucccagagcccacuuuuuuuucuuuuuuugaaauaaaauagccugucuuucagaucuaaaaaaaaaaaaaaaaaaaaaaaaaaaaaaaaaaaaaaaaaaaaaaaaaaaaaaaaaaaaaaaaaaaaaaaaaaaaaaaaaaaaaaaaaaaaaaaaaaaa

SEQ ID NO: 17257 - RNA, 1980 nt, Artificial Sequence
  mRNA product Design a-2 (A100) comprising derived and/or modified sequence from LASV(GA391;Clade III)__CAA36646__NP (opt1)
aggagaguccgcucagccagguugcagaagcggcuuagcguguguccuaaucuucucucugcguguagguaggccugugccgcaaacaagcuuaccaugagcgccuccaaggaggugcgcagcuuccuguggacccagucccuccggcgcgagcugagcggcuacugcuccaacaucaagcugcaggucgugaaggacgcccaggcgcuccugcacgggcuggacuucagcgagguguccaacguccagcggcucaugcgcaagcagaagcgggacgacggcgaccugaagcgccugcgggaccucaaccaggccgugaacaaccugguggagcucaagagcacccagcagaaguccguccugcgcguggggacccugagcuccgacgaccugcucauccuggccgccgaccuggagaagcucaagagcaaggugacccggaccgagcgcccccuguccagcggcgucuacauggggaaccuguccagccagcagcucgaccagcggcgcgcccugcugaacaugaucggcaugaccggcguguccgggggcgggaagggcgcgagcgacgggaucgugcgggucugggacgugaagaacgccgagcuccugaacaaccaguucggcacgaugccgucccugacccucgccugccugaccaagcagggccagguggaccugaacgacgccguccaggcgcucaccgaccuggggcugaucuacacggccaaguaccccaacagcagcgaccucgaccgccugucccagagccaccccauccugaacaugaucgacaccaagaaguccagccucaacaucuccggcuacaacuucagccugggggccgccgugaaggccggcgcgugcaugcuggacggcgggaacaugcucgagaccaucaaggugagcccccagaccauggacggcauccucaaguccauccugaaggucaagaagucccuggggauguucgugagcgacacgccgggcgagcggaaccccuacgagaacauccuguacaagaucugccuguccggggacggcuggcccuacaucgccagccgcaccuccaucgugggccgggccugggagaacaccgucguggaccucgagcaggacaacaagccccagaagaucgggaacggcgggagcaacaagucccugcagagcgccggcuucgccgcggggcugaccuacucccagcucaugacgcugaaggacuucaagugcuucaaccugaucccgaacgccaagaccuggauggacaucgagggccgccccgaggaccccguggagaucgcccuguaccagcccagcuccggcugcuacguccacuucuuccgggagccgaccgaccucaagcaguucaagcaggacgccaaguacagccacgggaucgacgugaccgaccuguucgccgcgcagcccggccugacgagcgccgucaucgaggcccucccccgcaacauggugaucacgugccagggguccgaggacauccggaagcugcuggagagccagggccgccgcgacaucaagcucaucgacaucacccuguccaaggccgacagccggaaguucgagaacgccgugugggaccaguucaaggaccugugccacaugcacaccggggucgugguggagaagaagaagcgcggcggcaaggaggagaucacgccccacugcgcgcucauggacugcaucauguucgacgccgccgucuccgggggccuggacgccaaggugcugcgggugguccucccgcgcgacaugguguuccggaccagcacccccaaggugguccugugaggacuagucccuguucccagagcccacuuuuuuuucuuuuuuugaaauaaaauagccugucuuucagaucuaaaaaaaaaaaaaaaaaaaaaaaaaaaaaaaaaaaaaaaaaaaaaaaaaaaaaaaaaaaaaaaaaaaaaaaaaaaaaaaaaaaaaaaaaaaaaaaaaaaa

SEQ ID NO: 17258 - RNA, 1977 nt, Artificial Sequence
  mRNA product Design a-2 (A100) comprising derived and/or modified sequence from LASV(AV;Clade V)__CCA30315__NP (opt1)
aggagaguccgcucagccagguugcagaagcggcuuagcguguguccuaaucuucucucugcguguagguaggccugugccgcaaacaagcuuaccaugagcgccuccaaggaggugaaguccuuccuguggacccagagccuccgccgggagcugagcggcuacugcuccaacaucaagcugcaggucgugaaggacgcccaggcgcuccugcacgggcuggacuucagcgagguguccaacguccagcgccucaugcggaagcagcgccgggacgacagcgaccugaagcgccugcgggaccucaaccaggccgugaacaaccugguggagcugaaguccacccagcagaaguccguccuccgcgugggcacgcugagcagcgacgaccugcucacccuggccgccgaccuggagaagcucaaguccaaggugacccggaccgagcgcccccugagcuccggggucuacaugggcaaccugagcucccagcagcucgaccagcggcgcgcccugcugaaccucaucgggaugacgaacggcagccagggcucccaggcggggcgggacggcguggugcgcgucugggacgugaagaacgccgagcugcugaacaaccaguucgggaccaugccgagccucacccuggccugccugaccaagcagggccagguggaccucaacgacgucgugcaggcccugacggaccuggggcucaucuacaccgcgaaguaccccaacaccagcgaccuggaccggcugacccagucccaccccauccucaacaugaucgacacgaagaaguccagccugaacaucagcggcuacaacuucucccugggcgccgccgugaaggccggggccugcaugcucgacggcgggaacaugcuggagaccaucaaggucagcccccaguccauggacggcauccucaagagcauccugaaggugaagcgcgcgcugggcauguucguguccgacaccccgggggagcggaaccccuacgagaacauccuguacaagaucugccucagcggcgacggguggcccuacaucgccucccgcaccagcaucgucggccgggccugggagaacacggugguggaccuggagaccgacgggaagccccagaagaucggcuccggcaacagcaacaagucccugcagagcgccggguucuccgccggccucaccuacagccagcugaugacccugaaggacgcgaugcugcagcucgacccgaacgccaagacguggauggacaucgaggggcgccccgaggaccccgucgagguggcccuguaccagcccaucuccggcugcuacauccacuucuuccgggagccgaccgaccugaagcaguucaagcaggacgccaaguacagccacgggaucgacaucgccgaccucuucgcggcccagcccggccugaccagcgccgucaucgaggcccugccccgcaacauggugaucacgugccagggcuccgaggacaucaagaagcuccuggagagccaggggcgcaaggacaucaagcugaucgacaucgcccucuccaagaucgacagccggaaguucgagaacgcggugugggaccaguacaaggaccugugccacaugcacaccggcgucgugguggagaagaagaagcgcgggggcaaggaggagaucaccccgcacugcgcccugauggacugcaucauguucgacgccgccgucuccgggggccucaacacccuggugcugcgggcggugcucccccgcgacauggucuuccggaccagcacgccccgcguggugcugugaggacuagucccuguucccagagcccacuuuuuuuucuuuuuuugaaauaaaauagccugucuuucagaucuaaaaaaaaaaaaaaaaaaaaaaaaaaaaaaaaaaaaaaaaaaaaaaaaaaaaaaaaaaaaaaaaaaaaaaaaaaaaaaaaaaaaaaaaaaaaaaaaaaaa

SEQ ID NO: 17259 - RNA, 1977 nt, Artificial Sequence
  mRNA product Design a-2 (A100) comprising derived and/or modified sequence from LASV(Togo/2016/7082;Clade VI)__AMR44578__NP (opt1)
aggagaguccgcucagccagguugcagaagcggcuuagcguguguccuaaucuucucucugcguguagguaggccugugccgcaaacaagcuuaccaugagcaacuccaaggaggugaaguccuuccuguggacccagagccuccgccgggagcugagcggcuacugcuccaacaucaagcugcaggucgugaaggacgcccaggcccuccugcacgggcuggacuucagcgagguguccaacguccagcgccucaugcggaagcagaagcgcgacgacggcgaccugaagcggcugcgcgaccucaaccaggcggugaacaaccugguggagcucaagagcguccagcagaaguccauccugcggguggggacccugaccagcgacgaccugcucacccuggccgccgaccuggagaagcucaaguccaaggugacccgcaccgagcggccccugagcuccggcgucuacauggggaaccugagcucccagcagcucgaccagcgccgggcccugcugagcaugaucggcauguccggcgggaaccagaacagccagccgaagggcgacgggguggugcgcgucugggacgugaagaacgccgaccuccugaacaaccaguucggcacgaugcccucccugacccucgcgugccugaccaagcagggccagguggaccugaacgacgccguccaggcccucaccgaccuggggcugaucuacacggccaaguaccccaacagcagcgaccucgaccggcugucccagagccaccccauccugaacaugaucgacaccaagaaguccagccucaacaucuccggcuacaacuucagccugggggcggccaucaagaccggcgccugcaugcuggacgggggcaacaugcucgagaccaucaaggugacgccgcagaccauggacggcauccugaaguccauccugaaggugaagcgcagccucgggauguucaucuccgacacccccggcgagcggaaccccuacgagaacauccuguacaagaucugccugagcggggacggcuggcccuacaucgccucccgcaccgccaucaucgggcgggcgugggagaacacggucguggaccucgagagcgacuccaagccgcagaagaucggcagcaacggcuccaacaagagccugcaguccgccggguucgcccccggccugaccuacagccagcucaugacccugaaggacuccaugcugcagcuggaccccaacgccaagaccuggaucgacaucgaggggcgccccgaggacccgguggaggucgcccucuuccagcccaucagcggcugcuacauccacuucuuccgggagcccacggaccugaagcaguucaagcaggacgcgaaguacagccacgggaucgacgugaccgaccuguucgccgcccagcccggccucaccuccgccgugaucgaggcccugccgcgcaacaugguccugaccugccagggcagcgacgacaucaagaagcuccuggacucccaggggcggcgcgacaucaagcugaucgacgugagccucaacaagaucgacucccgcaaguucgagaacgcggucugggaccaguacaaggaccugugccacaugcacacgggcgugguggucgagaagaagaagaagggcgggaaggaggagaucacgccccacugcgcccugcucgacugcaucauguucgacgccgccgugagcgggggccugaacgccaccgugcugcgggcgguccucccccgcgacaugguguuccggaccuccagccccaaggugguccugugaggacuagucccuguucccagagcccacuuuuuuuucuuuuuuugaaauaaaauagccugucuuucagaucuaaaaaaaaaaaaaaaaaaaaaaaaaaaaaaaaaaaaaaaaaaaaaaaaaaaaaaaaaaaaaaaaaaaaaaaaaaaaaaaaaaaaaaaaaaaaaaaaaaaa

SEQ ID NO: 17260 - RNA, 1977 nt, Artificial Sequence
  mRNA product Design a-2 (A100) comprising derived and/or modified sequence from LASV(KAK-428;Clade n.d. (VII))__ANH09741__NP (opt1)
aggagaguccgcucagccagguugcagaagcggcuuagcguguguccuaaucuucucucugcguguagguaggccugugccgcaaacaagcuuaccaugagcaacuccaaggaggugaaguccuuccuguggacccagagccuccgccgggagcugagcggcuacugcaccaacaucaagcugcaggucgugaaggacgcccaggcccuccugcacgggcuggacuucuccgaggugagcaacguccagcgccucaugcggaagcagaagcgcgacgacaacgaccugaagcggcugcgcgaccucaaccaggcggugaacaaccugguggagcugaaguccguccagcagaaguccgugcucaaggugggcacgcugaacagcgacgaccugcucacccuggccgccgaccuggagaagcucaagagcaaggucgugcggaccgagcgcccccuguccagcgggguguacaugggcaaccuguccagccagcagcucgaccagcggcgcgcccugcugaacaugaucgggauggccggcggcucccaggggaaccagccgagccgggacggcgucgugcgcgugugggacgucaagaacgcggaccuccugaacaaccaguucgggaccaugcccucccugacgcucgccugccugaccaagcagggccagguggaccugaacgacgugguccucgcccugaccgaccuggggcucaucuacaccgccaaguaccccaacagcuccgaccuggaccggcugagccagaaccaccccgugcucaacaugaucgacgugaacaagagcucccugaacaucagcggcuacaacuucucccugggcgcggccgucaaggccggggccugcaugcucgacggcgggaacaugcuggagacgaucaagaucagcccgcagaccguggacggcauccugaaguccauccucaaggugaagcgcgcccugggcauguucgucagcgacacccccggggagcggaaccccuacgagaacauccuguacaaggugugccucuccggcaacggguggcccuacaucgcgagccgcaccuccaucgucggccgggccugggagaacacggugguggaccuggagagcaacaagaaccagccgaaggucgggaacaacggcuccaacaagaugcugcagagcuccggcuucgccaccgggcucaccuacagccagcugaugacccugcgcgacuccaugcugcagcucgaccccacggccaagaccuggaucgacaucgagggccggcccgaggaccccguggagcuggcccuguuccagccgagcuccgggugcuacauccacuucuuccgcgagcccaccgaccucaagcaguucaagcaggacgcgaaguacagccacggcaucgacgugaacgaccuguucuccgcccagcccgggcugaccagcgccguccucgaggcccugccccggaacauggugcugacgugccagggcagcgacgacauccgcaagcuccuggacucccaggaccgcaaggacaucaagcugaucgacaucagccucuccaaggccgacgcgcggaaguucgagaacgacgugugggaccaguucaaggaccugugccacaugcacaccggcaucgucguggagaagaagaagaagggcgggaagcaggagaugaccccgcacugcgcccugcucgacugcaucauguucgacgccgccgugagcgggggccugaacguccccacccugcgcgccgugcuccccacggacaugguguuccggaccaucaccaccaaggucgugcugugaggacuagucccuguucccagagcccacuuuuuuuucuuuuuuugaaauaaaauagccugucuuucagaucuaaaaaaaaaaaaaaaaaaaaaaaaaaaaaaaaaaaaaaaaaaaaaaaaaaaaaaaaaaaaaaaaaaaaaaaaaaaaaaaaaaaaaaaaaaaaaaaaaaaa

SEQ ID NO: 17261 - RNA, 1977 nt, Artificial Sequence; identical to SEQ ID NO: 17255
  mRNA product Design a-2 (A100) comprising derived and/or modified sequence from LASV(Pinneo-NIG-1969;Clade I)__AIT17837__NP (opt1)

SEQ ID NO: 17262 - RNA, 1977 nt, Artificial Sequence
  mRNA product Design a-2 (A100) comprising derived and/or modified sequence from LASV(ISTH0009-NIG-2011;Clade II)__AIT17405__NP (opt1)
aggagaguccgcucagccagguugcagaagcggcuuagcguguguccuaaucuucucucugcguguagguaggccugugccgcaaacaagcuuaccaugagcguguccaaggaggucaagagcuuccuguggacccagucccuccgccgggagcugagcggcuacugcuccaacaucaagcuccagguggugaaggacgcccaggcccugcugcacgggcuggacuucagcgaggucuccaacgugcagcgccucaugcggaagcagaagcgcgacgacagcgaccugaagcggcugcgcgaccucaaccaggcggugaacaaccuggucgagcugaaguccacccagcagaaguccauccuccgggugggcacccugaccagcgacgaccugcucacccuggccgccgaccuggagaagcucaagagcaaggugauccgcaccgagcggccccuguccagcggggucuacaugggcaaccuguccacgcagcagcucgagcagcgccgggcccugcugaacaugaucgggauggugggcggcgcccaggggacccagccgggccgcgacggggugguccgggugugggacgugaagaaccccgaccuccugaacaaccaguucggcaccaugcccagccugacccucgcgugccugacgaagcaggggcaggucgaccugaacgacgccgugcucgcccugaccgaccugggccucaucuacaccgccaaguaccccaacuccagcgaccuggaccgccugucccagagccacccgauccucaacaugguggacaucaagaaguccagccugaacaucagcggcuacaacuucucccugggggcggccgucaaggccggcgccugcaugcucgacgggggcaacaugcuggagaccaucaaggugacgccccagaccauggacggcauccucaagagcauccugaaggugaagcggucccuggggauguucgucagcgacacccccggcgagcgcaaccccuacgagaacauccuguacaagaucugccucuccggggacggcuggccguacaucgccagccggaccuccaucguggggcgcgcgugggagaacacgaccguggaccuggagagcgacggcaagccccagaaggucggcuccgccgggagcaacaagucccugcagagcgccggcuuccccaccgggcucaccuacucccagcugaugacgcugaaggacagcaugaugcagcuggaccccuccgccaagaccuggaucgacaucgagggccggccggaggaccccguggagaucgcccucuaccagcccaugagcgggugcuacauccacuucuuccgcgagcccaccgaccugaagcaguucaagcaggacgcgaaguacucccacggcaucgacgucgccgaccuguucccggcccagcccggccucaccagcgccgugaucgaggcccugccccggaacauggugcugacgugccaggggagcgacgacaucaagcgccuccuggacucccagggccgccgggacaucaagcugaucgacaucgcgcucagcaaggccgacucccgccgguucgagaacgccgucugggaccagugcaaggaccugugccacaugcacaccggggugguggucgagaagaagaagcgcggcgggaaggaggagaucacgccccacugcgcccugauggacugcaucauguacgacgccgcggugagcggcggccucaacaucccggugcugcgggccguccugccccgcgacaugguguuccggaccuccagccccaaggugguccucugaggacuagucccuguucccagagcccacuuuuuuuucuuuuuuugaaauaaaauagccugucuuucagaucuaaaaaaaaaaaaaaaaaaaaaaaaaaaaaaaaaaaaaaaaaaaaaaaaaaaaaaaaaaaaaaaaaaaaaaaaaaaaaaaaaaaaaaaaaaaaaaaaaaaa

SEQ ID NO: 17263 - RNA, 1977 nt, Artificial Sequence
  mRNA product Design a-2 (A100) comprising derived and/or modified sequence from LASV(ISTH2010-NIG-2012;Clade II)__AIT17483__NP (opt1)
aggagaguccgcucagccagguugcagaagcggcuuagcguguguccuaaucuucucucugcguguagguaggccugugccgcaaacaagcuuaccaugagcgccuccaaggaggugaaguccuuccuguggacccagagccuccgccgggagcugagcggcuacugcuccaacaucaagcugcaggucgugaaggacgcccaggcgcuccugcacgggcuggacuucagcgagguguccaacguccagcgccucaugcggaagcagaagcgcgacgacagcgaccugaagcggcugcgcgaccucaaccaggccgugaacaaccugguggagcugaaguccacccagcagaaguccauccuccgggucggcacgcugaccagcgacgaccugcucacccuggccgccgaccuggagaagcucaagagcaaggugauccgcaccgagcggccccuguccagcgggguguacaugggcaaccuguccacgcagcagcucgagcagcgccgggcccugcugaaccucaucgggauggucggcggcgcgcaggggacccagccgggccgcgacgggguggugcgggucugggacgugaagaaccccgaccugcugaacaaccaguucggcaccaugcccagccucacccuggccugccugacgaagcagggccagguggaccucaacgacgccguccuggcccugaccgaccucgggcugaucuacaccgcgaaguaccccaacuccagcgaccuggaccgccucucccagagccacccgauccugaacaugguggacaccaagaaguccagccugaacaucagcggcuucaacuucucccucggggccgccgugaaggccggcgccugcaugcuggacgggggcaacaugcuggagacgaucaaggucacgccccagaccauggacggcauccucaagagcauccugaaggugaagaagucccuggggauguucgugagcgacacccccggcgagcggaaccccuacgagaacauccucuacaagaucugccuguccggggacggcuggccguacaucgcgagccgcaccuccaucgucgggcgggccugggagaacaccaccguggaccuggagagcgacggcaagccccacaaggugggcaccgccggguccaacaagagccuccaguccgccggcuuccccacggggcugaccuacagccagcugaugacccugaaggacuccaugaugcagcucgaccccagcgccaagaccuggaucgacaucgagggccgcccggaggaccccgucgagaucgcgcuguaccagcccauguccgggugcuacauccacuucuuccgggagcccacggaccugaagcaguucaagcaggacgccaaguacagccacggcaucgacguggccgaccucuucccggcccagcccggccugaccuccgccgucaucgaggcgcugccccgcaacauggugcugaccugccaggggagcgacgacaucaagcggcuccuggacagccagggccgccgcgacaucaagcucaucgacaucgcccuguccaaggccgacagccggcgcuucgagaacgccgugugggaccagugcaaggaccugugccacaugcacaccggggucgugguggagaagaagaagcggggcgggaaggaggagaucacgccccacugcgcccucauggacugcaucauguacgacgcggccgucuccggcggccugaacaucccggugcugcgcgccgugcucccccgggacauggucuuccgcaccagcucccccaagguggugcugugaggacuagucccuguucccagagcccacuuuuuuuucuuuuuuugaaauaaaauagccugucuuucagaucuaaaaaaaaaaaaaaaaaaaaaaaaaaaaaaaaaaaaaaaaaaaaaaaaaaaaaaaaaaaaaaaaaaaaaaaaaaaaaaaaaaaaaaaaaaaaaaaaaaaa

SEQ ID NO: 17264 - RNA, 1977 nt, Artificial Sequence
  mRNA product Design a-2 (A100) comprising derived and/or modified sequence from LASV(Lassa virus/H.sapiens-wt/NGA/2015/ISTH_0543;Clade II)__AVO03640__NP (opt1)
aggagaguccgcucagccagguugcagaagcggcuuagcguguguccuaaucuucucucugcguguagguaggccugugccgcaaacaagcuuaccaugagcgccuccaaggaggugaaguccuuccuguggacccagagccuccgccgggagcugagcggcuacugcuccaacaucaagcugcaggucgugaaggacgcccaggcgcuccugcacgggcuggacuucagcgagguguccaacguccagcgccucaugcggaagcagaagcgcgacgacagcgaccugaagcggcugcgcgaccucaaccaggccgugaacaaccugguggagcugaaguccacccagcagaaguccauccuccgggucggcacgcugaccagcgacgaccugcucacccuggccgccgaccuggagaagcucaagagcaaggugauccgcaccgagcggccccuguccagcgggguguacaugggcaaccuguccacgcagcagcucgagcagcgccgggcccugcugaacaugaucgggauggucggcggcgcgcaggggacccagccgggccgcgacgggguggugcgggucugggacgugaagaaccccgaccuccugaacaaccaguucggcaccaugcccagccugacccucgccugccugacgaagcagggccagguggaccugaacgacgccguccucgcccugaccgaccuggggcucaucuacaccgcgaaguaccccaacuccagcgaccuggaccgccugucccagagccacccgauccucaacaugguggacaccaagaaguccagccugaacaucagcggcuacaacuucucccugggggccgccgugaaggccggcgccugcaugcucgacgggggcaacaugcuggagacgaucaaggucacgccccagaccauggacggcauccucaagagcauccugaaggugaagaagucccuggggauguucgugagcgacacccccggcgagcggaaccccuacgagaacauccuguacaagaucugccucuccggggacggcuggccguacaucgcgagccgcaccuccaucgucgggcgggccugggagaacaccaccguggaccuggagagcgacggcaagccccagaaggugggcuccgccgggagcaacaagucccugcagagcgccggcuuccccaccgggcucacguacucccagcugaugacccugaaggacagcaugaugcagcuggaccccuccgccaagaccuggaucgacaucgagggccgcccggaggaccccgucgagaucgcgcucuaccagcccaugagcgggugcuacauccacuucuuccgggagcccaccgaccugaagcaguucaagcaggacgccaaguacucccacggcaucgacguggccgaccuguucccggcccagcccggccucacgagcgccgucaucgaggcgcugccccgcaacauggugcugaccugccaggggagcgacgacaucaagcggcuccuggacucccagggccgcaaggacaucaagcugaucgacaucgcccucagcaaggccgacucccgccgguucgagaacgccgugugggaccagugcaaggaccugugccacaugcacaccggggucgugguggagaagaagaagcgcggcgggaaggaggagaucacgccccacugcgcccugauggacugcaucauguacgacgcggccgucagcggcggccucaacaucccggugcugcgggccgugcugccccgcgacauggucuuccggaccuccagccccaagguggugcucugaggacuagucccuguucccagagcccacuuuuuuuucuuuuuuugaaauaaaauagccugucuuucagaucuaaaaaaaaaaaaaaaaaaaaaaaaaaaaaaaaaaaaaaaaaaaaaaaaaaaaaaaaaaaaaaaaaaaaaaaaaaaaaaaaaaaaaaaaaaaaaaaaaaaa

SEQ ID NO: 17265 - RNA, 1977 nt, Artificial Sequence
  mRNA product Design a-2 (A100) comprising derived and/or modified sequence from LASV(Lassa virus/H.sapiens-wt/NGA/2016/ISTH_0009;Clade II)__AVO03572__NP (opt1)
aggagaguccgcucagccagguugcagaagcggcuuagcguguguccuaaucuucucucugcguguagguaggccugugccgcaaacaagcuuaccaugagcgccuccaaggaggugaaguccuuccuguggacccagagccuccgccgggagcugagcggcuacugcuccaacaucaagcugcaggucgugaaggacgcccaggcgcuccugcacgggcuggacuucagcgagguguccaacguccagcgccucaugcggaagcagaagcgcgacgacagcgaccugaagcggcugcgcgaccucaaccaggccgugaacaaccugguggagcugaaguccacccagcagaaguccauccuccgggucggcacgcugaccagcgacgaccugcucacccuggccgccgaccuggagaagcucaagagcaaggugauccgcaccgagcggccccuguccagcgggguguacaugggcaaccuguccacgcagcagcucgagcagcgccgggcccugcugaacaugaucgggauggucggcggcgcgcaggggacccagccgggccgcgacgggguggugcgggucugggacgugaagaaccccgaccuccugaacaaccaguucggcaccaugcccagccugacccucgccugccugacgaagcagggccagguggaccugaacgacgccguccucgcccugaccgaccuggggcucaucuacaccgcgaaguaccccaacuccagcgaccuggaccgccugucccagagccacccgauccucaacaugguggacaccaagaaguccagccugaacaucagcggcuacaacuucucccugggggccgccgugaaggccggcgccugcaugcucgacgggggcaacaugcuggagacgaucaaggucacgccccagaccauggacggcauccucaagagcauccugaaggugaagaagucccuggggauguucgugagcgacacccccggcgagcggaaccccuacgagaacauccuguacaagaucugccucuccggggacggcuggccguacaucgcgagccgcaccuccaucgucgggcgggccugggagaacaccaccguggaccuggagagcgacggcaagccccagaaggugggcuccgccgggagcaacaagucccugcagagcgccggcuuccccaccgggcucacguacucccagcugaugacccugaaggacagcaugaugcagcuggaccccuccgccaagaccuggaucgacaucgagggccgcccggaggaccccgucgagaucgcgcucuaccagcccaugagcgggugcuacauccacuucuuccgggagcccaccgaccugaagcaguucaagcaggacgccaaguacucccacggcaucgacguggccgaccuguucccggcccagcccggccucacgagcgccgucaucgaggcgcugccccgcaacauggugcugaccugccaggggagcgacgacaucaagcggcuccuggacucccagggccgccgcgacaucaagcugaucgacaucgcccucagcaaggccgacucccggcgcuucgagaacgccgugugggaccagugcaaggaccugugccacaugcacaccggggucgugguggagaagaagaagcggggcgggaaggaggagaucacgccccacugcgcccugauggacugcaucauguacgacgcggccgucagcggcggccucaacaucccggugcugcgcgccgugcugccccgggacauggucuuccgcaccuccagccccaagguggugcucugaggacuagucccuguucccagagcccacuuuuuuuucuuuuuuugaaauaaaauagccugucuuucagaucuaaaaaaaaaaaaaaaaaaaaaaaaaaaaaaaaaaaaaaaaaaaaaaaaaaaaaaaaaaaaaaaaaaaaaaaaaaaaaaaaaaaaaaaaaaaaaaaaaaaa

SEQ ID NO: 17266 - RNA, 1977 nt, Artificial Sequence
  mRNA product Design a-2 (A100) comprising derived and/or modified sequence from LASV(Lassa virus/H.sapiens-wt/NGA/2016/ISTH_0017;Clade II)__AVO03568__NP (opt1)
aggagaguccgcucagccagguugcagaagcggcuuagcguguguccuaaucuucucucugcguguagguaggccugugccgcaaacaagcuuaccaugagcgccuccaaggaggugaaguccuuccuguggacccagagccuccgccgggagcugagcggcuacugcuccagcaucaagcugcaggucgugaaggacgcccaggcgcuccugcacgggcuggacuucuccgaggugagcaacguccagcgccucaugcggaagcagaagcgcgacgacuccgaccugaagcggcugcgcgaccucaaccaggccgugaacaaccugguggagcucaagagcacccagcagaaguccauccugcgggucggcacgcugaccagcgacgaccugcucacccuggccgccgaccuggagaagcucaaguccaaggugauccgcaccgagcggccccugagcuccgggguguacaugggcaaccugagcacgcagcagcucgagcagcgccgggcccugcugaacaugaucgggauggcgggcggcgcccaggggacccagccgggccgcgacggggucgugcgggugugggacgucaagaaccccgaccuccugaacaaccaguucggcaccaugcccucccugacccucgccugccugacgaagcagggccagguggaccugaacgacgccgugcucgcgcugaccgaccuggggcucaucuacaccgccaaguaccccaacagcuccgaccuggaccgccugagccagagccacccgauccucaacauggucgacaccaagaaguccagccugaacaucuccggcuacaacuucagccugggggccgccgugaaggccggcgcgugcaugcucgacgggggcaacaugcuggagacgaucaaggugacgccccagaccauggacggcauccugaaguccauccucaaggucaagcggagccuggggauguucguguccgacgcccccggcgagcgcaaccccuacgagaacauccuguacaagaucugccucagcggggacggcuggccguacaucgccucccggaccagcaucguggggcgcgccugggagaacaccaccgucgaccuggaguccgacggcaagccccagaaggugggcgccaccgggagcaacaagucccugcagagcgcgggcuuccccaccgggcucacguacucccagcugaugacccugaaggacagcaugaugcagcuggaccccuccgccaagaccuggaucgacaucgagggccggccggaggaccccguggaggucgcccucuaccagcccgugagcgggugcuacauccacuucuuccgcgagcccaccgaccugaagcaguucaagcaggacgccaaguacucccacggcaucgacgucgccgaccuguucccggcgcagcccggccucacgagcgccgugaucgaggcccugccccggaacauggugcugaccugccaggggagcgacgacaucaagaagcuccuggacucccagggccgcaaggacaucaagcugaucgacaucgcccucagcaaggccgacucccgccgguucgagaacgcggucugggaccagugcaaggaccugugccacaugcacaccggggugguggucgagaagaagaagcgcggcgggaaggaggagaucacgccccacugcgcccugauggacugcaucauguacgacgccgccgugagcggcggccucaacaucccggugcugcgggcgguccugccccgcgacaugguguuccggaccuccagccccaaggugguccucugaggacuagucccuguucccagagcccacuuuuuuuucuuuuuuugaaauaaaauagccugucuuucagaucuaaaaaaaaaaaaaaaaaaaaaaaaaaaaaaaaaaaaaaaaaaaaaaaaaaaaaaaaaaaaaaaaaaaaaaaaaaaaaaaaaaaaaaaaaaaaaaaaaaaa

SEQ ID NO: 17267 - RNA, 1977 nt, Artificial Sequence
  mRNA product Design a-2 (A100) comprising derived and/or modified sequence from LASV(Lassa virus/H.sapiens-wt/NGA/2018/ISTH_0959;Clade II)__AVV65100__NP (opt1)
aggagaguccgcucagccagguugcagaagcggcuuagcguguguccuaaucuucucucugcguguagguaggccugugccgcaaacaagcuuaccaugagcgccuccaaggaggugaaguccuuccuguggacccagagccuccgccgggagcugagcggcuacugcuccaacaucaagcugcaggucgugaaggacgcccaggcgcuccugcacgggcuggacuucagcgagguguccaacguccagcgccucaugcggaagcagaagcgcgacgacagcgaccugaagcggcugcgcgaccucaaccaggccgugaacaaccugguggagcugaaguccacccagcagaaguccauccuccgggucggcacccugaccagcgacgaccugcucacccuggccgccgaccuggagaagcucaagagcaaggugauccgcaccgagcggccccuguccagcgggguguacaugggcaaccuguccacgcagcagcucgagcagcgccgggcccugcugaaccucaucgggauggucggcggcgcgcaggggacccagccgggccgcgacgggguggugcgggucugggacgugaagaaccccgaccugcugaacaaccaguucggcaccaugcccagccucacccuggccugccugacgaagcagggccagguggaccucaacgacgucgugcuggcccugaccgaccucgggcugaucuacaccgccaaguaccccaacuccagcgaccuggaccgccucucccagagccacccgauccugaacaugguggacaccaagaaguccagccugaacaucagcggcuucaacuucucccucggggcggccgucaaggccggcgccugcaugcuggacgggggcaacaugcuggagacgaucaaggugacgccccagaccauggacggcauccucaagagcauccugaaggugaagaagucccuggggauguucgucagcgacacccccggcgagcggaaccccuacgagaacauccucuacaagaucugccuguccggggacggcuggccguacaucgccagccgcaccuccaucguggggcgggcgugggagaacaccaccguggaccuggagagcgacggcaagccccacaaggucggcaccgccggguccaacaagagccuccaguccgccggcuuccccacggggcugaccuacagccagcugaugacccugaaggacuccaugaugcagcucgaccccagcgccaagaccuggaucgacaucgagggccgcccggaggaccccguggagaucgcccuguaccagcccauguccgggugcuacauccacuucuuccgggagcccacggaccugaagcaguucaagcaggacgcgaaguacagccacggcaucgacgucgccgaccucuucccggcccagcccggccugaccuccgccgugaucgaggcccugccccgcaacauggugcugaccugccaggggagcgacgacaucaagcggcuccuggacagccagggccgcaaggacaucaagcucaucgacaucgcgcuguccaagaccgacagccgccgguucgagaacgccgucugggaccagugcaaggaccugugccacaugcacacgggggugguggucgagaagaagaagcgcggcgggaaggaggagaucacgccccacugcgcccucauggacugcaucauguacgacgccgccguguccggcggccugaacaucccggugcugcgggcgguccucccccgcgacaugguguuccggaccagcucccccaaggugguccugugaggacuagucccuguucccagagcccacuuuuuuuucuuuuuuugaaauaaaauagccugucuuucagaucuaaaaaaaaaaaaaaaaaaaaaaaaaaaaaaaaaaaaaaaaaaaaaaaaaaaaaaaaaaaaaaaaaaaaaaaaaaaaaaaaaaaaaaaaaaaaaaaaaaaa

SEQ ID NO: 17268 - RNA, 1977 nt, Artificial Sequence
  mRNA product Design a-2 (A100) comprising derived and/or modified sequence from LASV(LASV003-NIG-2008;Clade II)__AIT17581__NP (opt1)
aggagaguccgcucagccagguugcagaagcggcuuagcguguguccuaaucuucucucugcguguagguaggccugugccgcaaacaagcuuaccaugagcgccuccaaggaggugaaguccuuccuguggacccagagccuccgccgggagcugagcggcuacugcuccagcaucaagcugcaggucgugaaggacgcccaggcgcuccugcacgggcuggacuucuccgaggugagcaacguccagcgccucaugcggaagcagaagcgcgacgacuccgaccugaagcggcugcgcgaccucaaccaggccgugaacaaccugguggagcucaagagcacccagcagaaguccguccugcgggugggcacccugaccagcgacgaccugcucacccuggccgccgaccuggagaagcucaaguccaaggugauccgcaccgagcggccccugagcuccggggucuacaugggcaaccugagcgcccagcagcucgagcagcgccggacgcugcugaacaugaucgggauggugggcggcgcgcaggggacccagccgggccgcgacggggugguccgggugugggacgugaagaaccccgaccuccugaacaaccaguucggcaccaugcccucccugacccucgccugccugacgaagcaggggcaggucgaccugaacgacguggugcucgcccugaccgaccugggccucaucuacaccgccaaguaccccaacagcuccgaccuggaccgccugagccagagccacccgauccucuccauggucgacaccaagaaguccagccugaacaucagcggcuacaacuucucccugggggcggccgugaaggccggcgccugcaugcucgacgggggcaacaugcuggagacgaucaaggugacgccccagaccauggacggcauccucaagagcauccugaaggucaagaagucccuggggauguucgugagcgacacccccggcgagcggaaccccuacgagaacauccuguacaagaucugccucuccggggacggcuggccguacaucgccagccgcaccuccaucguggggcgggcgugggagaacaccaccgucgaccuggagagcgacggcaagccccagaaggugggcaccgccggguccaacaagagccugcaguccgccggcuuccccacggggcucaccuacagccagcugaugacccugaaggacuccaugaugcagcuggaccccagcgccaagaccuggaucgacaucgagggccgcccggaggaccccgucgagaucgcccucuaccagcccauguccgggugcuacauccacuucuuccgggagcccacggaccugaagcaguucaagcaggacgcgaaguacagccacggcaucgacgugaccgaccuguucccggcccagcccggccucaccagcgccgugaucgaggcccugccccgcaacaugguccugaccugccagggguccgacgacaucaagcggcuccuggacagccagggccgccgcgacaucaagcugaucgacaucgcccucuccaaggcggacagccggcgcuucgagaacgccgugugggaccagugcaaggaccugugccacaugcacacggggguggucguggagaagaagaagcggggcgggaaggaggagaucacgccccacugcgcccugauggacugcaucauguacgacgccgccguguccggcggccucaacaucccgguccugcgcgcggugcugccccgggacaugguguuccgcaccagcucccccaaggucgugcucugaggacuagucccuguucccagagcccacuuuuuuuucuuuuuuugaaauaaaauagccugucuuucagaucuaaaaaaaaaaaaaaaaaaaaaaaaaaaaaaaaaaaaaaaaaaaaaaaaaaaaaaaaaaaaaaaaaaaaaaaaaaaaaaaaaaaaaaaaaaaaaaaaaaaa

SEQ ID NO: 17269 - RNA, 1977 nt, Artificial Sequence
  mRNA product Design a-2 (A100) comprising derived and/or modified sequence from LASV(LASV035-NIG-2009;Clade II)__AIT17589__NP (opt1)
aggagaguccgcucagccagguugcagaagcggcuuagcguguguccuaaucuucucucugcguguagguaggccugugccgcaaacaagcuuaccaugagcgccuccaaggaggugaaguccuuccuguggacccagagccuccgccgggagcugagcggcuacugcuccagcaucaagcugcaggucgugaaggacgcccaggcgcuccugcacgggcuggacuucuccgaggugagcaacguccagcgccucaugcggaagcagaagcgcgacgacuccgaccugaagcggcugcgcgaccucaaccaggccgugaacaaccugguggagcucaagagcacccagcagaaguccauccugcgggucggcacgcugaccagcgacgaccugcucacccuggccgccgaccuggagaagcucaaguccaaggugauccgcaccgagcggccccugagcuccgggguguacaugggcaaccugagcgcccagcagcucgagcagcgccgggcgcugcugaacaugaucgggauggucggcggcgcccaggggacgcagccgggccgcgacgggguggugcgggucugggacgugaagaaccccgaccuccugaacaaccaguucggcaccaugcccucccugacccucgccugccugaccaagcagggccagguggaccugaacgacgccguccucgcgcugacggaccuggggcucaucuacaccgccaaguaccccaacagcuccgaccuggaccgccugagccagagccacccgauccucaacaugguggacaccaagaaguccagccugaacaucuccggcuacaacuucagccugggggccgccgugaaggccggcgcgugcaugcucgacgggggcaacaugcuggagaccaucaaggucacgccccagaccauggacggcauccugaaguccauccucaaggugaagcggagccuggggauguucguguccgacacccccggcgagcgcaaccccuacgagaacauccuguacaagaucugccucagcggggacggcuggccguacaucgccucccggaccagcaucgucgggcgcgccugggagaacacgaccguggaccuggaguccgacggcaagccccagaaggugggcaccaccgggagcaacaagucccugcagagcgccggcuuccccacggggcucaccuacucccagcugaugacccugaaggacagcaugaugcagcuggaccccuccgccaagaccuggaucgacaucgagggccggccggaggaccccgucgagaucgcgcucuaccagcccaugagcgggugcuacauccacuucuuccgcgagcccacggaccugaagcaguucaagcaggacgccaaguacucccacggcaucgacguggccgaccuguucccggcccagcccggccucaccagcgccgucaucgaggcgcugccccggaacauggugcugaccugccaggggagcgacgacaucaagaagcuccuggacucccagggccgccgcgacaucaagcugaucgacaucgcccucagcaaggccgacucccggaaguucgagaacgccgugugggaccagugcaaggaccugugccacaugcacaccggggucgugguggagaagaagaagcgcggcgggaaggaggagaucacgccccacugcgcccugauggacugcaucauguacgacgcggccgucagcggcggccucaacaucccggugcugcgggccgugcugccccgcgacauggucuuccggaccuccagccccaagguggugcucugaggacuagucccuguucccagagcccacuuuuuuuucuuuuuuugaaauaaaauagccugucuuucagaucuaaaaaaaaaaaaaaaaaaaaaaaaaaaaaaaaaaaaaaaaaaaaaaaaaaaaaaaaaaaaaaaaaaaaaaaaaaaaaaaaaaaaaaaaaaaaaaaaaaaa

SEQ ID NO: 17270 - RNA, 1977 nt, Artificial Sequence
  mRNA product Design a-2 (A100) comprising derived and/or modified sequence from LASV(LASV1000-NIG-2009;Clade II)__AIT17783__NP (opt1)
aggagaguccgcucagccagguugcagaagcggcuuagcguguguccuaaucuucucucugcguguagguaggccugugccgcaaacaagcuuaccaugagcgccuccaaggaggugaaguccuuccuguggacccagagccuccgccgggagcugagcggcuacugcuccaacaucaagcugcaggucgugaaggacgcccaggcgcuccugcacgggcuggacuucagcgagguguccaacguccagcgccucaugcggaagcagaagcgcgacgacagcgaccugaagcggcugcgcgaccucaaccaggccgugaacaaccugguggagcugaaguccacccagcagaaguccauccuccgggucggcacgcugaccagcgacgaccugcucacccuggccgccgaccuggagaagcucaagagcaaggugauccgcaccgagcggccccuguccagcgggguguacaugggcaaccuguccacgcagcagcucgagcagcgccgggcccugcugaacaugaucgggauggucggcggcgcgcaggggacccagccgggccgcgacgggguggugcgggucugggacgugaagaaccccgaccuccugaacaaccaguucggcaccaugcccagccugacccucgccugccugacgaagcagggccagguggaccugaacgacgucgugcucgcccugaccgaccuggggcucaucuacaccgccaaguaccccaacuccagcgaccuggaccgccugucccagagccacccgauccucaacaugguggacaccaagaaguccagccugaacaucagcggcuacaacuucucccugggggcggccgucaaggccggcgccugcaugcucgacgggggcaacaugcuggagacgaucaaggugacgccccagaccauggacggcauccucaagagcauccugaaggugaagaagucccuggggauguucgucagcgacacccccggcgagcggaaccccuacgagaacauccuguacaagaucugccucuccggggacggcuggccguacaucgccagccgcaccuccaucguggggcgggcgugggagaacaccaccguggaccuggagagcgacggcaagccccagaaggucggcaccgccggguccaacaagagccugcaguccgccggcuuccccacggggcucaccuacagccagcugaugacccugaaggacuccaugaugcagcuggaccccagcgccaagaccuggaucgacaucgagggccgcccggaggaccccguggagaucgcccucuaccagcccgucuccgggugcuacauccacuucuuccgggagcccacggaccugaagcaguucaagcaggacgcgaaguacagccacggcaucgacguggccgaccuguucccggcccagcccggccucaccuccgccgugaucgaggcccugccccgcaacaugguccugaccugccaggggagcgacgacaucaagcggcuccuggacagccagggccgccgcgacaucaagcugaucgacaucgcgcucuccaaggccgacagccggcgcuucgagaacgccgugugggaccagugcaaggaccugugccacaugcacaccgggguggucguggagaagaagaagcggggcgggaaggaggagaucacgccccacugcgcccugauggacugcaucauguacgacgccgcgguguccggcggccucaacaucccgguccugcgcgccgugcugccccgggacaugguguuccgcaccagcucccccaaggucgugcucugaggacuagucccuguucccagagcccacuuuuuuuucuuuuuuugaaauaaaauagccugucuuucagaucuaaaaaaaaaaaaaaaaaaaaaaaaaaaaaaaaaaaaaaaaaaaaaaaaaaaaaaaaaaaaaaaaaaaaaaaaaaaaaaaaaaaaaaaaaaaaaaaaaaaa

SEQ ID NO: 17271 - RNA, 1977 nt, Artificial Sequence
  mRNA product Design a-2 (A100) comprising derived and/or modified sequence from LASV(LASV221-NIG-2010;Clade II)__AIT17625__NP (opt1)
aggagaguccgcucagccagguugcagaagcggcuuagcguguguccuaaucuucucucugcguguagguaggccugugccgcaaacaagcuuaccaugagcgccuccaaggaggugaaguccuuccuguggacccagagccuccgccgggagcugagcggcuacugcuccagcaucaagcugcaggucgugaaggacgcccaggcgcuccugcacgggcuggacuucuccgaggugagcaacguccagcgccucaugcggaagcagcgccgggacgacuccgaccugaagcgccugcgggaccucaaccaggccgugaacaaccugguggagcucaagagcacccagcagaaguccauccugcgcgucggcacgcugaccagcgacgaccugcucacccuggccgccgaccuggagaagcucaaguccaaggugauccggaccgagcgcccccugagcuccgggguguacaugggcaaccugagcacgcagcagcucgagcagcggcgcgcccugcugaacaugaucgggauggucggcggcgcgcaggggacccagccgggccgggacgggguggugcgcgucugggacgugaagaaccccgaccuccugaacaaccaguucggcaccaugcccucccugacccucgccugccugacgaagcagggccagguggaccugaacgacgccguccucgcccugaccgaccuggggcucaucuacaccgcgaaguaccccaacagcuccgaccuggaccggcugagccagagccacccgauccucaacaugguggacaccaagaaguccagccugaacaucuccggcuacaacuucagccugggggccgccgugaaggccggcgccugcaugcucgacgggggcaacaugcuggagacgaucaaggucacgccccagaccguggacggcauccugaaguccauccucaaggugaagcgcagccuggggauguucgucuccgacacccccggcgagcggaaccccuacgagaacauccuguacaagaucugccucagcggggacggcuggccguacaucgcgucccgcaccagcaucguggggcgggccugggagaacaccaccguggaccuggaguccgacggcaagccccagaaggucggcaccgccgggagcaacaagucccugcagagcgccggcuuccccacggggcucaccuacucccagcugaugacccugaaggacagcaugaugcagcuggaccccuccgccaagaccuggaucgacaucgagggccgcccggaggaccccguggagaucgcgcucuaccagcccaugagcgggugcuacauccacuucuuccgggagcccacggaccugaagcaguucaagcaggacgccaaguacucccacggcaucgacgucgccgaccuguucccggcccagcccggccucaccagcgccgugaucgaggcgcugccccgcaacauggugcugaccugccaggggagcgacgacaucaagcgccuccuggacucccagggccggcgcgacaucaagcugaucgacaucgcccucagcaaggccgacucccggaaguucgagaacgccgucugggaccagugcaaggaccugugccacaugcacaccggggugguggucgagaagaagaagcgcggcgggaaggaggagaucacgccccacugcgcccugauggacugcaucauguacgacgcggccgugagcggcggccucaacaucccggugcugcgggccguccugccccgcgacaugguguuccggaccuccagccccaaggugguccucugaggacuagucccuguucccagagcccacuuuuuuuucuuuuuuugaaauaaaauagccugucuuucagaucuaaaaaaaaaaaaaaaaaaaaaaaaaaaaaaaaaaaaaaaaaaaaaaaaaaaaaaaaaaaaaaaaaaaaaaaaaaaaaaaaaaaaaaaaaaaaaaaaaaaa

SEQ ID NO: 17272 - RNA, 1977 nt, Artificial Sequence
  mRNA product Design a-2 (A100) comprising derived and/or modified sequence from LASV(LASV237-NIG-2010;Clade II)__AIT17639__NP (opt1)
aggagaguccgcucagccagguugcagaagcggcuuagcguguguccuaaucuucucucugcguguagguaggccugugccgcaaacaagcuuaccaugagcgccuccaaggaggugaaguccuuccuguggacccagagccuccgccgggagcugagcggcuacugcuccaacaucaagcugcaggucgugaaggacgcccaggcgcuccugcacgggcuggacuucagcgagguguccaacguccagcgccucaugcggaagcagaagcgcgacgacagcgaccugaagcggcugcgcgaccucaaccaggccgugaacaaccugguggagcugaaguccacccagcagaaguccauccuccgggucggcacccugaccagcgacgaccugcucacccuggccgccgaccuggagaagcucaagagcaaggugauccgcaccgagcggccccuguccagcgggguguacaugggcaaccuguccacgcagcagcucgagcagcgccgggcccugcugaacaugaucgggauggucggcggcgcgcaggggacccagccgggccgcgacgggguggugcgggucugggacgugaagaaccccgaccuccugaacaaccaguucggcaccaugcccagccugacccucgccugccugacgaagcagggccagguggaccugaacgacgccguccucgcccugaccgaccuggggcucaucuacaccgcgaaguaccccaacuccagcgaccuggaccgccugucccagagccacccgauccucaacaugguggacaucaagaaguccagccugaacaucagcggcuacaacuucucccugggggccgccgugaaggccggcgccugcaugcucgacgggggcaacaugcuggagaccaucaaggucacgccccagaccauggacggcauccucaagagcauccugaaggugaagcggucccuggggauguucgugagcgacacccccggcgagcgcaaccccuacgagaacauccuguacaagaucugccucuccggggacggcuggccguacaucgcgagccggaccuccaucgucgggcgcgccugggagaacacgaccguggaccuggagagcgacggcaagccccagaaggugggcuccgccgggagcaacaagucccugcagagcgccggcuuccccaccgggcucaccuacucccagcugaugacgcugaaggacagcaugaugcagcuggaccccuccgccaagaccuggaucgacaucgagggccggccggaggaccccgucgagaucgcgcucuaccagcccaugagcgggugcuacauccacuucuuccgcgagcccaccgaccugaagcaguucaagcaggacgccaaguacucccacggcaucgacguggccgaccuguucccggcccagcccggccucaccagcgccgucaucgaggcgcugccccggaacauggugcugacgugccaggggagcgacgacaucaagcgccuccuggacucccagggccgccgggacaucaagcugaucgacaucgcccucagcaaggccgacucccgccgguucgagaacgccgugugggaccagugcaaggaccugugccacaugcacaccggggucgugguggagaagaagaagcgcggcgggaaggaggagaucacgccccacugcgcccugauggacugcaucauguacgacgcggccgucagcggcggccucaacaucccggugcugcgggccgugcugccccgcgacauggucuuccggaccuccagccccaagguggugcucugaggacuagucccuguucccagagcccacuuuuuuuucuuuuuuugaaauaaaauagccugucuuucagaucuaaaaaaaaaaaaaaaaaaaaaaaaaaaaaaaaaaaaaaaaaaaaaaaaaaaaaaaaaaaaaaaaaaaaaaaaaaaaaaaaaaaaaaaaaaaaaaaaaaaa

SEQ ID NO: 17273 - RNA, 1977 nt, Artificial Sequence
  mRNA product Design a-2 (A100) comprising derived and/or modified sequence from LASV(LASV253-NIG-2011;Clade II)__AIT17671__NP (opt1)
aggagaguccgcucagccagguugcagaagcggcuuagcguguguccuaaucuucucucugcguguagguaggccugugccgcaaacaagcuuaccaugagcgccuccaaggaggugaaguccuuccuguggacccagagccuccgccgggagcugagcggcuacugcuccagcaucaagcugcaggucgugaaggacgcccaggcgcuccugcacgggcuggacuucuccgaggugagcaacguccagcgccucaugcggaagcagaagcgcgacgacuccgaccugaagcggcugcgcgaccucaaccaggccgugaacaaccugguggagcucaagagcacccagcagaaguccguccugcgggugggcacccugaccagcgacgaccugcucacccuggccgccgaccuggagaagcucaaguccaaggugauccgcaccgagcggccccugagcuccggggucuacaugggcaaccugagcacgcagcagcucgagcagcgccgggcccugcugaacaugaucgggauggugggcggcgcgcaggggacccagccgggccgcgacggggugguccgggugugggacgugaagaaccccgaccuccugaacaaccaguucggcaccaugcccucccugacccucgccugccugacgaagcaggggcaggucgaccugaacgacguggugcucgcccugaccgaccugggccucaucuacaccgccaaguaccccaacagcuccgaccuggaccgccugagccagagccacccgauccucaacauggucgacaccaagaaguccagccugaacaucuccggcuacaacuucagccugggggcggccgugaaggccggcgccugcaugcucgacgggggcaacaugcuggagacgaucaaggugacgccccagaccauggacggcauccugaaguccauccucaaggucaagaagucccuggggauguucgugagcgacacccccggcgagcggaaccccuacgagaacauccuguacaagaucugccucagcggggacggcuggccguacaucgccucccgcaccagcaucguggggcgggcgugggagaacaccaccgucgaccuggaguccgacggcaagccccagaaggugggcaccgccgggagcaacaagucccugcagagcgccggcuuccccacggggcucaccuacucccagcugaugacccugaaggacagcaugaugcagcuggaccccuccgccaagaccuggaucgacaucgagggccgcccggaggaccccgucgagaucgcccucuaccagcccaugagcgggugcuacauccacuucuuccgggagcccacggaccugaagcaguucaagcaggacgcgaaguacucccacggcaucgacgugaccgaccuguucccggcccagcccggccucaccagcgccgugaucgaggcccugccccgcaacaugguccugaccugccaggggagcgacgacaucaagcggcuccuggacucccagggccgccgcgacaucaagcugaucgacaucgcccucagcaaggcggacucccggcgcuucgagaacgccgugugggaccagugcaaggaccugugccacaugcacacggggguggucguggagaagaagaagcggggcgggaaggaggagaucacgccccacugcgcccugauggacugcaucauguacgacgccgccgugagcggcggccucaacaucccgguccugcgcgcggugcugccccgggacaugguguuccgcaccuccagccccaaggucgugcucugaggacuagucccuguucccagagcccacuuuuuuuucuuuuuuugaaauaaaauagccugucuuucagaucuaaaaaaaaaaaaaaaaaaaaaaaaaaaaaaaaaaaaaaaaaaaaaaaaaaaaaaaaaaaaaaaaaaaaaaaaaaaaaaaaaaaaaaaaaaaaaaaaaaaa

SEQ ID NO: 17274 - RNA, 1977 nt, Artificial Sequence
  mRNA product Design a-2 (A100) comprising derived and/or modified sequence from LASV(LASV254-NIG-2011;Clade II)__AIT17675__NP (opt1)
aggagaguccgcucagccagguugcagaagcggcuuagcguguguccuaaucuucucucugcguguagguaggccugugccgcaaacaagcuuaccaugagcgccuccaaggaggugaaguccuuccuguggacccagagccuccgccgggagcugagcggcuacugcuccagcaucaagcugcaggucgugaaggacgcccaggcgcuccugcacgggcuggacuucuccgaggugagcaacguccagcgccucaugcggaagcagaagcgcgacgacuccgaccugaagcggcugcgcgaccucaaccaggccgugaacaaccugguggagcucaagagcacccagcagaaguccguccugcgggugggcacgcugaccagcgacgaccugcucacccuggccgccgaccuggagaagcucaaguccaaggugauccgcaccgagcggccccugagcuccggggucuacaugggcaaccugagcacgcagcagcucgagcagcgccgggcccugcugaacaugaucgggauggugggcggcgcgcaggggacccagccgggccgcgacggggugguccgggugugggacgugaagaaccccgaccuccugaacaaccaguucggcaccaugcccucccugacccucgccugccugacgaagcaggggcaggucgaccugaacgacgccgugcucgcccugaccgaccugggccucaucuacaccgcgaaguaccccaacagcuccgaccuggaccgccugagccagagccacccgauccucaacaugguggacaccaagaaguccagccugaacaucuccggcuacaacuucagccugggggccgccgucaaggccggcgccugcaugcucgacgggggcaacaugcuggagacgaucaaggugacgccccagaccauggacggcauccugaaguccauccucaaggugaagaagucccuggggauguucgucagcgacacccccggcgagcggaaccccuacgagaacauccuguacaagaucugccucagcggggacggcuggccguacaucgcgucccgcaccagcaucguggggcgggccugggagaacaccaucguggaccuggaguccgacggcaagccccagaaggucggcaccgccgggagcaacaagucccugcagagcgccggcuuccccaccgggcucacguacucccagcugaugacccugaaggacagcaugaugcagcuggaccccuccgccaagaccuggaucgacaucgagggccgcccggaggaccccguggagaucgcgcucuaccagcccaugagcgggugcuacauccacuucuuccgggagcccaccgaccugaagcaguucaagcaggacgccaaguacucccacggcaucgacgucgccgaccuguucccggcccagcccggccucacgagcgccgugaucgaggcgcugccccgcaacauggugcugaccugccaggggagcgacgacaucaagcggcuccuggacucccagggccgccgcgacaucaagcugaucgacaucgcccucagcaaggccgacucccggcgcuucgagaacgccgucugggaccagugcaaggaccugugccacaugcacaccggggugguggucgagaagaagaagcggggcgggaaggaggagaucacgccccacugcgcccugauggacugcaucauguacgacgcggccgugagcggcggccucaacaucccggugcugcgcgccguccugccccgggacaugguguuccgcaccuccagccccaaggugguccucugaggacuagucccuguucccagagcccacuuuuuuuucuuuuuuugaaauaaaauagccugucuuucagaucuaaaaaaaaaaaaaaaaaaaaaaaaaaaaaaaaaaaaaaaaaaaaaaaaaaaaaaaaaaaaaaaaaaaaaaaaaaaaaaaaaaaaaaaaaaaaaaaaaaaa

SEQ ID NO: 17275 - RNA, 1977 nt, Artificial Sequence
  mRNA product Design a-2 (A100) comprising derived and/or modified sequence from LASV(Nig08-04;Clade II)__ADU56611__NP (opt1)
aggagaguccgcucagccagguugcagaagcggcuuagcguguguccuaaucuucucucugcguguagguaggccugugccgcaaacaagcuuaccaugagcgccuccaaggaggugaaguccuuccuguggacccagagccuccgccgggagcugagcggcuacugcuccaacaucaagcugcaggucgugaaggacgcccaggcgcuccugcacgggcuggacuucagcgagguguccaacguccagcgccucaugcggaagcagaagcgcgacgacggcgaccugaagcggcugcgcgaccucaaccaggccgugaacaaccugguggagcucaagagcacccagcagaaguccguccugcggguggggacccugaccagcgacgaccugcucacccuggccgccgaccuggagaagcucaaguccaaggugauccgcaccgagcggccccugagcuccggcgucuacauggggaaccugagcacgcagcagcucgagcagcgcaaggcccugcuguccaugaucggcauggugggcggggcgcagggcacccagccggggcgggacggcgugguccgcgugugggacgugaagaaccccgaccuccugaacaaccaguucgggaccaugcccagccugacccucgccugccugacgaagcagggccaggucgaccugaacgacgccgugcucgcccugaccgaccugggccucaucuacaccgcgaaguaccccaacuccagcgaccuggaccggcugucccagagccacccgauccucaacaugguggacaccaagaaguccagccugaacaucagcggguacaacuucucccugggcgccgccgucaaggccggggccugcaugcucgacggcggcaacaugcuggagacgaucaaggugacgccccagaccauggacgggauccucaagagcauccugaaggugaagcgcucccugggcauguucgucagcgacacccccggggagcggaaccccuacgagaacauccuguacaagaucugccucuccggcgacggguggccguacaucgcgagccgcaccuccaucgugggccgggccugggagaacaccaccguggaccuggagagcgacggcaagccccagaaggucgggaccgccggcuccaacaagagccugcaguccgccggguuccccacgggccucaccuacagccagcugaugacccugaaggacuccaugaugcagcuggaccccagcgccaagaccuggaucgacaucgaggggcgcccggaggaccccguggagaucgcgcucuaccagcccauguccggcugcuacauccacuucuuccgggagcccacggaccugaagcaguucaagcaggacgccaaguacagccacggcaucgacgucaccgaccuguucuccgcccagccggggcucaccagcgccgugaucgaggcccugccccgcaacauggugcugaccugccagggcagcgacgacaucaagaagcuccuggacucccaggggcggcgcgacaucaagcugaucgacaucagccucaacaaggcggacucccgccgguucgagaacgccgucugggaccagugcaaggaccugugccacaugcacacgggcgugguggucgagaagaagaagcgcgggggcaaggaggagaucacgccccacugcgcccugauggacugcaucauguucgacgccgccgugagcggcgggcucaacauccccauccugcgggcggugcugccgcgcgacauggucuuccggaccuccagccccaagguggugcucugaggacuagucccuguucccagagcccacuuuuuuuucuuuuuuugaaauaaaauagccugucuuucagaucuaaaaaaaaaaaaaaaaaaaaaaaaaaaaaaaaaaaaaaaaaaaaaaaaaaaaaaaaaaaaaaaaaaaaaaaaaaaaaaaaaaaaaaaaaaaaaaaaaaaa

SEQ ID NO: 17276 - RNA, 1980 nt, Artificial Sequence
  mRNA product Design a-2 (A100) comprising derived and/or modified sequence from LASV(GA391;Clade III)__AAA46284__NP (opt1)
aggagaguccgcucagccagguugcagaagcggcuuagcguguguccuaaucuucucucugcguguagguaggccugugccgcaaacaagcuuaccaugagcgccuccaaggaggugcgcagcugccuguggacccagucccuccggcgcgagcugagcggcuacugcuccaacaucaagcugcaggucgugaaggacgcccaggcgcuccugcacgggcuggacuucagcgagguguccaacguccagcggcucaugcgcaagcagaagcgggacgacggcgaccugaagcgccugcgggaccucaaccaggccgugaacaaccugguggagcugaaguccacccagcagaaguccguccuccgcguggggacgcugagcuccgacgaccugcucauccuggccgccgaccuggagaagcucaagagcaaggugacccggaccgagcgcccccuguccagcggcgucuacauggggaaccuguccagccagcagcucgaccagcggcgcgcccugcugaacaugaucggcaugaccggcguguccgggggcgggaagggcgcgagcaacgggaucgugcgggucugggacgugaagaacgccgagcuccugaacaaccaguucggcacgaugccgucccugacccucgccugccugaccaagcagggccagguggaccugaacgacgccguccaggcgcucaccgaccuggggcugaucuacacggccaaguaccccaacagcagcgaccucgaccgccugucccagagccaccccauccugaacaugaucgacaccaagaaguccagccucaacaucuccggcuacaacuucagccugggggccgccgugaaggccggcgcgugcaugcuggacggcgggaacaugcucgagaccaucaaggugagcccccagaccauggacggcauccucaagagcauccugaaggucaagaagucccuggggauguucgugagcgacacgccgggcgagcggaaccccuacgagaacauccuguacaagaucugccuguccggggacggcuggagcuacaucgccucccgcaccagcaucgugggccgggccugggagaacaccgucguggaccucgagcaggacaacaagccccagaagaucgggaacggcggguccaacaagagccugcaguccgccggcuucgccgcggggcugaucuacagccagcucaugacccugaaggacuucaagugcuucaaccugauccccaacgccaagacguggauggacaucgagggccgcccggaggaccccguggagaucgcccuguaccagcccuccagcggcugcuacguccacuucuuccgggagcccaccgaccucaagcaguucaagcaggacgccaaguacagccacgggcgcgacgugaccgaccuguucgccgcgcagccgggccugaccuccgccgucaucgaggcccucccccggaacauggugaucacgugccaggggagcgaggacauccgcaagcugcuggagucccagggccgccgggacaucaagcucaucgacaucacccugagcaaggccgacucccgcaaguucgagaacgccgugugggaccaguucaaggaccugugccacaugcacaccggggucgugguggagaagaagaagcggggcggcaaggaggagaucacgccccacugcgcgcucauggacugcaucauguucgacgccgccgucagcgggggccuggacgccaaggugcugcgcgugguccucccccgggacaugguguuccgcaccuccaccccgaaggugguccugugaggacuagucccuguucccagagcccacuuuuuuuucuuuuuuugaaauaaaauagccugucuuucagaucuaaaaaaaaaaaaaaaaaaaaaaaaaaaaaaaaaaaaaaaaaaaaaaaaaaaaaaaaaaaaaaaaaaaaaaaaaaaaaaaaaaaaaaaaaaaaaaaaaaaa

SEQ ID NO: 17277 - RNA, 1977 nt, Artificial Sequence
  mRNA product Design a-2 (A100) comprising derived and/or modified sequence from LASV(Nig08-A19;Clade III)__ADU56619__NP (opt1)
aggagaguccgcucagccagguugcagaagcggcuuagcguguguccuaaucuucucucugcguguagguaggccugugccgcaaacaagcuuaccaugagcgccuccaaggaggugaaguccuuccuguggacccagucccuccgccgggagcugagcggcuacugcuccaacaucaagcugcaggucgugaaggacgcccaggcgcuccugcacgggcuggacuucagcgagguguccaacguccagcgccucaugcggaagcagaagcgcgacgacggcgaccugaagcggcugcgcgaccucaaccaggccgugaacaaccugguggagcucaagagcacccagcagaaguccguccugcggguggggacccugagcuccgacgaccugcucgugcuggccgccgaccuggagaagcucaagagcaaggucgugcgcaccgagcggccccuguccagcggcaucuacauggggaaccuguccagccagcagcucgaccagcgcaaggcccugcugaacaugaucggcaugaccggcgggaacggcgggcggaacaccacguccgacggcaucgugcgcgucugggacgugaagaacgcggagcuccugaacaaccaguucgggaccaugccgagccugacccucgccugccugaccaagcagggccagguggaccugaacgacgccguccaggcccucacggaccugggccugaucuacaccgcgaaguaccccaacuccagcgaccucgaccggcuggcccagagccaccccauccugaacaugaucgacaccaagaaguccagccucaacaucuccggguacaacuucagccugggcgccgccgugaaggccggggcgugcaugcuggacggcggcaacaugcucgagaccaucaaggugagcccccagacgauggacgggauccucaagagcauccugaaggucaagcgcucccugggcauguucaucagcgacaccccgggggagcggaaccccuacgagaacauccuguacaagaucugccuguccggcgacggguggcccuacaucgccagccgcaccuccaucgugggccgggccugggagaacaccguggucgaccucgagagcgacaacaagccccagaagacgggcaacgggggcuccaacaagagccugcaguccgccggguucgccgcgggccugaccuacagccagcucaugacccugaaggacuccaugcugcagcuggacccgaacgccaagaccuggauggacaucgaggggcgccccgaggaccccguggagaucgcccucuaccagcccagcuccggcugcuacauccacuucuuccgggagccgacggaccugaagcaguucaagcaggacgccaaguacagccacggcaucgacgugaccgaccuguucgccgcgcagcccgggcucaccagcgccgucaucgaggcccugccccgcaacauggugaucacgugccagggcuccgaggacauccggaagcugcucgagagccaggggcgccgcgacaucaagcugaucgacaucucccugagcaaggucgacucccggaaguucgagaacgccgugugggaccaguucaaggaccucugccacaugcacaccggcaucguggucgagaagaagaagcgcgggggcaaggaggagaucacgccccacugcgcccugauggacugcaucauguucgacgcggccgugagcggcgggguggacgccaagguccugcgggccgugcucccgcgcgacaugguguuccggaccuccacccccaaggucgugcugugaggacuagucccuguucccagagcccacuuuuuuuucuuuuuuugaaauaaaauagccugucuuucagaucuaaaaaaaaaaaaaaaaaaaaaaaaaaaaaaaaaaaaaaaaaaaaaaaaaaaaaaaaaaaaaaaaaaaaaaaaaaaaaaaaaaaaaaaaaaaaaaaaaaaa

SEQ ID NO: 17278 - RNA, 1977 nt, Artificial Sequence
  mRNA product Design a-2 (A100) comprising derived and/or modified sequence from LASV(G1180-SLE-2010;Clade IV)__AIT17169__NP (opt1)
aggagaguccgcucagccagguugcagaagcggcuuagcguguguccuaaucuucucucugcguguagguaggccugugccgcaaacaagcuuaccaugagcgccuccaaggagaucaagagcuuccuguggacccagucccuccgccgggagcugagcggcuacugcuccaacaucaagcuccagguggucaaggacgcccaggcgcugcugcacgggcuggacuucagcgagguguccaacgugcagcgccucaugcggaaggagcgccgggacgacaacgaccugaagcgccugcgggaccucaaccaggccgucaacaaccugguggagcucaagagcacccagcagaaguccauccugcgcgugggcacccugaccagcgacgaccugcucauccuggccgccgaccuggagaagcucaaguccaaggucauccggaccgagcgcccccugagcgccgggguguacaugggcaaccuguccagccagcagcucgaccagcggcgcgcgcugcuguccaugaucgggaugagcuccggcaaccagcgggcccaggccggccgcgacggggugguccgggugugggacgugaagaacgucgagcuccugaacaaccaguucggcaccaugccgagccugacgcucgccugccugaccaagcagggccagguggaccugaacgacgcggugcaggcccucaccgaccuggggcugaucuacaccgccaaguaccccaacacguccgaccucgaccgccugacccagagccaccccauccugaacaugaucgacaccaagaaguccagccucaacaucagcggguacaacuucucccugggcgccgccgucaaggcgggcgccugcaugcuggacgggggcaacaugcucgagaccaucaaggugagcccccagacgauggacgggauccugaaguccauccugaaggugaagaaggcccucggcauguucaucagcgacaccccgggcgagcggaaccccuacgagaacauccuguacaagaucugccuguccggggacggcuggcccuacaucgccagccgcaccuccaucaccgggcgggccugggagaacacggucguggaccucgagagcgacggcaagccccagaaggcgggguccaacaacagcaacaagucccugcagagcgugggcuucaccgccggccugaccuacucccagcucaugacccugaaggacgccaugcugcagcuggacccgaacgccaagacguggauggacaucgaggggcgccccgaggaccccgucgagaucgcccucuaccagcccagcuccggcugcuacauccacuucuuccgggagccgaccgaccugaagcaguucaagcaggacgcgaaguacagccacgggaucgacgugaccgaccuguucgccgcccagcccggccucaccuccgccgugaucgacgcccugccccgcaacauggucaucacgugccaggggagcgacgacauccgcaagcugcucgagagccagggccggaaggacaucaagcugaucgacaucgcgcuguccaagaccgacagccgcaaguacgagaacgccgugugggaccaguacaaggaccucugccacaugcacaccggcgucgugguggagaagaagaagcgcgggggcaaggaggagaucacgccccacugcgcccugauggacugcaucauguucgacgccgcggucuccgggggccugaacaccagcgugcuccgggccgugcugccgcgggacauggucuuccgcaccuccacgccccggguggugcugugaggacuagucccuguucccagagcccacuuuuuuuucuuuuuuugaaauaaaauagccugucuuucagaucuaaaaaaaaaaaaaaaaaaaaaaaaaaaaaaaaaaaaaaaaaaaaaaaaaaaaaaaaaaaaaaaaaaaaaaaaaaaaaaaaaaaaaaaaaaaaaaaaaaaa

SEQ ID NO: 17279 - RNA, 1977 nt, Artificial Sequence
  mRNA product Design a-2 (A100) comprising derived and/or modified sequence from LASV(G1442-SLE-2011;Clade IV)__AIT17181__NP (opt1)
aggagaguccgcucagccagguugcagaagcggcuuagcguguguccuaaucuucucucugcguguagguaggccugugccgcaaacaagcuuaccaugagcgccuccaaggaggugaaguccuuccuguggacccagagccuccgccgggagcugagcggcuacugcuccaacaucaagcugcaggucgugaaggacgcccaggcgcuccugcacgggcuggacuucagcgagguguccaacguccagcgccucaugcggaagcagcgccgggacgacaacgaccugaagcgccugcgggaccucaaccaggccgugaacaaccugguggagcucaagagcacccagcagaaguccguccugcgcgugggcacccugaccagcgacgaccugcucgugcuggccgccgaccuggagaagcucaaguccaaggucauccggaccgagcgcccccugagcgccgggguguacaugggcaaccuguccagccagcagcucgaccagcggcgcgcgcugcugaacaugaucgggauguccggcggcauccaggggacccggacgggccgcgacggggugguccgggugugggacgugaagaacgccgaccuccugaacaaccaguucggcaccaugccgagccugacccucgccugccugaccaagcaggggcaggucgaccugaacgacguggugcaggcccucacggaccugggccugaucuacaccgcgaaguaccccaacgccuccgaccucgaccgccugacccagagccaccccauccugaacaugaucgacaccaagaaguccagccucaacaucagcggcuacaacuucucccugggggccgccgucaaggccggcgcgugcaugcuggacgggggcaacaugcucgagacgaucaaggugagcccccagaccauggacggcauccugaaguccauccugaaggugaagaagacccucgggauguucaucagcgacaccccgggcgagcggaaccccuacgagaacauccuguacaagaucugccuguccggggacggcuggcccuacaucgccagccgcacguccaucaccgggcgggccugggagaacaccgucguggaccucgagagcgacggcaagccccagaaggccggcuccaacaacagcaacaagucccugcagagcgccggguucgcggccggccugaccuacucccagcucaugacgcugaaggacgccaugcugcagcuggacccgaacgccaagaccuggauggacaucgaggggcgccccgaggaccccguggagaucgcccucuaccagcccagcuccggcugcuacauccacuucuuccgggagccgaccgaccugaagcaguucaagcaggacgcgaaguacagccacgggaucgacgucaccgaccuguucgccgcccagcccggccucacguccgccgugaucgaggcccugccccgcaacauggucaucacgugccagggcagcgacgacaucaagaagcugcucgagucccaggggcgcaaggacaucaagcugaucgacaucgcgcugagcaagaccgacagccggaaguacgagaacgccgugugggaccaguacaaggaccucugccacaugcacaccggcguggucguggagaagaagaagcgcgggggcaaggaggagaucaccccgcacugcgcccugauggacugcaucauguucgacgccgcgguguccgggggccugaacacccucguccugcgggccgugcugccccgcgacaugguguuccggaccagcacgccccgcgucgugcucugaggacuagucccuguucccagagcccacuuuuuuuucuuuuuuugaaauaaaauagccugucuuucagaucuaaaaaaaaaaaaaaaaaaaaaaaaaaaaaaaaaaaaaaaaaaaaaaaaaaaaaaaaaaaaaaaaaaaaaaaaaaaaaaaaaaaaaaaaaaaaaaaaaaaa

SEQ ID NO: 17280 - RNA, 1977 nt, Artificial Sequence
  mRNA product Design a-2 (A100) comprising derived and/or modified sequence from LASV(G3010-SLE-2013;Clade IV)__AIT17345__NP (opt1)
aggagaguccgcucagccagguugcagaagcggcuuagcguguguccuaaucuucucucugcguguagguaggccugugccgcaaacaagcuuaccaugagcgccuccaaggagaucaagagcuuccuguggacccagucccuccgccgggagcugagcggcuacugcuccaacaucaagcuccagguggucaaggacgcccaggcgcugcugcacgggcuggacuucagcgagguguccaacgugcagcgccucaugcggaaggagcgccgggacgacaacgaccugaagcgccugcgggaccucaaccaggccgucaacaaccugguggagcucaagagcacccagcagaaguccauccugcgcgugggcacccugaccagcgacgaccugcucauccuggccgccgaccuggagaagcucaaguccaaggucacccggaccgagcgcccccugagcgccgggguguacaugggcaaccuguccagccagcagcucgaccagcggcgcgcgcugcuguccaugaucgggaugagcuccggcgugcagggcgcccgggccgggcgcgacggcgucgugcgggugugggacgucaagaacgccgagcuccugaacaaccaguucgggacgaugccgagccugacccucgcgugccugaccaagcagggccagguggaccugaacgacgugguccaggcccucaccgaccuggggcugaucuacacggccaaguaccccaacaccuccgaccucgaccgccugacccagagccaccccauccugaacaugaucgacaccaagaaguccagccucaacaucagcggcuacaacuucucccugggcgccgccgugaaggcgggggccugcaugcuggacggcgggaacaugcucgagacgaucaaggugagcccccagaccauggacggcauccugaaguccauccugaaggucaagaaggcccucggcauguucaucagcgagaccccgggggagcggaaccccuacgagaacauccuguacaagaucugccuguccggcgacggguggcccuacaucgccagccgcaccuccaucacgggccgggccugggagaacaccgugguggaccucgagagcgacgggaagccccagaaggcgggcuccaacaacagcaacaagucccugcagagcgccggcuucaccgccgggcugaccuacucccagcucaugacgcugaaggacgccaugcugcagcuggacccgaacgccaagaccuggauggacaucgagggccgccccgaggaccccgucgagguggcgcucuaccagcccagcuccgggugcuacauccacuucuuccgggagccgaccgaccugaagcaguucaagcaggacgccaaguacagccacggcaucgacgugaccgaccuguucgccgcccagcccgggcucacguccgccgucaucgacgcgcugccccgcaacauggugaucacgugccagggcagcgacgacaucaagaagcugcucgagagccagggccgcaaggacaucaagcugaucgacaucgcccuguccaagaccgacagccggaaguacgagaacgccgucugggaccaguacaaggaccucugccacaugcacaccggggugguggucgagaagaagaagcgcggcgggaaggaggagaucaccccgcacugcgcccugauggacugcaucauguucgacgcggccguguccggcgggcugaacaccagcgugcuccgggccguccugccccgcgacaugguguuccggaccuccacgccccgcgugguccugugaggacuagucccuguucccagagcccacuuuuuuuucuuuuuuugaaauaaaauagccugucuuucagaucuaaaaaaaaaaaaaaaaaaaaaaaaaaaaaaaaaaaaaaaaaaaaaaaaaaaaaaaaaaaaaaaaaaaaaaaaaaaaaaaaaaaaaaaaaaaaaaaaaaaa

SEQ ID NO: 17281 - RNA, 1977 nt, Artificial Sequence
  mRNA product Design a-2 (A100) comprising derived and/or modified sequence from LASV(G502-SLE-2009;Clade IV)__AIT17127__NP (opt1)
aggagaguccgcucagccagguugcagaagcggcuuagcguguguccuaaucuucucucugcguguagguaggccugugccgcaaacaagcuuaccaugagcgccuccaaggagaucaagagcuuccuguggacccagucccuccgccgggagcugagcggcuacugcuccaacaucaagcuccagguggucaaggacgcccaggcgcugcugcacgggcuggacuucagcgagguguccaacgugcagcgccucaugcggaaggagcgccgggacgacaacgaccugaagcgccugcgggaccucaaccaggccgucaacaaccugguggagcucaagagcacccagcagaaguccauccugcgcgugggcacccugaccagcgacgaccugcucauccuggccgccgaccuggagaagcucaaguccaaggucauccggaccgagcgcccccugagcgccgggguguacaugggcaaccuguccagccagcagcucgaccagcggcgcgcgcugcuguccaugaucgggaugagcggcggcaaccagggggugcgggccggcaaggacggggucgugcgcgugugggacgucaagaacgccgagcuccugaacaaccaguucggcaccaugccgucccugacgcucgccugccugaccaagcagggccagguggaccugaacgacgcggugcaggcccucaccgaccuggggcugaucuacaccgccaaguaccccaacacgagcgaccucgaccggcugacccagucccaccccauccugaacaugaucgacaccaagaaguccagccucaacaucuccggcuacaacuucagccugggggccgccgucaaggcgggcgccugcaugcuggacgggggcaacaugcucgagaccaucaaggugagcccccagacgauggacggcauccucaagagcauccugaaggugaagaaggcccuggggauguucaucuccgacaccccgggcgagcgcaaccccuacgagaacauccuguacaagaucugccugagcggggacggcuggcccuacaucgccucccggaccagcaucaccgggcgcgccugggagaacacggucguggaccucgaguccgacggcaagccccagaaggcgggcagcaacaacuccaacaagagccugcaguccgccggguucaccgccggccugaccuacagccagcucaugacccugaaggacgccaugcugcagcuggacccgaacacgaagaccuggauggacaucgaggggcggcccgaggaccccguggagaucgcccucuaccagcccuccagcggcugcuacauccacuucuuccgcgagccgaccgaccugaagcaguucaagcaggacgcgaaguacucccacgggaucgacgucaccgaccuguucgccgcccagcccggccucacgagcgccgugaucgacgcccugccccggaacauggugaucacgugccagggcuccgacgacauccgcaagcugcucgagagccaggggcgcaaggacaucaagcugaucgacaucgcgcugaacaagaccgacagccggaaguacgagaacgccgucugggaccaguacaaggaccucugccacaugcacaccggcguggucguggagaagaagaagcgcgggggcaaggaggagaucaccccgcacugcgcccugauggacugcaucauguucgacgccgcgguguccgggggccugaacaccagcguccuccgggccgugcugccccgcgacaugguguuccggaccuccacgccccgcgucgugcugugaggacuagucccuguucccagagcccacuuuuuuuucuuuuuuugaaauaaaauagccugucuuucagaucuaaaaaaaaaaaaaaaaaaaaaaaaaaaaaaaaaaaaaaaaaaaaaaaaaaaaaaaaaaaaaaaaaaaaaaaaaaaaaaaaaaaaaaaaaaaaaaaaaaaa

SEQ ID NO: 17282 - RNA, 1977 nt, Artificial Sequence
  mRNA product Design a-2 (A100) comprising derived and/or modified sequence from LASV(G733-SLE-2010;Clade IV)__AIT17155__NP (opt1)
aggagaguccgcucagccagguugcagaagcggcuuagcguguguccuaaucuucucucugcguguagguaggccugugccgcaaacaagcuuaccaugagcgccuccaaggagaucaagagcuuccuguggacccagucccuccgccgggagcugagcggcuacugcuccaacaucaagcuccagguggucaaggacgcccaggcgcugcugcacgggcuggacuucagcgagguguccaacgugcagcgccucaugcggaaggagcgccgggacgacaacgaccugaagcgccugcgggaccucaaccaggccgucaacaaccugguggagcucaagagcacccagcagaaguccgugcugcgcgucggcacccugaccagcgacgagcugcucgugcuggccgccgaccuggagaagcucaaguccaaggugauccggaccgagcgcccccugagcgccggggucuacaugggcaaccuguccagccagcagcucgaccagcggcgcgcgcugcuguccaugaucgggaugagcggcggcaaccagggggcccggaccggccgcgacgggguggugcgggucugggacgugaagaacgccgagcuccugaacaaccaguucggcaccaugccgucccugacccucgccugccugaccaagcagggccagguggaccugaacgacgcgguccaggcccucaccgaccuggggcugaucuacacggccaaguaccccaacaccagcgaccucgaccgccugacccagucccaccccauccugaacaugaucgacaccaagaaguccagccucaacaucuccggcuacaacuucagccugggggccgccgugaaggcgggcgccugcaugcuggacgggggcaacaugcucgagacgaucaaggugagcccccagaccauggacggcauccucaagagcauccugaaggucaagaaggcccuggggauguucaucuccgacaccccgggcgagcggaaccccuacgagaacauccuguacaagaucugccugagcggggacggcuggcccuacaucgccucccgcaccagcaucacggggcgggccugggagaacaccgugguggaccucgaguccgacggcaagccccagaaggcgggcagcaacaacuccaacaagagccugcaguccgccggguucaccgccggccugaccuacagccagcucaugacgcugaaggacgccaugcugcagcuggacccgaacgccaagaccuggauggacaucgaggggcgccccgaggaccccgucgagaucgcgcucuaccagcccuccagcggcugcuacauccacuucuuccgggagccgaccgaccugaagcaguucaagcaggacgccaaguacucccacgggaucgacgugaccgaccuguucgccgcccagcccggccucacgagcgccgugaucgacgcgcugccccgcaacauggucaucacgugccagggcuccgacgacauccgcaagcugcucgagagccaggggcggaaggacaucaagcugaucgacaucgcccugagcaagaucgacucccgcaaguacgagaacgccgugugggaccaguacaaggaccucugccacaugcacaccggcgucgugguggagaagaagaagcgcgggggcaaggaggagaucacgccccacugcgcccugauggacugcaucauguucgacgcggccgucagcgggggccugaacucccucgugcugcgggccgugcugccgcgggacauggucuuccgcaccagcacgccccggguggugcucugaggacuagucccuguucccagagcccacuuuuuuuucuuuuuuugaaauaaaauagccugucuuucagaucuaaaaaaaaaaaaaaaaaaaaaaaaaaaaaaaaaaaaaaaaaaaaaaaaaaaaaaaaaaaaaaaaaaaaaaaaaaaaaaaaaaaaaaaaaaaaaaaaaaaa

SEQ ID NO: 17283 - RNA, 1977 nt, Artificial Sequence
  mRNA product Design a-2 (A100) comprising derived and/or modified sequence from MOPV/LASV reassortant(IGS-1;Clade IV)__AFY05578__NP (opt1)
aggagaguccgcucagccagguugcagaagcggcuuagcguguguccuaaucuucucucugcguguagguaggccugugccgcaaacaagcuuaccaugagcgccuccaaggagaucaagagcuuccuguggacccagucccuccgccgggagcugagcggcuacugcuccaacaucaagcuccagguggucaaggacgcccaggcgcugcugcacgggcuggacuucagcgagguguccaacgugcagcgccucaugcggaaggagcgccgggacgacaacgaccugaagcgccugcgggaccucaaccaggccgucaacaaccugguggagcucaagagcacccagcagaaguccauccugcgcgugggcacccugaccagcgacgaccugcucauccuggccgccgaccuggagaagcuccgguccaaggucauccgcaccgagcggccccugagcgccgggguguacaugggcaaccuguccagccagcagcucgaccagcgccgggcgcugcugaacaugaucgggauguccggcggcaaccagggggcccgcgccggccgggacggggugguccgcgugugggacgugaagaacgccgagcuccugagcaaccaguucggcaccaugccgucccugacgcucgcgugccugaccaagcaggggcaggucgaccugaacgacgccgugcaggcccucaccgaccugggccugaucuacaccgccaaguaccccaacacgagcgaccucgaccggcugacccagucccaccccauccugaacaugaucgacaccaagaaguccagccucaacaucuccggcuacaacuucagccugggggccgcggugaaggccggcgccugcaugcuggacgggggcaacaugcucgagaccaucaaggucagcccccagacgauggacggcauccucaagagcauccugaaggugaagaaggcccuggggauguucaucuccgacaccccgggcgagcgcaaccccuacgagaacauccuguacaagaucugccugagcggggacggcuggcccuacaucgccucccggaccagcaucaccgggcgcgcgugggagaacacgguggucgaccucgaguccgacggcaagccccagaaggccgacagcaacaacuccagcaagucccugcagagcgccggcuucaccgccgggcugaccuacucccagcucaugacccugaaggacgccaugcugcagcuggacccgaacgcgaagacguggauggacaucgagggccggcccgaggaccccguggagaucgcccucuaccagcccagcuccgggugcuacauccacuucuuccgcgagccgaccgaccugaagcaguucaagcaggacgccaaguacagccacggcaucgacgugaccgaccuguucgccacccagcccgggcucacguccgccgucaucgacgcgcugccccgcaacauggugaucacgugccagggcagcgacgacauccggaagcugcucgagagccagggccgcaaggacaucaagcugaucgacaucgaccuguccaagaccgacagccggaaguacgagaacgccgugugggaccaguacaaggaccucugccacaugcacaccggggucguggucgagaagaagaagcgcggcgggaaggaggagaucaccccgcacugcgcccugauggacugcaucauguucgacgccgcgguguccggcgggcugaacaccagcgugcuccgggccguccugccccgcgacaugguguuccggaccuccacgccccgcgugguccugugaggacuagucccuguucccagagcccacuuuuuuuucuuuuuuugaaauaaaauagccugucuuucagaucuaaaaaaaaaaaaaaaaaaaaaaaaaaaaaaaaaaaaaaaaaaaaaaaaaaaaaaaaaaaaaaaaaaaaaaaaaaaaaaaaaaaaaaaaaaaaaaaaaaaa

SEQ ID NO: 17284 - RNA, 1977 nt, Artificial Sequence
  mRNA product Design a-2 (A100) comprising derived and/or modified sequence from LASV(LM765-SLE-2012;Clade IV)__AIT17815__NP (opt1)
aggagaguccgcucagccagguugcagaagcggcuuagcguguguccuaaucuucucucugcguguagguaggccugugccgcaaacaagcuuaccaugagcgccuccaaggagaucaagagcuuccuguggacccagucccuccgccgggagcugagcggcuacugcuccaacaucaagcuccagguggucaaggacgcccaggcgcugcugcacgggcuggacuucagcgagguguccaacgugcagcgccucaugcggaaggagcgccgggacgacaacgaccugaagcgccugcgggaccucaaccaggccgucaacaaccugguggagcucaagagcacccagcagaaguccauccugcgcgugggcacccugaccagcgacgaccugcucauccuggccgccgaccuggagaagcucaaguccaaggucacccggaccgagcgcccccugagcgccgggguguacaugggcaaccuguccagccagcagcucgaccagcggcgcgcgcugcuggacaugaucgggauguccggcagcaaccagggcgcccgggccgggcgcgacggcgugguccgggugugggacgugaagaacgccgagcuccugaacaaccaguucgggacgaugccgucccugacccucgcgugccugaccaagcagggccaggucgaccugaacgacgccgugcaggcccucaccgaccuggggcugaucuacacggccaaguaccccaacaccagcgaccucgaccgccugacccagucccaccccauccugaacaugaucgacaccaagaaguccagccucaacaucuccggcuacaacuucagccugggcgccgcggugaaggccggggccugcaugcuggacggcgggaacaugcucgagacgaucaaggucagcccccagaccauggacggcauccucaagagcauccugaaggugaagaaggcccugggcauguucaucuccgacgccccgggggagcggaaccccuacgagaacauccuguacaagaucugccugagcggcgacggguggcccuacaucgcgucccgcaccagcaucaccggccgggccugggagaacacgguggucgaccucgaguccgacgggaagccccagaaggccggcagcaacggcuccaacaagagccugcaguccgccggguucaccgccggccugaccuacagccagcucaugacccugaaggacgcgaugcugcagcuggacccgaacgccaagacguggauggacaucgaggggcgccccgaggaccccguggagaucgcccucuaccagcccuccagcggcugcuacauccacuucuuccgggagccgaccgaccugaagcaguucaagcaggacgccaaguacucccacgggaucgacgugaccgaccuguucgccgcgcagcccggccucaccagcgccgucaucgacgcccugccccgcaacauggugaucacgugccagggcuccgacgacauccgcaagcuguucgagagccaggggcggaaggacaucaagcucaucgacaucgcccugagcaagaccgacucccgcaaguacgagaacgcggugugggaccaguacaaggaccugugccacaugcacaccggcaucgucguggagaagaagaagcgcgggggcaaggaggagaucacgccccacugcgcccucauggacugcaucauguucgacgccgccgucagcgggggccugaacaccuccgugcugcgggccgugcucccgcgggacauggucuuccgcaccagcacgccccggguggugcugugaggacuagucccuguucccagagcccacuuuuuuuucuuuuuuugaaauaaaauagccugucuuucagaucuaaaaaaaaaaaaaaaaaaaaaaaaaaaaaaaaaaaaaaaaaaaaaaaaaaaaaaaaaaaaaaaaaaaaaaaaaaaaaaaaaaaaaaaaaaaaaaaaaaaa

SEQ ID NO: 17285 - RNA, 1977 nt, Artificial Sequence
  mRNA product Design a-2 (A100) comprising derived and/or modified sequence from LASV(LM776-SLE-2012;Clade IV)__AIT17825__NP (opt1)
aggagaguccgcucagccagguugcagaagcggcuuagcguguguccuaaucuucucucugcguguagguaggccugugccgcaaacaagcuuaccaugagcgccuccaaggagaucaagagcuuccuguggacccagucccuccgccgggagcugagcuccuacugcagcaacaucaagcuccagguggucaaggacgcccaggcgcugcugcacggccuggacuucuccgaggugagcaacgugcagcgccucaugcggaaggagcgccgggacgacaacgaccugaagcgccugcgggaccucaaccaggccgucaacaaccugguggagcugaaguccacccagcagaaguccauccuccgcguggggacccugaccuccgacgaccugcucauccuggccgccgaccuggagaagcucaagagcaaggucacccggaccgagcgcccccuguccgccggcguguacauggggaaccugagcucccagcagcucgaccagcggcgcgcgcugcugagcaugaucggcauguccgggagcaaccagggcgcccgggccggccgcgacggggugguccgggugugggacgugaagaacgccgagcuccugaacaaccaguucggcacgaugccgucccugacccucgcgugccugaccaagcaggggcaggucgaccugaacgacgccgugcaggcccucaccgaccugggccugaucuacacggccaaguaccccaacaccagcgaccucgaccgccugacccagagccaccccauccugaacaugaucgacaccaagaaguccagccucaacaucuccggguacaacuucagccugggcgccgcggugaaggccggcgccugcaugcuggacgggggcaacaugcucgagacgaucaaggucagcccccagaccauggacgggauccucaagagcauccugaaggugaagaaggcccugggcauguucaucuccgacaccccgggcgagcggaaccccuacgagaacauccuguacaagaucugccugagcggggacggcuggcccuacaucgccucccgcaccagcaucacggggcgggcgugggagaacaccguggucgaccucgaguccgacggcaagccccagaaggccgggagcaacaacuccaacaagagccugcaguccgccggcuucaccgccggccugaccuacagccagcucaugacgcugaaggacgccaugcugcagcuggacccgaacgcgaagaccuggauggacaucgaggggcgccccgaggaccccguggagguggcccucuaccagcccuccagcggcugcuacauccacuucuuccgggagccgaccgaccugaagcaguucaagcaggacgccaaguacucccacgggaucgacgucaccgaccuguucgccgcccagcccggccucacgagcgcggugaucgacgcccugccccgcaacauggugaucacgugccaggggagcgacgacauccgcaagcugcucgagucccagggccggaaggacaucaagcugaucgacaucgcccugagcaagaccgacucccgcaaguacgagaacgccgucugggaccaguacaaggaccucugccacaugcacaccggcguggucguggagaagaagaagcgcgggggcaaggaggagaucaccccgcacugcgcgcugauggacugcaucauguucgacgccgccgugagcgggggccugaacaccuccguccuccgggccgugcugccccgggacaugguguuccgcaccagcacgccccgggucgugcugugaggacuagucccuguucccagagcccacuuuuuuuucuuuuuuugaaauaaaauagccugucuuucagaucuaaaaaaaaaaaaaaaaaaaaaaaaaaaaaaaaaaaaaaaaaaaaaaaaaaaaaaaaaaaaaaaaaaaaaaaaaaaaaaaaaaaaaaaaaaaaaaaaaaaa

SEQ ID NO: 17286 - RNA, 1977 nt, Artificial Sequence
  mRNA product Design a-2 (A100) comprising derived and/or modified sequence from LASV(Mad39;Clade IV)__ANH09723__NP (opt1)
aggagaguccgcucagccagguugcagaagcggcuuagcguguguccuaaucuucucucugcguguagguaggccugugccgcaaacaagcuuaccaugagcgccuccaaggagaucaagagcuuccuguggacccagucccuccgccgggagcugagcggcuacugcuccaacaucaagcuccagguggucaaggacgcccaggcgcugcugcacgggcuggacuucagcgagguguccaacgugcagcgccucaugcggaagcagcgccgggacgacaacgaccugaagcgccugcgggaccucaaccaggccgucaacaaccugguggagcugaaguccacccagcagaaguccgugcuccgcgucggcacgcugaccagcgacgaccugcucacccuggccgccgaccuggagaagcucaaguccaaggugacccggacggagcgcccccugaccgccgggguguacaugggcaaccugagcucccagcagcucgaccagcggcgcgcgcugcugaacaugaucgggaugagcggcggcaaccagggggcccggaccggccgcgacggggucgugcgggugugggacgucaagaacgccgagcuccugaacaaccaguucggcaccaugccgucccugacgcucgccugccugaccaagcagggccagguggaccugaacgacgugguccaggcgcucaccgaccuggggcugaucuacaccgccaaguaccccaacacgagcgaccucgaccgccugacccagucccaccccauccugaacaugaucgacaccaacaagagcucccucaacaucagcggcuacaacuucagccugggggccgccgugaaggccggcgcgugcaugcuggacgggggcaacaugcucgagaccaucaaggugagcccccagacgauggacggcauccucaagagcauccugaaggucaagaagucccuggggauguucaucagcgacaccccgggcgagcggaaccccuacgagaacauccuguacaagaucugccuguccggggacggcuggcccuacaucgccagccgcaccuccaucaccgggcgggccugggagaacacggugguggaccucgagagcggcggcaagccccagaaggccggguccaacaacagcaacaagucccugcagagcgccggcuucgcggccgggcugaccuacucccagcucaugacccugaaggacgccaugcugcagcuggacccgaacgccaagaccuggauggacaucgagggccgccccgaggaccccgucgagaucgcccucuaccagcccaucagcgggugcuacauccacuucuuccgggagccgacggaccugaagcaguucaagcaggacgcgaaguacucccacggcaucgacgugaccgaccuguucgccgcccagcccggccucaccagcgccgugaucgaggcccugccccgcaacauggucaucacgugccagggguccgacgacauccgcaagcuguucgagagccagggccggaaggacaucaagcucaucgacaucgcgcuguccaagaccgacagccgcaaguacgagaacgccgugugggaccaguacaaggaccugugccacaugcacaccggggucgugguggagaagaagaagaagggcgggaaggaggagaucacgccccacugcgcccucauggacugcaucauguucgacgccgcggucagcggcggccugaacacccuggugcuccgggccgugcugccgcgcgacauggucuuccggaccuccacccccaagguggugcugugaggacuagucccuguucccagagcccacuuuuuuuucuuuuuuugaaauaaaauagccugucuuucagaucuaaaaaaaaaaaaaaaaaaaaaaaaaaaaaaaaaaaaaaaaaaaaaaaaaaaaaaaaaaaaaaaaaaaaaaaaaaaaaaaaaaaaaaaaaaaaaaaaaaaa

SEQ ID NO: 17287 - RNA, 1977 nt, Artificial Sequence
  mRNA product Design a-2 (A100) comprising derived and/or modified sequence from LASV(Z0947-SLE-2011;Clade IV)__AIT17841__NP (opt1)
aggagaguccgcucagccagguugcagaagcggcuuagcguguguccuaaucuucucucugcguguagguaggccugugccgcaaacaagcuuaccaugagcgccuccaaggagaucaagagcuuccuguggacccagucccuccgccgggagcugagcggcuacugcuccaacaucaagcuccagguggucaaggacgcccaggcgcugcugcacgggcuggacuucagcgagguguccaacgugcagcgccucaugcggaaggagcgccgggacgacaacgaccugaagcgccugcgggaccucaaccaggccgucaacaaccugguggagcucaagagcacccagcagaaguccauccugcgcgugggcacccugaccagcgacgaccugcucauccuggccgccgaccuggagaagcucaaguccaaggucacccggaccgagcgcccccugagcgccgggguguacaugggcaaccuguccagccagcagcucgaccagcggcgcgcgcugcugaacaugaucgggauguccggcagcaaccagggcgcccggacggggcgcgacggcgugguccgggugugggacgugaagaacgccgagcuccugaacaaccaguucgggaccaugccgucccugacccucgccugccugaccaagcagggccaggucgaccugaacgacgcggugcaggcccucacggaccuggggcugaucuacaccgccaaguaccccaacaccagcgaccucgaccgccugacccagucccaccccauccugaacaugaucgacacgaagaaguccagccucaacaucuccggcuacaacuucagccugggcgccgccgugaaggcgggggccugcaugcuggacggcgggaacaugcucgagaccaucaaggucagcccccagaccauggacggcauccucaagagcauccugaaggugaagaaggcccugggcauguucaucuccgacgccccgggggagcggaaccccuacgagaacauccuguacaagaucugccugagcggcgacggguggcccuacaucgccucccgcaccagcaucacgggccgggcgugggagaacaccguggucgaccucgaguccgacgggaagccccagaaggccggcagcaacggcuccaacaagagccugcaguccgccggguucaccgccggccugaccuacagccagcucaugacgcugaaggacgccaugcugcagcuggacccgaacgcgaagaccuggauggacaucgaggggcgccccgaggaccccguggagaucgcccucuaccagcccuccagcggcugcuacauccacuucuuccgggagccgaccgaccugaagcaguucaagcaggacgccaaguacucccacgggaucgacgugaccgaccuguucgccgcccagcccggccucacgagcgcggucaucgacgcccugccccgcaacauggugaucacgugccagggcuccgacgacauccgcaagcuguucgagagccaggggcggaaggacaucaagcucaucgacaucgcccugagcaagaccgacucccgcaaguacgagaacgccgugugggaccaguacaaggaccugugccacaugcacaccggcaucgucguggagaagaagaagcgcgggggcaaggaggagaucaccccgcacugcgcgcucauggacugcaucauguucgacgccgccgucagcgggggccugaacaccuccgugcugcgggccgugcucccccgggacauggucuuccgcaccagcacgccccggguggugcugugaggacuagucccuguucccagagcccacuuuuuuuucuuuuuuugaaauaaaauagccugucuuucagaucuaaaaaaaaaaaaaaaaaaaaaaaaaaaaaaaaaaaaaaaaaaaaaaaaaaaaaaaaaaaaaaaaaaaaaaaaaaaaaaaaaaaaaaaaaaaaaaaaaaaa

SEQ ID NO: 17288 - RNA, 1977 nt, Artificial Sequence
  mRNA product Design a-2 (A100) comprising derived and/or modified sequence from LASV(Josiah;Clade IV)__NP_694869__NP (opt4)
aggagaguccgcucagccagguugcagaagcggcuuagcguguguccuaaucuucucucugcguguagguaggccugugccgcaaacaagcuuaccaugagcgccagcaaggagaucaagagcuuccuguggacccagagccugagaagagagcugagcggcuacugcagcaacaucaagcugcagguggugaaggacgcccaggcccugcugcacggccuggacuucagcgaggugagcaacgugcagagacugaugagaaaggagagaagagacgacaacgaccugaagagacugagagaccugaaccaggccgugaacaaccugguggagcugaagagcacccagcagaagagcauccugagagugggcacccugaccagcgacgaccugcugauccuggccgccgaccuggagaagcugaagagcaaggugaucagaaccgagagaccccugagcgccggcguguacaugggcaaccugagcagccagcagcuggaccagagaagagcccugcugaacaugaucggcaugagcggcggcaaccagggcgccagagccggcagagacggcguggugagagugugggacgugaagaacgccgagcugcugaacaaccaguucggcaccaugcccagccugacccuggccugccugaccaagcagggccagguggaccugaacgacgccgugcaggcccugaccgaccugggccugaucuacaccgccaaguaccccaacaccagcgaccuggacagacugacccagagccaccccauccugaacaugaucgacaccaagaagagcagccugaacaucagcggcuacaacuucagccugggcgccgccgugaaggccggcgccugcaugcuggacggcggcaacaugcuggagaccaucaaggugagcccccagaccauggacggcauccugaagagcauccugaaggugaagaaggcccugggcauguucaucagcgacacccccggcgagagaaaccccuacgagaacauccuguacaagaucugccugagcggcgacggcuggcccuacaucgccagcagaaccagcaucaccggcagagccugggagaacaccgugguggaccuggagagcgacggcaagccccagaaggccgacagcaacaacagcagcaagagccugcagagcgccggcuucaccgccggccugaccuacagccagcugaugacccugaaggacgccaugcugcagcuggaccccaacgccaagaccuggauggacaucgagggcagacccgaggaccccguggagaucgcccuguaccagcccagcagcggcugcuacauccacuucuucagagagcccaccgaccugaagcaguucaagcaggacgccaaguacagccacggcaucgacgugaccgaccuguucgccacccagcccggccugaccagcgccgugaucgacgcccugcccagaaacauggugaucaccugccagggcagcgacgacaucagaaagcugcuggagagccagggcagaaaggacaucaagcugaucgacaucgcccugagcaagaccgacagcagaaaguacgagaacgccgugugggaccaguacaaggaccugugccacaugcacaccggcguggugguggagaagaagaagagaggcggcaaggaggagaucaccccccacugcgcccugauggacugcaucauguucgacgccgccgugagcggcggccugaacaccagcgugcugagagccgugcugcccagagacaugguguucagaaccagcacccccagaguggugcugugaggacuagucccuguucccagagcccacuuuuuuuucuuuuuuugaaauaaaauagccugucuuucagaucuaaaaaaaaaaaaaaaaaaaaaaaaaaaaaaaaaaaaaaaaaaaaaaaaaaaaaaaaaaaaaaaaaaaaaaaaaaaaaaaaaaaaaaaaaaaaaaaaaaaa

SEQ ID NO: 17289 - RNA, 1977 nt, Artificial Sequence
  mRNA product Design a-2 (A100) comprising derived and/or modified sequence from LASV(LP;Clade I)__AAF86702__NP (opt4)
aggagaguccgcucagccagguugcagaagcggcuuagcguguguccuaaucuucucucugcguguagguaggccugugccgcaaacaagcuuaccaugagcaacagcaaggagaucaagagcuuccuguggacccagagccugagaagagagcugagcggcuacugcagcaacaucaagcugcagguggugaaggacgcccaggcccugcugcacggccuggacuucagcgaggugagcaacgugcagagacugaugagaaagcagaagagagacgacgccgaccugaagagacugagagaccugaaccaggccgugaacaaccugguggagcugaagagcacccagcagaagaacgugcugagagugggcacccugagcagcgacgaccugaucacccuggccgccgaccuggagaagcugaagagcaaggugaucagaaccgagagaccccugagcagcggcguguacaugggcaaccugagcagccagcagcuggaccagagaagagcccugcugagcaugaucggcaugagcggcggcccccagggcaacagaaccggcggcgacggcguggugagagugugggacgugaagaacgccgagcugcugaacaaccaguucggcaccaugcccagccugacccuggccugccugaccaagcagggccagguggaccugaacgacgccgugcaggcccugaccgaccugggccugaucuacaccgccaaguaccccaacagcagcgaccuggacaugcugacccagagccaccccauccugggcaugguggacaccaagaagagcagccugaacaucagcggcuacaacuucagccugggcgccgccgugaaggccggcgccugcaugcuggacggcggcaacaugcuggagaccaucaaggugagcccccagaccauggacggcauccugaagagcauccugaaggugaagagaagccugggcauguucaucagcgacacccccggcgagagaaaccccuacgagaacauccuguacaagaucugccugagcggcgagggcuggcccuacaucgccagcagaaccagcaucaccggcagagccugggagaacacccugguggaccuggagagcgacaacaagccccccaagcugaacagcgccggcagcaacaagagccugcaggccgccggccugaacgccggccugaccuacagccagcugaugacccugaaggacugcaugcugcagcuggaccccagcagcaagaccuggaucgacaucgagggcagacccgaggaccccguggagaucgcccuguuccagcccagcagcggcugcuacauccacuucuucagagagcccaccgaccugaagcaguucaagcaggacgccaaguacagccacggcaucgacgugaccgaccuguucagcacccagcccggccugaccagcgccgugaucgaggcccugcccagaaacauggugcugaccugccagggcagcgacgacaucaagaagcugcuggagagccagggcagaagagacaucaagcugaucgacaucagccugagcaaggccgacagcagaaaguucgagaacgccgugugggaccaguacaaggaccugugccacaugcacaccggcguggugguggagaagaagaagagaggcggcaaggaggagaucaccccccacugcgcccugcuggacugcaucauguucgacgccgccaccaccggcagccugaacaucaccacccugagagccgugcugcccagagacaugguguucagaaccagcacccccaagguggugcugugaggacuagucccuguucccagagcccacuuuuuuuucuuuuuuugaaauaaaauagccugucuuucagaucuaaaaaaaaaaaaaaaaaaaaaaaaaaaaaaaaaaaaaaaaaaaaaaaaaaaaaaaaaaaaaaaaaaaaaaaaaaaaaaaaaaaaaaaaaaaaaaaaaaaa

SEQ ID NO: 17290 - RNA, 1977 nt, Artificial Sequence
  mRNA product Design a-2 (A100) comprising derived and/or modified sequence from LASV(803213;Clade II)__AAF86704__NP (opt4)
aggagaguccgcucagccagguugcagaagcggcuuagcguguguccuaaucuucucucugcguguagguaggccugugccgcaaacaagcuuaccaugagcgccagcaaggaggugaagagcuuccuguggacccagagccugagaagagagcugagcggcuacugcagcaacaucaagcugcagguggugaaggacgcccaggcccugcugcacggccuggacuucagcgaggugaacaacgugcagagacugaugagaaagcagaagagagacgacggcgaccugaagagacugagagaccugaaccaggccgugaacaaccugguggagcugaagagcacccagcagaagagcauccugagagugggcacccugaccagcgacgaccugcugacccuggccgccgaccuggagaagcugaagagcaaggugaucagaaccgagagaccccugagcagcggcguguacaugggcaaccugagcacccagcagcuggagcagagaagagcccugcugaacaugaucggcauggugggcggcgcccagggcacccagcccggcagagacggcguggugagagugugggacgugaagaaccccgaccugcugaacaaccaguucggcaccaugcccagccugacccuggccugccugaccaagcagggccagguggaccugaacgacgccgugcuggcccugaccgaccugggccugaucuacaccgccaaguaccccaacagcagcgaccuggacagacugagccagagccaccccauccugaacaugguggacaccaagaagagcagccugaacaucagcggcuacaacuucagccugggcgccgccgugaaggccggcgccugcaugcuggacggcggcaacaugcuggagaccaucaaggugaccccccagaccauggacggcauccugaagagcauccugaaggugaagagaagccugggcauguucgugagcgacacccccggcgagagaaaccccuacgagaacauccuguacaagaucugccugagcggcgacggcuggcccuacaucgccagcagaaccagcaucgugggcagagccugggagaacaccaccguggaccuggagagcgacggcaagccccagaaggugggcaccgccggcagcaacaagagccugcagagcgccggcuuccccaccggccugaccuacagccagcugaugacccugaaggacagcaugaugcagcuggaccccagcgccaagaccuggaucgacaucgagggcagacccgaggaccccguggagaucgcccuguaccagcccaugagcggcugcuacauccacuucuucagagagcccaccgaccugaagcaguucaagcaggacgccaaguacagccacggcaucgacguggccgaccuguuccccgcccagcccggccugaccagcgccgugaucgaggcccugcccagaaacauggugcugaccugccagggcagcgacgacaucaagaagcugcuggacagccagggcagaagagacaucaagcugaucgacaucagccugagcaagguggacagcagaaaguucgagaacgccgugugggaccagugcaaggaccugugccacaugcacaccggcguggugguggagaagaagaagagaggcggcaaggaggagaucaccccccacugcgcccugauggacugcaucauguucgacgccgccgugagcggcggccugaacauccccgugcugagagccgugcugcccagagacaugguguucagaaccagcagccccaagguggugcugugaggacuagucccuguucccagagcccacuuuuuuuucuuuuuuugaaauaaaauagccugucuuucagaucuaaaaaaaaaaaaaaaaaaaaaaaaaaaaaaaaaaaaaaaaaaaaaaaaaaaaaaaaaaaaaaaaaaaaaaaaaaaaaaaaaaaaaaaaaaaaaaaaaaaa

SEQ ID NO: 17291 - RNA, 1980 nt, Artificial Sequence
  mRNA product Design a-2 (A100) comprising derived and/or modified sequence from LASV(GA391;Clade III)__CAA36646__NP (opt4)
aggagaguccgcucagccagguugcagaagcggcuuagcguguguccuaaucuucucucugcguguagguaggccugugccgcaaacaagcuuaccaugagcgccagcaaggaggugagaagcuuccuguggacccagagccugagaagagagcugagcggcuacugcagcaacaucaagcugcagguggugaaggacgcccaggcccugcugcacggccuggacuucagcgaggugagcaacgugcagagacugaugagaaagcagaagagagacgacggcgaccugaagagacugagagaccugaaccaggccgugaacaaccugguggagcugaagagcacccagcagaagagcgugcugagagugggcacccugagcagcgacgaccugcugauccuggccgccgaccuggagaagcugaagagcaaggugaccagaaccgagagaccccugagcagcggcguguacaugggcaaccugagcagccagcagcuggaccagagaagagcccugcugaacaugaucggcaugaccggcgugagcggcggcggcaagggcgccagcgacggcaucgugagagugugggacgugaagaacgccgagcugcugaacaaccaguucggcaccaugcccagccugacccuggccugccugaccaagcagggccagguggaccugaacgacgccgugcaggcccugaccgaccugggccugaucuacaccgccaaguaccccaacagcagcgaccuggacagacugagccagagccaccccauccugaacaugaucgacaccaagaagagcagccugaacaucagcggcuacaacuucagccugggcgccgccgugaaggccggcgccugcaugcuggacggcggcaacaugcuggagaccaucaaggugagcccccagaccauggacggcauccugaagagcauccugaaggugaagaagagccugggcauguucgugagcgacacccccggcgagagaaaccccuacgagaacauccuguacaagaucugccugagcggcgacggcuggcccuacaucgccagcagaaccagcaucgugggcagagccugggagaacaccgugguggaccuggagcaggacaacaagccccagaagaucggcaacggcggcagcaacaagagccugcagagcgccggcuucgccgccggccugaccuacagccagcugaugacccugaaggacuucaagugcuucaaccugauccccaacgccaagaccuggauggacaucgagggcagacccgaggaccccguggagaucgcccuguaccagcccagcagcggcugcuacgugcacuucuucagagagcccaccgaccugaagcaguucaagcaggacgccaaguacagccacggcaucgacgugaccgaccuguucgccgcccagcccggccugaccagcgccgugaucgaggcccugcccagaaacauggugaucaccugccagggcagcgaggacaucagaaagcugcuggagagccagggcagaagagacaucaagcugaucgacaucacccugagcaaggccgacagcagaaaguucgagaacgccgugugggaccaguucaaggaccugugccacaugcacaccggcguggugguggagaagaagaagagaggcggcaaggaggagaucaccccccacugcgcccugauggacugcaucauguucgacgccgccgugagcggcggccuggacgccaaggugcugagaguggugcugcccagagacaugguguucagaaccagcacccccaagguggugcugugaggacuagucccuguucccagagcccacuuuuuuuucuuuuuuugaaauaaaauagccugucuuucagaucuaaaaaaaaaaaaaaaaaaaaaaaaaaaaaaaaaaaaaaaaaaaaaaaaaaaaaaaaaaaaaaaaaaaaaaaaaaaaaaaaaaaaaaaaaaaaaaaaaaaa

SEQ ID NO: 17292 - RNA, 1977 nt, Artificial Sequence
  mRNA product Design a-2 (A100) comprising derived and/or modified sequence from LASV(AV;Clade V)__CCA30315__NP (opt4)
aggagaguccgcucagccagguugcagaagcggcuuagcguguguccuaaucuucucucugcguguagguaggccugugccgcaaacaagcuuaccaugagcgccagcaaggaggugaagagcuuccuguggacccagagccugagaagagagcugagcggcuacugcagcaacaucaagcugcagguggugaaggacgcccaggcccugcugcacggccuggacuucagcgaggugagcaacgugcagagacugaugagaaagcagagaagagacgacagcgaccugaagagacugagagaccugaaccaggccgugaacaaccugguggagcugaagagcacccagcagaagagcgugcugagagugggcacccugagcagcgacgaccugcugacccuggccgccgaccuggagaagcugaagagcaaggugaccagaaccgagagaccccugagcagcggcguguacaugggcaaccugagcagccagcagcuggaccagagaagagcccugcugaaccugaucggcaugaccaacggcagccagggcagccaggccggcagagacggcguggugagagugugggacgugaagaacgccgagcugcugaacaaccaguucggcaccaugcccagccugacccuggccugccugaccaagcagggccagguggaccugaacgacguggugcaggcccugaccgaccugggccugaucuacaccgccaaguaccccaacaccagcgaccuggacagacugacccagagccaccccauccugaacaugaucgacaccaagaagagcagccugaacaucagcggcuacaacuucagccugggcgccgccgugaaggccggcgccugcaugcuggacggcggcaacaugcuggagaccaucaaggugagcccccagagcauggacggcauccugaagagcauccugaaggugaagagagcccugggcauguucgugagcgacacccccggcgagagaaaccccuacgagaacauccuguacaagaucugccugagcggcgacggcuggcccuacaucgccagcagaaccagcaucgugggcagagccugggagaacaccgugguggaccuggagaccgacggcaagccccagaagaucggcagcggcaacagcaacaagagccugcagagcgccggcuucagcgccggccugaccuacagccagcugaugacccugaaggacgccaugcugcagcuggaccccaacgccaagaccuggauggacaucgagggcagacccgaggaccccguggagguggcccuguaccagcccaucagcggcugcuacauccacuucuucagagagcccaccgaccugaagcaguucaagcaggacgccaaguacagccacggcaucgacaucgccgaccuguucgccgcccagcccggccugaccagcgccgugaucgaggcccugcccagaaacauggugaucaccugccagggcagcgaggacaucaagaagcugcuggagagccagggcagaaaggacaucaagcugaucgacaucgcccugagcaagaucgacagcagaaaguucgagaacgccgugugggaccaguacaaggaccugugccacaugcacaccggcguggugguggagaagaagaagagaggcggcaaggaggagaucaccccccacugcgcccugauggacugcaucauguucgacgccgccgugagcggcggccugaacacccuggugcugagagccgugcugcccagagacaugguguucagaaccagcacccccagaguggugcugugaggacuagucccuguucccagagcccacuuuuuuuucuuuuuuugaaauaaaauagccugucuuucagaucuaaaaaaaaaaaaaaaaaaaaaaaaaaaaaaaaaaaaaaaaaaaaaaaaaaaaaaaaaaaaaaaaaaaaaaaaaaaaaaaaaaaaaaaaaaaaaaaaaaaa

SEQ ID NO: 17293 - RNA, 1977 nt, Artificial Sequence
  mRNA product Design a-2 (A100) comprising derived and/or modified sequence from LASV(Togo/2016/7082;Clade VI)__AMR44578__NP (opt4)
aggagaguccgcucagccagguugcagaagcggcuuagcguguguccuaaucuucucucugcguguagguaggccugugccgcaaacaagcuuaccaugagcaacagcaaggaggugaagagcuuccuguggacccagagccugagaagagagcugagcggcuacugcagcaacaucaagcugcagguggugaaggacgcccaggcccugcugcacggccuggacuucagcgaggugagcaacgugcagagacugaugagaaagcagaagagagacgacggcgaccugaagagacugagagaccugaaccaggccgugaacaaccugguggagcugaagagcgugcagcagaagagcauccugagagugggcacccugaccagcgacgaccugcugacccuggccgccgaccuggagaagcugaagagcaaggugaccagaaccgagagaccccugagcagcggcguguacaugggcaaccugagcagccagcagcuggaccagagaagagcccugcugagcaugaucggcaugagcggcggcaaccagaacagccagcccaagggcgacggcguggugagagugugggacgugaagaacgccgaccugcugaacaaccaguucggcaccaugcccagccugacccuggccugccugaccaagcagggccagguggaccugaacgacgccgugcaggcccugaccgaccugggccugaucuacaccgccaaguaccccaacagcagcgaccuggacagacugagccagagccaccccauccugaacaugaucgacaccaagaagagcagccugaacaucagcggcuacaacuucagccugggcgccgccaucaagaccggcgccugcaugcuggacggcggcaacaugcuggagaccaucaaggugaccccccagaccauggacggcauccugaagagcauccugaaggugaagagaagccugggcauguucaucagcgacacccccggcgagagaaaccccuacgagaacauccuguacaagaucugccugagcggcgacggcuggcccuacaucgccagcagaaccgccaucaucggcagagccugggagaacaccgugguggaccuggagagcgacagcaagccccagaagaucggcagcaacggcagcaacaagagccugcagagcgccggcuucgcccccggccugaccuacagccagcugaugacccugaaggacagcaugcugcagcuggaccccaacgccaagaccuggaucgacaucgagggcagacccgaggaccccguggagguggcccuguuccagcccaucagcggcugcuacauccacuucuucagagagcccaccgaccugaagcaguucaagcaggacgccaaguacagccacggcaucgacgugaccgaccuguucgccgcccagcccggccugaccagcgccgugaucgaggcccugcccagaaacauggugcugaccugccagggcagcgacgacaucaagaagcugcuggacagccagggcagaagagacaucaagcugaucgacgugagccugaacaagaucgacagcagaaaguucgagaacgccgugugggaccaguacaaggaccugugccacaugcacaccggcguggugguggagaagaagaagaagggcggcaaggaggagaucaccccccacugcgcccugcuggacugcaucauguucgacgccgccgugagcggcggccugaacgccaccgugcugagagccgugcugcccagagacaugguguucagaaccagcagccccaagguggugcugugaggacuagucccuguucccagagcccacuuuuuuuucuuuuuuugaaauaaaauagccugucuuucagaucuaaaaaaaaaaaaaaaaaaaaaaaaaaaaaaaaaaaaaaaaaaaaaaaaaaaaaaaaaaaaaaaaaaaaaaaaaaaaaaaaaaaaaaaaaaaaaaaaaaaa

SEQ ID NO: 17294 - RNA, 1977 nt, Artificial Sequence
  mRNA product Design a-2 (A100) comprising derived and/or modified sequence from LASV(KAK-428;Clade n.d. (VII))__ANH09741__NP (opt4)
aggagaguccgcucagccagguugcagaagcggcuuagcguguguccuaaucuucucucugcguguagguaggccugugccgcaaacaagcuuaccaugagcaacagcaaggaggugaagagcuuccuguggacccagagccugagaagagagcugagcggcuacugcaccaacaucaagcugcagguggugaaggacgcccaggcccugcugcacggccuggacuucagcgaggugagcaacgugcagagacugaugagaaagcagaagagagacgacaacgaccugaagagacugagagaccugaaccaggccgugaacaaccugguggagcugaagagcgugcagcagaagagcgugcugaaggugggcacccugaacagcgacgaccugcugacccuggccgccgaccuggagaagcugaagagcaagguggugagaaccgagagaccccugagcagcggcguguacaugggcaaccugagcagccagcagcuggaccagagaagagcccugcugaacaugaucggcauggccggcggcagccagggcaaccagcccagcagagacggcguggugagagugugggacgugaagaacgccgaccugcugaacaaccaguucggcaccaugcccagccugacccuggccugccugaccaagcagggccagguggaccugaacgacguggugcuggcccugaccgaccugggccugaucuacaccgccaaguaccccaacagcagcgaccuggacagacugagccagaaccaccccgugcugaacaugaucgacgugaacaagagcagccugaacaucagcggcuacaacuucagccugggcgccgccgugaaggccggcgccugcaugcuggacggcggcaacaugcuggagaccaucaagaucagcccccagaccguggacggcauccugaagagcauccugaaggugaagagagcccugggcauguucgugagcgacacccccggcgagagaaaccccuacgagaacauccuguacaaggugugccugagcggcaacggcuggcccuacaucgccagcagaaccagcaucgugggcagagccugggagaacaccgugguggaccuggagagcaacaagaaccagcccaaggugggcaacaacggcagcaacaagaugcugcagagcagcggcuucgccaccggccugaccuacagccagcugaugacccugagagacagcaugcugcagcuggaccccaccgccaagaccuggaucgacaucgagggcagacccgaggaccccguggagcuggcccuguuccagcccagcagcggcugcuacauccacuucuucagagagcccaccgaccugaagcaguucaagcaggacgccaaguacagccacggcaucgacgugaacgaccuguucagcgcccagcccggccugaccagcgccgugcuggaggcccugcccagaaacauggugcugaccugccagggcagcgacgacaucagaaagcugcuggacagccaggacagaaaggacaucaagcugaucgacaucagccugagcaaggccgacgccagaaaguucgagaacgacgugugggaccaguucaaggaccugugccacaugcacaccggcaucgugguggagaagaagaagaagggcggcaagcaggagaugaccccccacugcgcccugcuggacugcaucauguucgacgccgccgugagcggcggccugaacgugcccacccugagagccgugcugcccaccgacaugguguucagaaccaucaccaccaagguggugcugugaggacuagucccuguucccagagcccacuuuuuuuucuuuuuuugaaauaaaauagccugucuuucagaucuaaaaaaaaaaaaaaaaaaaaaaaaaaaaaaaaaaaaaaaaaaaaaaaaaaaaaaaaaaaaaaaaaaaaaaaaaaaaaaaaaaaaaaaaaaaaaaaaaaaa

SEQ ID NO: 17295 - RNA, 1977 nt, Artificial Sequence; identical to SEQ ID NO: 17289
  mRNA product Design a-2 (A100) comprising derived and/or modified sequence from LASV(Pinneo-NIG-1969;Clade I)__AIT17837__NP (opt4)

SEQ ID NO: 17296 - RNA, 1977 nt, Artificial Sequence
  mRNA product Design a-2 (A100) comprising derived and/or modified sequence from LASV(ISTH0009-NIG-2011;Clade II)__AIT17405__NP (opt4)
aggagaguccgcucagccagguugcagaagcggcuuagcguguguccuaaucuucucucugcguguagguaggccugugccgcaaacaagcuuaccaugagcgugagcaaggaggugaagagcuuccuguggacccagagccugagaagagagcugagcggcuacugcagcaacaucaagcugcagguggugaaggacgcccaggcccugcugcacggccuggacuucagcgaggugagcaacgugcagagacugaugagaaagcagaagagagacgacagcgaccugaagagacugagagaccugaaccaggccgugaacaaccugguggagcugaagagcacccagcagaagagcauccugagagugggcacccugaccagcgacgaccugcugacccuggccgccgaccuggagaagcugaagagcaaggugaucagaaccgagagaccccugagcagcggcguguacaugggcaaccugagcacccagcagcuggagcagagaagagcccugcugaacaugaucggcauggugggcggcgcccagggcacccagcccggcagagacggcguggugagagugugggacgugaagaaccccgaccugcugaacaaccaguucggcaccaugcccagccugacccuggccugccugaccaagcagggccagguggaccugaacgacgccgugcuggcccugaccgaccugggccugaucuacaccgccaaguaccccaacagcagcgaccuggacagacugagccagagccaccccauccugaacaugguggacaucaagaagagcagccugaacaucagcggcuacaacuucagccugggcgccgccgugaaggccggcgccugcaugcuggacggcggcaacaugcuggagaccaucaaggugaccccccagaccauggacggcauccugaagagcauccugaaggugaagagaagccugggcauguucgugagcgacacccccggcgagagaaaccccuacgagaacauccuguacaagaucugccugagcggcgacggcuggcccuacaucgccagcagaaccagcaucgugggcagagccugggagaacaccaccguggaccuggagagcgacggcaagccccagaaggugggcagcgccggcagcaacaagagccugcagagcgccggcuuccccaccggccugaccuacagccagcugaugacccugaaggacagcaugaugcagcuggaccccagcgccaagaccuggaucgacaucgagggcagacccgaggaccccguggagaucgcccuguaccagcccaugagcggcugcuacauccacuucuucagagagcccaccgaccugaagcaguucaagcaggacgccaaguacagccacggcaucgacguggccgaccuguuccccgcccagcccggccugaccagcgccgugaucgaggcccugcccagaaacauggugcugaccugccagggcagcgacgacaucaagagacugcuggacagccagggcagaagagacaucaagcugaucgacaucgcccugagcaaggccgacagcagaagauucgagaacgccgugugggaccagugcaaggaccugugccacaugcacaccggcguggugguggagaagaagaagagaggcggcaaggaggagaucaccccccacugcgcccugauggacugcaucauguacgacgccgccgugagcggcggccugaacauccccgugcugagagccgugcugcccagagacaugguguucagaaccagcagccccaagguggugcugugaggacuagucccuguucccagagcccacuuuuuuuucuuuuuuugaaauaaaauagccugucuuucagaucuaaaaaaaaaaaaaaaaaaaaaaaaaaaaaaaaaaaaaaaaaaaaaaaaaaaaaaaaaaaaaaaaaaaaaaaaaaaaaaaaaaaaaaaaaaaaaaaaaaaa

SEQ ID NO: 17297 - RNA, 1977 nt, Artificial Sequence
  mRNA product Design a-2 (A100) comprising derived and/or modified sequence from LASV(ISTH2010-NIG-2012;Clade II)__AIT17483__NP (opt4)
aggagaguccgcucagccagguugcagaagcggcuuagcguguguccuaaucuucucucugcguguagguaggccugugccgcaaacaagcuuaccaugagcgccagcaaggaggugaagagcuuccuguggacccagagccugagaagagagcugagcggcuacugcagcaacaucaagcugcagguggugaaggacgcccaggcccugcugcacggccuggacuucagcgaggugagcaacgugcagagacugaugagaaagcagaagagagacgacagcgaccugaagagacugagagaccugaaccaggccgugaacaaccugguggagcugaagagcacccagcagaagagcauccugagagugggcacccugaccagcgacgaccugcugacccuggccgccgaccuggagaagcugaagagcaaggugaucagaaccgagagaccccugagcagcggcguguacaugggcaaccugagcacccagcagcuggagcagagaagagcccugcugaaccugaucggcauggugggcggcgcccagggcacccagcccggcagagacggcguggugagagugugggacgugaagaaccccgaccugcugaacaaccaguucggcaccaugcccagccugacccuggccugccugaccaagcagggccagguggaccugaacgacgccgugcuggcccugaccgaccugggccugaucuacaccgccaaguaccccaacagcagcgaccuggacagacugagccagagccaccccauccugaacaugguggacaccaagaagagcagccugaacaucagcggcuucaacuucagccugggcgccgccgugaaggccggcgccugcaugcuggacggcggcaacaugcuggagaccaucaaggugaccccccagaccauggacggcauccugaagagcauccugaaggugaagaagagccugggcauguucgugagcgacacccccggcgagagaaaccccuacgagaacauccuguacaagaucugccugagcggcgacggcuggcccuacaucgccagcagaaccagcaucgugggcagagccugggagaacaccaccguggaccuggagagcgacggcaagccccacaaggugggcaccgccggcagcaacaagagccugcagagcgccggcuuccccaccggccugaccuacagccagcugaugacccugaaggacagcaugaugcagcuggaccccagcgccaagaccuggaucgacaucgagggcagacccgaggaccccguggagaucgcccuguaccagcccaugagcggcugcuacauccacuucuucagagagcccaccgaccugaagcaguucaagcaggacgccaaguacagccacggcaucgacguggccgaccuguuccccgcccagcccggccugaccagcgccgugaucgaggcccugcccagaaacauggugcugaccugccagggcagcgacgacaucaagagacugcuggacagccagggcagaagagacaucaagcugaucgacaucgcccugagcaaggccgacagcagaagauucgagaacgccgugugggaccagugcaaggaccugugccacaugcacaccggcguggugguggagaagaagaagagaggcggcaaggaggagaucaccccccacugcgcccugauggacugcaucauguacgacgccgccgugagcggcggccugaacauccccgugcugagagccgugcugcccagagacaugguguucagaaccagcagccccaagguggugcugugaggacuagucccuguucccagagcccacuuuuuuuucuuuuuuugaaauaaaauagccugucuuucagaucuaaaaaaaaaaaaaaaaaaaaaaaaaaaaaaaaaaaaaaaaaaaaaaaaaaaaaaaaaaaaaaaaaaaaaaaaaaaaaaaaaaaaaaaaaaaaaaaaaaaa

SEQ ID NO: 17298 - RNA, 1977 nt, Artificial Sequence
  mRNA product Design a-2 (A100) comprising derived and/or modified sequence from LASV(Lassa virus/H.sapiens-wt/NGA/2015/ISTH_0543;Clade II)__AVO03640__NP (opt4)
aggagaguccgcucagccagguugcagaagcggcuuagcguguguccuaaucuucucucugcguguagguaggccugugccgcaaacaagcuuaccaugagcgccagcaaggaggugaagagcuuccuguggacccagagccugagaagagagcugagcggcuacugcagcaacaucaagcugcagguggugaaggacgcccaggcccugcugcacggccuggacuucagcgaggugagcaacgugcagagacugaugagaaagcagaagagagacgacagcgaccugaagagacugagagaccugaaccaggccgugaacaaccugguggagcugaagagcacccagcagaagagcauccugagagugggcacccugaccagcgacgaccugcugacccuggccgccgaccuggagaagcugaagagcaaggugaucagaaccgagagaccccugagcagcggcguguacaugggcaaccugagcacccagcagcuggagcagagaagagcccugcugaacaugaucggcauggugggcggcgcccagggcacccagcccggcagagacggcguggugagagugugggacgugaagaaccccgaccugcugaacaaccaguucggcaccaugcccagccugacccuggccugccugaccaagcagggccagguggaccugaacgacgccgugcuggcccugaccgaccugggccugaucuacaccgccaaguaccccaacagcagcgaccuggacagacugagccagagccaccccauccugaacaugguggacaccaagaagagcagccugaacaucagcggcuacaacuucagccugggcgccgccgugaaggccggcgccugcaugcuggacggcggcaacaugcuggagaccaucaaggugaccccccagaccauggacggcauccugaagagcauccugaaggugaagaagagccugggcauguucgugagcgacacccccggcgagagaaaccccuacgagaacauccuguacaagaucugccugagcggcgacggcuggcccuacaucgccagcagaaccagcaucgugggcagagccugggagaacaccaccguggaccuggagagcgacggcaagccccagaaggugggcagcgccggcagcaacaagagccugcagagcgccggcuuccccaccggccugaccuacagccagcugaugacccugaaggacagcaugaugcagcuggaccccagcgccaagaccuggaucgacaucgagggcagacccgaggaccccguggagaucgcccuguaccagcccaugagcggcugcuacauccacuucuucagagagcccaccgaccugaagcaguucaagcaggacgccaaguacagccacggcaucgacguggccgaccuguuccccgcccagcccggccugaccagcgccgugaucgaggcccugcccagaaacauggugcugaccugccagggcagcgacgacaucaagagacugcuggacagccagggcagaaaggacaucaagcugaucgacaucgcccugagcaaggccgacagcagaagauucgagaacgccgugugggaccagugcaaggaccugugccacaugcacaccggcguggugguggagaagaagaagagaggcggcaaggaggagaucaccccccacugcgcccugauggacugcaucauguacgacgccgccgugagcggcggccugaacauccccgugcugagagccgugcugcccagagacaugguguucagaaccagcagccccaagguggugcugugaggacuagucccuguucccagagcccacuuuuuuuucuuuuuuugaaauaaaauagccugucuuucagaucuaaaaaaaaaaaaaaaaaaaaaaaaaaaaaaaaaaaaaaaaaaaaaaaaaaaaaaaaaaaaaaaaaaaaaaaaaaaaaaaaaaaaaaaaaaaaaaaaaaaa

SEQ ID NO: 17299 - RNA, 1977 nt, Artificial Sequence
  mRNA product Design a-2 (A100) comprising derived and/or modified sequence from LASV(Lassa virus/H.sapiens-wt/NGA/2016/ISTH_0009;Clade II)__AVO03572__NP (opt4)
aggagaguccgcucagccagguugcagaagcggcuuagcguguguccuaaucuucucucugcguguagguaggccugugccgcaaacaagcuuaccaugagcgccagcaaggaggugaagagcuuccuguggacccagagccugagaagagagcugagcggcuacugcagcaacaucaagcugcagguggugaaggacgcccaggcccugcugcacggccuggacuucagcgaggugagcaacgugcagagacugaugagaaagcagaagagagacgacagcgaccugaagagacugagagaccugaaccaggccgugaacaaccugguggagcugaagagcacccagcagaagagcauccugagagugggcacccugaccagcgacgaccugcugacccuggccgccgaccuggagaagcugaagagcaaggugaucagaaccgagagaccccugagcagcggcguguacaugggcaaccugagcacccagcagcuggagcagagaagagcccugcugaacaugaucggcauggugggcggcgcccagggcacccagcccggcagagacggcguggugagagugugggacgugaagaaccccgaccugcugaacaaccaguucggcaccaugcccagccugacccuggccugccugaccaagcagggccagguggaccugaacgacgccgugcuggcccugaccgaccugggccugaucuacaccgccaaguaccccaacagcagcgaccuggacagacugagccagagccaccccauccugaacaugguggacaccaagaagagcagccugaacaucagcggcuacaacuucagccugggcgccgccgugaaggccggcgccugcaugcuggacggcggcaacaugcuggagaccaucaaggugaccccccagaccauggacggcauccugaagagcauccugaaggugaagaagagccugggcauguucgugagcgacacccccggcgagagaaaccccuacgagaacauccuguacaagaucugccugagcggcgacggcuggcccuacaucgccagcagaaccagcaucgugggcagagccugggagaacaccaccguggaccuggagagcgacggcaagccccagaaggugggcagcgccggcagcaacaagagccugcagagcgccggcuuccccaccggccugaccuacagccagcugaugacccugaaggacagcaugaugcagcuggaccccagcgccaagaccuggaucgacaucgagggcagacccgaggaccccguggagaucgcccuguaccagcccaugagcggcugcuacauccacuucuucagagagcccaccgaccugaagcaguucaagcaggacgccaaguacagccacggcaucgacguggccgaccuguuccccgcccagcccggccugaccagcgccgugaucgaggcccugcccagaaacauggugcugaccugccagggcagcgacgacaucaagagacugcuggacagccagggcagaagagacaucaagcugaucgacaucgcccugagcaaggccgacagcagaagauucgagaacgccgugugggaccagugcaaggaccugugccacaugcacaccggcguggugguggagaagaagaagagaggcggcaaggaggagaucaccccccacugcgcccugauggacugcaucauguacgacgccgccgugagcggcggccugaacauccccgugcugagagccgugcugcccagagacaugguguucagaaccagcagccccaagguggugcugugaggacuagucccuguucccagagcccacuuuuuuuucuuuuuuugaaauaaaauagccugucuuucagaucuaaaaaaaaaaaaaaaaaaaaaaaaaaaaaaaaaaaaaaaaaaaaaaaaaaaaaaaaaaaaaaaaaaaaaaaaaaaaaaaaaaaaaaaaaaaaaaaaaaaa

SEQ ID NO: 17300 - RNA, 1977 nt, Artificial Sequence
  mRNA product Design a-2 (A100) comprising derived and/or modified sequence from LASV(Lassa virus/H.sapiens-wt/NGA/2016/ISTH_0017;Clade II)__AVO03568__NP (opt4)
aggagaguccgcucagccagguugcagaagcggcuuagcguguguccuaaucuucucucugcguguagguaggccugugccgcaaacaagcuuaccaugagcgccagcaaggaggugaagagcuuccuguggacccagagccugagaagagagcugagcggcuacugcagcagcaucaagcugcagguggugaaggacgcccaggcccugcugcacggccuggacuucagcgaggugagcaacgugcagagacugaugagaaagcagaagagagacgacagcgaccugaagagacugagagaccugaaccaggccgugaacaaccugguggagcugaagagcacccagcagaagagcauccugagagugggcacccugaccagcgacgaccugcugacccuggccgccgaccuggagaagcugaagagcaaggugaucagaaccgagagaccccugagcagcggcguguacaugggcaaccugagcacccagcagcuggagcagagaagagcccugcugaacaugaucggcauggccggcggcgcccagggcacccagcccggcagagacggcguggugagagugugggacgugaagaaccccgaccugcugaacaaccaguucggcaccaugcccagccugacccuggccugccugaccaagcagggccagguggaccugaacgacgccgugcuggcccugaccgaccugggccugaucuacaccgccaaguaccccaacagcagcgaccuggacagacugagccagagccaccccauccugaacaugguggacaccaagaagagcagccugaacaucagcggcuacaacuucagccugggcgccgccgugaaggccggcgccugcaugcuggacggcggcaacaugcuggagaccaucaaggugaccccccagaccauggacggcauccugaagagcauccugaaggugaagagaagccugggcauguucgugagcgacgcccccggcgagagaaaccccuacgagaacauccuguacaagaucugccugagcggcgacggcuggcccuacaucgccagcagaaccagcaucgugggcagagccugggagaacaccaccguggaccuggagagcgacggcaagccccagaaggugggcgccaccggcagcaacaagagccugcagagcgccggcuuccccaccggccugaccuacagccagcugaugacccugaaggacagcaugaugcagcuggaccccagcgccaagaccuggaucgacaucgagggcagacccgaggaccccguggagguggcccuguaccagcccgugagcggcugcuacauccacuucuucagagagcccaccgaccugaagcaguucaagcaggacgccaaguacagccacggcaucgacguggccgaccuguuccccgcccagcccggccugaccagcgccgugaucgaggcccugcccagaaacauggugcugaccugccagggcagcgacgacaucaagaagcugcuggacagccagggcagaaaggacaucaagcugaucgacaucgcccugagcaaggccgacagcagaagauucgagaacgccgugugggaccagugcaaggaccugugccacaugcacaccggcguggugguggagaagaagaagagaggcggcaaggaggagaucaccccccacugcgcccugauggacugcaucauguacgacgccgccgugagcggcggccugaacauccccgugcugagagccgugcugcccagagacaugguguucagaaccagcagccccaagguggugcugugaggacuagucccuguucccagagcccacuuuuuuuucuuuuuuugaaauaaaauagccugucuuucagaucuaaaaaaaaaaaaaaaaaaaaaaaaaaaaaaaaaaaaaaaaaaaaaaaaaaaaaaaaaaaaaaaaaaaaaaaaaaaaaaaaaaaaaaaaaaaaaaaaaaaa

SEQ ID NO: 17301 - RNA, 1977 nt, Artificial Sequence
  mRNA product Design a-2 (A100) comprising derived and/or modified sequence from LASV(Lassa virus/H.sapiens-wt/NGA/2018/ISTH_0959;Clade II)__AVV65100__NP (opt4)
aggagaguccgcucagccagguugcagaagcggcuuagcguguguccuaaucuucucucugcguguagguaggccugugccgcaaacaagcuuaccaugagcgccagcaaggaggugaagagcuuccuguggacccagagccugagaagagagcugagcggcuacugcagcaacaucaagcugcagguggugaaggacgcccaggcccugcugcacggccuggacuucagcgaggugagcaacgugcagagacugaugagaaagcagaagagagacgacagcgaccugaagagacugagagaccugaaccaggccgugaacaaccugguggagcugaagagcacccagcagaagagcauccugagagugggcacccugaccagcgacgaccugcugacccuggccgccgaccuggagaagcugaagagcaaggugaucagaaccgagagaccccugagcagcggcguguacaugggcaaccugagcacccagcagcuggagcagagaagagcccugcugaaccugaucggcauggugggcggcgcccagggcacccagcccggcagagacggcguggugagagugugggacgugaagaaccccgaccugcugaacaaccaguucggcaccaugcccagccugacccuggccugccugaccaagcagggccagguggaccugaacgacguggugcuggcccugaccgaccugggccugaucuacaccgccaaguaccccaacagcagcgaccuggacagacugagccagagccaccccauccugaacaugguggacaccaagaagagcagccugaacaucagcggcuucaacuucagccugggcgccgccgugaaggccggcgccugcaugcuggacggcggcaacaugcuggagaccaucaaggugaccccccagaccauggacggcauccugaagagcauccugaaggugaagaagagccugggcauguucgugagcgacacccccggcgagagaaaccccuacgagaacauccuguacaagaucugccugagcggcgacggcuggcccuacaucgccagcagaaccagcaucgugggcagagccugggagaacaccaccguggaccuggagagcgacggcaagccccacaaggugggcaccgccggcagcaacaagagccugcagagcgccggcuuccccaccggccugaccuacagccagcugaugacccugaaggacagcaugaugcagcuggaccccagcgccaagaccuggaucgacaucgagggcagacccgaggaccccguggagaucgcccuguaccagcccaugagcggcugcuacauccacuucuucagagagcccaccgaccugaagcaguucaagcaggacgccaaguacagccacggcaucgacguggccgaccuguuccccgcccagcccggccugaccagcgccgugaucgaggcccugcccagaaacauggugcugaccugccagggcagcgacgacaucaagagacugcuggacagccagggcagaaaggacaucaagcugaucgacaucgcccugagcaagaccgacagcagaagauucgagaacgccgugugggaccagugcaaggaccugugccacaugcacaccggcguggugguggagaagaagaagagaggcggcaaggaggagaucaccccccacugcgcccugauggacugcaucauguacgacgccgccgugagcggcggccugaacauccccgugcugagagccgugcugcccagagacaugguguucagaaccagcagccccaagguggugcugugaggacuagucccuguucccagagcccacuuuuuuuucuuuuuuugaaauaaaauagccugucuuucagaucuaaaaaaaaaaaaaaaaaaaaaaaaaaaaaaaaaaaaaaaaaaaaaaaaaaaaaaaaaaaaaaaaaaaaaaaaaaaaaaaaaaaaaaaaaaaaaaaaaaaa

SEQ ID NO: 17302 - RNA, 1977 nt, Artificial Sequence
  mRNA product Design a-2 (A100) comprising derived and/or modified sequence from LASV(LASV003-NIG-2008;Clade II)__AIT17581__NP (opt4)
aggagaguccgcucagccagguugcagaagcggcuuagcguguguccuaaucuucucucugcguguagguaggccugugccgcaaacaagcuuaccaugagcgccagcaaggaggugaagagcuuccuguggacccagagccugagaagagagcugagcggcuacugcagcagcaucaagcugcagguggugaaggacgcccaggcccugcugcacggccuggacuucagcgaggugagcaacgugcagagacugaugagaaagcagaagagagacgacagcgaccugaagagacugagagaccugaaccaggccgugaacaaccugguggagcugaagagcacccagcagaagagcgugcugagagugggcacccugaccagcgacgaccugcugacccuggccgccgaccuggagaagcugaagagcaaggugaucagaaccgagagaccccugagcagcggcguguacaugggcaaccugagcgcccagcagcuggagcagagaagaacccugcugaacaugaucggcauggugggcggcgcccagggcacccagcccggcagagacggcguggugagagugugggacgugaagaaccccgaccugcugaacaaccaguucggcaccaugcccagccugacccuggccugccugaccaagcagggccagguggaccugaacgacguggugcuggcccugaccgaccugggccugaucuacaccgccaaguaccccaacagcagcgaccuggacagacugagccagagccaccccauccugagcaugguggacaccaagaagagcagccugaacaucagcggcuacaacuucagccugggcgccgccgugaaggccggcgccugcaugcuggacggcggcaacaugcuggagaccaucaaggugaccccccagaccauggacggcauccugaagagcauccugaaggugaagaagagccugggcauguucgugagcgacacccccggcgagagaaaccccuacgagaacauccuguacaagaucugccugagcggcgacggcuggcccuacaucgccagcagaaccagcaucgugggcagagccugggagaacaccaccguggaccuggagagcgacggcaagccccagaaggugggcaccgccggcagcaacaagagccugcagagcgccggcuuccccaccggccugaccuacagccagcugaugacccugaaggacagcaugaugcagcuggaccccagcgccaagaccuggaucgacaucgagggcagacccgaggaccccguggagaucgcccuguaccagcccaugagcggcugcuacauccacuucuucagagagcccaccgaccugaagcaguucaagcaggacgccaaguacagccacggcaucgacgugaccgaccuguuccccgcccagcccggccugaccagcgccgugaucgaggcccugcccagaaacauggugcugaccugccagggcagcgacgacaucaagagacugcuggacagccagggcagaagagacaucaagcugaucgacaucgcccugagcaaggccgacagcagaagauucgagaacgccgugugggaccagugcaaggaccugugccacaugcacaccggcguggugguggagaagaagaagagaggcggcaaggaggagaucaccccccacugcgcccugauggacugcaucauguacgacgccgccgugagcggcggccugaacauccccgugcugagagccgugcugcccagagacaugguguucagaaccagcagccccaagguggugcugugaggacuagucccuguucccagagcccacuuuuuuuucuuuuuuugaaauaaaauagccugucuuucagaucuaaaaaaaaaaaaaaaaaaaaaaaaaaaaaaaaaaaaaaaaaaaaaaaaaaaaaaaaaaaaaaaaaaaaaaaaaaaaaaaaaaaaaaaaaaaaaaaaaaaa

SEQ ID NO: 17303 - RNA, 1977 nt, Artificial Sequence
  mRNA product Design a-2 (A100) comprising derived and/or modified sequence from LASV(LASV035-NIG-2009;Clade II)__AIT17589__NP (opt4)
aggagaguccgcucagccagguugcagaagcggcuuagcguguguccuaaucuucucucugcguguagguaggccugugccgcaaacaagcuuaccaugagcgccagcaaggaggugaagagcuuccuguggacccagagccugagaagagagcugagcggcuacugcagcagcaucaagcugcagguggugaaggacgcccaggcccugcugcacggccuggacuucagcgaggugagcaacgugcagagacugaugagaaagcagaagagagacgacagcgaccugaagagacugagagaccugaaccaggccgugaacaaccugguggagcugaagagcacccagcagaagagcauccugagagugggcacccugaccagcgacgaccugcugacccuggccgccgaccuggagaagcugaagagcaaggugaucagaaccgagagaccccugagcagcggcguguacaugggcaaccugagcgcccagcagcuggagcagagaagagcccugcugaacaugaucggcauggugggcggcgcccagggcacccagcccggcagagacggcguggugagagugugggacgugaagaaccccgaccugcugaacaaccaguucggcaccaugcccagccugacccuggccugccugaccaagcagggccagguggaccugaacgacgccgugcuggcccugaccgaccugggccugaucuacaccgccaaguaccccaacagcagcgaccuggacagacugagccagagccaccccauccugaacaugguggacaccaagaagagcagccugaacaucagcggcuacaacuucagccugggcgccgccgugaaggccggcgccugcaugcuggacggcggcaacaugcuggagaccaucaaggugaccccccagaccauggacggcauccugaagagcauccugaaggugaagagaagccugggcauguucgugagcgacacccccggcgagagaaaccccuacgagaacauccuguacaagaucugccugagcggcgacggcuggcccuacaucgccagcagaaccagcaucgugggcagagccugggagaacaccaccguggaccuggagagcgacggcaagccccagaaggugggcaccaccggcagcaacaagagccugcagagcgccggcuuccccaccggccugaccuacagccagcugaugacccugaaggacagcaugaugcagcuggaccccagcgccaagaccuggaucgacaucgagggcagacccgaggaccccguggagaucgcccuguaccagcccaugagcggcugcuacauccacuucuucagagagcccaccgaccugaagcaguucaagcaggacgccaaguacagccacggcaucgacguggccgaccuguuccccgcccagcccggccugaccagcgccgugaucgaggcccugcccagaaacauggugcugaccugccagggcagcgacgacaucaagaagcugcuggacagccagggcagaagagacaucaagcugaucgacaucgcccugagcaaggccgacagcagaaaguucgagaacgccgugugggaccagugcaaggaccugugccacaugcacaccggcguggugguggagaagaagaagagaggcggcaaggaggagaucaccccccacugcgcccugauggacugcaucauguacgacgccgccgugagcggcggccugaacauccccgugcugagagccgugcugcccagagacaugguguucagaaccagcagccccaagguggugcugugaggacuagucccuguucccagagcccacuuuuuuuucuuuuuuugaaauaaaauagccugucuuucagaucuaaaaaaaaaaaaaaaaaaaaaaaaaaaaaaaaaaaaaaaaaaaaaaaaaaaaaaaaaaaaaaaaaaaaaaaaaaaaaaaaaaaaaaaaaaaaaaaaaaaa

SEQ ID NO: 17304 - RNA, 1977 nt, Artificial Sequence
  mRNA product Design a-2 (A100) comprising derived and/or modified sequence from LASV(LASV1000-NIG-2009;Clade II)__AIT17783__NP (opt4)
aggagaguccgcucagccagguugcagaagcggcuuagcguguguccuaaucuucucucugcguguagguaggccugugccgcaaacaagcuuaccaugagcgccagcaaggaggugaagagcuuccuguggacccagagccugagaagagagcugagcggcuacugcagcaacaucaagcugcagguggugaaggacgcccaggcccugcugcacggccuggacuucagcgaggugagcaacgugcagagacugaugagaaagcagaagagagacgacagcgaccugaagagacugagagaccugaaccaggccgugaacaaccugguggagcugaagagcacccagcagaagagcauccugagagugggcacccugaccagcgacgaccugcugacccuggccgccgaccuggagaagcugaagagcaaggugaucagaaccgagagaccccugagcagcggcguguacaugggcaaccugagcacccagcagcuggagcagagaagagcccugcugaacaugaucggcauggugggcggcgcccagggcacccagcccggcagagacggcguggugagagugugggacgugaagaaccccgaccugcugaacaaccaguucggcaccaugcccagccugacccuggccugccugaccaagcagggccagguggaccugaacgacguggugcuggcccugaccgaccugggccugaucuacaccgccaaguaccccaacagcagcgaccuggacagacugagccagagccaccccauccugaacaugguggacaccaagaagagcagccugaacaucagcggcuacaacuucagccugggcgccgccgugaaggccggcgccugcaugcuggacggcggcaacaugcuggagaccaucaaggugaccccccagaccauggacggcauccugaagagcauccugaaggugaagaagagccugggcauguucgugagcgacacccccggcgagagaaaccccuacgagaacauccuguacaagaucugccugagcggcgacggcuggcccuacaucgccagcagaaccagcaucgugggcagagccugggagaacaccaccguggaccuggagagcgacggcaagccccagaaggugggcaccgccggcagcaacaagagccugcagagcgccggcuuccccaccggccugaccuacagccagcugaugacccugaaggacagcaugaugcagcuggaccccagcgccaagaccuggaucgacaucgagggcagacccgaggaccccguggagaucgcccuguaccagcccgugagcggcugcuacauccacuucuucagagagcccaccgaccugaagcaguucaagcaggacgccaaguacagccacggcaucgacguggccgaccuguuccccgcccagcccggccugaccagcgccgugaucgaggcccugcccagaaacauggugcugaccugccagggcagcgacgacaucaagagacugcuggacagccagggcagaagagacaucaagcugaucgacaucgcccugagcaaggccgacagcagaagauucgagaacgccgugugggaccagugcaaggaccugugccacaugcacaccggcguggugguggagaagaagaagagaggcggcaaggaggagaucaccccccacugcgcccugauggacugcaucauguacgacgccgccgugagcggcggccugaacauccccgugcugagagccgugcugcccagagacaugguguucagaaccagcagccccaagguggugcugugaggacuagucccuguucccagagcccacuuuuuuuucuuuuuuugaaauaaaauagccugucuuucagaucuaaaaaaaaaaaaaaaaaaaaaaaaaaaaaaaaaaaaaaaaaaaaaaaaaaaaaaaaaaaaaaaaaaaaaaaaaaaaaaaaaaaaaaaaaaaaaaaaaaaa

SEQ ID NO: 17305 - RNA, 1977 nt, Artificial Sequence
  mRNA product Design a-2 (A100) comprising derived and/or modified sequence from LASV(LASV221-NIG-2010;Clade II)__AIT17625__NP (opt4)
aggagaguccgcucagccagguugcagaagcggcuuagcguguguccuaaucuucucucugcguguagguaggccugugccgcaaacaagcuuaccaugagcgccagcaaggaggugaagagcuuccuguggacccagagccugagaagagagcugagcggcuacugcagcagcaucaagcugcagguggugaaggacgcccaggcccugcugcacggccuggacuucagcgaggugagcaacgugcagagacugaugagaaagcagagaagagacgacagcgaccugaagagacugagagaccugaaccaggccgugaacaaccugguggagcugaagagcacccagcagaagagcauccugagagugggcacccugaccagcgacgaccugcugacccuggccgccgaccuggagaagcugaagagcaaggugaucagaaccgagagaccccugagcagcggcguguacaugggcaaccugagcacccagcagcuggagcagagaagagcccugcugaacaugaucggcauggugggcggcgcccagggcacccagcccggcagagacggcguggugagagugugggacgugaagaaccccgaccugcugaacaaccaguucggcaccaugcccagccugacccuggccugccugaccaagcagggccagguggaccugaacgacgccgugcuggcccugaccgaccugggccugaucuacaccgccaaguaccccaacagcagcgaccuggacagacugagccagagccaccccauccugaacaugguggacaccaagaagagcagccugaacaucagcggcuacaacuucagccugggcgccgccgugaaggccggcgccugcaugcuggacggcggcaacaugcuggagaccaucaaggugaccccccagaccguggacggcauccugaagagcauccugaaggugaagagaagccugggcauguucgugagcgacacccccggcgagagaaaccccuacgagaacauccuguacaagaucugccugagcggcgacggcuggcccuacaucgccagcagaaccagcaucgugggcagagccugggagaacaccaccguggaccuggagagcgacggcaagccccagaaggugggcaccgccggcagcaacaagagccugcagagcgccggcuuccccaccggccugaccuacagccagcugaugacccugaaggacagcaugaugcagcuggaccccagcgccaagaccuggaucgacaucgagggcagacccgaggaccccguggagaucgcccuguaccagcccaugagcggcugcuacauccacuucuucagagagcccaccgaccugaagcaguucaagcaggacgccaaguacagccacggcaucgacguggccgaccuguuccccgcccagcccggccugaccagcgccgugaucgaggcccugcccagaaacauggugcugaccugccagggcagcgacgacaucaagagacugcuggacagccagggcagaagagacaucaagcugaucgacaucgcccugagcaaggccgacagcagaaaguucgagaacgccgugugggaccagugcaaggaccugugccacaugcacaccggcguggugguggagaagaagaagagaggcggcaaggaggagaucaccccccacugcgcccugauggacugcaucauguacgacgccgccgugagcggcggccugaacauccccgugcugagagccgugcugcccagagacaugguguucagaaccagcagccccaagguggugcugugaggacuagucccuguucccagagcccacuuuuuuuucuuuuuuugaaauaaaauagccugucuuucagaucuaaaaaaaaaaaaaaaaaaaaaaaaaaaaaaaaaaaaaaaaaaaaaaaaaaaaaaaaaaaaaaaaaaaaaaaaaaaaaaaaaaaaaaaaaaaaaaaaaaaa

SEQ ID NO: 17306 - RNA, 1977 nt, Artificial Sequence
  mRNA product Design a-2 (A100) comprising derived and/or modified sequence from LASV(LASV237-NIG-2010;Clade II)__AIT17639__NP (opt4)
aggagaguccgcucagccagguugcagaagcggcuuagcguguguccuaaucuucucucugcguguagguaggccugugccgcaaacaagcuuaccaugagcgccagcaaggaggugaagagcuuccuguggacccagagccugagaagagagcugagcggcuacugcagcaacaucaagcugcagguggugaaggacgcccaggcccugcugcacggccuggacuucagcgaggugagcaacgugcagagacugaugagaaagcagaagagagacgacagcgaccugaagagacugagagaccugaaccaggccgugaacaaccugguggagcugaagagcacccagcagaagagcauccugagagugggcacccugaccagcgacgaccugcugacccuggccgccgaccuggagaagcugaagagcaaggugaucagaaccgagagaccccugagcagcggcguguacaugggcaaccugagcacccagcagcuggagcagagaagagcccugcugaacaugaucggcauggugggcggcgcccagggcacccagcccggcagagacggcguggugagagugugggacgugaagaaccccgaccugcugaacaaccaguucggcaccaugcccagccugacccuggccugccugaccaagcagggccagguggaccugaacgacgccgugcuggcccugaccgaccugggccugaucuacaccgccaaguaccccaacagcagcgaccuggacagacugagccagagccaccccauccugaacaugguggacaucaagaagagcagccugaacaucagcggcuacaacuucagccugggcgccgccgugaaggccggcgccugcaugcuggacggcggcaacaugcuggagaccaucaaggugaccccccagaccauggacggcauccugaagagcauccugaaggugaagagaagccugggcauguucgugagcgacacccccggcgagagaaaccccuacgagaacauccuguacaagaucugccugagcggcgacggcuggcccuacaucgccagcagaaccagcaucgugggcagagccugggagaacaccaccguggaccuggagagcgacggcaagccccagaaggugggcagcgccggcagcaacaagagccugcagagcgccggcuuccccaccggccugaccuacagccagcugaugacccugaaggacagcaugaugcagcuggaccccagcgccaagaccuggaucgacaucgagggcagacccgaggaccccguggagaucgcccuguaccagcccaugagcggcugcuacauccacuucuucagagagcccaccgaccugaagcaguucaagcaggacgccaaguacagccacggcaucgacguggccgaccuguuccccgcccagcccggccugaccagcgccgugaucgaggcccugcccagaaacauggugcugaccugccagggcagcgacgacaucaagagacugcuggacagccagggcagaagagacaucaagcugaucgacaucgcccugagcaaggccgacagcagaagauucgagaacgccgugugggaccagugcaaggaccugugccacaugcacaccggcguggugguggagaagaagaagagaggcggcaaggaggagaucaccccccacugcgcccugauggacugcaucauguacgacgccgccgugagcggcggccugaacauccccgugcugagagccgugcugcccagagacaugguguucagaaccagcagccccaagguggugcugugaggacuagucccuguucccagagcccacuuuuuuuucuuuuuuugaaauaaaauagccugucuuucagaucuaaaaaaaaaaaaaaaaaaaaaaaaaaaaaaaaaaaaaaaaaaaaaaaaaaaaaaaaaaaaaaaaaaaaaaaaaaaaaaaaaaaaaaaaaaaaaaaaaaaa

SEQ ID NO: 17307 - RNA, 1977 nt, Artificial Sequence
  mRNA product Design a-2 (A100) comprising derived and/or modified sequence from LASV(LASV253-NIG-2011;Clade II)__AIT17671__NP (opt4)
aggagaguccgcucagccagguugcagaagcggcuuagcguguguccuaaucuucucucugcguguagguaggccugugccgcaaacaagcuuaccaugagcgccagcaaggaggugaagagcuuccuguggacccagagccugagaagagagcugagcggcuacugcagcagcaucaagcugcagguggugaaggacgcccaggcccugcugcacggccuggacuucagcgaggugagcaacgugcagagacugaugagaaagcagaagagagacgacagcgaccugaagagacugagagaccugaaccaggccgugaacaaccugguggagcugaagagcacccagcagaagagcgugcugagagugggcacccugaccagcgacgaccugcugacccuggccgccgaccuggagaagcugaagagcaaggugaucagaaccgagagaccccugagcagcggcguguacaugggcaaccugagcacccagcagcuggagcagagaagagcccugcugaacaugaucggcauggugggcggcgcccagggcacccagcccggcagagacggcguggugagagugugggacgugaagaaccccgaccugcugaacaaccaguucggcaccaugcccagccugacccuggccugccugaccaagcagggccagguggaccugaacgacguggugcuggcccugaccgaccugggccugaucuacaccgccaaguaccccaacagcagcgaccuggacagacugagccagagccaccccauccugaacaugguggacaccaagaagagcagccugaacaucagcggcuacaacuucagccugggcgccgccgugaaggccggcgccugcaugcuggacggcggcaacaugcuggagaccaucaaggugaccccccagaccauggacggcauccugaagagcauccugaaggugaagaagagccugggcauguucgugagcgacacccccggcgagagaaaccccuacgagaacauccuguacaagaucugccugagcggcgacggcuggcccuacaucgccagcagaaccagcaucgugggcagagccugggagaacaccaccguggaccuggagagcgacggcaagccccagaaggugggcaccgccggcagcaacaagagccugcagagcgccggcuuccccaccggccugaccuacagccagcugaugacccugaaggacagcaugaugcagcuggaccccagcgccaagaccuggaucgacaucgagggcagacccgaggaccccguggagaucgcccuguaccagcccaugagcggcugcuacauccacuucuucagagagcccaccgaccugaagcaguucaagcaggacgccaaguacagccacggcaucgacgugaccgaccuguuccccgcccagcccggccugaccagcgccgugaucgaggcccugcccagaaacauggugcugaccugccagggcagcgacgacaucaagagacugcuggacagccagggcagaagagacaucaagcugaucgacaucgcccugagcaaggccgacagcagaagauucgagaacgccgugugggaccagugcaaggaccugugccacaugcacaccggcguggugguggagaagaagaagagaggcggcaaggaggagaucaccccccacugcgcccugauggacugcaucauguacgacgccgccgugagcggcggccugaacauccccgugcugagagccgugcugcccagagacaugguguucagaaccagcagccccaagguggugcugugaggacuagucccuguucccagagcccacuuuuuuuucuuuuuuugaaauaaaauagccugucuuucagaucuaaaaaaaaaaaaaaaaaaaaaaaaaaaaaaaaaaaaaaaaaaaaaaaaaaaaaaaaaaaaaaaaaaaaaaaaaaaaaaaaaaaaaaaaaaaaaaaaaaaa

SEQ ID NO: 17308 - RNA, 1977 nt, Artificial Sequence
  mRNA product Design a-2 (A100) comprising derived and/or modified sequence from LASV(LASV254-NIG-2011;Clade II)__AIT17675__NP (opt4)
aggagaguccgcucagccagguugcagaagcggcuuagcguguguccuaaucuucucucugcguguagguaggccugugccgcaaacaagcuuaccaugagcgccagcaaggaggugaagagcuuccuguggacccagagccugagaagagagcugagcggcuacugcagcagcaucaagcugcagguggugaaggacgcccaggcccugcugcacggccuggacuucagcgaggugagcaacgugcagagacugaugagaaagcagaagagagacgacagcgaccugaagagacugagagaccugaaccaggccgugaacaaccugguggagcugaagagcacccagcagaagagcgugcugagagugggcacccugaccagcgacgaccugcugacccuggccgccgaccuggagaagcugaagagcaaggugaucagaaccgagagaccccugagcagcggcguguacaugggcaaccugagcacccagcagcuggagcagagaagagcccugcugaacaugaucggcauggugggcggcgcccagggcacccagcccggcagagacggcguggugagagugugggacgugaagaaccccgaccugcugaacaaccaguucggcaccaugcccagccugacccuggccugccugaccaagcagggccagguggaccugaacgacgccgugcuggcccugaccgaccugggccugaucuacaccgccaaguaccccaacagcagcgaccuggacagacugagccagagccaccccauccugaacaugguggacaccaagaagagcagccugaacaucagcggcuacaacuucagccugggcgccgccgugaaggccggcgccugcaugcuggacggcggcaacaugcuggagaccaucaaggugaccccccagaccauggacggcauccugaagagcauccugaaggugaagaagagccugggcauguucgugagcgacacccccggcgagagaaaccccuacgagaacauccuguacaagaucugccugagcggcgacggcuggcccuacaucgccagcagaaccagcaucgugggcagagccugggagaacaccaucguggaccuggagagcgacggcaagccccagaaggugggcaccgccggcagcaacaagagccugcagagcgccggcuuccccaccggccugaccuacagccagcugaugacccugaaggacagcaugaugcagcuggaccccagcgccaagaccuggaucgacaucgagggcagacccgaggaccccguggagaucgcccuguaccagcccaugagcggcugcuacauccacuucuucagagagcccaccgaccugaagcaguucaagcaggacgccaaguacagccacggcaucgacguggccgaccuguuccccgcccagcccggccugaccagcgccgugaucgaggcccugcccagaaacauggugcugaccugccagggcagcgacgacaucaagagacugcuggacagccagggcagaagagacaucaagcugaucgacaucgcccugagcaaggccgacagcagaagauucgagaacgccgugugggaccagugcaaggaccugugccacaugcacaccggcguggugguggagaagaagaagagaggcggcaaggaggagaucaccccccacugcgcccugauggacugcaucauguacgacgccgccgugagcggcggccugaacauccccgugcugagagccgugcugcccagagacaugguguucagaaccagcagccccaagguggugcugugaggacuagucccuguucccagagcccacuuuuuuuucuuuuuuugaaauaaaauagccugucuuucagaucuaaaaaaaaaaaaaaaaaaaaaaaaaaaaaaaaaaaaaaaaaaaaaaaaaaaaaaaaaaaaaaaaaaaaaaaaaaaaaaaaaaaaaaaaaaaaaaaaaaaa

SEQ ID NO: 17309 - RNA, 1977 nt, Artificial Sequence
  mRNA product Design a-2 (A100) comprising derived and/or modified sequence from LASV(Nig08-04;Clade II)__ADU56611__NP (opt4)
aggagaguccgcucagccagguugcagaagcggcuuagcguguguccuaaucuucucucugcguguagguaggccugugccgcaaacaagcuuaccaugagcgccagcaaggaggugaagagcuuccuguggacccagagccugagaagagagcugagcggcuacugcagcaacaucaagcugcagguggugaaggacgcccaggcccugcugcacggccuggacuucagcgaggugagcaacgugcagagacugaugagaaagcagaagagagacgacggcgaccugaagagacugagagaccugaaccaggccgugaacaaccugguggagcugaagagcacccagcagaagagcgugcugagagugggcacccugaccagcgacgaccugcugacccuggccgccgaccuggagaagcugaagagcaaggugaucagaaccgagagaccccugagcagcggcguguacaugggcaaccugagcacccagcagcuggagcagagaaaggcccugcugagcaugaucggcauggugggcggcgcccagggcacccagcccggcagagacggcguggugagagugugggacgugaagaaccccgaccugcugaacaaccaguucggcaccaugcccagccugacccuggccugccugaccaagcagggccagguggaccugaacgacgccgugcuggcccugaccgaccugggccugaucuacaccgccaaguaccccaacagcagcgaccuggacagacugagccagagccaccccauccugaacaugguggacaccaagaagagcagccugaacaucagcggcuacaacuucagccugggcgccgccgugaaggccggcgccugcaugcuggacggcggcaacaugcuggagaccaucaaggugaccccccagaccauggacggcauccugaagagcauccugaaggugaagagaagccugggcauguucgugagcgacacccccggcgagagaaaccccuacgagaacauccuguacaagaucugccugagcggcgacggcuggcccuacaucgccagcagaaccagcaucgugggcagagccugggagaacaccaccguggaccuggagagcgacggcaagccccagaaggugggcaccgccggcagcaacaagagccugcagagcgccggcuuccccaccggccugaccuacagccagcugaugacccugaaggacagcaugaugcagcuggaccccagcgccaagaccuggaucgacaucgagggcagacccgaggaccccguggagaucgcccuguaccagcccaugagcggcugcuacauccacuucuucagagagcccaccgaccugaagcaguucaagcaggacgccaaguacagccacggcaucgacgugaccgaccuguucagcgcccagcccggccugaccagcgccgugaucgaggcccugcccagaaacauggugcugaccugccagggcagcgacgacaucaagaagcugcuggacagccagggcagaagagacaucaagcugaucgacaucagccugaacaaggccgacagcagaagauucgagaacgccgugugggaccagugcaaggaccugugccacaugcacaccggcguggugguggagaagaagaagagaggcggcaaggaggagaucaccccccacugcgcccugauggacugcaucauguucgacgccgccgugagcggcggccugaacauccccauccugagagccgugcugcccagagacaugguguucagaaccagcagccccaagguggugcugugaggacuagucccuguucccagagcccacuuuuuuuucuuuuuuugaaauaaaauagccugucuuucagaucuaaaaaaaaaaaaaaaaaaaaaaaaaaaaaaaaaaaaaaaaaaaaaaaaaaaaaaaaaaaaaaaaaaaaaaaaaaaaaaaaaaaaaaaaaaaaaaaaaaaa

SEQ ID NO: 17310 - RNA, 1980 nt, Artificial Sequence
  mRNA product Design a-2 (A100) comprising derived and/or modified sequence from LASV(GA391;Clade III)__AAA46284__NP (opt4)
aggagaguccgcucagccagguugcagaagcggcuuagcguguguccuaaucuucucucugcguguagguaggccugugccgcaaacaagcuuaccaugagcgccagcaaggaggugagaagcugccuguggacccagagccugagaagagagcugagcggcuacugcagcaacaucaagcugcagguggugaaggacgcccaggcccugcugcacggccuggacuucagcgaggugagcaacgugcagagacugaugagaaagcagaagagagacgacggcgaccugaagagacugagagaccugaaccaggccgugaacaaccugguggagcugaagagcacccagcagaagagcgugcugagagugggcacccugagcagcgacgaccugcugauccuggccgccgaccuggagaagcugaagagcaaggugaccagaaccgagagaccccugagcagcggcguguacaugggcaaccugagcagccagcagcuggaccagagaagagcccugcugaacaugaucggcaugaccggcgugagcggcggcggcaagggcgccagcaacggcaucgugagagugugggacgugaagaacgccgagcugcugaacaaccaguucggcaccaugcccagccugacccuggccugccugaccaagcagggccagguggaccugaacgacgccgugcaggcccugaccgaccugggccugaucuacaccgccaaguaccccaacagcagcgaccuggacagacugagccagagccaccccauccugaacaugaucgacaccaagaagagcagccugaacaucagcggcuacaacuucagccugggcgccgccgugaaggccggcgccugcaugcuggacggcggcaacaugcuggagaccaucaaggugagcccccagaccauggacggcauccugaagagcauccugaaggugaagaagagccugggcauguucgugagcgacacccccggcgagagaaaccccuacgagaacauccuguacaagaucugccugagcggcgacggcuggagcuacaucgccagcagaaccagcaucgugggcagagccugggagaacaccgugguggaccuggagcaggacaacaagccccagaagaucggcaacggcggcagcaacaagagccugcagagcgccggcuucgccgccggccugaucuacagccagcugaugacccugaaggacuucaagugcuucaaccugauccccaacgccaagaccuggauggacaucgagggcagacccgaggaccccguggagaucgcccuguaccagcccagcagcggcugcuacgugcacuucuucagagagcccaccgaccugaagcaguucaagcaggacgccaaguacagccacggcagagacgugaccgaccuguucgccgcccagcccggccugaccagcgccgugaucgaggcccugcccagaaacauggugaucaccugccagggcagcgaggacaucagaaagcugcuggagagccagggcagaagagacaucaagcugaucgacaucacccugagcaaggccgacagcagaaaguucgagaacgccgugugggaccaguucaaggaccugugccacaugcacaccggcguggugguggagaagaagaagagaggcggcaaggaggagaucaccccccacugcgcccugauggacugcaucauguucgacgccgccgugagcggcggccuggacgccaaggugcugagaguggugcugcccagagacaugguguucagaaccagcacccccaagguggugcugugaggacuagucccuguucccagagcccacuuuuuuuucuuuuuuugaaauaaaauagccugucuuucagaucuaaaaaaaaaaaaaaaaaaaaaaaaaaaaaaaaaaaaaaaaaaaaaaaaaaaaaaaaaaaaaaaaaaaaaaaaaaaaaaaaaaaaaaaaaaaaaaaaaaaa

SEQ ID NO: 17311 - RNA, 1977 nt, Artificial Sequence
  mRNA product Design a-2 (A100) comprising derived and/or modified sequence from LASV(Nig08-A19;Clade III)__ADU56619__NP (opt4)
aggagaguccgcucagccagguugcagaagcggcuuagcguguguccuaaucuucucucugcguguagguaggccugugccgcaaacaagcuuaccaugagcgccagcaaggaggugaagagcuuccuguggacccagagccugagaagagagcugagcggcuacugcagcaacaucaagcugcagguggugaaggacgcccaggcccugcugcacggccuggacuucagcgaggugagcaacgugcagagacugaugagaaagcagaagagagacgacggcgaccugaagagacugagagaccugaaccaggccgugaacaaccugguggagcugaagagcacccagcagaagagcgugcugagagugggcacccugagcagcgacgaccugcuggugcuggccgccgaccuggagaagcugaagagcaagguggugagaaccgagagaccccugagcagcggcaucuacaugggcaaccugagcagccagcagcuggaccagagaaaggcccugcugaacaugaucggcaugaccggcggcaacggcggcagaaacaccaccagcgacggcaucgugagagugugggacgugaagaacgccgagcugcugaacaaccaguucggcaccaugcccagccugacccuggccugccugaccaagcagggccagguggaccugaacgacgccgugcaggcccugaccgaccugggccugaucuacaccgccaaguaccccaacagcagcgaccuggacagacuggcccagagccaccccauccugaacaugaucgacaccaagaagagcagccugaacaucagcggcuacaacuucagccugggcgccgccgugaaggccggcgccugcaugcuggacggcggcaacaugcuggagaccaucaaggugagcccccagaccauggacggcauccugaagagcauccugaaggugaagagaagccugggcauguucaucagcgacacccccggcgagagaaaccccuacgagaacauccuguacaagaucugccugagcggcgacggcuggcccuacaucgccagcagaaccagcaucgugggcagagccugggagaacaccgugguggaccuggagagcgacaacaagccccagaagaccggcaacggcggcagcaacaagagccugcagagcgccggcuucgccgccggccugaccuacagccagcugaugacccugaaggacagcaugcugcagcuggaccccaacgccaagaccuggauggacaucgagggcagacccgaggaccccguggagaucgcccuguaccagcccagcagcggcugcuacauccacuucuucagagagcccaccgaccugaagcaguucaagcaggacgccaaguacagccacggcaucgacgugaccgaccuguucgccgcccagcccggccugaccagcgccgugaucgaggcccugcccagaaacauggugaucaccugccagggcagcgaggacaucagaaagcugcuggagagccagggcagaagagacaucaagcugaucgacaucagccugagcaagguggacagcagaaaguucgagaacgccgugugggaccaguucaaggaccugugccacaugcacaccggcaucgugguggagaagaagaagagaggcggcaaggaggagaucaccccccacugcgcccugauggacugcaucauguucgacgccgccgugagcggcggcguggacgccaaggugcugagagccgugcugcccagagacaugguguucagaaccagcacccccaagguggugcugugaggacuagucccuguucccagagcccacuuuuuuuucuuuuuuugaaauaaaauagccugucuuucagaucuaaaaaaaaaaaaaaaaaaaaaaaaaaaaaaaaaaaaaaaaaaaaaaaaaaaaaaaaaaaaaaaaaaaaaaaaaaaaaaaaaaaaaaaaaaaaaaaaaaaa

SEQ ID NO: 17312 - RNA, 1977 nt, Artificial Sequence
  mRNA product Design a-2 (A100) comprising derived and/or modified sequence from LASV(G1180-SLE-2010;Clade IV)__AIT17169__NP (opt4)
aggagaguccgcucagccagguugcagaagcggcuuagcguguguccuaaucuucucucugcguguagguaggccugugccgcaaacaagcuuaccaugagcgccagcaaggagaucaagagcuuccuguggacccagagccugagaagagagcugagcggcuacugcagcaacaucaagcugcagguggugaaggacgcccaggcccugcugcacggccuggacuucagcgaggugagcaacgugcagagacugaugagaaaggagagaagagacgacaacgaccugaagagacugagagaccugaaccaggccgugaacaaccugguggagcugaagagcacccagcagaagagcauccugagagugggcacccugaccagcgacgaccugcugauccuggccgccgaccuggagaagcugaagagcaaggugaucagaaccgagagaccccugagcgccggcguguacaugggcaaccugagcagccagcagcuggaccagagaagagcccugcugagcaugaucggcaugagcagcggcaaccagagagcccaggccggcagagacggcguggugagagugugggacgugaagaacguggagcugcugaacaaccaguucggcaccaugcccagccugacccuggccugccugaccaagcagggccagguggaccugaacgacgccgugcaggcccugaccgaccugggccugaucuacaccgccaaguaccccaacaccagcgaccuggacagacugacccagagccaccccauccugaacaugaucgacaccaagaagagcagccugaacaucagcggcuacaacuucagccugggcgccgccgugaaggccggcgccugcaugcuggacggcggcaacaugcuggagaccaucaaggugagcccccagaccauggacggcauccugaagagcauccugaaggugaagaaggcccugggcauguucaucagcgacacccccggcgagagaaaccccuacgagaacauccuguacaagaucugccugagcggcgacggcuggcccuacaucgccagcagaaccagcaucaccggcagagccugggagaacaccgugguggaccuggagagcgacggcaagccccagaaggccggcagcaacaacagcaacaagagccugcagagcgugggcuucaccgccggccugaccuacagccagcugaugacccugaaggacgccaugcugcagcuggaccccaacgccaagaccuggauggacaucgagggcagacccgaggaccccguggagaucgcccuguaccagcccagcagcggcugcuacauccacuucuucagagagcccaccgaccugaagcaguucaagcaggacgccaaguacagccacggcaucgacgugaccgaccuguucgccgcccagcccggccugaccagcgccgugaucgacgcccugcccagaaacauggugaucaccugccagggcagcgacgacaucagaaagcugcuggagagccagggcagaaaggacaucaagcugaucgacaucgcccugagcaagaccgacagcagaaaguacgagaacgccgugugggaccaguacaaggaccugugccacaugcacaccggcguggugguggagaagaagaagagaggcggcaaggaggagaucaccccccacugcgcccugauggacugcaucauguucgacgccgccgugagcggcggccugaacaccagcgugcugagagccgugcugcccagagacaugguguucagaaccagcacccccagaguggugcugugaggacuagucccuguucccagagcccacuuuuuuuucuuuuuuugaaauaaaauagccugucuuucagaucuaaaaaaaaaaaaaaaaaaaaaaaaaaaaaaaaaaaaaaaaaaaaaaaaaaaaaaaaaaaaaaaaaaaaaaaaaaaaaaaaaaaaaaaaaaaaaaaaaaaa

SEQ ID NO: 17313 - RNA, 1977 nt, Artificial Sequence
  mRNA product Design a-2 (A100) comprising derived and/or modified sequence from LASV(G1442-SLE-2011;Clade IV)__AIT17181__NP (opt4)
aggagaguccgcucagccagguugcagaagcggcuuagcguguguccuaaucuucucucugcguguagguaggccugugccgcaaacaagcuuaccaugagcgccagcaaggaggugaagagcuuccuguggacccagagccugagaagagagcugagcggcuacugcagcaacaucaagcugcagguggugaaggacgcccaggcccugcugcacggccuggacuucagcgaggugagcaacgugcagagacugaugagaaagcagagaagagacgacaacgaccugaagagacugagagaccugaaccaggccgugaacaaccugguggagcugaagagcacccagcagaagagcgugcugagagugggcacccugaccagcgacgaccugcuggugcuggccgccgaccuggagaagcugaagagcaaggugaucagaaccgagagaccccugagcgccggcguguacaugggcaaccugagcagccagcagcuggaccagagaagagcccugcugaacaugaucggcaugagcggcggcauccagggcaccagaaccggcagagacggcguggugagagugugggacgugaagaacgccgaccugcugaacaaccaguucggcaccaugcccagccugacccuggccugccugaccaagcagggccagguggaccugaacgacguggugcaggcccugaccgaccugggccugaucuacaccgccaaguaccccaacgccagcgaccuggacagacugacccagagccaccccauccugaacaugaucgacaccaagaagagcagccugaacaucagcggcuacaacuucagccugggcgccgccgugaaggccggcgccugcaugcuggacggcggcaacaugcuggagaccaucaaggugagcccccagaccauggacggcauccugaagagcauccugaaggugaagaagacccugggcauguucaucagcgacacccccggcgagagaaaccccuacgagaacauccuguacaagaucugccugagcggcgacggcuggcccuacaucgccagcagaaccagcaucaccggcagagccugggagaacaccgugguggaccuggagagcgacggcaagccccagaaggccggcagcaacaacagcaacaagagccugcagagcgccggcuucgccgccggccugaccuacagccagcugaugacccugaaggacgccaugcugcagcuggaccccaacgccaagaccuggauggacaucgagggcagacccgaggaccccguggagaucgcccuguaccagcccagcagcggcugcuacauccacuucuucagagagcccaccgaccugaagcaguucaagcaggacgccaaguacagccacggcaucgacgugaccgaccuguucgccgcccagcccggccugaccagcgccgugaucgaggcccugcccagaaacauggugaucaccugccagggcagcgacgacaucaagaagcugcuggagagccagggcagaaaggacaucaagcugaucgacaucgcccugagcaagaccgacagcagaaaguacgagaacgccgugugggaccaguacaaggaccugugccacaugcacaccggcguggugguggagaagaagaagagaggcggcaaggaggagaucaccccccacugcgcccugauggacugcaucauguucgacgccgccgugagcggcggccugaacacccuggugcugagagccgugcugcccagagacaugguguucagaaccagcacccccagaguggugcugugaggacuagucccuguucccagagcccacuuuuuuuucuuuuuuugaaauaaaauagccugucuuucagaucuaaaaaaaaaaaaaaaaaaaaaaaaaaaaaaaaaaaaaaaaaaaaaaaaaaaaaaaaaaaaaaaaaaaaaaaaaaaaaaaaaaaaaaaaaaaaaaaaaaaa

SEQ ID NO: 17314 - RNA, 1977 nt, Artificial Sequence
  mRNA product Design a-2 (A100) comprising derived and/or modified sequence from LASV(G3010-SLE-2013;Clade IV)__AIT17345__NP (opt4)
aggagaguccgcucagccagguugcagaagcggcuuagcguguguccuaaucuucucucugcguguagguaggccugugccgcaaacaagcuuaccaugagcgccagcaaggagaucaagagcuuccuguggacccagagccugagaagagagcugagcggcuacugcagcaacaucaagcugcagguggugaaggacgcccaggcccugcugcacggccuggacuucagcgaggugagcaacgugcagagacugaugagaaaggagagaagagacgacaacgaccugaagagacugagagaccugaaccaggccgugaacaaccugguggagcugaagagcacccagcagaagagcauccugagagugggcacccugaccagcgacgaccugcugauccuggccgccgaccuggagaagcugaagagcaaggugaccagaaccgagagaccccugagcgccggcguguacaugggcaaccugagcagccagcagcuggaccagagaagagcccugcugagcaugaucggcaugagcagcggcgugcagggcgccagagccggcagagacggcguggugagagugugggacgugaagaacgccgagcugcugaacaaccaguucggcaccaugcccagccugacccuggccugccugaccaagcagggccagguggaccugaacgacguggugcaggcccugaccgaccugggccugaucuacaccgccaaguaccccaacaccagcgaccuggacagacugacccagagccaccccauccugaacaugaucgacaccaagaagagcagccugaacaucagcggcuacaacuucagccugggcgccgccgugaaggccggcgccugcaugcuggacggcggcaacaugcuggagaccaucaaggugagcccccagaccauggacggcauccugaagagcauccugaaggugaagaaggcccugggcauguucaucagcgagacccccggcgagagaaaccccuacgagaacauccuguacaagaucugccugagcggcgacggcuggcccuacaucgccagcagaaccagcaucaccggcagagccugggagaacaccgugguggaccuggagagcgacggcaagccccagaaggccggcagcaacaacagcaacaagagccugcagagcgccggcuucaccgccggccugaccuacagccagcugaugacccugaaggacgccaugcugcagcuggaccccaacgccaagaccuggauggacaucgagggcagacccgaggaccccguggagguggcccuguaccagcccagcagcggcugcuacauccacuucuucagagagcccaccgaccugaagcaguucaagcaggacgccaaguacagccacggcaucgacgugaccgaccuguucgccgcccagcccggccugaccagcgccgugaucgacgcccugcccagaaacauggugaucaccugccagggcagcgacgacaucaagaagcugcuggagagccagggcagaaaggacaucaagcugaucgacaucgcccugagcaagaccgacagcagaaaguacgagaacgccgugugggaccaguacaaggaccugugccacaugcacaccggcguggugguggagaagaagaagagaggcggcaaggaggagaucaccccccacugcgcccugauggacugcaucauguucgacgccgccgugagcggcggccugaacaccagcgugcugagagccgugcugcccagagacaugguguucagaaccagcacccccagaguggugcugugaggacuagucccuguucccagagcccacuuuuuuuucuuuuuuugaaauaaaauagccugucuuucagaucuaaaaaaaaaaaaaaaaaaaaaaaaaaaaaaaaaaaaaaaaaaaaaaaaaaaaaaaaaaaaaaaaaaaaaaaaaaaaaaaaaaaaaaaaaaaaaaaaaaaa

SEQ ID NO: 17315 - RNA, 1977 nt, Artificial Sequence
  mRNA product Design a-2 (A100) comprising derived and/or modified sequence from LASV(G502-SLE-2009;Clade IV)__AIT17127__NP (opt4)
aggagaguccgcucagccagguugcagaagcggcuuagcguguguccuaaucuucucucugcguguagguaggccugugccgcaaacaagcuuaccaugagcgccagcaaggagaucaagagcuuccuguggacccagagccugagaagagagcugagcggcuacugcagcaacaucaagcugcagguggugaaggacgcccaggcccugcugcacggccuggacuucagcgaggugagcaacgugcagagacugaugagaaaggagagaagagacgacaacgaccugaagagacugagagaccugaaccaggccgugaacaaccugguggagcugaagagcacccagcagaagagcauccugagagugggcacccugaccagcgacgaccugcugauccuggccgccgaccuggagaagcugaagagcaaggugaucagaaccgagagaccccugagcgccggcguguacaugggcaaccugagcagccagcagcuggaccagagaagagcccugcugagcaugaucggcaugagcggcggcaaccagggcgugagagccggcaaggacggcguggugagagugugggacgugaagaacgccgagcugcugaacaaccaguucggcaccaugcccagccugacccuggccugccugaccaagcagggccagguggaccugaacgacgccgugcaggcccugaccgaccugggccugaucuacaccgccaaguaccccaacaccagcgaccuggacagacugacccagagccaccccauccugaacaugaucgacaccaagaagagcagccugaacaucagcggcuacaacuucagccugggcgccgccgugaaggccggcgccugcaugcuggacggcggcaacaugcuggagaccaucaaggugagcccccagaccauggacggcauccugaagagcauccugaaggugaagaaggcccugggcauguucaucagcgacacccccggcgagagaaaccccuacgagaacauccuguacaagaucugccugagcggcgacggcuggcccuacaucgccagcagaaccagcaucaccggcagagccugggagaacaccgugguggaccuggagagcgacggcaagccccagaaggccggcagcaacaacagcaacaagagccugcagagcgccggcuucaccgccggccugaccuacagccagcugaugacccugaaggacgccaugcugcagcuggaccccaacaccaagaccuggauggacaucgagggcagacccgaggaccccguggagaucgcccuguaccagcccagcagcggcugcuacauccacuucuucagagagcccaccgaccugaagcaguucaagcaggacgccaaguacagccacggcaucgacgugaccgaccuguucgccgcccagcccggccugaccagcgccgugaucgacgcccugcccagaaacauggugaucaccugccagggcagcgacgacaucagaaagcugcuggagagccagggcagaaaggacaucaagcugaucgacaucgcccugaacaagaccgacagcagaaaguacgagaacgccgugugggaccaguacaaggaccugugccacaugcacaccggcguggugguggagaagaagaagagaggcggcaaggaggagaucaccccccacugcgcccugauggacugcaucauguucgacgccgccgugagcggcggccugaacaccagcgugcugagagccgugcugcccagagacaugguguucagaaccagcacccccagaguggugcugugaggacuagucccuguucccagagcccacuuuuuuuucuuuuuuugaaauaaaauagccugucuuucagaucuaaaaaaaaaaaaaaaaaaaaaaaaaaaaaaaaaaaaaaaaaaaaaaaaaaaaaaaaaaaaaaaaaaaaaaaaaaaaaaaaaaaaaaaaaaaaaaaaaaaa

SEQ ID NO: 17316 - RNA, 1977 nt, Artificial Sequence
  mRNA product Design a-2 (A100) comprising derived and/or modified sequence from LASV(G733-SLE-2010;Clade IV)__AIT17155__NP (opt4)
aggagaguccgcucagccagguugcagaagcggcuuagcguguguccuaaucuucucucugcguguagguaggccugugccgcaaacaagcuuaccaugagcgccagcaaggagaucaagagcuuccuguggacccagagccugagaagagagcugagcggcuacugcagcaacaucaagcugcagguggugaaggacgcccaggcccugcugcacggccuggacuucagcgaggugagcaacgugcagagacugaugagaaaggagagaagagacgacaacgaccugaagagacugagagaccugaaccaggccgugaacaaccugguggagcugaagagcacccagcagaagagcgugcugagagugggcacccugaccagcgacgagcugcuggugcuggccgccgaccuggagaagcugaagagcaaggugaucagaaccgagagaccccugagcgccggcguguacaugggcaaccugagcagccagcagcuggaccagagaagagcccugcugagcaugaucggcaugagcggcggcaaccagggcgccagaaccggcagagacggcguggugagagugugggacgugaagaacgccgagcugcugaacaaccaguucggcaccaugcccagccugacccuggccugccugaccaagcagggccagguggaccugaacgacgccgugcaggcccugaccgaccugggccugaucuacaccgccaaguaccccaacaccagcgaccuggacagacugacccagagccaccccauccugaacaugaucgacaccaagaagagcagccugaacaucagcggcuacaacuucagccugggcgccgccgugaaggccggcgccugcaugcuggacggcggcaacaugcuggagaccaucaaggugagcccccagaccauggacggcauccugaagagcauccugaaggugaagaaggcccugggcauguucaucagcgacacccccggcgagagaaaccccuacgagaacauccuguacaagaucugccugagcggcgacggcuggcccuacaucgccagcagaaccagcaucaccggcagagccugggagaacaccgugguggaccuggagagcgacggcaagccccagaaggccggcagcaacaacagcaacaagagccugcagagcgccggcuucaccgccggccugaccuacagccagcugaugacccugaaggacgccaugcugcagcuggaccccaacgccaagaccuggauggacaucgagggcagacccgaggaccccguggagaucgcccuguaccagcccagcagcggcugcuacauccacuucuucagagagcccaccgaccugaagcaguucaagcaggacgccaaguacagccacggcaucgacgugaccgaccuguucgccgcccagcccggccugaccagcgccgugaucgacgcccugcccagaaacauggugaucaccugccagggcagcgacgacaucagaaagcugcuggagagccagggcagaaaggacaucaagcugaucgacaucgcccugagcaagaucgacagcagaaaguacgagaacgccgugugggaccaguacaaggaccugugccacaugcacaccggcguggugguggagaagaagaagagaggcggcaaggaggagaucaccccccacugcgcccugauggacugcaucauguucgacgccgccgugagcggcggccugaacagccuggugcugagagccgugcugcccagagacaugguguucagaaccagcacccccagaguggugcugugaggacuagucccuguucccagagcccacuuuuuuuucuuuuuuugaaauaaaauagccugucuuucagaucuaaaaaaaaaaaaaaaaaaaaaaaaaaaaaaaaaaaaaaaaaaaaaaaaaaaaaaaaaaaaaaaaaaaaaaaaaaaaaaaaaaaaaaaaaaaaaaaaaaaa

SEQ ID NO: 17317 - RNA, 1977 nt, Artificial Sequence
  mRNA product Design a-2 (A100) comprising derived and/or modified sequence from MOPV/LASV reassortant(IGS-1;Clade IV)__AFY05578__NP (opt4)
aggagaguccgcucagccagguugcagaagcggcuuagcguguguccuaaucuucucucugcguguagguaggccugugccgcaaacaagcuuaccaugagcgccagcaaggagaucaagagcuuccuguggacccagagccugagaagagagcugagcggcuacugcagcaacaucaagcugcagguggugaaggacgcccaggcccugcugcacggccuggacuucagcgaggugagcaacgugcagagacugaugagaaaggagagaagagacgacaacgaccugaagagacugagagaccugaaccaggccgugaacaaccugguggagcugaagagcacccagcagaagagcauccugagagugggcacccugaccagcgacgaccugcugauccuggccgccgaccuggagaagcugagaagcaaggugaucagaaccgagagaccccugagcgccggcguguacaugggcaaccugagcagccagcagcuggaccagagaagagcccugcugaacaugaucggcaugagcggcggcaaccagggcgccagagccggcagagacggcguggugagagugugggacgugaagaacgccgagcugcugagcaaccaguucggcaccaugcccagccugacccuggccugccugaccaagcagggccagguggaccugaacgacgccgugcaggcccugaccgaccugggccugaucuacaccgccaaguaccccaacaccagcgaccuggacagacugacccagagccaccccauccugaacaugaucgacaccaagaagagcagccugaacaucagcggcuacaacuucagccugggcgccgccgugaaggccggcgccugcaugcuggacggcggcaacaugcuggagaccaucaaggugagcccccagaccauggacggcauccugaagagcauccugaaggugaagaaggcccugggcauguucaucagcgacacccccggcgagagaaaccccuacgagaacauccuguacaagaucugccugagcggcgacggcuggcccuacaucgccagcagaaccagcaucaccggcagagccugggagaacaccgugguggaccuggagagcgacggcaagccccagaaggccgacagcaacaacagcagcaagagccugcagagcgccggcuucaccgccggccugaccuacagccagcugaugacccugaaggacgccaugcugcagcuggaccccaacgccaagaccuggauggacaucgagggcagacccgaggaccccguggagaucgcccuguaccagcccagcagcggcugcuacauccacuucuucagagagcccaccgaccugaagcaguucaagcaggacgccaaguacagccacggcaucgacgugaccgaccuguucgccacccagcccggccugaccagcgccgugaucgacgcccugcccagaaacauggugaucaccugccagggcagcgacgacaucagaaagcugcuggagagccagggcagaaaggacaucaagcugaucgacaucgaccugagcaagaccgacagcagaaaguacgagaacgccgugugggaccaguacaaggaccugugccacaugcacaccggcguggugguggagaagaagaagagaggcggcaaggaggagaucaccccccacugcgcccugauggacugcaucauguucgacgccgccgugagcggcggccugaacaccagcgugcugagagccgugcugcccagagacaugguguucagaaccagcacccccagaguggugcugugaggacuagucccuguucccagagcccacuuuuuuuucuuuuuuugaaauaaaauagccugucuuucagaucuaaaaaaaaaaaaaaaaaaaaaaaaaaaaaaaaaaaaaaaaaaaaaaaaaaaaaaaaaaaaaaaaaaaaaaaaaaaaaaaaaaaaaaaaaaaaaaaaaaaa

SEQ ID NO: 17318 - RNA, 1977 nt, Artificial Sequence
  mRNA product Design a-2 (A100) comprising derived and/or modified sequence from LASV(LM765-SLE-2012;Clade IV)__AIT17815__NP (opt4)
aggagaguccgcucagccagguugcagaagcggcuuagcguguguccuaaucuucucucugcguguagguaggccugugccgcaaacaagcuuaccaugagcgccagcaaggagaucaagagcuuccuguggacccagagccugagaagagagcugagcggcuacugcagcaacaucaagcugcagguggugaaggacgcccaggcccugcugcacggccuggacuucagcgaggugagcaacgugcagagacugaugagaaaggagagaagagacgacaacgaccugaagagacugagagaccugaaccaggccgugaacaaccugguggagcugaagagcacccagcagaagagcauccugagagugggcacccugaccagcgacgaccugcugauccuggccgccgaccuggagaagcugaagagcaaggugaccagaaccgagagaccccugagcgccggcguguacaugggcaaccugagcagccagcagcuggaccagagaagagcccugcuggacaugaucggcaugagcggcagcaaccagggcgccagagccggcagagacggcguggugagagugugggacgugaagaacgccgagcugcugaacaaccaguucggcaccaugcccagccugacccuggccugccugaccaagcagggccagguggaccugaacgacgccgugcaggcccugaccgaccugggccugaucuacaccgccaaguaccccaacaccagcgaccuggacagacugacccagagccaccccauccugaacaugaucgacaccaagaagagcagccugaacaucagcggcuacaacuucagccugggcgccgccgugaaggccggcgccugcaugcuggacggcggcaacaugcuggagaccaucaaggugagcccccagaccauggacggcauccugaagagcauccugaaggugaagaaggcccugggcauguucaucagcgacgcccccggcgagagaaaccccuacgagaacauccuguacaagaucugccugagcggcgacggcuggcccuacaucgccagcagaaccagcaucaccggcagagccugggagaacaccgugguggaccuggagagcgacggcaagccccagaaggccggcagcaacggcagcaacaagagccugcagagcgccggcuucaccgccggccugaccuacagccagcugaugacccugaaggacgccaugcugcagcuggaccccaacgccaagaccuggauggacaucgagggcagacccgaggaccccguggagaucgcccuguaccagcccagcagcggcugcuacauccacuucuucagagagcccaccgaccugaagcaguucaagcaggacgccaaguacagccacggcaucgacgugaccgaccuguucgccgcccagcccggccugaccagcgccgugaucgacgcccugcccagaaacauggugaucaccugccagggcagcgacgacaucagaaagcuguucgagagccagggcagaaaggacaucaagcugaucgacaucgcccugagcaagaccgacagcagaaaguacgagaacgccgugugggaccaguacaaggaccugugccacaugcacaccggcaucgugguggagaagaagaagagaggcggcaaggaggagaucaccccccacugcgcccugauggacugcaucauguucgacgccgccgugagcggcggccugaacaccagcgugcugagagccgugcugcccagagacaugguguucagaaccagcacccccagaguggugcugugaggacuagucccuguucccagagcccacuuuuuuuucuuuuuuugaaauaaaauagccugucuuucagaucuaaaaaaaaaaaaaaaaaaaaaaaaaaaaaaaaaaaaaaaaaaaaaaaaaaaaaaaaaaaaaaaaaaaaaaaaaaaaaaaaaaaaaaaaaaaaaaaaaaaa

SEQ ID NO: 17319 - RNA, 1977 nt, Artificial Sequence
  mRNA product Design a-2 (A100) comprising derived and/or modified sequence from LASV(LM776-SLE-2012;Clade IV)__AIT17825__NP (opt4)
aggagaguccgcucagccagguugcagaagcggcuuagcguguguccuaaucuucucucugcguguagguaggccugugccgcaaacaagcuuaccaugagcgccagcaaggagaucaagagcuuccuguggacccagagccugagaagagagcugagcagcuacugcagcaacaucaagcugcagguggugaaggacgcccaggcccugcugcacggccuggacuucagcgaggugagcaacgugcagagacugaugagaaaggagagaagagacgacaacgaccugaagagacugagagaccugaaccaggccgugaacaaccugguggagcugaagagcacccagcagaagagcauccugagagugggcacccugaccagcgacgaccugcugauccuggccgccgaccuggagaagcugaagagcaaggugaccagaaccgagagaccccugagcgccggcguguacaugggcaaccugagcagccagcagcuggaccagagaagagcccugcugagcaugaucggcaugagcggcagcaaccagggcgccagagccggcagagacggcguggugagagugugggacgugaagaacgccgagcugcugaacaaccaguucggcaccaugcccagccugacccuggccugccugaccaagcagggccagguggaccugaacgacgccgugcaggcccugaccgaccugggccugaucuacaccgccaaguaccccaacaccagcgaccuggacagacugacccagagccaccccauccugaacaugaucgacaccaagaagagcagccugaacaucagcggcuacaacuucagccugggcgccgccgugaaggccggcgccugcaugcuggacggcggcaacaugcuggagaccaucaaggugagcccccagaccauggacggcauccugaagagcauccugaaggugaagaaggcccugggcauguucaucagcgacacccccggcgagagaaaccccuacgagaacauccuguacaagaucugccugagcggcgacggcuggcccuacaucgccagcagaaccagcaucaccggcagagccugggagaacaccgugguggaccuggagagcgacggcaagccccagaaggccggcagcaacaacagcaacaagagccugcagagcgccggcuucaccgccggccugaccuacagccagcugaugacccugaaggacgccaugcugcagcuggaccccaacgccaagaccuggauggacaucgagggcagacccgaggaccccguggagguggcccuguaccagcccagcagcggcugcuacauccacuucuucagagagcccaccgaccugaagcaguucaagcaggacgccaaguacagccacggcaucgacgugaccgaccuguucgccgcccagcccggccugaccagcgccgugaucgacgcccugcccagaaacauggugaucaccugccagggcagcgacgacaucagaaagcugcuggagagccagggcagaaaggacaucaagcugaucgacaucgcccugagcaagaccgacagcagaaaguacgagaacgccgugugggaccaguacaaggaccugugccacaugcacaccggcguggugguggagaagaagaagagaggcggcaaggaggagaucaccccccacugcgcccugauggacugcaucauguucgacgccgccgugagcggcggccugaacaccagcgugcugagagccgugcugcccagagacaugguguucagaaccagcacccccagaguggugcugugaggacuagucccuguucccagagcccacuuuuuuuucuuuuuuugaaauaaaauagccugucuuucagaucuaaaaaaaaaaaaaaaaaaaaaaaaaaaaaaaaaaaaaaaaaaaaaaaaaaaaaaaaaaaaaaaaaaaaaaaaaaaaaaaaaaaaaaaaaaaaaaaaaaaa

SEQ ID NO: 17320 - RNA, 1977 nt, Artificial Sequence
  mRNA product Design a-2 (A100) comprising derived and/or modified sequence from LASV(Mad39;Clade IV)__ANH09723__NP (opt4)
aggagaguccgcucagccagguugcagaagcggcuuagcguguguccuaaucuucucucugcguguagguaggccugugccgcaaacaagcuuaccaugagcgccagcaaggagaucaagagcuuccuguggacccagagccugagaagagagcugagcggcuacugcagcaacaucaagcugcagguggugaaggacgcccaggcccugcugcacggccuggacuucagcgaggugagcaacgugcagagacugaugagaaagcagagaagagacgacaacgaccugaagagacugagagaccugaaccaggccgugaacaaccugguggagcugaagagcacccagcagaagagcgugcugagagugggcacccugaccagcgacgaccugcugacccuggccgccgaccuggagaagcugaagagcaaggugaccagaaccgagagaccccugaccgccggcguguacaugggcaaccugagcagccagcagcuggaccagagaagagcccugcugaacaugaucggcaugagcggcggcaaccagggcgccagaaccggcagagacggcguggugagagugugggacgugaagaacgccgagcugcugaacaaccaguucggcaccaugcccagccugacccuggccugccugaccaagcagggccagguggaccugaacgacguggugcaggcccugaccgaccugggccugaucuacaccgccaaguaccccaacaccagcgaccuggacagacugacccagagccaccccauccugaacaugaucgacaccaacaagagcagccugaacaucagcggcuacaacuucagccugggcgccgccgugaaggccggcgccugcaugcuggacggcggcaacaugcuggagaccaucaaggugagcccccagaccauggacggcauccugaagagcauccugaaggugaagaagagccugggcauguucaucagcgacacccccggcgagagaaaccccuacgagaacauccuguacaagaucugccugagcggcgacggcuggcccuacaucgccagcagaaccagcaucaccggcagagccugggagaacaccgugguggaccuggagagcggcggcaagccccagaaggccggcagcaacaacagcaacaagagccugcagagcgccggcuucgccgccggccugaccuacagccagcugaugacccugaaggacgccaugcugcagcuggaccccaacgccaagaccuggauggacaucgagggcagacccgaggaccccguggagaucgcccuguaccagcccaucagcggcugcuacauccacuucuucagagagcccaccgaccugaagcaguucaagcaggacgccaaguacagccacggcaucgacgugaccgaccuguucgccgcccagcccggccugaccagcgccgugaucgaggcccugcccagaaacauggugaucaccugccagggcagcgacgacaucagaaagcuguucgagagccagggcagaaaggacaucaagcugaucgacaucgcccugagcaagaccgacagcagaaaguacgagaacgccgugugggaccaguacaaggaccugugccacaugcacaccggcguggugguggagaagaagaagaagggcggcaaggaggagaucaccccccacugcgcccugauggacugcaucauguucgacgccgccgugagcggcggccugaacacccuggugcugagagccgugcugcccagagacaugguguucagaaccagcacccccaagguggugcugugaggacuagucccuguucccagagcccacuuuuuuuucuuuuuuugaaauaaaauagccugucuuucagaucuaaaaaaaaaaaaaaaaaaaaaaaaaaaaaaaaaaaaaaaaaaaaaaaaaaaaaaaaaaaaaaaaaaaaaaaaaaaaaaaaaaaaaaaaaaaaaaaaaaaa

SEQ ID NO: 17321 - RNA, 1977 nt, Artificial Sequence
  mRNA product Design a-2 (A100) comprising derived and/or modified sequence from LASV(Z0947-SLE-2011;Clade IV)__AIT17841__NP (opt4)
aggagaguccgcucagccagguugcagaagcggcuuagcguguguccuaaucuucucucugcguguagguaggccugugccgcaaacaagcuuaccaugagcgccagcaaggagaucaagagcuuccuguggacccagagccugagaagagagcugagcggcuacugcagcaacaucaagcugcagguggugaaggacgcccaggcccugcugcacggccuggacuucagcgaggugagcaacgugcagagacugaugagaaaggagagaagagacgacaacgaccugaagagacugagagaccugaaccaggccgugaacaaccugguggagcugaagagcacccagcagaagagcauccugagagugggcacccugaccagcgacgaccugcugauccuggccgccgaccuggagaagcugaagagcaaggugaccagaaccgagagaccccugagcgccggcguguacaugggcaaccugagcagccagcagcuggaccagagaagagcccugcugaacaugaucggcaugagcggcagcaaccagggcgccagaaccggcagagacggcguggugagagugugggacgugaagaacgccgagcugcugaacaaccaguucggcaccaugcccagccugacccuggccugccugaccaagcagggccagguggaccugaacgacgccgugcaggcccugaccgaccugggccugaucuacaccgccaaguaccccaacaccagcgaccuggacagacugacccagagccaccccauccugaacaugaucgacaccaagaagagcagccugaacaucagcggcuacaacuucagccugggcgccgccgugaaggccggcgccugcaugcuggacggcggcaacaugcuggagaccaucaaggugagcccccagaccauggacggcauccugaagagcauccugaaggugaagaaggcccugggcauguucaucagcgacgcccccggcgagagaaaccccuacgagaacauccuguacaagaucugccugagcggcgacggcuggcccuacaucgccagcagaaccagcaucaccggcagagccugggagaacaccgugguggaccuggagagcgacggcaagccccagaaggccggcagcaacggcagcaacaagagccugcagagcgccggcuucaccgccggccugaccuacagccagcugaugacccugaaggacgccaugcugcagcuggaccccaacgccaagaccuggauggacaucgagggcagacccgaggaccccguggagaucgcccuguaccagcccagcagcggcugcuacauccacuucuucagagagcccaccgaccugaagcaguucaagcaggacgccaaguacagccacggcaucgacgugaccgaccuguucgccgcccagcccggccugaccagcgccgugaucgacgcccugcccagaaacauggugaucaccugccagggcagcgacgacaucagaaagcuguucgagagccagggcagaaaggacaucaagcugaucgacaucgcccugagcaagaccgacagcagaaaguacgagaacgccgugugggaccaguacaaggaccugugccacaugcacaccggcaucgugguggagaagaagaagagaggcggcaaggaggagaucaccccccacugcgcccugauggacugcaucauguucgacgccgccgugagcggcggccugaacaccagcgugcugagagccgugcugcccagagacaugguguucagaaccagcacccccagaguggugcugugaggacuagucccuguucccagagcccacuuuuuuuucuuuuuuugaaauaaaauagccugucuuucagaucuaaaaaaaaaaaaaaaaaaaaaaaaaaaaaaaaaaaaaaaaaaaaaaaaaaaaaaaaaaaaaaaaaaaaaaaaaaaaaaaaaaaaaaaaaaaaaaaaaaaa

SEQ ID NO: 17322 - RNA, 1977 nt, Artificial Sequence
  mRNA product Design a-2 (A100) comprising derived and/or modified sequence from LASV(Josiah;Clade IV)__NP_694869__NP (opt5)
aggagaguccgcucagccagguugcagaagcggcuuagcguguguccuaaucuucucucugcguguagguaggccugugccgcaaacaagcuuaccaugagcgccuccaaggagaucaaaucuuuccuguggacccagagccucagacgggaacuguccggcuacugcucuaacauuaagcugcaaguggucaaagacgcucaggcccugcuccacgggcuggauuuuagcgagguuuccaaugugcagcgccuuaugagaaaggaacggcgcgacgauaacgaccugaaaagacuccgggaucugaaucaggcggugaacaaucuggucgagcucaagucuacacaacaaaagagcauccugcgcgugggaacgcuuaccuccgacgaucugcucauucuggcugccgaccuugaaaaacuuaagagcaaaguuaucagaacagagcggccccucucugccggcguguauauggggaaccuguccagccagcagcuggaucagcgcagagcucuccugaauaugauuggaaugucuggcgggaaccagggagcccgggcuggccgcgacggcgucgugagaguuugggaugugaagaaugccgagcuucugaacaaucaguucgggaccaugccuucccucacacuggcgugucuuaccaaacagggacaagucgaccugaacgaugccgugcaggcucucacagaccugggccugaucuacaccgccaaguauccgaauacgagcgaccucgaucggcugacccagucucaucccauccuuaacaugauugacacaaagaaauccagccugaauaucuccggguacaacuuuucucucggagcugccgugaaggcgggcgccugcaugcuggaugggggaaacaugcuugaaaccauuaaagucagcccucaaacaauggacggcauccugaaguccauucucaaaguuaagaaagcucugggcauguucaucagcgauacccccggggagcgcaauccuuaugaaaacauucuguacaagaucugucucucuggagacggcuggcccuauaucgccuccagaacgagcauuacagggcgggcuugggagaauaccgugguggaucuggagucugacggaaagccucagaaagccgauagcaacaauuccucuaagagccuucaguccgccggcuuuacagcugggcugaccuacagccagcucaugacccugaaagacgcgaugcugcaacuugauccgaacgccaagacauggauggacaucgaaggaagacccgaggacccugucgaaauugcucucuaccagcccucuuccggcugcuauauccacuucuuucgcgagccuacggaucugaaacaguucaagcaggacgccaaguacagccauggcauugaugugaccgaccuguuugccacacaacccgggcucaccucugcuguuaucgaugcccugccgcggaauauggugaucacaugucagggauccgacgauauuagaaaacuucuggaaagccagggccgcaaggacaucaaacucauugauaucgcgcuguccaagaccgacucucggaaauaugagaacgcugucugggaucaguacaaggaccugugccacaugcauacgggggugguuguggagaagaaaaagagaggaggcaaagaagagauuacaccucacugugcccuuauggauugcaucauguucgacgccgcugucagcgggggccucaauaccuccgugcugcgcgccguccugccccgggacaugguguuuagaaccucuacaccucgcguugugcucugaggacuagucccuguucccagagcccacuuuuuuuucuuuuuuugaaauaaaauagccugucuuucagaucuaaaaaaaaaaaaaaaaaaaaaaaaaaaaaaaaaaaaaaaaaaaaaaaaaaaaaaaaaaaaaaaaaaaaaaaaaaaaaaaaaaaaaaaaaaaaaaaaaaaa

SEQ ID NO: 17323 - RNA, 1977 nt, Artificial Sequence
  mRNA product Design a-2 (A100) comprising derived and/or modified sequence from LASV(LP;Clade I)__AAF86702__NP (opt5)
aggagaguccgcucagccagguugcagaagcggcuuagcguguguccuaaucuucucucugcguguagguaggccugugccgcaaacaagcuuaccaugagcaacuccaaggagaucaaaucuuuccuguggacccagagccucagacgggaacuguccggcuacugcucuaauauuaagcuccaaguggucaaagacgcccaggcucugcuccacgggcuggauuuuagcgagguuuccaacgugcagcgccuuaugagaaagcagaaacgggacgaugccgaccugaagcgccucagagaucugaaucaagcggugaacaaucuggucgaacucaagucuacacagcagaaaaacgugcugcggguuggaacgcuuagcuccgacgaucugaucacccucgcugccgaccuggagaaacuuaaaagcaaggugauucgcacagaaagaccccugucuuccggcgucuauauggggaaucucagcucucagcaacuggaucagcggcgcgcccugcucuccaugaucggaaugagcggcgggccucagggaaacagaaccggcggcgacggggugguucgggugugggaugucaaaaaugcugagcugcuuaacaaucaguucggaacaaugccgucucugacccucgccugucugacaaagcaaggccagguggaccuuaacgaugcugugcaggcccugaccgaccucgggcugauuuacacggcgaaguaucccaauuccagcgaccuggauaugcucacccaaucccauccuauccugggaauggucgacacaaagaagucuagccuuaacaucuccggcuacaauuuuagccugggggccgcuguuaaagccggagcuugcaugcucgauggcggcaacaugcuggagaccauuaaggugucuccccagacaauggacgggauccuuaaauccauucugaaggugaaacgcagccucggaauguucaucucugauaccccuggcgaaagaaaccccuaugagaauauucuguacaagaucugucugagcggggaaggauggccuuauauugccucccggacgucuaucacaggccgcgcgugggagaacacccucgucgaccuggagagcgauaauaagccgcccaaacuuaacuccgccgggagcaauaagucucugcaggcugccggacucaacgcuggccugacauacucccagcugaugacccuuaaagacugcaugcuccaacuggauccuagcucuaagaccuggaucgacauugaaggcagacccgaggauccuguggaaaucgcccuguuucagcccuccagcggguguuacauucacuucuuucgggagccgacagaccucaaacaguucaagcaggacgccaaguauucccauggaaucgauguuacggaccuguuuucuacccaaccuggccuuacaagcgcugugauugaagcgcugcccagaaauaugguccuuaccugccagggguccgaugacaucaaaaagcugcuggagucucagggacgccgggauaucaaacuuauugacaucagccucuccaaggccgauagcagaaaauucgagaacgcugugugggaccaguacaaggaucugugucacaugcauacaggcguuguggucgaaaagaaaaagcgcgggggcaaagaggaaauuaccccucacugcgcccugcucgacuguaucauguuugaugccgcuacgacaggaucucugaauauuaccacccuucgggccgugcugcccagagacauggucuuccgcacauccacccccaaggugguucucugaggacuagucccuguucccagagcccacuuuuuuuucuuuuuuugaaauaaaauagccugucuuucagaucuaaaaaaaaaaaaaaaaaaaaaaaaaaaaaaaaaaaaaaaaaaaaaaaaaaaaaaaaaaaaaaaaaaaaaaaaaaaaaaaaaaaaaaaaaaaaaaaaaaaa

SEQ ID NO: 17324 - RNA, 1977 nt, Artificial Sequence
  mRNA product Design a-2 (A100) comprising derived and/or modified sequence from LASV(803213;Clade II)__AAF86704__NP (opt5)
aggagaguccgcucagccagguugcagaagcggcuuagcguguguccuaaucuucucucugcguguagguaggccugugccgcaaacaagcuuaccaugagcgccuccaaggaggugaaaucuuuccuguggacccagagccucagacgggaacuguccggcuacugcucuaacaucaaacuucaagucguuaaggacgcucaggcccugcuccacgggcuggauuuuagcgaggugaauaacgugcagcgccuuaugagaaagcagaaacgggacgauggagaccugaagcgccucagagaucugaaucaagcggucaacaaucugguggaacucaaguccacacagcagaaaucuauucugcggguuggcacgcuuaccagcgacgaucugcucacacuggcugccgaccuugagaagcugaaauccaaggugauccgcaccgaaagaccccucagcucuggggucuauaugggaaaccuguccacacagcaacuggagcagcggcgcgcccuccugaauaugauuggcauggugggaggagcucagggcacccagccuggcagagaugggguugugcgggucugggacgugaaaaacccggaucuucugaauaaccaauucggaacaaugcccagccucacccuggccugucuuacgaagcagggccagguggaccugaaugaugcuguccucgcccugaccgaccuggggcucaucuacacagcgaaguauccuaacucuuccgaccuggaucgccuuagccaaucucaucccauucugaauaugguugacaccaaaaaguccagccucaacaucuccggauacaauuuuucucugggcgccgcugugaaagccggggcuugcaugcuugauggaggcaacaugcuggagacaaucaaggugaccccucagacgauggacggcauucucaaaagcauccugaaggucaaaagaucccuggggauguucgugagcgauacacccggagaacggaacccuuaugagaauauucucuacaagaucugucugucuggcgacggguggccguauauugccucccgcaccagcaucguugggagagcgugggaaaacacaaccguggaucuugagucugacggcaagccccagaaagucgggaccgccggaagcaauaagucccugcagucugcuggcuuuccuacaggccucacguacagccaacugaugacccugaaagauuccaugaugcagcuugaccccagcgccaagacauggauugauaucgaggggcggccugaagaccccguggagaucgcucucuaccagccgaugucuggaugcuauauucacuucuuuagagaaccuaccgaccugaaacaguucaagcaagaugccaaguacucccauggcaucgacguugccgaucuguuucccgcucagccugggcucacaagcgcggugauugaggcccugccccgcaacaugguccuuaccugucagggaucugacgauaucaaaaagcugcucgacucccagggccggagagauauuaaacugaucgacaucagccuguccaagguggauucucgcaaauucgaaaaugcugucugggaccaaugcaaggaucuuugucacaugcauacgggggugguuguggagaagaaaaagcggggcggaaaagaggaaauuacaccccacugcgcccucauggacuguaucauguuugaugccgcugucagcggcgggcugaacauuccugugcugagagccguucucccgcgcgacaugguguuccggaccuccucucccaaggucgugcugugaggacuagucccuguucccagagcccacuuuuuuuucuuuuuuugaaauaaaauagccugucuuucagaucuaaaaaaaaaaaaaaaaaaaaaaaaaaaaaaaaaaaaaaaaaaaaaaaaaaaaaaaaaaaaaaaaaaaaaaaaaaaaaaaaaaaaaaaaaaaaaaaaaaaa

SEQ ID NO: 17325 - RNA, 1980 nt, Artificial Sequence
  mRNA product Design a-2 (A100) comprising derived and/or modified sequence from LASV(GA391;Clade III)__CAA36646__NP (opt5)
aggagaguccgcucagccagguugcagaagcggcuuagcguguguccuaaucuucucucugcguguagguaggccugugccgcaaacaagcuuaccaugagcgccuccaaggaggugagaucuuuccuguggacccagagccuccggcgcgaacuguccggcuacugcucuaacaucaaacuucaagucguuaaggacgcucaggcccugcuccacgggcuggauuuuagcgagguguccaaugugcagagacuuaugcggaaacagaagcgcgacgauggagaccugaaaagacuccgggaucugaaccaagcggucaauaaccugguggaacucaagucuacacagcagaaaagcguucugcgcgugggcacgcuuuccagcgacgaucugcucauucuggcugccgaccuugagaaacugaagucuaaagucaccagaacagaacggccccucuccagcgggguguauaugggaaaucugucuucccagcaacuggaucagcgcagagcccuccugaacaugaucggcaugaccgggguuagcggaggcggcaagggggcuucugacggaauugugcgggucugggaugugaaaaaugccgagcuucugaacaaucaguucggcacaaugccuucccucacccuggcuugucuuacaaagcaggggcaaguggaccugaacgaugccguccaggcgcucaccgaccugggacugaucuacacggccaaguauccgaauagcuccgaccucgaucgccugucucagagccaucccauucuuaacaugaucgacaccaaaaaguccagccugaauaucucuggcuacaacuuuucccucggggcugccguuaaagcuggagccugcaugcuggauggcggcaauaugcuugagacaauuaaggugagcccucaaaccauggacgggauccugaaaucuauucucaaggugaaaaagagccugggaauguucgucuccgauacacccggcgaaagaaacccuuaugagaacauccuguacaagauuugucucucuggggacggauggcccuauaucgcgagccggaccuccauugugggccgcgccugggaaaauacgguuguggaucuggagcaggacaacaaaccucagaagaucgggaauggaggcagcaacaaaucucuucaguccgcuggcuuugccgcugggcugacauacagccaacucaugacccugaaggauuucaaaugcuuuaaucugaucccgaacgccaagacauggauggacauugagggaagacccgaagauccugucgagaucgcccuuuaccagcccucuuccggcuguuaugugcacuucuuucgggaaccuaccgaccucaagcaguucaaacaggacgcuaaguacagccaugggauugauguuaccgaccuguuugcggcccaacccggacugacauccgcugugaucgaggcccucccgagaaauauggucauuacgugccagggcucugaagauauccgcaaacugcuugagagccaggggcggagagacaucaagcugauugauaucacccucuccaaagccgacucucgcaaguucgagaacgcugugugggaucaguuuaaggaccugugucacaugcauacaggcgucgugguugaaaagaagaaacggggaggcaaggaggaaauuaccccucacugcgcccugauggauuguaucauguucgacgcggcugugagcgggggacuugaugccaaaguccucagagugguucugccccgcgacaugguguuccggacauccaccccuaaggucgugcugugaggacuagucccuguucccagagcccacuuuuuuuucuuuuuuugaaauaaaauagccugucuuucagaucuaaaaaaaaaaaaaaaaaaaaaaaaaaaaaaaaaaaaaaaaaaaaaaaaaaaaaaaaaaaaaaaaaaaaaaaaaaaaaaaaaaaaaaaaaaaaaaaaaaaa

SEQ ID NO: 17326 - RNA, 1977 nt, Artificial Sequence
  mRNA product Design a-2 (A100) comprising derived and/or modified sequence from LASV(AV;Clade V)__CCA30315__NP (opt5)
aggagaguccgcucagccagguugcagaagcggcuuagcguguguccuaaucuucucucugcguguagguaggccugugccgcaaacaagcuuaccaugagcgccuccaaggaggugaaaucuuuccuguggacccagagccucagacgggaacuguccggcuacugcucuaacaucaaacuucaagucguuaaggacgcucaggcccugcuccacgggcuggauuuuagcgagguguccaaugugcagcgccuuaugagaaagcagcggcgcgacgauucugaccugaaaagacuccgggaucugaaccaagcggucaauaaccugguggaacucaagagcacacagcagaaguccguucugcgcgugggaacgcuuagcucugacgaucugcucacccuggcugccgaccuugagaaacugaaguccaaagucacaagaaccgaacggccccucagcucuggcguguauauggggaaucuguccagccagcaacuggaucagcgcagagcccuccugaaccuuauuggaaugacaaauggcucucaggggucccaggcuggacgggacggcguugugcgcgucugggaugugaagaacgccgagcugcucaauaaccaauucggcaccaugccuagccugacacuugcuugucugaccaaacagggacagguggaccucaaugaugucguucaagcccugacggaccuggggcucaucuacaccgcgaaguauccgaacacauccgaccuggauagacuuacccagucucaucccauucugaauaugaucgacacaaagaaaagcucccucaacauuagcggcuacaauuuuucucugggggccgcugugaaggccggagcuugcaugcuugauggcgggaacaugcuggagaccaucaaaguguccccucagagcauggacggaauccucaagucuauucugaaagucaagcgggcccugggcauguucgugagcgauacgcccggcgaacgcaacccuuaugagaauauccucuacaaaauuugucuguccggggacggauggcccuauaucgcgucuagaacaagcauuguuggccgggccugggaaaacaccguggucgaucuugagacagacgggaagccucagaagaucggauccggcaauagcaacaaaucucugcaauccgcuggguuuagcgccggacucaccuacucucagcugaugacccugaaggaugcuaugcuucagcucgacccgaaugccaaaacauggauggauauugagggcagacccgaagacccuguggagguugcccuguaccagcccaucuccggcugcuauauccacuucuuucgcgaaccuacggaccugaagcaauucaaacaggaugcuaaguacagccaugggauugacaucgcggaucucuuugccgcucagcccggacugaccuccgccgugauugaggcccuuccgcggaacauggucaucacaugucagggcucugaagacauuaagaaacugcucgagagccaagggagaaaggauaucaaacugaucgacauugcucuguccaagaucgauucucgcaaauucgagaaugccgugugggaccaguauaaggaucuuugccacaugcauaccggagucgugguugaaaagaaaaagcggggcgggaaagaggaaauuacaccucacugugcgcucauggacugcaucauguuugaugcugccgugagcggcggacugaacacccugguccucagagccgugcugccccgcgacaugguuuuccggacguccacaccuagagugguccuuugaggacuagucccuguucccagagcccacuuuuuuuucuuuuuuugaaauaaaauagccugucuuucagaucuaaaaaaaaaaaaaaaaaaaaaaaaaaaaaaaaaaaaaaaaaaaaaaaaaaaaaaaaaaaaaaaaaaaaaaaaaaaaaaaaaaaaaaaaaaaaaaaaaaaa

SEQ ID NO: 17327 - RNA, 1977 nt, Artificial Sequence
  mRNA product Design a-2 (A100) comprising derived and/or modified sequence from LASV(Togo/2016/7082;Clade VI)__AMR44578__NP (opt5)
aggagaguccgcucagccagguugcagaagcggcuuagcguguguccuaaucuucucucugcguguagguaggccugugccgcaaacaagcuuaccaugagcaacuccaaggaggugaaaucuuuccuguggacccagagccucagacgggaacuguccggcuacugcucuaauaucaaacuucaagucguuaaagacgcccaggcucugcuccacgggcuggauuuuagcgagguguccaacgugcagcgccuuaugagaaagcagaaacgggacgauggagaccugaagcgccucagagaucugaaucaagccgucaacaaucugguggaacucaagucuguucagcagaaaagcauucugcgggugggcacacuuacguccgacgaucugcucacccuggcggcugaccuugagaagcugaaaagcaaggucacacgcaccgaaagaccccucucuuccgggguguauaugggaaaccugagcucucagcaacuggaucagcggcgcgcccuccuguccaugaucggcaugagcgggggaaaucagaacucucagccuaaaggcgacggcguugugagagucugggaugugaagaaugccgaccuucugaacaaucaauucgggacaaugccgucccucacccuggcuugucuuacaaagcagggacagguggaucugaacgacgccguccaagcucucaccgaccugggccugauuuacacggccaaauaucccaauagcuccgaucucgaccggcugucucagagccauccuauccuuaacaugauugauaccaagaaauccagccugaauaucucuggguacaacuuuucccucggagcggccaucaagacaggcgcuugcaugcuggacgggggaaacaugcuugagaccauuaaaguuacaccccagaccauggauggcauccucaagagcauucugaaagugaagcgcucucugggcauguucaucagcgacacgccuggggagagaaaucccuaugaaaacauucuguacaagaucugucucuccggagauggcuggccuuauauugccucucggacagcuaucaucgggcgcgccugggagaauaccguggucgaccuggaaagcgauuccaaaccgcagaagauuggaagcaacggcucuaauaaaucccuucaaagcgcgggguuugcccccggacugacauacucucagcucaugacccugaaggacuccaugcugcagcuugauccuaacgcuaaaaccuggaucgacauugagggcagacccgaggacccuguggaaguugcccucuuccagcccaucagcggcugcuacauucacuuuuuccgggagccgacagaucugaagcaauuuaagcaggacgcuaaauauucccaugggaucgaugugacggaccuguucgccgcccagccuggacucaccucugcugucaucgaagcgcugcccagaaauauggugcuuacaugucagggcagcgaugacauuaagaaacugcucgauucccaagggcgccgggacaucaagcugauugauguuucucugaacaaaaucgacagcagaaaguuugagaaugccgugugggaucaguacaaggaccuuugccacaugcauaccggagucguggucgaaaagaagaaaaagggcgggaaagaggagauuacaccucacugugcucuccuggauugcaucauguucgacgccgccguguccggcggacugaacgcuaccguucuccgcgccgugcugccccgggacauggucuuuagaacgagcucucccaaggugguucuuugaggacuagucccuguucccagagcccacuuuuuuuucuuuuuuugaaauaaaauagccugucuuucagaucuaaaaaaaaaaaaaaaaaaaaaaaaaaaaaaaaaaaaaaaaaaaaaaaaaaaaaaaaaaaaaaaaaaaaaaaaaaaaaaaaaaaaaaaaaaaaaaaaaaaa

SEQ ID NO: 17328 - RNA, 1977 nt, Artificial Sequence
  mRNA product Design a-2 (A100) comprising derived and/or modified sequence from LASV(KAK-428;Clade n.d. (VII))__ANH09741__NP (opt5)
aggagaguccgcucagccagguugcagaagcggcuuagcguguguccuaaucuucucucugcguguagguaggccugugccgcaaacaagcuuaccaugagcaacuccaaggaggugaaaucuuuccuguggacccagagccucagacgggaacuguccggcuacugcacaaauaucaaacuucaagucguuaaggacgcccaggcucugcuccacgggcuggauuuuucugaggugagcaacgugcagcgccuuaugagaaagcagaaacgggacgauaaugaccugaagcgccucagagaucugaaccaagccgucaauaaccugguggaacucaaguccguucagcagaaaucugugcugaaggucggaacgcuuaauagcgacgaucugcucacccuggcggcugaccuugagaaacugaaguccaaagugguucggacagaacgcccccucagcucuggcguguauauggggaaccuguccagccagcaacuggaucagagacgggcccuccugaauaugauuggaauggccggcgggucucagggaaaccagccuucccgcgacggcgucgugagagugugggaugucaagaaugcugaccuucugaacaaucaauucggcaccaugccgagccucacacuggccugucuuaccaagcaggggcagguugaucugaacgacguggugcucgcucugacagaccugggacucaucuacaccgccaaauaucccaauucuuccgaucuggaccggcuuagccaaaaccauccuguccugaacaugauugaugugaauaaguccucucucaacaucagcggcuacaauuuuucccugggggcggccguuaaagcuggagccugcaugcuugacggcgggaacaugcuggagacgauuaagaucagcccccagaccguggauggaauccucaaaucuauucugaaggucaaacgcgcucugggcauguucguguccgacacaccuggcgagagaaaucccuaugaaaacauccucuacaagguuugucugagcgggaauggauggccuuauauugccucucggaccagcaucgugggccgcgcgugggagaacacagucguggaucuugaauccaauaagaaccagccgaaagucgggaauaacggaucuaauaagaugcugcagagcuccggcuuugccaccgggcucacguacagccaacugaugacacugagagacucuaugcuucagcucgaucccaccgcuaaaacauggauugacaucgagggacggccugaggaucccguggaacuggcccuguuccagccuuccagcggcugcuacauucacuuuuucagagagcccaccgaccucaagcaguuuaaacaagacgcuaaguauucucauggcaucgauguuaacgaccuguucuccgcccagccggggcuuaccagcgccgugcuggaagcucucccucgcaauaugguccugacaugucagggauccgaugacauccggaagcugcuugauucucaggacagaaaagauauuaagcucaucgacauuagccuguccaaagcggaugcccgcaaguuugagaacgacgugugggaucaauucaaagaccugugccacaugcauacgggcaucguuguggaaaagaagaaaaagggagggaaacaggagaugacaccccacugugcucuccuggauugcauuauguuugacgccgccgucucuggcgggcuuaacgugccuacccugcgggcugugcuccccaccgacaugguuuucagaacaaucaccacgaaggucgugcugugaggacuagucccuguucccagagcccacuuuuuuuucuuuuuuugaaauaaaauagccugucuuucagaucuaaaaaaaaaaaaaaaaaaaaaaaaaaaaaaaaaaaaaaaaaaaaaaaaaaaaaaaaaaaaaaaaaaaaaaaaaaaaaaaaaaaaaaaaaaaaaaaaaaaa

SEQ ID NO: 17329 - RNA, 1977 nt, Artificial Sequence; identical to SEQ ID NO: 17323
  mRNA product Design a-2 (A100) comprising derived and/or modified sequence from LASV(Pinneo-NIG-1969;Clade I)__AIT17837__NP (opt5)

SEQ ID NO: 17330 - RNA, 1977 nt, Artificial Sequence
  mRNA product Design a-2 (A100) comprising derived and/or modified sequence from LASV(ISTH0009-NIG-2011;Clade II)__AIT17405__NP (opt5)
aggagaguccgcucagccagguugcagaagcggcuuagcguguguccuaaucuucucucugcguguagguaggccugugccgcaaacaagcuuaccaugagcguguccaaggaggucaaaucuuuccuguggacccagagccucagacgggaacuguccggcuacugcucuaacaucaaacuucaaguugugaaggacgcccaggcucugcuccacgggcuggauuuuagcgagguguccaauguccagcgccuuaugagaaagcagaaacgggacgauucugaccugaagcgccucagagaucugaaccaagccgugaauaaccugguugaacucaagagcacacagcagaaauccauucugcgggugggaacgcuuaccagcgacgaucugcucacacuggcggcugaccuugagaagcugaaaucuaaggucauccgcaccgaaagaccccucuccagcggcguguauauggggaaucugucuacacagcaacuggagcagcggcgcgcccuccugaacaugauuggaaugguuggcggggcccagggaacccagccuggcagagauggcgugguccgggugugggacgugaaaaauccggaucuucugaacaaucaauucgggacaaugcccucccucacccuggcuugucuuacgaagcagggacaggucgaccugaacgaugccguucucgcucugaccgaccugggccucaucuacacagccaaguauccuaauagcucugaccuggaucgccuuucccaaagccaucccauucugaacaugguggacaucaaaaaguccucucucaauaucagcggguacaacuuuucccugggagcggccgugaaagcuggcgccugcaugcuugaugggggaaauaugcuggagaccauuaaggucacaccucagaccauggacggcauccucaaaagcauucugaaggugaaaagaucucugggcauguucguuuccgauacgcccggggaacggaacccuuaugagaacauccucuacaagauuugucugagcggagacggcuggccguauaucgcuucucgcacaagcauuguggggagagccugggaaaauaccacagucgaucuugaguccgacggaaagccccagaaagugggcucugcggggagcaacaagucccugcagagcgccggauuuccuaccggccucaccuacucucaacugaugacacugaaagauuccaugaugcagcuugaccccagcgcuaagacguggaucgauaucgagggccggccugaagaccccguugagauugcccucuaccagccgaugucugggugcuauauccacuucuuuagagaaccuaccgaccugaaacaguucaagcaagaugcuaaguacucccauggaauugacguggccgaucuguuucccgcccagccuggccucacaagcgcugucaucgaggcgcugccccgcaauauggugcuuaccugucagggguccgacgauauuaaacggcugcucgacucucagggaagacgcgauaucaagcugaucgacauugcccugagcaaagcugauucccggagauucgaaaacgccgucugggaccaaugcaaggaucuuugucacaugcauacaggcgugguuguggagaaaaagaagcgcgggggcaaagaggaaaucacgccccacugcgcccucauggacuguauuauguaugaugcugccgucucuggaggccugaauaucccugugcugcgggcgguucucccgagagacaugguguuucgcaccagcucccccaaggucgugcugugaggacuagucccuguucccagagcccacuuuuuuuucuuuuuuugaaauaaaauagccugucuuucagaucuaaaaaaaaaaaaaaaaaaaaaaaaaaaaaaaaaaaaaaaaaaaaaaaaaaaaaaaaaaaaaaaaaaaaaaaaaaaaaaaaaaaaaaaaaaaaaaaaaaaa

SEQ ID NO: 17331 - RNA, 1977 nt, Artificial Sequence
  mRNA product Design a-2 (A100) comprising derived and/or modified sequence from LASV(ISTH2010-NIG-2012;Clade II)__AIT17483__NP (opt5)
aggagaguccgcucagccagguugcagaagcggcuuagcguguguccuaaucuucucucugcguguagguaggccugugccgcaaacaagcuuaccaugagcgccuccaaggaggugaaaucuuuccuguggacccagagccucagacgggaacuguccggcuacugcucuaacaucaaacuucaagucguuaaggacgcucaggcccugcuccacgggcuggauuuuagcgagguguccaaugugcagcgccuuaugagaaagcagaaacgggacgauucugaccugaagcgccucagagaucugaaccaagcggucaauaaccugguggaacucaagagcacacagcagaaauccauucugcggguuggaacgcuuaccagcgacgaucugcucacacuggcugccgaccuugagaagcugaaaucuaaggugauccgcaccgaaagaccccucuccagcggcgucuauauggggaaucugucuacacagcaacuggagcagcggcgcgcccuccugaaccuuauuggaauggugggcggggcucagggaacccagccuggcagagauggcguugugcgggucugggacgugaaaaauccggaucugcucaacaaucaauucgggacaaugcccucccugacccuugccugucugacgaagcagggacagguggaccucaacgaugcuguccuggcccugaccgaccucggccugaucuacacagcgaaguauccuaauagcucugaccuugaucgccugucccaaagccaucccauucucaacaugguugacaccaaaaaguccucucugaauaucagcggguuuaacuucucccuuggagccgcugugaaagccggcgcuugcaugcuggaugggggaaauaugcucgagacaaucaaggugaccccucagacgauggacggcauucugaaaagcauccugaaggucaaaaagucucucggcauguuuguguccgauacacccggggaaagaaacccuuacgagaacauucuguauaagaucugucuuagcggagacggcuggccguacauugccucucggaccagcaucguugggcgcgcgugggaaaauacaaccguggaucuggaguccgacggaaaaccccacaaggucggcaccgccgggucuaacaaaagccuccaguccgcuggauucccuacaggccugacguauagccagcugaugacccuuaaggauucuaugaugcaacucgaccccuccgccaaaacauggauugauaucgagggcagaccugaagaccccguggagaucgcucuguaccagccgaugagcgggugcuacauucacuuuuuccgggaaccuaccgaccugaagcaguuuaagcaggaugccaaauauucucauggaaucgacguugccgaucucuuccccgcucaaccuggccugacauccgcggugauugaggcccuucccagaaauaugguccugaccugucaggggagcgacgauaucaagcgccuccuggacucccagggacggagagauauuaaacugaucgacaucgcucuuucuaaggccgauagccgccgguuugaaaacgccgugugggaccagugcaaagaucucugucauaugcacacgggcgucgugguugagaagaagaaaagagggggcaaggaggaaauuacaccccacugcgcucugauggacuguaucauguacgaugccgcgguguccggaggccugaauauuccuguccuccgcgcugugcugccgcgggacaugguuuucagaaccucuagccccaaagugguccuuugaggacuagucccuguucccagagcccacuuuuuuuucuuuuuuugaaauaaaauagccugucuuucagaucuaaaaaaaaaaaaaaaaaaaaaaaaaaaaaaaaaaaaaaaaaaaaaaaaaaaaaaaaaaaaaaaaaaaaaaaaaaaaaaaaaaaaaaaaaaaaaaaaaaaa

SEQ ID NO: 17332 - RNA, 1977 nt, Artificial Sequence
  mRNA product Design a-2 (A100) comprising derived and/or modified sequence from LASV(Lassa virus/H.sapiens-wt/NGA/2015/ISTH_0543;Clade II)__AVO03640__NP (opt5)
aggagaguccgcucagccagguugcagaagcggcuuagcguguguccuaaucuucucucugcguguagguaggccugugccgcaaacaagcuuaccaugagcgccuccaaggaggugaaaucuuuccuguggacccagagccucagacgggaacuguccggcuacugcucuaacaucaaacuucaagucguuaaggacgcucaggcccugcuccacgggcuggauuuuagcgagguguccaaugugcagcgccuuaugagaaagcagaaacgggacgauucugaccugaagcgccucagagaucugaaccaagcggucaauaaccugguggaacucaagagcacacagcagaaauccauucugcggguuggaacgcuuaccagcgacgaucugcucacacuggcugccgaccuugagaagcugaaaucuaaggugauccgcaccgaaagaccccucuccagcggcgucuauauggggaaucugucuacacagcaacuggagcagcggcgcgcccuccugaacaugauuggaauggugggcggggcucagggaacccagccuggcagagauggcguugugcgggucugggacgugaaaaauccggaucuucugaacaaucaauucgggacaaugcccucccucacccuggccugucuuacgaagcagggacagguggaccugaacgaugcuguccucgcccugaccgaccugggccucaucuacacagcgaaguauccuaauagcucugaccuggaucgccuuucccaaagccaucccauucugaacaugguugacaccaaaaaguccucucucaauaucagcggguacaacuuuucccugggagccgcugugaaagccggcgcuugcaugcuugaugggggaaauaugcuggagacaaucaaggugaccccucagacgauggacggcauucucaaaagcauccugaaggucaaaaagucucugggcauguucguguccgauacacccggggaaagaaacccuuaugagaacauucucuacaagaucugucugagcggagacggcuggccguauauugccucucggaccagcaucguugggcgcgcgugggaaaauacaaccguggaucuugaguccgacggaaaaccccagaaggucggcucugccgggagcaacaaaucccugcagagcgcuggauuuccuaccggccucacauacucucaacugaugacgcugaaggauuccaugaugcagcuugaccccagcgccaaaaccuggauugauaucgagggcagaccugaagaccccguggagaucgcucucuaccagccgaugucugggugcuauauucacuucuuucgggaaccuacagaccugaagcaguucaagcaagaugccaaauacucccauggaaucgacguugccgaucuguuucccgcucagccuggccucaccagcgcggugauugaggcccugcccagaaauaugguccuuacaugucagggguccgacgauaucaagcgccugcucgacucucagggacggaaagauauuaagcugaucgacaucgcucugagcaaagccgauuccagacgcuucgaaaacgccgugugggaccaaugcaaggaucuuugucacaugcauaccggcgucgugguugagaagaaaaagagagggggcaaagaggaaauuacgccccacugcgcucucauggacuguaucauguaugaugccgcggugucuggaggccugaauauuccuguccugcgggcugugcucccgcgcgacaugguuuuucggacaagcucccccaaggugguccugugaggacuagucccuguucccagagcccacuuuuuuuucuuuuuuugaaauaaaauagccugucuuucagaucuaaaaaaaaaaaaaaaaaaaaaaaaaaaaaaaaaaaaaaaaaaaaaaaaaaaaaaaaaaaaaaaaaaaaaaaaaaaaaaaaaaaaaaaaaaaaaaaaaaaa

SEQ ID NO: 17333 - RNA, 1977 nt, Artificial Sequence
  mRNA product Design a-2 (A100) comprising derived and/or modified sequence from LASV(Lassa virus/H.sapiens-wt/NGA/2016/ISTH_0009;Clade II)__AVO03572__NP (opt5)
aggagaguccgcucagccagguugcagaagcggcuuagcguguguccuaaucuucucucugcguguagguaggccugugccgcaaacaagcuuaccaugagcgccuccaaggaggugaaaucuuuccuguggacccagagccucagacgggaacuguccggcuacugcucuaacaucaaacuucaagucguuaaggacgcucaggcccugcuccacgggcuggauuuuagcgagguguccaaugugcagcgccuuaugagaaagcagaaacgggacgauucugaccugaagcgccucagagaucugaaccaagcggucaauaaccugguggaacucaagagcacacagcagaaauccauucugcggguuggaacgcuuaccagcgacgaucugcucacacuggcugccgaccuugagaagcugaaaucuaaggugauccgcaccgaaagaccccucuccagcggcgucuauauggggaaucugucuacacagcaacuggagcagcggcgcgcccuccugaacaugauuggaauggugggcggggcucagggaacccagccuggcagagauggcguugugcgggucugggacgugaaaaauccggaucuucugaacaaucaauucgggacaaugcccucccucacccuggccugucuuacgaagcagggacagguggaccugaacgaugcuguccucgcccugaccgaccugggccucaucuacacagcgaaguauccuaauagcucugaccuggaucgccuuucccaaagccaucccauucugaacaugguugacaccaaaaaguccucucucaauaucagcggguacaacuuuucccugggagccgcugugaaagccggcgcuugcaugcuugaugggggaaauaugcuggagacaaucaaggugaccccucagacgauggacggcauucucaaaagcauccugaaggucaaaaagucucugggcauguucguguccgauacacccggggaaagaaacccuuaugagaacauucucuacaagaucugucugagcggagacggcuggccguauauugccucucggaccagcaucguugggcgcgcgugggaaaauacaaccguggaucuugaguccgacggaaaaccccagaaggucggcucugccgggagcaacaaaucccugcagagcgcuggauuuccuaccggccucacauacucucaacugaugacgcugaaggauuccaugaugcagcuugaccccagcgccaaaaccuggauugauaucgagggcagaccugaagaccccguggagaucgcucucuaccagccgaugucugggugcuauauucacuucuuucgggaaccuacagaccugaagcaguucaagcaagaugccaaauacucccauggaaucgacguugccgaucuguuucccgcucagccuggccucaccagcgcggugauugaggcccugcccagaaauaugguccuuacaugucagggguccgacgauaucaagcgccugcucgacucucagggacggagagauauuaaacugaucgacaucgcucugagcaaggccgauucccgccgguucgaaaacgccgugugggaccaaugcaaagaucuuugucacaugcauaccggcgucgugguugagaagaagaaaagagggggcaaggaggaaauuacgccccacugcgcucucauggacuguaucauguaugaugccgcggugucuggaggccugaauauuccuguccugcgcgcugugcucccgcgggacaugguuuuuagaacaagcucccccaaagugguccugugaggacuagucccuguucccagagcccacuuuuuuuucuuuuuuugaaauaaaauagccugucuuucagaucuaaaaaaaaaaaaaaaaaaaaaaaaaaaaaaaaaaaaaaaaaaaaaaaaaaaaaaaaaaaaaaaaaaaaaaaaaaaaaaaaaaaaaaaaaaaaaaaaaaaa

SEQ ID NO: 17334 - RNA, 1977 nt, Artificial Sequence
  mRNA product Design a-2 (A100) comprising derived and/or modified sequence from LASV(Lassa virus/H.sapiens-wt/NGA/2016/ISTH_0017;Clade II)__AVO03568__NP (opt5)
aggagaguccgcucagccagguugcagaagcggcuuagcguguguccuaaucuucucucugcguguagguaggccugugccgcaaacaagcuuaccaugagcgccuccaaggaggugaaaucuuuccuguggacccagagccucagacgggaacuguccggcuacugcucuagcaucaaacuucaagucguuaaggacgcucaggcccugcuccacgggcuggauuuuuccgaggugucuaacgugcagcgccuuaugagaaagcagaaacgggacgauagcgaccugaagcgccucagagaucugaaucaagcggucaacaaucugguggaacucaaguccacacagcagaaaagcauucugcggguuggaacgcuuaccucugacgaucugcucacacuggcugccgaccuugagaagcugaaauccaaggugauccgcaccgaaagaccccucagcucuggcgucuauauggggaaccuguccacacagcaacuggagcagcggcgcgcccuccugaauaugauuggaauggcuggcggggcccagggaacccagccuggcagagauggcgugguucgggugugggacgucaaaaacccggaucuucugaauaaccaauucgggacaaugcccagccucacccuggcuugucuuacgaagcagggacagguggaccugaaugaugccgugcucgcgcugaccgaccugggccucaucuacacagccaaguauccuaacucuuccgaccuggaucgccuuagccaaucccaucccauucugaauauggucgacaccaaaaagucuagccucaacaucuccggguacaauuuuagccugggagcugccguuaaagcuggcgccugcaugcuugaugggggaaacaugcuggagacaaucaaggugaccccucagacgauggacggcauucucaaaucuauccugaaggugaaaagaucccugggcauguucgucagcgaugcgcccggggaacggaauccuuaugagaacauucucuacaagaucugucugucuggagacggcuggccguauauugccagccgcacauccaucguggggagagcuugggaaaacaccacaguugaucuugagucugacggaaagccccagaaagugggcgccaccgggagcaauaagucccugcagagcgcuggauuuccuaccggccucacauacucucaacugaugacgcugaaagauuccaugaugcagcuugaccccagcgccaagaccuggauugauaucgagggccggccugaagaccccgucgagguggcccucuaccagccgguuucugggugcuauauccacuucuuuagagaaccuacagaccugaaacaguucaagcaagaugcuaaguacucccauggaauugacguggcggaucuguuucccgcccagccuggccucaccagcgcugucaucgaggcccugccccgcaacauggugcuuacaugucagggguccgacgauauuaaaaagcugcucgacucucagggacggaaagauaucaagcugauugacaucgcccugagcaaagcugauuccagacgcuucgaaaaugccgucugggaccaaugcaaggaucuuugucacaugcauaccggcgugguuguggagaagaaaaagagagggggcaaagaggaaaucacgccccacugcgcgcucauggacuguauuauguaugaugcugccgucucuggaggccugaacaucccugugcugcgggccguucucccgcgcgacaugguguuucggacaagcucccccaaggucgugcugugaggacuagucccuguucccagagcccacuuuuuuuucuuuuuuugaaauaaaauagccugucuuucagaucuaaaaaaaaaaaaaaaaaaaaaaaaaaaaaaaaaaaaaaaaaaaaaaaaaaaaaaaaaaaaaaaaaaaaaaaaaaaaaaaaaaaaaaaaaaaaaaaaaaaa

SEQ ID NO: 17335 - RNA, 1977 nt, Artificial Sequence
  mRNA product Design a-2 (A100) comprising derived and/or modified sequence from LASV(Lassa virus/H.sapiens-wt/NGA/2018/ISTH_0959;Clade II)__AVV65100__NP (opt5)
aggagaguccgcucagccagguugcagaagcggcuuagcguguguccuaaucuucucucugcguguagguaggccugugccgcaaacaagcuuaccaugagcgccuccaaggaggugaaaucuuuccuguggacccagagccucagacgggaacuguccggcuacugcucuaacaucaaacuucaagucguuaaggacgcucaggcccugcuccacgggcuggauuuuagcgagguguccaaugugcagcgccuuaugagaaagcagaaacgggacgauucugaccugaagcgccucagagaucugaaccaagcggucaauaaccugguggaacucaagagcacccagcagaaauccauucugcggguuggaacgcuuaccagcgacgaucugcucacacuggcugccgaccuugagaagcugaaaucuaaggugauccgcaccgaaagaccccucuccagcggcgucuauauggggaaucugucuacacagcaacuggagcagcggcgcgcccuccugaaccuuauuggaauggugggcggggcucagggaacccagccuggcagagauggcguugugcgggucugggacgugaaaaauccggaucugcucaacaaucaauucgggacaaugcccucccugacccuugccugucugacgaagcagggacagguggaccucaacgaugucguucuggcucugaccgaccucggccugaucuacacagccaaguauccuaauagcucugaccuugaucgccugucccaaagccaucccauucucaacaugguggacaccaaaaaguccucucugaauaucagcggguuuaacuucucccuuggagcggccgugaaagcuggcgccugcaugcuggaugggggaaauaugcucgagacaaucaaggucaccccucagacgauggacggcauucugaaaagcauccugaaggugaaaaagucucucggcauguuuguuuccgauacacccggggaaagaaacccuuacgagaacauucuguauaagaucugucuuagcggagacggcuggccguacauugcuucucggaccagcaucguggggcgcgccugggaaaauacaaccgucgaucuggaguccgacggaaaaccccacaaggugggcaccgcggggucuaacaaaagccuccaguccgccggauucccuacaggccugacguauagccagcugaugacccuuaaggauucuaugaugcaacucgaccccuccgcuaaaacauggauugauaucgagggcagaccugaagaccccguugagaucgcccuguaccagccgaugagcgggugcuacauucacuuuuuccgggaaccuaccgaccugaagcaguuuaagcaggaugcuaaauauucucauggaaucgacguggccgaucucuuccccgcccaaccuggccugacauccgcugucauugaggcgcuucccagaaauauggugcugaccugucaggggagcgacgauaucaagcgccuccuggacucccagggacggaaagauauuaagcugaucgacaucgcccuuucuaaaacggauagcagacgcuuugaaaacgcugucugggaccagugcaaggaucucugucauaugcacacaggcgugguuguggagaagaaaaagagagggggcaaagaggaaauuacaccccacugcgcccugauggacuguaucauguacgaugccgcugucuccggaggccugaauauuccugugcuccgggccguucugccgcgcgacaugguguuccggaccucuagccccaaggucgugcuuugaggacuagucccuguucccagagcccacuuuuuuuucuuuuuuugaaauaaaauagccugucuuucagaucuaaaaaaaaaaaaaaaaaaaaaaaaaaaaaaaaaaaaaaaaaaaaaaaaaaaaaaaaaaaaaaaaaaaaaaaaaaaaaaaaaaaaaaaaaaaaaaaaaaaa

SEQ ID NO: 17336 - RNA, 1977 nt, Artificial Sequence
  mRNA product Design a-2 (A100) comprising derived and/or modified sequence from LASV(LASV003-NIG-2008;Clade II)__AIT17581__NP (opt5)
aggagaguccgcucagccagguugcagaagcggcuuagcguguguccuaaucuucucucugcguguagguaggccugugccgcaaacaagcuuaccaugagcgccuccaaggaggugaaaucuuuccuguggacccagagccucagacgggaacuguccggcuacugcucuagcaucaaacuucaagucguuaaggacgcucaggcccugcuccacgggcuggauuuuuccgaggugucuaacgugcagcgccuuaugagaaagcagaaacgggacgauagcgaccugaagcgccucagagaucugaaucaagcggucaacaaucugguggaacucaaguccacccagcagaaaagcguucugcgggugggaacgcuuaccucugacgaucugcucacacuggcugccgaccuugagaagcugaaauccaaggucauucgcaccgaaagaccccucagcucuggcguguauauggggaaccuguccgcccagcaacuggagcagcggcgcacacuccugaauaugaucggaaugguuggcggggcucagggaacccagccuggcagagauggcgugguccgggugugggacgugaaaaacccggaucuucugaauaaccaauucgggacaaugcccagccucacccuggccugucuuacgaagcagggacaggucgaccugaaugauguugugcucgcucugaccgaccugggccucauuuacacagccaaguauccuaacucuuccgaccuggaucgccuuagccaaucccaucccauccugucuaugguggacaccaaaaagagcucccucaauauuagcggguacaacuuuucucugggagcggccgucaaagcuggcgccugcaugcuugaugggggaaauaugcuggagacaaucaaggugaccccucagacgauggacggcauccucaaauccauucugaagguuaaaaagagccugggcauguucgugucugauacacccggggaaagaaacccuuaugagaauauccucuacaagauuugucugagcggagacggcuggccguauaucgcuucccggaccucuauugucgggcgcgccugggaaaacacaaccguggaucuugagagcgacggaaaaccccagaagguuggcaccgcgggguccaacaaaagccugcagucugccggauuuccuacaggccucacguacucccaacugaugacccugaaggauagcaugaugcagcuugaccccucugcuaaaacauggaucgauauugagggcagaccugaagaccccguggagaucgcccucuaccagccgauguccgggugcuauauccacuucuuucgggaaccuaccgaccugaagcaguucaagcaagaugcuaaauacagccauggaauugacgucacagaucuguuucccgcccagccuggccucaccuccgccgugaucgaggcucugcccagaaauaugguccuuacgugucaggggucugacgauauuaagcgccugcucgacagccagggacggagagauaucaaacugauugacaucgcgcuguccaaggccgauucucgccgguucgaaaacgcugugugggaccaaugcaaagaucuuugucacaugcauacaggcguuguggucgagaagaagaaaagagggggcaaggaggaaaucacaccccacugcgcccucauggacuguauuauguaugaugccgcugugagcggaggccugaauaucccuguucugcgcgccgugcucccgcgggacauggucuuuagaaccuccagccccaaaguggugcugugaggacuagucccuguucccagagcccacuuuuuuuucuuuuuuugaaauaaaauagccugucuuucagaucuaaaaaaaaaaaaaaaaaaaaaaaaaaaaaaaaaaaaaaaaaaaaaaaaaaaaaaaaaaaaaaaaaaaaaaaaaaaaaaaaaaaaaaaaaaaaaaaaaaaa

SEQ ID NO: 17337 - RNA, 1977 nt, Artificial Sequence
  mRNA product Design a-2 (A100) comprising derived and/or modified sequence from LASV(LASV035-NIG-2009;Clade II)__AIT17589__NP (opt5)
aggagaguccgcucagccagguugcagaagcggcuuagcguguguccuaaucuucucucugcguguagguaggccugugccgcaaacaagcuuaccaugagcgccuccaaggaggugaaaucuuuccuguggacccagagccucagacgggaacuguccggcuacugcucuagcaucaaacuucaagucguuaaagacgcucaggcccugcuccacgggcuggauuuuuccgaggugucuaacgugcagcgccuuaugagaaagcagaaacgggacgauagcgaccugaagcgccucagagaucugaaucaagcggucaacaaucugguggaacucaaguccacacagcagaaaagcauucugcggguuggaacgcuuaccucugacgaucugcucacacuggcugccgaccuugagaagcugaaauccaaggugauccgcaccgaaagaccccucagcucuggcgucuauauggggaaccuguccgcccagcaacuggagcagcggcgcgcucuccugaauaugauuggaauggugggcggggcccagggaacacagccuggcagagauggcguugugcgggucugggacgugaaaaacccggaucuucugaauaaccaauucgggaccaugcccagccucacacuggcuugucuuaccaagcagggacagguggaccugaaugaugccguccucgcgcugacggaccugggccucaucuacaccgccaaguauccuaacucuuccgaccuggaucgccuuagccaaucccaucccauucugaauaugguugacacaaagaagucuagccucaacaucuccggguacaauuuuagccugggagcugccgugaaagcuggcgccugcaugcuugaugggggaaacaugcuggagaccaucaaggugacaccucagaccauggacggcauucucaaaucuauccugaaggucaaaagaucccugggcauguucgugagcgauacgcccggggaacggaauccuuaugagaacauucucuacaagaucugucugucuggagacggcuggccguauauugcgagccgcacauccaucguugggagagccugggaaaacaccacaguggaucuugagucugacggaaagccccagaaagucggcaccaccgggagcaauaagucccugcagagcgcuggauuuccuacaggccucacguacucucaacugaugacccugaaagauuccaugaugcagcuugaccccagcgccaagacauggauugauaucgagggccggccugaagaccccguggagaucgcucucuaccagccgaugucugggugcuauauucacuucuuuagagaaccuaccgaccugaaacaguucaagcaagaugccaaguacucccauggaaucgacguugccgaucuguuucccgcucagccuggccucacaagcgcggugauugaggcccugccccgcaacaugguccuuaccugucagggguccgacgauaucaaaaagcugcucgacucucagggacggagagauauuaaacugaucgacaucgcucugagcaaggccgauucccgcaaauucgaaaaugccgugugggaccaaugcaaggaucuuugucacaugcauacgggcgucgugguugagaagaaaaagagagggggcaaagaggaaauuacaccccacugcgcucucauggacuguaucauguaugaugccgcggugucuggaggccugaacauuccuguccugcgggcugugcucccgcgcgacaugguuuuucggaccagcucccccaaggugguccugugaggacuagucccuguucccagagcccacuuuuuuuucuuuuuuugaaauaaaauagccugucuuucagaucuaaaaaaaaaaaaaaaaaaaaaaaaaaaaaaaaaaaaaaaaaaaaaaaaaaaaaaaaaaaaaaaaaaaaaaaaaaaaaaaaaaaaaaaaaaaaaaaaaaaa

SEQ ID NO: 17338 - RNA, 1977 nt, Artificial Sequence
  mRNA product Design a-2 (A100) comprising derived and/or modified sequence from LASV(LASV1000-NIG-2009;Clade II)__AIT17783__NP (opt5)
aggagaguccgcucagccagguugcagaagcggcuuagcguguguccuaaucuucucucugcguguagguaggccugugccgcaaacaagcuuaccaugagcgccuccaaggaggugaaaucuuuccuguggacccagagccucagacgggaacuguccggcuacugcucuaacaucaaacuucaagucguuaaggacgcucaggcccugcuccacgggcuggauuuuagcgagguguccaaugugcagcgccuuaugagaaagcagaaacgggacgauucugaccugaagcgccucagagaucugaaccaagcggucaauaaccugguggaacucaagagcacacagcagaaauccauucugcggguuggaacgcuuaccagcgacgaucugcucacacuggcugccgaccuugagaagcugaaaucuaaggugauccgcaccgaaagaccccucuccagcggcgucuauauggggaaucugucuacacagcaacuggagcagcggcgcgcccuccugaacaugauuggaauggugggcggggcucagggaacccagccuggcagagauggcguugugcgggucugggacgugaaaaauccggaucuucugaacaaucaauucgggacaaugcccucccucacccuggccugucuuacgaagcagggacagguggaccugaacgaugucguucucgcucugaccgaccugggccucaucuacacagccaaguauccuaauagcucugaccuggaucgccuuucccaaagccaucccauucugaacaugguggacaccaaaaaguccucucucaauaucagcggguacaacuuuucccugggagcggccgugaaagcuggcgccugcaugcuugaugggggaaauaugcuggagacaaucaaggucaccccucagacgauggacggcauucucaaaagcauccugaaggugaaaaagucucugggcauguucguuuccgauacacccggggaaagaaacccuuaugagaacauucucuacaagaucugucugagcggagacggcuggccguauauugcuucucggaccagcaucguggggcgcgccugggaaaauacaaccgucgaucuugaguccgacggaaaaccccagaaggugggcaccgcggggucuaacaaaagccugcaguccgccggauuuccuacaggccucacguacagccaacugaugacccugaaggauucuaugaugcagcuugaccccuccgcuaaaacauggauugauaucgagggcagaccugaagaccccguugagaucgcccucuaccagccggugagcgggugcuauauucacuucuuucgggaaccuaccgaccugaagcaguucaagcaagaugcuaaauacucucauggaaucgacgucgccgaucuguuucccgcccagccuggccucacauccgcugugauugaggcgcugcccagaaauaugguccuuaccugucaggggagcgacgauaucaagcgccugcucgacucccagggacggagagauauuaaacugaucgacaucgcccugucuaaggcugauagccgccgguucgaaaacgccgugugggaccaaugcaaagaucuuugucacaugcauacgggcguuguggucgagaagaagaaaagagggggcaaggaggaaauuacaccccacugcgcccucauggacuguaucauguaugaugcugccguguccggaggccugaauauuccuguucugcgcgcggugcucccgcgggacauggucuuuagaaccucuagccccaaaguggugcugugaggacuagucccuguucccagagcccacuuuuuuuucuuuuuuugaaauaaaauagccugucuuucagaucuaaaaaaaaaaaaaaaaaaaaaaaaaaaaaaaaaaaaaaaaaaaaaaaaaaaaaaaaaaaaaaaaaaaaaaaaaaaaaaaaaaaaaaaaaaaaaaaaaaaa

SEQ ID NO: 17339 - RNA, 1977 nt, Artificial Sequence
  mRNA product Design a-2 (A100) comprising derived and/or modified sequence from LASV(LASV221-NIG-2010;Clade II)__AIT17625__NP (opt5)
aggagaguccgcucagccagguugcagaagcggcuuagcguguguccuaaucuucucucugcguguagguaggccugugccgcaaacaagcuuaccaugagcgccuccaaggaggugaaaucuuuccuguggacccagagccucagacgggaacuguccggcuacugcucuagcaucaaacuucaagucguuaaggacgcucaggcccugcuccacgggcuggauuuuuccgaggugucuaacgugcagcgccuuaugagaaagcagcggcgcgacgauagcgaccugaaaagacuccgggaucugaaucaagcggucaacaaucugguggaacucaaguccacacagcaaaagagcauucugcgcguuggaacgcuuaccucugacgaucugcucacacuggcugccgaccuugagaaacugaaguccaaagugaucagaaccgaacggccccucagcucuggcgucuauauggggaaccuguccacacagcagcuggagcagcgcagagcccuccugaauaugauuggaauggugggcggggcucagggaacccagccuggccgggauggcguugugcgcgucugggacgugaagaacccggaucuucugaauaaccaauucgggacaaugcccagccucacccuggccugucuuacgaaacagggacagguggaccugaaugaugcuguccucgcccugaccgaccugggccucaucuacacagcgaaguauccuaacucuuccgaccuggauagacuuagccaaucccaucccauucugaauaugguugacaccaagaaaucuagccucaacaucuccggguacaauuuuagccugggagccgcugugaaggccggcgcuugcaugcuugaugggggaaacaugcuggagacaaucaaagugaccccucagacggucgacggcauucucaagucuauccugaaagugaagcggucccugggcauguucguuagcgauacacccggggaacgcaauccuuaugagaacauucucuacaaaaucugucugucuggagacggcuggccguauauugccagcagaaccuccaucguggggcgggcgugggaaaacacaaccgucgaucuugagucugacggaaagccccagaaggugggcaccgccgggagcaauaaaucccugcagagcgcuggauuuccuacaggccucacguacucucaacugaugacccugaaggauuccaugaugcagcuugaccccagcgccaaaacauggauugauaucgagggcagaccugaagaccccguugagaucgcucucuaccagccgaugucugggugcuauauucacuucuuucgcgaaccuaccgaccugaagcaguucaaacaagaugccaaguacucccauggaaucgacguggccgaucuguuucccgcucagccuggccucacaagcgcggucauugaggcccugccccggaacauggugcuuaccugucagggguccgacgauaucaagagacugcucgacucucagggacgccgggauauuaaacugaucgacaucgcucugagcaaggccgauuccagaaaauucgaaaaugccgucugggaccaaugcaaggaucuuugucacaugcauacgggcgugguuguggagaaaaagaagcgcgggggcaaagaggaaauuacaccccacugcgcucucauggacuguaucauguaugaugccgcggucucuggaggccugaacauuccugugcugcgggcuguucucccgagagacaugguguuucgcaccagcucccccaaggucgugcugugaggacuagucccuguucccagagcccacuuuuuuuucuuuuuuugaaauaaaauagccugucuuucagaucuaaaaaaaaaaaaaaaaaaaaaaaaaaaaaaaaaaaaaaaaaaaaaaaaaaaaaaaaaaaaaaaaaaaaaaaaaaaaaaaaaaaaaaaaaaaaaaaaaaaa

SEQ ID NO: 17340 - RNA, 1977 nt, Artificial Sequence
  mRNA product Design a-2 (A100) comprising derived and/or modified sequence from LASV(LASV237-NIG-2010;Clade II)__AIT17639__NP (opt5)
aggagaguccgcucagccagguugcagaagcggcuuagcguguguccuaaucuucucucugcguguagguaggccugugccgcaaacaagcuuaccaugagcgccuccaaggaggugaaaucuuuccuguggacccagagccucagacgggaacuguccggcuacugcucuaacaucaaacuucaagucguuaaggacgcucaggcccugcuccacgggcuggauuuuagcgagguguccaaugugcagcgccuuaugagaaagcagaaacgggacgauucugaccugaagcgccucagagaucugaaccaagcggucaauaaccugguggaacucaagagcacacagcagaaauccauucugcggguuggaacgcuuaccagcgacgaucugcucacacuggcugccgaccuugagaagcugaaaucuaaggugauccgcaccgaaagaccccucuccagcggcgucuauauggggaaucugucuacacagcaacuggagcagcggcgcgcccuccugaacaugauuggaauggugggcggggcucagggaacccagccuggcagagauggcguugugcgggucugggacgugaaaaauccggaucuucugaacaaucaauucgggacaaugcccucccucacccuggccugucuuacgaagcagggacagguggaccugaacgaugcuguccucgcccugaccgaccugggccucaucuacacagcgaaguauccuaauagcucugaccuggaucgccuuucccaaagccaucccauucugaacaugguugacaucaaaaaguccucucucaauaucagcggguacaacuuuucccugggagccgcugugaaagccggcgcuugcaugcuugaugggggaaauaugcuggagaccauuaaggugacaccucagaccauggacggcauccucaaaagcauucugaaggucaaaagaucucugggcauguucguguccgauacgcccggggaacggaacccuuaugagaacauccucuacaagauuugucugagcggagacggcuggccguauaucgccucucgcacaagcauuguugggagagcgugggaaaauaccacaguggaucuugaguccgacggaaagccccagaaagucggcucugccgggagcaacaagucccugcagagcgcuggauuuccuaccggccucaccuacucucaacugaugacacugaaagauuccaugaugcagcuugaccccagcgccaagacguggaucgauaucgagggccggccugaagaccccguggagauugcucucuaccagccgaugucugggugcuauauccacuucuuuagagaaccuaccgaccugaaacaguucaagcaagaugccaaguacucccauggaauugacguugccgaucuguuucccgcucagccuggccucacaagcgcggugaucgaggcccugccccgcaauaugguccuuaccugucagggguccgacgauauuaaacggcugcucgacucucagggaagacgcgauaucaagcugaucgacauugcucugagcaaagccgauucccggagauucgaaaacgccgugugggaccaaugcaaggaucuuugucacaugcauacaggcgucgugguugagaaaaagaagcgcgggggcaaagaggaaaucacgccccacugcgcucucauggacuguauuauguaugaugccgcggugucuggaggccugaauaucccuguccugcgggcugugcucccgagagacaugguuuuucgcaccagcucccccaaggugguccugugaggacuagucccuguucccagagcccacuuuuuuuucuuuuuuugaaauaaaauagccugucuuucagaucuaaaaaaaaaaaaaaaaaaaaaaaaaaaaaaaaaaaaaaaaaaaaaaaaaaaaaaaaaaaaaaaaaaaaaaaaaaaaaaaaaaaaaaaaaaaaaaaaaaaa

SEQ ID NO: 17341 - RNA, 1977 nt, Artificial Sequence
  mRNA product Design a-2 (A100) comprising derived and/or modified sequence from LASV(LASV253-NIG-2011;Clade II)__AIT17671__NP (opt5)
aggagaguccgcucagccagguugcagaagcggcuuagcguguguccuaaucuucucucugcguguagguaggccugugccgcaaacaagcuuaccaugagcgccuccaaggaggugaaaucuuuccuguggacccagagccucagacgggaacuguccggcuacugcucuagcaucaaacuucaagucguuaaggacgcucaggcccugcuccacgggcuggauuuuuccgaggugucuaacgugcagcgccuuaugagaaagcagaaacgggacgauagcgaccugaagcgccucagagaucugaaucaagcggucaacaaucugguggaacucaaguccacccagcagaaaagcguucugcgggugggaacgcuuaccucugacgaucugcucacacuggcugccgaccuugagaagcugaaauccaaggucauucgcaccgaaagaccccucagcucuggcguguauauggggaaccuguccacacagcaacuggagcagcggcgcgcccuccugaauaugaucggaaugguuggcggggcucagggaacccagccuggcagagauggcgugguccgggugugggacgugaaaaacccggaucuucugaauaaccaauucgggacaaugcccagccucacccuggccugucuuacgaagcagggacaggucgaccugaaugauguugugcucgcucugaccgaccugggccucauuuacacagccaaguauccuaacucuuccgaccuggaucgccuuagccaaucccaucccauccugaauaugguggacaccaaaaagucuagccucaacauuuccggguacaauuuuagccugggagcggccgucaaagcuggcgccugcaugcuugaugggggaaacaugcuggagacaaucaaggugaccccucagacgauggacggcauccucaaaucuauucugaagguuaaaaagucccugggcauguucgugagcgauacacccggggaaagaaauccuuaugagaacauccucuacaagauuugucugucuggagacggcuggccguauaucgcuagccggaccuccauugucgggcgcgccugggaaaacacaaccguggaucuugagucugacggaaaaccccagaagguuggcaccgcggggagcaauaaaucccugcagagcgccggauuuccuacaggccucacguacucucaacugaugacccugaaggauuccaugaugcagcuugaccccagcgcuaaaacauggaucgauauugagggcagaccugaagaccccguggagaucgcccucuaccagccgaugucugggugcuauauccacuucuuucgggaaccuaccgaccugaagcaguucaagcaagaugcuaaauacucccauggaauugacgucacagaucuguuucccgcccagccuggccucaccagcgccgugaucgaggcucugcccagaaacaugguccuuacgugucagggguccgacgauauuaagcgccugcucgacucucagggacggagagauaucaaacugauugacaucgcgcugagcaaggccgauucccgccgguucgaaaaugcugugugggaccaaugcaaagaucuuugucacaugcauacaggcguuguggucgagaagaagaaaagagggggcaaggaggaaaucacaccccacugcgcccucauggacuguauuauguaugaugccgcugugucuggaggccugaacaucccuguucugcgcgccgugcucccgcgggacauggucuuuagaaccagcucccccaaaguggugcugugaggacuagucccuguucccagagcccacuuuuuuuucuuuuuuugaaauaaaauagccugucuuucagaucuaaaaaaaaaaaaaaaaaaaaaaaaaaaaaaaaaaaaaaaaaaaaaaaaaaaaaaaaaaaaaaaaaaaaaaaaaaaaaaaaaaaaaaaaaaaaaaaaaaaa

SEQ ID NO: 17342 - RNA, 1977 nt, Artificial Sequence
  mRNA product Design a-2 (A100) comprising derived and/or modified sequence from LASV(LASV254-NIG-2011;Clade II)__AIT17675__NP (opt5)
aggagaguccgcucagccagguugcagaagcggcuuagcguguguccuaaucuucucucugcguguagguaggccugugccgcaaacaagcuuaccaugagcgccuccaaggaggugaaaucuuuccuguggacccagagccucagacgggaacuguccggcuacugcucuagcaucaaacuucaagucguuaaggacgcucaggcccugcuccacgggcuggauuuuuccgaggugucuaacgugcagcgccuuaugagaaagcagaaacgggacgauagcgaccugaagcgccucagagaucugaaucaagcggucaacaaucugguggaacucaaguccacacagcagaaaagcguucugcgggugggaacgcuuaccucugacgaucugcucacacuggcugccgaccuugagaagcugaaauccaaggucauucgcaccgaaagaccccucagcucuggcguguauauggggaaccuguccacacagcaacuggagcagcggcgcgcccuccugaauaugaucggaaugguuggcggggcucagggaacccagccuggcagagauggcgugguccgggugugggacgugaaaaacccggaucuucugaauaaccaauucgggacaaugcccagccucacccuggccugucuuacgaagcagggacaggucgaccugaaugaugcuguucucgcccugaccgaccugggccucauuuacacagcgaaguauccuaacucuuccgaccuggaucgccuuagccaaucccaucccauccugaauaugguggacaccaaaaagucuagccucaacauuuccggguacaauuuuagccugggagccgcugugaaagccggcgcuugcaugcuugaugggggaaacaugcuggagacaaucaaggucaccccucagacgauggacggcauccucaaaucuauucugaaggugaaaaagucccugggcauguucguuagcgauacacccggggaaagaaauccuuaugagaacauccucuacaagauuugucugucuggagacggcuggccguauaucgccagccggaccuccauuguggggcgcgcgugggaaaacacaaucgucgaucuugagucugacggaaaaccccagaaggugggcaccgccgggagcaauaaaucccugcagagcgcuggauuuccuaccggccucacauacucucaacugaugacgcugaaggauuccaugaugcagcuugaccccagcgccaaaaccuggauugauaucgagggcagaccugaagaccccguugagaucgcucucuaccagccgaugucugggugcuauauucacuucuuucgggaaccuacagaccugaagcaguucaagcaagaugccaaauacucccauggaaucgacguggccgaucuguuucccgcucagccuggccucaccagcgcggucauugaggcccugcccagaaacauggugcuuacaugucagggguccgacgauaucaagcgccugcucgacucucagggacggagagauauuaaacugaucgacaucgcucugagcaaggccgauucccgccgguucgaaaaugccgucugggaccaaugcaaagaucuuugucacaugcauaccggcgugguuguggagaagaagaaaagagggggcaaggaggaaauuacgccccacugcgcucucauggacuguaucauguaugaugccgcggucucuggaggccugaacauuccugugcugcgcgcuguucucccgcgggacaugguguuuagaacaagcucccccaaagucgugcugugaggacuagucccuguucccagagcccacuuuuuuuucuuuuuuugaaauaaaauagccugucuuucagaucuaaaaaaaaaaaaaaaaaaaaaaaaaaaaaaaaaaaaaaaaaaaaaaaaaaaaaaaaaaaaaaaaaaaaaaaaaaaaaaaaaaaaaaaaaaaaaaaaaaaa

SEQ ID NO: 17343 - RNA, 1977 nt, Artificial Sequence
  mRNA product Design a-2 (A100) comprising derived and/or modified sequence from LASV(Nig08-04;Clade II)__ADU56611__NP (opt5)
aggagaguccgcucagccagguugcagaagcggcuuagcguguguccuaaucuucucucugcguguagguaggccugugccgcaaacaagcuuaccaugagcgccuccaaggaggugaaaucuuuccuguggacccagagccucagacgggaacuguccggcuacugcucuaacaucaaacuucaagucguuaaggacgcucaggcccugcuccacgggcuggauuuuagcgagguguccaaugugcagcgccuuaugagaaagcagaaacgggacgauggagaccugaagcgccucagagaucugaaccaagcggucaauaaccugguggaacucaagucuacccagcagaaaagcguucugcgggugggcacgcuuaccuccgacgaucugcucacacuggcugccgaccuugagaagcugaaaagcaaggucauucgcaccgaaagaccccucucuuccgggguguauaugggaaaucugagcacacagcaacuggagcagcggaaagcccuccugucuaugaucggcaugguugggggagcucagggcacccagccuggccgcgaugggguggucagagugugggacgugaagaacccggaucuucugaauaaccaauucggaacaaugcccucccucacccuggccugucuuacgaagcagggccaggucgaccugaaugaugcuguucucgcccugaccgaccuggggcucauuuacacagcgaaauauccuaacagcucugaccuggaucggcuuucccaaagccaucccauccugaauaugguggacaccaagaaauccucucucaacauuagcggauacaauuuuucccugggcgccgcugugaaggccggggcuugcaugcuugauggaggcaacaugcuggagacaaucaaagucaccccucagacgauggacggcauccucaagagcauucugaaagugaagcgcucucuggggauguucguuuccgauacacccggagaaagaaauccuuaugagaacauccucuacaagauuugucugagcggcgacggguggccguauaucgccucucggaccagcauugugggacgcgcgugggaaaacacaaccgucgaucuugaguccgacggcaaaccccagaagguggggaccgccggaucuaauaaaagccugcaguccgcuggcuuuccuacaggccucacguacagccaacugaugacccugaaggauucuaugaugcagcuugaccccuccgccaaaacauggaucgauauugaggggagaccugaagaccccguugagaucgcucucuaccagccgaugagcggaugcuauauccacuucuuucgggaaccuaccgaccugaagcaguucaagcaagaugccaaauacucucauggcauugacgugacagaucuguuuuccgcccagcccgggcucaccagcgcugucaucgaggcgcugccuagaaacauggugcuuacgugucagggauccgacgauauuaagaaacugcucgacucucagggccgccgggauaucaagcugauugacaucagccugaauaaagccgauuccagacgcuucgaaaacgcugucugggaccaaugcaaggaucuuugucacaugcauacaggggugguuguggagaagaaaaagcggggcggaaaagaggaaaucacaccccacugcgcccucauggacuguauuauguuugaugccgcugucucuggcgggcugaauauccccauucugagagccgugcucccucgcgacaugguuuuccggaccagcuccccgaaggugguccugugaggacuagucccuguucccagagcccacuuuuuuuucuuuuuuugaaauaaaauagccugucuuucagaucuaaaaaaaaaaaaaaaaaaaaaaaaaaaaaaaaaaaaaaaaaaaaaaaaaaaaaaaaaaaaaaaaaaaaaaaaaaaaaaaaaaaaaaaaaaaaaaaaaaaa

SEQ ID NO: 17344 - RNA, 1980 nt, Artificial Sequence
  mRNA product Design a-2 (A100) comprising derived and/or modified sequence from LASV(GA391;Clade III)__AAA46284__NP (opt5)
aggagaguccgcucagccagguugcagaagcggcuuagcguguguccuaaucuucucucugcguguagguaggccugugccgcaaacaagcuuaccaugagcgccuccaaggaggugagaucuugccuguggacccagagccuccggcgcgaacuguccggcuacuguucuaacaucaaacuucaagucguuaaggacgcucaggcccugcuccacgggcuggauuucagcgagguguccaaugugcagagacuuaugcggaaacagaagcgcgacgauggagaccugaaaagacuccgggaucugaaccaagcggucaauaaccugguggaacucaagucuacacagcagaaaagcguucugcgcgugggcacgcuuuccagcgacgaucugcucauucuggcugccgaccuugagaaacugaagucuaaagucaccagaacagaacggccccucuccagcgggguguauaugggaaaucugucuucccagcaacuggaucagcgcagagcccuccugaacaugaucggcaugaccgggguuagcggaggcggcaagggggcuucuaauggaauugugcgggucugggacgugaaaaacgccgagcuucugaauaaccaguuuggcacaaugccuucccucacccuggcuugccuuacaaagcaggggcaaguggaucugaaugacgccguccaggcgcucaccgaucugggacugaucuacacggccaaguauccgaacagcuccgaccucgaccgccugucucagagccaucccauucuuaauaugaucgauaccaaaaaguccagccugaacaucucuggcuacaauuucucccucggggcugccguuaaagcuggagccuguaugcuggacggcggcaacaugcuugagacaauuaaggugagcccucaaaccauggaugggauccugaaaucuauucucaaggugaaaaagagccugggaauguuugucuccgacacacccggcgaaagaaacccuuaugagaauauccuguacaagauuugccucucuggggauggauggagcuauaucgcgucccggaccagcauugugggccgcgccugggaaaacacgguuguggaccuggagcaggauaauaaaccccagaagaucgggaacggaggcucuaauaaaucccuucagagcgcuggcuucgccgcugggcugaucuacucucaacucaugacacugaaggacuuuaaauguuucaaccugauuccuaaugccaagaccuggauggauaucgagggaagaccggaagaccccgucgagauugcccuuuaccagccuuccagcggcugcuaugugcacuuuuuccgggaacccacagaucucaagcaguuuaaacaggacgcuaaguacucccaugggagagacguuaccgaucuguucgcggcccaaccuggacugaccucugcugugaucgaggcccucccccgcaacauggucauuacaugucagggcagcgaagacauccggaaacugcuugagucccaggggagacgcgauaucaagcugauugacaucacgcucucuaaagccgauagccggaaguuugagaaugcugugugggaccaguucaaggaucugugccacaugcauaccggcgucgugguugaaaagaagaaaagaggaggcaaggaggaaauuacaccgcacugugcccugauggacugcaucauguuugaugcggcuguguccgggggacuugacgccaaaguccuccgcgugguucugccucgggauaugguguucagaaccagcacacccaaggucgugcugugaggacuagucccuguucccagagcccacuuuuuuuucuuuuuuugaaauaaaauagccugucuuucagaucuaaaaaaaaaaaaaaaaaaaaaaaaaaaaaaaaaaaaaaaaaaaaaaaaaaaaaaaaaaaaaaaaaaaaaaaaaaaaaaaaaaaaaaaaaaaaaaaaaaaa

SEQ ID NO: 17345 - RNA, 1977 nt, Artificial Sequence
  mRNA product Design a-2 (A100) comprising derived and/or modified sequence from LASV(Nig08-A19;Clade III)__ADU56619__NP (opt5)
aggagaguccgcucagccagguugcagaagcggcuuagcguguguccuaaucuucucucugcguguagguaggccugugccgcaaacaagcuuaccaugagcgccuccaaggaggugaaaucuuuccuguggacccagagccucagacgggaacuguccggcuacugcucuaacaucaaacuucaagucguuaaggacgcucaggcccugcuccacgggcuggauuuuagcgagguguccaaugugcagcgccuuaugagaaagcagaaacgggacgauggagaccugaagcgccucagagaucugaaccaagcggucaauaaccugguggaacucaagucuacacagcagaaaagcguucugcgggugggcacgcuuuccagcgacgaucugcucguccuggcugccgaccuugagaagcugaaaucuaaggugguucgcaccgaaagaccccucuccagcgggauuuauaugggaaaucugucuucccagcaacuggaucagcggaaagcccuccugaacaugaucggcaugacagggggaaauggcggccgcaacaccacaagcgacgggauugugagagucugggaugugaagaaugcugagcuucugaacaaucaguucggaaccaugccuucucucacacuggccugucuuaccaagcagggccaaguggaccugaacgaugcuguccaggcccucacggaccuggggcugaucuacaccgcgaaauaucccaauuccagcgaccucgaucggcuggcccagucccauccgauucuuaacaugaucgacacaaagaaaucuagccugaauaucuccggauacaacuuuagccucggcgcugccguuaaggcuggggccugcaugcuggauggaggcaacaugcuugagaccauuaaagugucuccucaaacaauggacggcauccugaaguccauucucaaagugaagcgcagccuggggauguucaucucugauacccccggagaaagaaauccuuaugagaacauucuguacaagaucugucucagcggcgacggguggcccuauauugcgucccggacgucuaucgucggacgcgccugggaaaauacagugguugaucuggagagcgacaacaaaccucagaagaccggcaaugggggauccaacaaaagccuucagucugcuggcuuugccgcuggccugacauacucccagcucaugacccugaaggauagcaugcugcaacuugacccgaaugccaaaaccuggauggauaucgaggggagacccgaagacccuguggagauugcccucuaccagcccucuuccggaugcuauauccacuucuuucgggaaccuacagaccugaagcaguucaagcaggaugcuaaauacagccauggcauugacgucacggaucuguuugcggcccaacccgggcucaccuccgcugugaucgaggcccugccgagaaacaugguuauuacaugucagggaucugaagacauccgcaaacuucuggagagccagggccggagagauaucaagcucauugacaucucccugucuaagguggauagccgcaaauucgagaaugccgucugggaccaguuuaaggaucugugccacaugcauaccgggauuguggucgaaaagaaaaagcggggcggaaaagaggaaaucacaccucacugugcucuuauggacugcauuauguucgaugccgcgguguccggcgggguugacgcuaaggugcucagagccguccugccccgcgauaugguguuucggaccagcacgccuaaaguugugcugugaggacuagucccuguucccagagcccacuuuuuuuucuuuuuuugaaauaaaauagccugucuuucagaucuaaaaaaaaaaaaaaaaaaaaaaaaaaaaaaaaaaaaaaaaaaaaaaaaaaaaaaaaaaaaaaaaaaaaaaaaaaaaaaaaaaaaaaaaaaaaaaaaaaaa

SEQ ID NO: 17346 - RNA, 1977 nt, Artificial Sequence
  mRNA product Design a-2 (A100) comprising derived and/or modified sequence from LASV(G1180-SLE-2010;Clade IV)__AIT17169__NP (opt5)
aggagaguccgcucagccagguugcagaagcggcuuagcguguguccuaaucuucucucugcguguagguaggccugugccgcaaacaagcuuaccaugagcgccuccaaggagaucaaaucuuuccuguggacccagagccucagacgggaacuguccggcuacugcucuaacauuaagcugcaaguggucaaagacgcucaggcccugcuccacgggcuggauuuuagcgagguuuccaaugugcagcgccuuaugagaaaggaacggcgcgacgauaacgaccugaaaagacuccgggaucugaaucaggcggugaacaaucuggucgagcucaagucuacacaacaaaagagcauccugcgcgugggaacgcuuaccuccgacgaucugcucauucuggcugccgaccuugaaaaacuuaagagcaaaguuaucagaacagagcggccccucucugccggcguguauauggggaaccuguccagccagcagcuggaucagcgcagagcucuccugucuaugauuggaauguccagcggcaaucagcgggcccaggcugggcgcgacggagucgugagaguuugggaugugaagaacgucgagcuucugaauaaccaguucggcaccaugccuucucucacacuggccugucuuaccaaacaaggccagguggaccugaaugaugcggugcaggcccucacagaccuggggcugaucuacaccgcuaaguauccgaacacguccgaccucgaucggcugacccaaagccaucccauccuuaauaugauugacacaaagaaauccucucugaacaucagcggauacaauuuuucccucggcgccgcugucaaggccggggcgugcaugcuggauggaggcaacaugcuugaaaccauuaaaguuagcccucagacaauggacgggauccugaagucuauucucaaagugaagaaagcccugggaauguucaucuccgauacccccggcgagcgcaacccuuaugaaaauauucuguacaagaucugucucagcggcgacggguggcccuauaucgcuucuagaacgagcauuacaggacgggccugggagaacaccguggucgaucuggaguccgacggcaagccucagaaagcugggucuaauaacagcaauaagucccuucagagcgugggauuuacagccggccugaccuacucucaacucaugacccugaaagaugccaugcugcagcuugacccgaacgcuaagacauggauggauaucgaagggagacccgaggacccuguugaaauugcgcucuaccagcccuccagcggaugcuauauccacuucuuucgcgagccuacggaccugaaacaguucaagcaagaugccaaguacucucauggcauugacgugaccgaucuguuugcugcccagcccggccucacauccgccgucaucgacgcucugccgcggaauauggugaucaccugucaggggagcgaugacauuagaaaacuucuggaaucccagggacgcaaggauaucaaacucauugacaucgcccugucuaagacagauagccggaaauaugagaacgcgguuugggaccaauacaaggaucugugccacaugcauaccggcguggucguggagaagaaaaagagagggggaaaagaagagauuacgccucacugugcucuuauggacugcaucauguucgaugccgccgucuccggcgggcucaauacaucugugcugcgcgcuguucugccccgggacaugguguuuagaaccagcaccccucgcgucgugcucugaggacuagucccuguucccagagcccacuuuuuuuucuuuuuuugaaauaaaauagccugucuuucagaucuaaaaaaaaaaaaaaaaaaaaaaaaaaaaaaaaaaaaaaaaaaaaaaaaaaaaaaaaaaaaaaaaaaaaaaaaaaaaaaaaaaaaaaaaaaaaaaaaaaaa

SEQ ID NO: 17347 - RNA, 1977 nt, Artificial Sequence
  mRNA product Design a-2 (A100) comprising derived and/or modified sequence from LASV(G1442-SLE-2011;Clade IV)__AIT17181__NP (opt5)
aggagaguccgcucagccagguugcagaagcggcuuagcguguguccuaaucuucucucugcguguagguaggccugugccgcaaacaagcuuaccaugagcgccuccaaggaggugaaaucuuuccuguggacccagagccucagacgggaacuguccggcuacugcucuaacaucaaacuucaagucguuaaggacgcucaggcccugcuccacgggcuggauuuuagcgagguguccaaugugcagcgccuuaugagaaagcagcggcgcgacgauaacgaccugaaaagacuccgggaucugaaucaagcggucaacaaucugguggaacucaagucuacacagcaaaagagcguucugcgcgugggaacgcuuaccuccgacgaucugcucguccuggcugccgaccuugagaaacuuaagagcaaagugauuagaacagaacggccccucucugccggcguuuauauggggaaccuguccagccagcagcuggaucagcgcagagcucuccugaauaugaucggaaugucuggcgggauucagggaacccggacaggccgcgacggcguggucagagugugggaugugaagaacgccgaccuucugaauaaccaguucgggaccaugccuucccucacacuggcuugucuuaccaaacaaggacaggucgaucugaaugacguugugcaggcccucacggaccugggccugaucuacaccgcgaaguauccgaacgccagcgaucucgaccggcugacacaaucucaucccauucuuaauaugaucgauaccaagaaauccagccugaacaucuccggguacaauuuuucucucggagcugccgugaaggcuggcgccugcaugcuggacgggggaaacaugcuugagacaauuaaagucagcccucagaccauggauggcauccugaaguccauucucaaagugaagaaaacgcugggcauguucaucagcgacacacccggggagcgcaacccuuaugaaaauauucuguacaagaucugucucucuggagauggcuggcccuauauugcguccagaaccagcaucacagggcgggccugggagaacaccguuguggaccuggaaucugauggaaagccucagaaagcuggcagcaauaacuccaauaagucucuucagagcgccggguuugcugccggacugaccuacucccaacucaugacacugaaagacgccaugcugcagcuugauccgaacgcuaagacguggauggacaucgagggcagacccgaggacccugucgaaauugcgcucuaccagcccagcucuggcugcuauauccacuucuuucgcgagccuaccgaucugaaacaguucaagcaagacgccaaguacucccaugggauugaugugacagaccuguuugcugcccagcccggacucaccagcgccguuaucgaagcucugccgcggaauauggugauuacaugucagggcucugaugacaucaaaaagcugcuggagucccaggggagaaaagauaucaagcucauugacaucgcccugagcaaaaccgauucccgcaaguaugaaaacgcggucugggaccaauacaaggaucugugccacaugcauacgggaguggucguggagaaaaagaaacggggcgggaaggaggaaauuacaccucacugugcucuuauggacugcaucauguucgaugccgccguuucuggcggacucaauacccuggugcugagagcuguccucccccgcgacaugguguuucggaccagcacaccuagaguugugcugugaggacuagucccuguucccagagcccacuuuuuuuucuuuuuuugaaauaaaauagccugucuuucagaucuaaaaaaaaaaaaaaaaaaaaaaaaaaaaaaaaaaaaaaaaaaaaaaaaaaaaaaaaaaaaaaaaaaaaaaaaaaaaaaaaaaaaaaaaaaaaaaaaaaaa

SEQ ID NO: 17348 - RNA, 1977 nt, Artificial Sequence
  mRNA product Design a-2 (A100) comprising derived and/or modified sequence from LASV(G3010-SLE-2013;Clade IV)__AIT17345__NP (opt5)
aggagaguccgcucagccagguugcagaagcggcuuagcguguguccuaaucuucucucugcguguagguaggccugugccgcaaacaagcuuaccaugagcgccuccaaggagaucaaaucuuuccuguggacccagagccucagacgggaacuguccggcuacugcucuaacauuaaacuucaaguggucaaagacgcucaggcccugcuccacgggcuggauuuuagcgagguuuccaaugugcagcgccuuaugagaaaggaacggcgcgacgauaacgaccugaaaagacuccgggaucugaaucaggcggugaacaaucuggucgagcucaagucuacacaacaaaagagcauccugcgcgugggaacgcuuaccuccgacgaucugcucauucuggcugccgaccuugaaaaacuuaagagcaaaguuacaagaaccgagcggccccucucugccggcguguauauggggaaccuguccagccagcagcuggaucagcgcagagcucuccugucuaugaucggaauguccagcggcguccagggggcccgggcuggacgcgacggcgugguuagagugugggaugucaagaaugccgagcuucugaacaaucaguucggcacaaugccuucucucacccuggcgugucuuacaaaacaggggcaaguggaccugaacgaugugguccaggcccucaccgaccugggacugauuuacacggcuaaguauccgaauaccuccgaccucgaucggcugacacagagccaucccauccuuaacaugaucgacaccaagaaauccucucugaauauuagcggcuacaacuuuucccucggggccgcuguuaaggccggagcgugcaugcuggauggcgggaauaugcuugaaacaaucaaagugagcccucaaaccauggacggcauucugaagucuauccucaaagugaagaaagcccugggaauguucauuuccgagacgcccggcgaacgcaacccuuaugagaacauccuguacaagauuugucucagcggggauggauggcccuauaucgcuucuagaacaagcaucaccggccgggccugggagaauacagucguggaccuggaauccgaugggaagccucagaaagcuggaucuaacaauagcaacaagucccuucagagcgccggcuuuaccgccgggcugaccuacucucagcucaugacacugaaagacgcuaugcugcaacuugauccgaaugcgaagacguggauggacauugagggaagacccgaagauccuguugagguggcccucuaccagcccuccagcggcugcuauauccacuucuuucgcgaaccuaccgaccugaaacaguucaagcaggacgcuaaguacucucauggcauugaugucacagaccuguuugccgcccaacccgggcucaccuccgcugugaucgaugcccugccgcggaacaugguuauuacaugucagggaagcgacgauaucaaaaagcugcuggagucccagggcagaaaagacaucaagcucauugauaucgcgcugucuaaaaccgacagccgcaaguaugagaaugcugugugggaucaguacaaggaccugugccacaugcauacgggggucguggucgaaaagaagaaacggggaggcaaggaggaaauuacaccucacugugcccuuauggauugcaucauguucgacgccgcuguguccgggggccucaacaccucuguucugagagccgugcugccccgcgauauggucuuucggaccagcacaccuagagugguucucugaggacuagucccuguucccagagcccacuuuuuuuucuuuuuuugaaauaaaauagccugucuuucagaucuaaaaaaaaaaaaaaaaaaaaaaaaaaaaaaaaaaaaaaaaaaaaaaaaaaaaaaaaaaaaaaaaaaaaaaaaaaaaaaaaaaaaaaaaaaaaaaaaaaaa

SEQ ID NO: 17349 - RNA, 1977 nt, Artificial Sequence
  mRNA product Design a-2 (A100) comprising derived and/or modified sequence from LASV(G502-SLE-2009;Clade IV)__AIT17127__NP (opt5)
aggagaguccgcucagccagguugcagaagcggcuuagcguguguccuaaucuucucucugcguguagguaggccugugccgcaaacaagcuuaccaugagcgccuccaaggagaucaaaucuuuccuguggacccagagccucagacgggaacuguccggcuacugcucuaacauuaagcugcaaguggucaaagacgcucaggcccugcuccacgggcuggauuuuagcgagguuuccaaugugcagcgccuuaugagaaaggaacggcgcgacgauaacgaccugaaaagacuccgggaucugaaucaggcggugaacaaucuggucgagcucaagucuacacaacaaaagagcauccugcgcgugggaacgcuuaccuccgacgaucugcucauucuggcugccgaccuugaaaaacuuaagagcaaaguuaucagaacagagcggccccucucugccggcguguauauggggaaccuguccagccagcagcuggaucagcgcagagcucuccugucuaugauuggaauguccggcgggaaucagggaguccgggccggcaaggacggcgugguucgcgugugggaugucaaaaacgcugagcuucugaauaaccaguucgggaccaugccuagccucacacuggccugucuuaccaagcagggacaaguggaccugaaugaugcggugcaggcccucacagaccugggccugaucuacaccgcuaaguauccgaacacgucugaccucgauagacugacccagucccaucccauccuuaauaugauugacaccaaaaagagcucccugaacaucucuggguacaauuuuagccucggagccgcugucaaagccggcgcgugcaugcuggaugggggaaacaugcuugaaacaauuaagguuuccccucaaacaauggacggcauccugaaaagcauucucaaggugaaaaaggcccugggcauguucaucucugauacccccggggagcggaacccuuaugaaaauauucuguacaagaucugucucuccggagacggcuggcccuauaucgcuagccgcacgucuauuacagggagagccugggagaacaccguggucgaucuggagagcgacggaaaaccucagaaggcuggcuccaauaacucuaauaaaagccuucaguccgccggguuuacagccggacugaccuacagccagcucaugacccugaaggaugcuaugcugcaacuugacccgaacacaaaaacguggauggauaucgaaggccggcccgaggacccuguggaaauugcgcucuaccagcccucuuccggcugcuauauccacuucuuuagagagccuaccgaccugaagcaguucaagcaggaugccaaauacagccaugggauugacguuacagaucuguuugcugcccaacccggacucaccucugccgugaucgacgcucugccgcgcaauauggucaucacaugucagggcuccgaugacauucggaaacuucuggaaagccaggggagaaaggauaucaagcucauugacaucgcccugaacaaaaccgauucccgcaaguaugagaaugcggugugggaccaguacaaggaucugugccacaugcauacgggaguuguggucgagaaaaagaaacggggcgggaaggaagagauuacaccucacugugcucuuauggacugcaucauguucgaugccgccgugucuggcggacucaacaccagcguccugagagcugugcugccccgcgacaugguuuuucggaccuccacaccuagagugguccucugaggacuagucccuguucccagagcccacuuuuuuuucuuuuuuugaaauaaaauagccugucuuucagaucuaaaaaaaaaaaaaaaaaaaaaaaaaaaaaaaaaaaaaaaaaaaaaaaaaaaaaaaaaaaaaaaaaaaaaaaaaaaaaaaaaaaaaaaaaaaaaaaaaaaa

SEQ ID NO: 17350 - RNA, 1977 nt, Artificial Sequence
  mRNA product Design a-2 (A100) comprising derived and/or modified sequence from LASV(G733-SLE-2010;Clade IV)__AIT17155__NP (opt5)
aggagaguccgcucagccagguugcagaagcggcuuagcguguguccuaaucuucucucugcguguagguaggccugugccgcaaacaagcuuaccaugagcgccuccaaggagaucaaaucuuuccuguggacccagagccucagacgggaacuguccggcuacugcucuaacauuaagcugcaaguggucaaagacgcucaggcccugcuccacgggcuggauuuuagcgagguuuccaaugugcagcgccuuaugagaaaggaacggcgcgacgauaacgaccugaaaagacuccgggaucugaaucaggcggugaacaaucuggucgagcucaagucuacacaacaaaagagcgugcugcgcguuggaacgcuuaccuccgacgaacugcucgugcuggcugccgaucuugagaaacuuaagagcaaagucaucagaacagagcggccccucucugccggcguguauauggggaaccuguccagccagcagcuggaccagcgcagagcucuccugucuaugauuggaauguccggcgggaaucagggagcccggaccggccgcgauggcguugugagagucugggacgugaagaacgcugaacuucugaauaaccaguucgggacaaugccuagccucacccuggccugucuuacaaaacagggacaaguggaucugaaugacgcgguccaggcccucaccgaucugggccugaucuacacggcuaaguauccgaacaccucugaccucgaccggcugacacagucccaucccauucuuaauaugaucgauaccaagaaaagcucccugaacaucucuggguacaauuuuagccucggagccgcuguuaaggccggcgcgugcaugcuggacgggggaaacaugcuugagacaauuaaaguguccccucaaaccauggauggcauccucaagagcauucugaaagugaagaaagcccugggcauguucaucucugacacgcccggggaacgcaacccuuaugagaauauucuguacaagaucugucucuccggagauggcuggcccuauauugcuagcagaacaucuaucaccgggcgggccugggagaacacagucguggaccuggaaagcgauggaaagccucagaaagcuggcuccaauaacucuaauaagagccuucaguccgccggguuuaccgccggacugaccuacagccagcucaugacacugaaagacgcuaugcugcaacuugauccgaacgcgaagacguggauggacaucgagggcagacccgaagauccuguugagauugcccucuaccagcccucuuccggcugcuauauccacuucuuucgcgaaccuaccgaccugaaacaguucaagcaggacgcuaaguacagccaugggauugaugugacagaccuguuugccgcccaacccggacucaccucugcugucaucgaugcccugccgcggaauauggugauuacaugucagggcuccgacgauaucagaaaacuucuggagagccaggggcgcaaggacaucaaacucauugauaucgcgcuguccaagauugacucucggaaauaugagaacgcuguuugggaucaguacaaggaccugugccacaugcauaccggaguggucguggaaaagaaaaagagaggcgggaaagaggaaaucacgccucacugugcccuuauggauugcauuauguucgacgccgcugucagcggcggacucaauucccuggugcugcgcgccguucucccccgggauaugguguuuagaacaucuaccccucgcgucgugcugugaggacuagucccuguucccagagcccacuuuuuuuucuuuuuuugaaauaaaauagccugucuuucagaucuaaaaaaaaaaaaaaaaaaaaaaaaaaaaaaaaaaaaaaaaaaaaaaaaaaaaaaaaaaaaaaaaaaaaaaaaaaaaaaaaaaaaaaaaaaaaaaaaaaaa

SEQ ID NO: 17351 - RNA, 1977 nt, Artificial Sequence
  mRNA product Design a-2 (A100) comprising derived and/or modified sequence from MOPV/LASV reassortant(IGS-1;Clade IV)__AFY05578__NP (opt5)
aggagaguccgcucagccagguugcagaagcggcuuagcguguguccuaaucuucucucugcguguagguaggccugugccgcaaacaagcuuaccaugagcgccuccaaggagaucaaaucuuuccuguggacccagagccucagacgggaacuguccggcuacugcucuaacauuaaacuucaaguggucaaggacgcucaggcccugcuccacgggcuggauuuuagcgagguuuccaaugugcagcgccuuaugagaaaggaacggcgcgacgauaacgaccugaaaagacuccgggaucugaaucaggcggugaacaaucuggucgagcucaagucuacacaacaaaagagcauccugcgcgugggaacgcuuaccuccgacgaucugcucauucuggcugccgaccuugaaaaacugagaagcaagguuauccggacagagcgcccccucucugccggcguguauauggggaaccuguccagccagcagcuggaucagagacgggcucuccugaauaugauuggaaugucuggcgggaaccagggagcccgcgcuggcagagacggcgucgugcggguuugggaugugaaaaaugccgagcuucuguccaaccaguucgggaccaugccuagccucacacuggcgugucuuaccaagcagggacaagucgaccugaaugaugccgugcaggcucucacagaccugggccugaucuacaccgccaaauauccgaacacgucugaccucgaucgccugacccagucccaucccauccuuaauaugauugacacaaagaaaagcucccugaacaucucuggguacaauuuuagccucggagcugccgugaaggcgggcgccugcaugcuggaugggggaaacaugcuugaaaccauuaaggucuccccucaaacaauggacggcauccugaaaagcauucucaagguuaaaaaggcucugggcauguucaucucugauacccccggggagagaaacccuuaugaaaauauucuguacaaaaucugucucuccggagacggcuggcccuauaucgccagccggacgucuauuacagggagagcuugggagaacaccgugguggaucuggagagcgacggaaagccucagaaggccgauuccaauaacucuagcaaaucccuucagagcgccggcuuuacagcugggcugaccuacucucagcucaugacccugaaggacgcgaugcugcaacuugauccgaaugccaaaacauggauggacaucgaaggacgccccgaggacccugucgaaauugcucucuaccagcccuccagcggcugcuauauccacuucuuucgggagccuacggaucugaagcaguucaaacaggacgccaaguacucucauggcauugaugugaccgaccuguuugccacacaacccgggcucaccuccgcuguuaucgaugcccugccgagaaacauggugaucacaugucagggaagcgacgauauucgcaaacuucuggaaucccagggccggaaggacaucaagcucauugauaucgaccugucuaaaaccgauagcagaaaguaugagaaugcggucugggaccaguacaaagaucugugccacaugcauacgggggugguuguggagaagaagaaacgcggaggcaaggaagagauuacaccucacugugcucuuauggacugcaucauguucgacgccgccgucuccgggggccucaacaccucugugcugcgggcuguccugcccagagauaugguguuucgcaccagcacaccucggguugugcucugaggacuagucccuguucccagagcccacuuuuuuuucuuuuuuugaaauaaaauagccugucuuucagaucuaaaaaaaaaaaaaaaaaaaaaaaaaaaaaaaaaaaaaaaaaaaaaaaaaaaaaaaaaaaaaaaaaaaaaaaaaaaaaaaaaaaaaaaaaaaaaaaaaaaa

SEQ ID NO: 17352 - RNA, 1977 nt, Artificial Sequence
  mRNA product Design a-2 (A100) comprising derived and/or modified sequence from LASV(LM765-SLE-2012;Clade IV)__AIT17815__NP (opt5)
aggagaguccgcucagccagguugcagaagcggcuuagcguguguccuaaucuucucucugcguguagguaggccugugccgcaaacaagcuuaccaugagcgccuccaaggagaucaaaucuuuccuguggacccagagccucagacgggaacuguccggcuacugcucuaacauuaagcugcaaguggucaaagacgcucaggcccugcuccacgggcuggauuuuagcgagguuuccaaugugcagcgccuuaugagaaaggaacggcgcgacgauaacgaccugaaaagacuccgggaucugaaucaggcggugaacaaucuggucgagcucaagucuacacaacaaaagagcauccugcgcgugggaacgcuuaccuccgacgaucugcucauucuggcugccgaccuugaaaaacuuaagagcaaaguuacaagaaccgagcggccccucucugccggcguguauauggggaaccuguccagccagcagcuggaucagcgcagagcucuccuggacaugaucggaaugucuggcuccaaucagggggcccgggcuggacgcgauggcgucgugagaguuugggacgugaagaacgccgagcuucugaauaaccaguucggcacaaugccuagccucacccuggcgugucuuacaaaacaggggcaagucgaucugaaugacgccgugcaggcucucaccgaccugggacugauuuacacggccaaguauccgaacaccucugaucucgaccggcugacacagucccaucccauccuuaauaugaucgauaccaagaaaagcucccugaacauuucuggcuacaauuuuagccucggggcugccgugaaggcgggagccugcaugcuggacggcgggaacaugcuugaaacaaucaaagucuccccucaaaccauggauggcauucucaagagcauccugaaaguuaagaaagcucugggaauguucauuucugacgcccccggcgagcgcaacccuuaugaaaauauccuguacaagauuugucucuccggggauggauggcccuauaucgcuagcagaacgucuaucacaggccgggccugggagaacaccgugguggaccuggagagcgaugggaagccucagaaagccggauccaauggcucuaacaagagccuucaguccgcuggguuuacagcgggacugaccuacagccagcucaugacccugaaagacgccaugcugcaacuugauccgaaugcuaagacauggauggacauugaaggcagacccgaggacccugucgaaaucgcccucuaccagcccucuuccggcugcuauauucacuucuuucgcgagccuacggaucugaaacaguucaagcaggacgccaaguacagccaugggaucgaugugaccgaccuguuugcugcccaacccggacucacaucugcgguuauugaugcucugccgcggaacauggugaucaccugucagggcuccgacgauaucagaaaacuuuucgaaagccaggggcgcaaggacauuaaacugaucgauauugcccucuccaagacagacucucggaaauaugagaaugccgucugggaucaguacaaggaccugugccacaugcauaccggaaucgugguugagaagaaaaagagaggcgggaaagaagagauuacgccucacugugcucugauggauugcaucauguuugacgccgcugugagcggcggacuuaacacauccguccuccgcgccgugcugccccgggacauggucuucagaaccucuaccccucgcgugguucugugaggacuagucccuguucccagagcccacuuuuuuuucuuuuuuugaaauaaaauagccugucuuucagaucuaaaaaaaaaaaaaaaaaaaaaaaaaaaaaaaaaaaaaaaaaaaaaaaaaaaaaaaaaaaaaaaaaaaaaaaaaaaaaaaaaaaaaaaaaaaaaaaaaaaa

SEQ ID NO: 17353 - RNA, 1977 nt, Artificial Sequence
  mRNA product Design a-2 (A100) comprising derived and/or modified sequence from LASV(LM776-SLE-2012;Clade IV)__AIT17825__NP (opt5)
aggagaguccgcucagccagguugcagaagcggcuuagcguguguccuaaucuucucucugcguguagguaggccugugccgcaaacaagcuuaccaugagcgccuccaaggagaucaaaucuuuccuguggacccagagccucagacgggaacuguccucuuacugcagcaacauuaaacuucaaguggucaaggacgcucaggcccugcuccacggccuggauuuuuccgagguuucuaaugugcagcgccuuaugagaaaggaacggcgcgacgauaacgaccugaaaagacuccgggaucugaaucaggcggugaacaaucuggucgagcucaagagcacacaacagaaguccauccugcgcguggggacgcuuaccagcgacgaucugcucauucuggcugccgaccuugaaaaacugaagucuaaaguuacaagaaccgagcggccccucuccgccggaguguauaugggcaaccugagcucucagcagcuggaucaacgcagagcucuccuguccaugaucgggaugagcggaucuaaucagggcgcccgggcugggcgcgacggagucgugagaguuugggaugugaagaacgccgagcuucugaauaaccaguucggcacaaugccuucccucacccuggcgugucuuacaaaacagggccaagucgaccugaaugaugccgugcaggcucucaccgaccuggggcugauuuacacggccaaguauccgaacaccagcgaccucgaucggcugacacagucccaucccauccuuaauaugaucgacaccaagaaaucuagccugaacauuuccggauacaauuuuagccucggcgcugccgugaaggcgggggccugcaugcuggauggaggcaacaugcuugaaacaaucaaagucucuccucaaaccauggacgggauucugaaguccauccucaaaguuaagaaagcucugggaauguucauuagcgauacgcccggcgagcgcaacccuuaugaaaauauccuguacaagauuugucucucuggcgacggguggcccuauaucgccagcagaacauccaucaccggacgggcuugggagaacacagugguggaucuggagucugacggcaagccucagaaagccgggagcaauaacuccaauaagagccuucagucugccggauuuaccgcuggccugaccuacucccagcucaugacacugaaagaugcgaugcugcaacuugacccgaacgccaagacguggauggauauugaagggagacccgaggacccugucgaaguggcucucuaccagcccagcucuggaugcuauauccacuucuuucgcgagccuaccgaccugaaacaguucaagcaggaugccaaguacucccauggcauugacguuacagaucuguuugccgcucaacccggccucaccagcgccgugaucgacgcgcugccgcggaauauggucauuacaugucagggguccgaugacaucagaaaacuucuggaaucucagggacgcaaggauaucaaacucauugacaucgcucugagcaagaccgauucccggaaauaugagaacgccgugugggaccaguacaaggaucugugccacaugcauacgggcguuguggucgagaagaaaaagagagggggaaaagaagagauuacaccucacugugcccuuauggacugcaucauguucgaugcugccgugucuggcgggcucaauaccagcguccugcgcgcugugcugccccgggacaugguuuuuagaaccuccacaccucgcgugguccucugaggacuagucccuguucccagagcccacuuuuuuuucuuuuuuugaaauaaaauagccugucuuucagaucuaaaaaaaaaaaaaaaaaaaaaaaaaaaaaaaaaaaaaaaaaaaaaaaaaaaaaaaaaaaaaaaaaaaaaaaaaaaaaaaaaaaaaaaaaaaaaaaaaaaa

SEQ ID NO: 17354 - RNA, 1977 nt, Artificial Sequence
  mRNA product Design a-2 (A100) comprising derived and/or modified sequence from LASV(Mad39;Clade IV)__ANH09723__NP (opt5)
aggagaguccgcucagccagguugcagaagcggcuuagcguguguccuaaucuucucucugcguguagguaggccugugccgcaaacaagcuuaccaugagcgccuccaaggagaucaaaucuuuccuguggacccagagccucagacgggaacuguccggcuacugcucuaacauuaagcugcaaguggucaaagacgcucaggcccugcuccacgggcuggauuuuagcgagguuuccaaugugcagcgccuuaugagaaagcagcggcgcgacgauaacgaccugaaaagacuccgggaucugaaucaagcggugaacaaucuggucgaacucaagucuacacagcaaaagagcgugcugcgcguuggaacgcuuaccuccgacgaucugcucacacuggcugccgaccuugagaaacuuaagagcaaagugaccagaacagaacggccccucaccgccggcgucuauauggggaaccugucuucccagcagcuggaucagcgcagagcucuccugaauaugaucggaaugagcggcgggaaccagggagcccggacaggccgcgacggcgugguuagagugugggaugucaagaaugcugagcuucugaacaaucaguucgggaccaugccuucucucacgcuggccugucuuaccaaacaaggacagguggaccugaacgaugugguccaggcgcucacagaccugggccugauuuacaccgccaaguauccgaauacauccgaccucgaucggcugacccaaagccaucccauccuuaacaugauugacacgaauaagucuucccugaacaucagcggguacaacuuuucccucggagcugccguuaaagcuggcgccugcaugcuggaugggggaaauaugcuugagacaaucaaggugucuccucagaccauggacggcauucugaaaagcauccucaaggugaaaaagucccugggcauguucauuagcgauacacccggggaacgcaacccuuaugagaauauccuguacaaaauuugucucucuggagacggcuggcccuauaucgcguccagaaccagcauuaccgggcgggccugggaaaacacagucguggaucuggagucuggaggcaagccucagaaggcugggagcaauaacuccaauaaaucucuucagagcgccggauuugcugccggccugacguacucccaacucaugacccugaaggacgccaugcugcagcuugauccgaacgcuaaaacauggauggacaucgagggcagacccgaagauccuguugagaucgcgcucuaccagcccauuagcgggugcuauauccacuucuuucgcgaaccuaccgaccugaagcaguucaaacaagacgccaaguacucucauggaauugaugugacagaccuguuugcugcccagcccggccucaccuccgccgucaucgaggcucugccgcggaauauggugauuacgugucaggggagcgaugacaucagaaaacuuuucgaaucucagggacgcaaggauaucaagcugauugacaucgcccucuccaaaacagauagccggaaguaugagaacgcgguuugggaccaauacaaagaucugugccacaugcauaccggcguggucguggagaagaagaaaaagggcgggaaagaagagauuaccccucacugugcucugauggacugcaucauguuugaugccgccgucuccggaggccuuaauacacucgugcugagagcuguucugccccgcgacaugguguuccggaccucuacaccuaaggucgugcucugaggacuagucccuguucccagagcccacuuuuuuuucuuuuuuugaaauaaaauagccugucuuucagaucuaaaaaaaaaaaaaaaaaaaaaaaaaaaaaaaaaaaaaaaaaaaaaaaaaaaaaaaaaaaaaaaaaaaaaaaaaaaaaaaaaaaaaaaaaaaaaaaaaaaa

SEQ ID NO: 17355 - RNA, 1977 nt, Artificial Sequence
  mRNA product Design a-2 (A100) comprising derived and/or modified sequence from LASV(Z0947-SLE-2011;Clade IV)__AIT17841__NP (opt5)
aggagaguccgcucagccagguugcagaagcggcuuagcguguguccuaaucuucucucugcguguagguaggccugugccgcaaacaagcuuaccaugagcgccuccaaggagaucaaaucuuuccuguggacccagagccucagacgggaacuguccggcuacugcucuaacauuaagcugcaaguggucaaagacgcucaggcccugcuccacgggcuggauuuuagcgagguuuccaaugugcagcgccuuaugagaaaggaacggcgcgacgauaacgaccugaaaagacuccgggaucugaaucaggcggugaacaaucuggucgagcucaagucuacacaacaaaagagcauccugcgcgugggaacgcuuaccuccgacgaucugcucauucuggcugccgaccuugaaaaacuuaagagcaaaguuacaagaaccgagcggccccucucugccggcguguauauggggaaccuguccagccagcagcuggaucagcgcagagcucuccugaauaugaucggaaugucuggcuccaaccagggggcccggacaggacgcgacggcgucgugagaguuugggaugugaagaaugcugagcuucugaacaaucaguucggcaccaugccuagccucacacuggccugucuuaccaaacaggggcaagucgaccugaacgaugcggugcaggcccucacggaccugggacugauuuacaccgcuaaguauccgaauacaucugaccucgaucggcugacccagucccaucccauccuuaacaugaucgacacaaagaaaagcucccugaauauuucuggcuacaacuuuagccucggggccgcugugaaggccggagcgugcaugcuggauggcgggaacaugcuugaaaccaucaaagucuccccucaaacgauggacggcauucucaagagcauccugaaaguuaagaaagcccugggaauguucauuucugaugcucccggcgagcgcaauccuuaugaaaacauccuguacaagauuugucucuccggggacggauggcccuauaucgccagcagaacaucuaucaccggccgggcuugggagaauacagugguggaucuggagagcgacgggaagccucagaaagccggauccaacggcucuaauaagagccuucaguccgccggguuuaccgcuggacugaccuacagccagcucaugacacugaaagaugcgaugcugcaacuugacccgaacgccaagacguggauggauauugaaggcagacccgaggacccugucgaaaucgcucucuaccagcccucuuccggcugcuauauucacuucuuucgcgagccuaccgaccugaaacaguucaagcaggaugccaaguacagccaugggaucgacgugacagaucuguuugccgcucaacccggacucaccucugccguuauugacgcgcugccgcggaauauggugaucacaugucagggcuccgaugacaucagaaaacuuuucgaaagccaggggcgcaaggauauuaaacugaucgacauugcucucuccaagaccgauucucggaaauaugagaacgccgucugggaccaguacaaggaucugugccacaugcauacgggaaucgugguugagaagaaaaagagaggcgggaaagaagagauuacaccucacugugcccugauggacugcaucauguuugaugcugccgugagcggcggacuuaauaccuccguccuccgcgcugugcugccccgggacauggucuucagaaccucuacaccucgcgugguucugugaggacuagucccuguucccagagcccacuuuuuuuucuuuuuuugaaauaaaauagccugucuuucagaucuaaaaaaaaaaaaaaaaaaaaaaaaaaaaaaaaaaaaaaaaaaaaaaaaaaaaaaaaaaaaaaaaaaaaaaaaaaaaaaaaaaaaaaaaaaaaaaaaaaaa

SEQ ID NO: 17356 - RNA, 2015 nt, Artificial Sequence
  mRNA product Design b-4 (hSL-A64-N5) comprising derived and/or modified sequence from LASV(Josiah;Clade IV)__NP_694869__NP (opt1)
aggagagucccgcagucggcguccagcggcucugcuuguucgugugugugucguugcaggccuuauucaagcuuaccaugagcgccuccaaggagaucaagagcuuccuguggacccagucccuccgccgggagcugagcggcuacugcuccaacaucaagcuccagguggucaaggacgcccaggcgcugcugcacgggcuggacuucagcgagguguccaacgugcagcgccucaugcggaaggagcgccgggacgacaacgaccugaagcgccugcgggaccucaaccaggccgucaacaaccugguggagcucaagagcacccagcagaaguccauccugcgcgugggcacccugaccagcgacgaccugcucauccuggccgccgaccuggagaagcucaaguccaaggucauccggaccgagcgcccccugagcgccgggguguacaugggcaaccuguccagccagcagcucgaccagcggcgcgcgcugcugaacaugaucgggauguccggcggcaaccagggggcccgggccggccgcgacggggugguccgggugugggacgugaagaacgccgagcuccugaacaaccaguucggcaccaugccgagccugacgcucgcgugccugaccaagcaggggcaggucgaccugaacgacgccgugcaggcccucaccgaccugggccugaucuacaccgccaaguaccccaacacguccgaccucgaccgccugacccagagccaccccauccugaacaugaucgacaccaagaaguccagccucaacaucagcggcuacaacuucucccugggggccgcggugaaggccggcgccugcaugcuggacgggggcaacaugcucgagaccaucaaggucagcccccagacgauggacggcauccugaaguccauccugaaggugaagaaggcccucgggauguucaucagcgacaccccgggcgagcggaaccccuacgagaacauccuguacaagaucugccuguccggggacggcuggcccuacaucgccagccgcaccuccaucaccgggcgggcgugggagaacacgguggucgaccucgagagcgacggcaagccccagaaggccgacuccaacaacagcuccaagagccugcaguccgccggcuucaccgccgggcugaccuacagccagcucaugacccugaaggacgccaugcugcagcuggacccgaacgcgaagacguggauggacaucgagggccgccccgaggaccccguggagaucgcccucuaccagcccuccagcgggugcuacauccacuucuuccgggagccgaccgaccugaagcaguucaagcaggacgccaaguacucccacggcaucgacgugaccgaccuguucgccacccagcccgggcucacgagcgccgucaucgacgcgcugccccgcaacauggugaucacgugccagggcuccgacgacauccgcaagcugcucgagagccagggccggaaggacaucaagcugaucgacaucgcccugagcaagaccgacucccgcaaguacgagaacgccgugugggaccaguacaaggaccucugccacaugcacaccggggucguggucgagaagaagaagcggggcgggaaggaggagaucaccccgcacugcgcccugauggacugcaucauguucgacgcggccgugagcggcgggcugaacaccuccgugcuccgcgccguccugccccgggacaugguguuccgcaccagcacgccccgggugguccugugaggacuaguaauaaggaaacuguaugaaugucugugggcaggaagugaagagauccuucuguaaagguuuuuggaauuaugucugcugaauaauaaacuuuuuugaaauaauaaaucugguagaaaaaugagaucucaaaggcucuuuucagagccaccaaaaaaaaaaaaaaaaaaaaaaaaaaaaaaaaaaaaaaaaaaaaaaaaaaaaaaaaaaaaaaaaagaauu

SEQ ID NO: 17357 - RNA, 2015 nt, Artificial Sequence
  mRNA product Design b-4 (hSL-A64-N5) comprising derived and/or modified sequence from LASV(LP;Clade I)__AAF86702__NP (opt1)
aggagagucccgcagucggcguccagcggcucugcuuguucgugugugugucguugcaggccuuauucaagcuuaccaugagcaacuccaaggagaucaagagcuuccuguggacccagucccuccgccgggagcugagcggcuacugcuccaacaucaagcuccagguggucaaggacgcccaggcccugcugcacgggcuggacuucagcgagguguccaacgugcagcgccucaugcggaagcagaagcgcgacgacgcggaccugaagcggcugcgcgaccucaaccaggccgucaacaaccugguggagcucaagagcacccagcagaagaacgugcugcgggucggcacgcuguccagcgacgaccugaucacccucgccgccgaccuggagaagcugaaguccaaggugauccgcaccgagcggccccucagcuccgggguguacaugggcaaccugagcucccagcagcuggaccagcgccgggcccuccugagcaugaucgggauguccggcggcccgcaggggaaccgcaccggcggggacggcgucgugcgggugugggacgucaagaacgcggagcugcucaacaaccaguucgggacgaugcccagccugacccuggccugccucaccaagcagggccagguggaccugaacgacgccgugcaggcccugaccgaccucggccugaucuacacggcgaaguaccccaacuccagcgaccuggacaugcucacccagagccaccccauccuggggauggucgacaccaagaaguccagccugaacaucuccggcuacaacuucagccucggggccgccgugaaggccggcgccugcaugcuggacggcgggaacaugcuggagaccaucaagguguccccgcagacgauggacggcauccucaagagcauccugaaggucaagcgcucccuggggauguucaucagcgacacccccggcgagcggaaccccuacgagaacauccucuacaagaucugccuguccggggagggcuggcccuacaucgcgagccgcaccuccaucaccggccgggccugggagaacacgcugguggaccucgagagcgacaacaagccgcccaagcugaacuccgccgggagcaacaagucccugcaggccgccggccucaacgcggggcugaccuacagccagcugaugacccugaaggacugcaugcuccagcuggaccccuccagcaagaccuggaucgacaucgagggccgccccgaggacccgguggagaucgcccuguuccagcccuccagcgggugcuacauccacuucuuccgggagcccacggaccucaagcaguucaagcaggacgccaaguacagccacggcaucgacgucaccgaccuguucuccacccagcccggccugaccagcgccgugaucgaggcccucccgcgcaacauggugcugacgugccagggguccgacgacaucaagaagcugcucgagagccagggccggcgcgacaucaagcugaucgacaucucccugagcaaggcggacucccgcaaguucgagaacgccgucugggaccaguacaaggaccucugccacaugcacaccgggguggucguggagaagaagaagcggggcgggaaggaggagaucacgccccacugcgcccugcuggacugcaucauguucgacgccgccaccaccggcagccucaacaucaccacccugcgcgcggugcugccccgggacauggucuuccgcaccuccacgcccaagguggugcucugaggacuaguaauaaggaaacuguaugaaugucugugggcaggaagugaagagauccuucuguaaagguuuuuggaauuaugucugcugaauaauaaacuuuuuugaaauaauaaaucugguagaaaaaugagaucucaaaggcucuuuucagagccaccaaaaaaaaaaaaaaaaaaaaaaaaaaaaaaaaaaaaaaaaaaaaaaaaaaaaaaaaaaaaaaaaagaauu

SEQ ID NO: 17358 - RNA, 2015 nt, Artificial Sequence
  mRNA product Design b-4 (hSL-A64-N5) comprising derived and/or modified sequence from LASV(803213;Clade II)__AAF86704__NP (opt1)
aggagagucccgcagucggcguccagcggcucugcuuguucgugugugugucguugcaggccuuauucaagcuuaccaugagcgccuccaaggaggugaaguccuuccuguggacccagagccuccgccgggagcugagcggcuacugcuccaacaucaagcugcaggucgugaaggacgcccaggcgcuccugcacgggcuggacuucagcgaggugaacaacguccagcgccucaugcggaagcagaagcgcgacgacggcgaccugaagcggcugcgcgaccucaaccaggccgugaacaaccugguggagcugaaguccacccagcagaaguccauccuccgggucgggacgcugaccagcgacgaccugcucacccuggccgccgaccuggagaagcucaagagcaaggugauccgcaccgagcggccccuguccagcggcguguacauggggaaccuguccacgcagcagcucgagcagcgccgggcccugcugaacaugaucggcauggucggcggggcgcagggcacccagccggggcgcgacggcguggugcgggucugggacgugaagaaccccgaccuccugaacaaccaguucgggaccaugcccagccugacccucgccugccugacgaagcagggccagguggaccugaacgacgccguccucgcccugaccgaccugggccucaucuacaccgcgaaguaccccaacuccagcgaccuggaccgccugucccagagccacccgauccucaacaugguggacaccaagaaguccagccugaacaucagcggguacaacuucucccugggcgccgccgugaaggccggggccugcaugcucgacggcggcaacaugcuggagacgaucaaggucacgccccagaccauggacgggauccucaagagcauccugaaggugaagcggucccugggcauguucgugagcgacacccccggggagcgcaaccccuacgagaacauccuguacaagaucugccucuccggcgacggguggccguacaucgcgagccggaccuccaucgucggccgcgccugggagaacaccaccguggaccuggagagcgacggcaagccccagaagguggggaccgccggcuccaacaagagccugcaguccgccggguuccccacgggccucaccuacagccagcugaugacccugaaggacuccaugaugcagcuggaccccagcgccaagaccuggaucgacaucgaggggcggccggaggaccccgucgagaucgcgcucuaccagcccauguccggcugcuacauccacuucuuccgcgagcccacggaccugaagcaguucaagcaggacgccaaguacagccacggcaucgacguggccgaccuguucccggcccagcccgggcucaccuccgccgucaucgaggcgcugccccggaacauggugcugaccugccagggcagcgacgacaucaagaagcuccuggacucccaggggcgccgcgacaucaagcugaucgacaucagccucagcaagguggacucccggaaguucgagaacgccgucugggaccagugcaaggaccugugccacaugcacaccggcgugguggucgagaagaagaagcgcgggggcaaggaggagaucacgccccacugcgcccugauggacugcaucauguucgacgccgccgugagcggcgggcucaacaucccggugcugcgggcgguccugccccgcgacaugguguuccggaccuccagccccaaggugguccucugaggacuaguaauaaggaaacuguaugaaugucugugggcaggaagugaagagauccuucuguaaagguuuuuggaauuaugucugcugaauaauaaacuuuuuugaaauaauaaaucugguagaaaaaugagaucucaaaggcucuuuucagagccaccaaaaaaaaaaaaaaaaaaaaaaaaaaaaaaaaaaaaaaaaaaaaaaaaaaaaaaaaaaaaaaaaagaauu

SEQ ID NO: 17359 - RNA, 2018 nt, Artificial Sequence
  mRNA product Design b-4 (hSL-A64-N5) comprising derived and/or modified sequence from LASV(GA391;Clade III)__CAA36646__NP (opt1)
aggagagucccgcagucggcguccagcggcucugcuuguucgugugugugucguugcaggccuuauucaagcuuaccaugagcgccuccaaggaggugcgcagcuuccuguggacccagucccuccggcgcgagcugagcggcuacugcuccaacaucaagcugcaggucgugaaggacgcccaggcgcuccugcacgggcuggacuucagcgagguguccaacguccagcggcucaugcgcaagcagaagcgggacgacggcgaccugaagcgccugcgggaccucaaccaggccgugaacaaccugguggagcucaagagcacccagcagaaguccguccugcgcguggggacccugagcuccgacgaccugcucauccuggccgccgaccuggagaagcucaagagcaaggugacccggaccgagcgcccccuguccagcggcgucuacauggggaaccuguccagccagcagcucgaccagcggcgcgcccugcugaacaugaucggcaugaccggcguguccgggggcgggaagggcgcgagcgacgggaucgugcgggucugggacgugaagaacgccgagcuccugaacaaccaguucggcacgaugccgucccugacccucgccugccugaccaagcagggccagguggaccugaacgacgccguccaggcgcucaccgaccuggggcugaucuacacggccaaguaccccaacagcagcgaccucgaccgccugucccagagccaccccauccugaacaugaucgacaccaagaaguccagccucaacaucuccggcuacaacuucagccugggggccgccgugaaggccggcgcgugcaugcuggacggcgggaacaugcucgagaccaucaaggugagcccccagaccauggacggcauccucaaguccauccugaaggucaagaagucccuggggauguucgugagcgacacgccgggcgagcggaaccccuacgagaacauccuguacaagaucugccuguccggggacggcuggcccuacaucgccagccgcaccuccaucgugggccgggccugggagaacaccgucguggaccucgagcaggacaacaagccccagaagaucgggaacggcgggagcaacaagucccugcagagcgccggcuucgccgcggggcugaccuacucccagcucaugacgcugaaggacuucaagugcuucaaccugaucccgaacgccaagaccuggauggacaucgagggccgccccgaggaccccguggagaucgcccuguaccagcccagcuccggcugcuacguccacuucuuccgggagccgaccgaccucaagcaguucaagcaggacgccaaguacagccacgggaucgacgugaccgaccuguucgccgcgcagcccggccugacgagcgccgucaucgaggcccucccccgcaacauggugaucacgugccagggguccgaggacauccggaagcugcuggagagccagggccgccgcgacaucaagcucaucgacaucacccuguccaaggccgacagccggaaguucgagaacgccgugugggaccaguucaaggaccugugccacaugcacaccggggucgugguggagaagaagaagcgcggcggcaaggaggagaucacgccccacugcgcgcucauggacugcaucauguucgacgccgccgucuccgggggccuggacgccaaggugcugcgggugguccucccgcgcgacaugguguuccggaccagcacccccaaggugguccugugaggacuaguaauaaggaaacuguaugaaugucugugggcaggaagugaagagauccuucuguaaagguuuuuggaauuaugucugcugaauaauaaacuuuuuugaaauaauaaaucugguagaaaaaugagaucucaaaggcucuuuucagagccaccaaaaaaaaaaaaaaaaaaaaaaaaaaaaaaaaaaaaaaaaaaaaaaaaaaaaaaaaaaaaaaaaagaauu

SEQ ID NO: 17360 - RNA, 2015 nt, Artificial Sequence
  mRNA product Design b-4 (hSL-A64-N5) comprising derived and/or modified sequence from LASV(AV;Clade V)__CCA30315__NP (opt1)
aggagagucccgcagucggcguccagcggcucugcuuguucgugugugugucguugcaggccuuauucaagcuuaccaugagcgccuccaaggaggugaaguccuuccuguggacccagagccuccgccgggagcugagcggcuacugcuccaacaucaagcugcaggucgugaaggacgcccaggcgcuccugcacgggcuggacuucagcgagguguccaacguccagcgccucaugcggaagcagcgccgggacgacagcgaccugaagcgccugcgggaccucaaccaggccgugaacaaccugguggagcugaaguccacccagcagaaguccguccuccgcgugggcacgcugagcagcgacgaccugcucacccuggccgccgaccuggagaagcucaaguccaaggugacccggaccgagcgcccccugagcuccggggucuacaugggcaaccugagcucccagcagcucgaccagcggcgcgcccugcugaaccucaucgggaugacgaacggcagccagggcucccaggcggggcgggacggcguggugcgcgucugggacgugaagaacgccgagcugcugaacaaccaguucgggaccaugccgagccucacccuggccugccugaccaagcagggccagguggaccucaacgacgucgugcaggcccugacggaccuggggcucaucuacaccgcgaaguaccccaacaccagcgaccuggaccggcugacccagucccaccccauccucaacaugaucgacacgaagaaguccagccugaacaucagcggcuacaacuucucccugggcgccgccgugaaggccggggccugcaugcucgacggcgggaacaugcuggagaccaucaaggucagcccccaguccauggacggcauccucaagagcauccugaaggugaagcgcgcgcugggcauguucguguccgacaccccgggggagcggaaccccuacgagaacauccuguacaagaucugccucagcggcgacggguggcccuacaucgccucccgcaccagcaucgucggccgggccugggagaacacggugguggaccuggagaccgacgggaagccccagaagaucggcuccggcaacagcaacaagucccugcagagcgccggguucuccgccggccucaccuacagccagcugaugacccugaaggacgcgaugcugcagcucgacccgaacgccaagacguggauggacaucgaggggcgccccgaggaccccgucgagguggcccuguaccagcccaucuccggcugcuacauccacuucuuccgggagccgaccgaccugaagcaguucaagcaggacgccaaguacagccacgggaucgacaucgccgaccucuucgcggcccagcccggccugaccagcgccgucaucgaggcccugccccgcaacauggugaucacgugccagggcuccgaggacaucaagaagcuccuggagagccaggggcgcaaggacaucaagcugaucgacaucgcccucuccaagaucgacagccggaaguucgagaacgcggugugggaccaguacaaggaccugugccacaugcacaccggcgucgugguggagaagaagaagcgcgggggcaaggaggagaucaccccgcacugcgcccugauggacugcaucauguucgacgccgccgucuccgggggccucaacacccuggugcugcgggcggugcucccccgcgacauggucuuccggaccagcacgccccgcguggugcugugaggacuaguaauaaggaaacuguaugaaugucugugggcaggaagugaagagauccuucuguaaagguuuuuggaauuaugucugcugaauaauaaacuuuuuugaaauaauaaaucugguagaaaaaugagaucucaaaggcucuuuucagagccaccaaaaaaaaaaaaaaaaaaaaaaaaaaaaaaaaaaaaaaaaaaaaaaaaaaaaaaaaaaaaaaaaagaauu

SEQ ID NO: 17361 - RNA, 2015 nt, Artificial Sequence
  mRNA product Design b-4 (hSL-A64-N5) comprising derived and/or modified sequence from LASV(Togo/2016/7082;Clade VI)__AMR44578__NP (opt1)
aggagagucccgcagucggcguccagcggcucugcuuguucgugugugugucguugcaggccuuauucaagcuuaccaugagcaacuccaaggaggugaaguccuuccuguggacccagagccuccgccgggagcugagcggcuacugcuccaacaucaagcugcaggucgugaaggacgcccaggcccuccugcacgggcuggacuucagcgagguguccaacguccagcgccucaugcggaagcagaagcgcgacgacggcgaccugaagcggcugcgcgaccucaaccaggcggugaacaaccugguggagcucaagagcguccagcagaaguccauccugcggguggggacccugaccagcgacgaccugcucacccuggccgccgaccuggagaagcucaaguccaaggugacccgcaccgagcggccccugagcuccggcgucuacauggggaaccugagcucccagcagcucgaccagcgccgggcccugcugagcaugaucggcauguccggcgggaaccagaacagccagccgaagggcgacgggguggugcgcgucugggacgugaagaacgccgaccuccugaacaaccaguucggcacgaugcccucccugacccucgcgugccugaccaagcagggccagguggaccugaacgacgccguccaggcccucaccgaccuggggcugaucuacacggccaaguaccccaacagcagcgaccucgaccggcugucccagagccaccccauccugaacaugaucgacaccaagaaguccagccucaacaucuccggcuacaacuucagccugggggcggccaucaagaccggcgccugcaugcuggacgggggcaacaugcucgagaccaucaaggugacgccgcagaccauggacggcauccugaaguccauccugaaggugaagcgcagccucgggauguucaucuccgacacccccggcgagcggaaccccuacgagaacauccuguacaagaucugccugagcggggacggcuggcccuacaucgccucccgcaccgccaucaucgggcgggcgugggagaacacggucguggaccucgagagcgacuccaagccgcagaagaucggcagcaacggcuccaacaagagccugcaguccgccggguucgcccccggccugaccuacagccagcucaugacccugaaggacuccaugcugcagcuggaccccaacgccaagaccuggaucgacaucgaggggcgccccgaggacccgguggaggucgcccucuuccagcccaucagcggcugcuacauccacuucuuccgggagcccacggaccugaagcaguucaagcaggacgcgaaguacagccacgggaucgacgugaccgaccuguucgccgcccagcccggccucaccuccgccgugaucgaggcccugccgcgcaacaugguccugaccugccagggcagcgacgacaucaagaagcuccuggacucccaggggcggcgcgacaucaagcugaucgacgugagccucaacaagaucgacucccgcaaguucgagaacgcggucugggaccaguacaaggaccugugccacaugcacacgggcgugguggucgagaagaagaagaagggcgggaaggaggagaucacgccccacugcgcccugcucgacugcaucauguucgacgccgccgugagcgggggccugaacgccaccgugcugcgggcgguccucccccgcgacaugguguuccggaccuccagccccaaggugguccugugaggacuaguaauaaggaaacuguaugaaugucugugggcaggaagugaagagauccuucuguaaagguuuuuggaauuaugucugcugaauaauaaacuuuuuugaaauaauaaaucugguagaaaaaugagaucucaaaggcucuuuucagagccaccaaaaaaaaaaaaaaaaaaaaaaaaaaaaaaaaaaaaaaaaaaaaaaaaaaaaaaaaaaaaaaaaagaauu

SEQ ID NO: 17362 - RNA, 2015 nt, Artificial Sequence
  mRNA product Design b-4 (hSL-A64-N5) comprising derived and/or modified sequence from LASV(KAK-428;Clade n.d. (VII))__ANH09741__NP (opt1)
aggagagucccgcagucggcguccagcggcucugcuuguucgugugugugucguugcaggccuuauucaagcuuaccaugagcaacuccaaggaggugaaguccuuccuguggacccagagccuccgccgggagcugagcggcuacugcaccaacaucaagcugcaggucgugaaggacgcccaggcccuccugcacgggcuggacuucuccgaggugagcaacguccagcgccucaugcggaagcagaagcgcgacgacaacgaccugaagcggcugcgcgaccucaaccaggcggugaacaaccugguggagcugaaguccguccagcagaaguccgugcucaaggugggcacgcugaacagcgacgaccugcucacccuggccgccgaccuggagaagcucaagagcaaggucgugcggaccgagcgcccccuguccagcgggguguacaugggcaaccuguccagccagcagcucgaccagcggcgcgcccugcugaacaugaucgggauggccggcggcucccaggggaaccagccgagccgggacggcgucgugcgcgugugggacgucaagaacgcggaccuccugaacaaccaguucgggaccaugcccucccugacgcucgccugccugaccaagcagggccagguggaccugaacgacgugguccucgcccugaccgaccuggggcucaucuacaccgccaaguaccccaacagcuccgaccuggaccggcugagccagaaccaccccgugcucaacaugaucgacgugaacaagagcucccugaacaucagcggcuacaacuucucccugggcgcggccgucaaggccggggccugcaugcucgacggcgggaacaugcuggagacgaucaagaucagcccgcagaccguggacggcauccugaaguccauccucaaggugaagcgcgcccugggcauguucgucagcgacacccccggggagcggaaccccuacgagaacauccuguacaaggugugccucuccggcaacggguggcccuacaucgcgagccgcaccuccaucgucggccgggccugggagaacacggugguggaccuggagagcaacaagaaccagccgaaggucgggaacaacggcuccaacaagaugcugcagagcuccggcuucgccaccgggcucaccuacagccagcugaugacccugcgcgacuccaugcugcagcucgaccccacggccaagaccuggaucgacaucgagggccggcccgaggaccccguggagcuggcccuguuccagccgagcuccgggugcuacauccacuucuuccgcgagcccaccgaccucaagcaguucaagcaggacgcgaaguacagccacggcaucgacgugaacgaccuguucuccgcccagcccgggcugaccagcgccguccucgaggcccugccccggaacauggugcugacgugccagggcagcgacgacauccgcaagcuccuggacucccaggaccgcaaggacaucaagcugaucgacaucagccucuccaaggccgacgcgcggaaguucgagaacgacgugugggaccaguucaaggaccugugccacaugcacaccggcaucgucguggagaagaagaagaagggcgggaagcaggagaugaccccgcacugcgcccugcucgacugcaucauguucgacgccgccgugagcgggggccugaacguccccacccugcgcgccgugcuccccacggacaugguguuccggaccaucaccaccaaggucgugcugugaggacuaguaauaaggaaacuguaugaaugucugugggcaggaagugaagagauccuucuguaaagguuuuuggaauuaugucugcugaauaauaaacuuuuuugaaauaauaaaucugguagaaaaaugagaucucaaaggcucuuuucagagccaccaaaaaaaaaaaaaaaaaaaaaaaaaaaaaaaaaaaaaaaaaaaaaaaaaaaaaaaaaaaaaaaaagaauu

SEQ ID NO: 17363 - RNA, 2015 nt, Artificial Sequence; identical to SEQ ID NO: 17357
  mRNA product Design b-4 (hSL-A64-N5) comprising derived and/or modified sequence from LASV(Pinneo-NIG-1969;Clade I)__AIT17837__NP (opt1)

SEQ ID NO: 17364 - RNA, 2015 nt, Artificial Sequence
  mRNA product Design b-4 (hSL-A64-N5) comprising derived and/or modified sequence from LASV(ISTH0009-NIG-2011;Clade II)__AIT17405__NP (opt1)
aggagagucccgcagucggcguccagcggcucugcuuguucgugugugugucguugcaggccuuauucaagcuuaccaugagcguguccaaggaggucaagagcuuccuguggacccagucccuccgccgggagcugagcggcuacugcuccaacaucaagcuccagguggugaaggacgcccaggcccugcugcacgggcuggacuucagcgaggucuccaacgugcagcgccucaugcggaagcagaagcgcgacgacagcgaccugaagcggcugcgcgaccucaaccaggcggugaacaaccuggucgagcugaaguccacccagcagaaguccauccuccgggugggcacccugaccagcgacgaccugcucacccuggccgccgaccuggagaagcucaagagcaaggugauccgcaccgagcggccccuguccagcggggucuacaugggcaaccuguccacgcagcagcucgagcagcgccgggcccugcugaacaugaucgggauggugggcggcgcccaggggacccagccgggccgcgacggggugguccgggugugggacgugaagaaccccgaccuccugaacaaccaguucggcaccaugcccagccugacccucgcgugccugacgaagcaggggcaggucgaccugaacgacgccgugcucgcccugaccgaccugggccucaucuacaccgccaaguaccccaacuccagcgaccuggaccgccugucccagagccacccgauccucaacaugguggacaucaagaaguccagccugaacaucagcggcuacaacuucucccugggggcggccgucaaggccggcgccugcaugcucgacgggggcaacaugcuggagaccaucaaggugacgccccagaccauggacggcauccucaagagcauccugaaggugaagcggucccuggggauguucgucagcgacacccccggcgagcgcaaccccuacgagaacauccuguacaagaucugccucuccggggacggcuggccguacaucgccagccggaccuccaucguggggcgcgcgugggagaacacgaccguggaccuggagagcgacggcaagccccagaaggucggcuccgccgggagcaacaagucccugcagagcgccggcuuccccaccgggcucaccuacucccagcugaugacgcugaaggacagcaugaugcagcuggaccccuccgccaagaccuggaucgacaucgagggccggccggaggaccccguggagaucgcccucuaccagcccaugagcgggugcuacauccacuucuuccgcgagcccaccgaccugaagcaguucaagcaggacgcgaaguacucccacggcaucgacgucgccgaccuguucccggcccagcccggccucaccagcgccgugaucgaggcccugccccggaacauggugcugacgugccaggggagcgacgacaucaagcgccuccuggacucccagggccgccgggacaucaagcugaucgacaucgcgcucagcaaggccgacucccgccgguucgagaacgccgucugggaccagugcaaggaccugugccacaugcacaccggggugguggucgagaagaagaagcgcggcgggaaggaggagaucacgccccacugcgcccugauggacugcaucauguacgacgccgcggugagcggcggccucaacaucccggugcugcgggccguccugccccgcgacaugguguuccggaccuccagccccaaggugguccucugaggacuaguaauaaggaaacuguaugaaugucugugggcaggaagugaagagauccuucuguaaagguuuuuggaauuaugucugcugaauaauaaacuuuuuugaaauaauaaaucugguagaaaaaugagaucucaaaggcucuuuucagagccaccaaaaaaaaaaaaaaaaaaaaaaaaaaaaaaaaaaaaaaaaaaaaaaaaaaaaaaaaaaaaaaaaagaauu

SEQ ID NO: 17365 - RNA, 2015 nt, Artificial Sequence
  mRNA product Design b-4 (hSL-A64-N5) comprising derived and/or modified sequence from LASV(ISTH2010-NIG-2012;Clade II)__AIT17483__NP (opt1)
aggagagucccgcagucggcguccagcggcucugcuuguucgugugugugucguugcaggccuuauucaagcuuaccaugagcgccuccaaggaggugaaguccuuccuguggacccagagccuccgccgggagcugagcggcuacugcuccaacaucaagcugcaggucgugaaggacgcccaggcgcuccugcacgggcuggacuucagcgagguguccaacguccagcgccucaugcggaagcagaagcgcgacgacagcgaccugaagcggcugcgcgaccucaaccaggccgugaacaaccugguggagcugaaguccacccagcagaaguccauccuccgggucggcacgcugaccagcgacgaccugcucacccuggccgccgaccuggagaagcucaagagcaaggugauccgcaccgagcggccccuguccagcgggguguacaugggcaaccuguccacgcagcagcucgagcagcgccgggcccugcugaaccucaucgggauggucggcggcgcgcaggggacccagccgggccgcgacgggguggugcgggucugggacgugaagaaccccgaccugcugaacaaccaguucggcaccaugcccagccucacccuggccugccugacgaagcagggccagguggaccucaacgacgccguccuggcccugaccgaccucgggcugaucuacaccgcgaaguaccccaacuccagcgaccuggaccgccucucccagagccacccgauccugaacaugguggacaccaagaaguccagccugaacaucagcggcuucaacuucucccucggggccgccgugaaggccggcgccugcaugcuggacgggggcaacaugcuggagacgaucaaggucacgccccagaccauggacggcauccucaagagcauccugaaggugaagaagucccuggggauguucgugagcgacacccccggcgagcggaaccccuacgagaacauccucuacaagaucugccuguccggggacggcuggccguacaucgcgagccgcaccuccaucgucgggcgggccugggagaacaccaccguggaccuggagagcgacggcaagccccacaaggugggcaccgccggguccaacaagagccuccaguccgccggcuuccccacggggcugaccuacagccagcugaugacccugaaggacuccaugaugcagcucgaccccagcgccaagaccuggaucgacaucgagggccgcccggaggaccccgucgagaucgcgcuguaccagcccauguccgggugcuacauccacuucuuccgggagcccacggaccugaagcaguucaagcaggacgccaaguacagccacggcaucgacguggccgaccucuucccggcccagcccggccugaccuccgccgucaucgaggcgcugccccgcaacauggugcugaccugccaggggagcgacgacaucaagcggcuccuggacagccagggccgccgcgacaucaagcucaucgacaucgcccuguccaaggccgacagccggcgcuucgagaacgccgugugggaccagugcaaggaccugugccacaugcacaccggggucgugguggagaagaagaagcggggcgggaaggaggagaucacgccccacugcgcccucauggacugcaucauguacgacgcggccgucuccggcggccugaacaucccggugcugcgcgccgugcucccccgggacauggucuuccgcaccagcucccccaagguggugcugugaggacuaguaauaaggaaacuguaugaaugucugugggcaggaagugaagagauccuucuguaaagguuuuuggaauuaugucugcugaauaauaaacuuuuuugaaauaauaaaucugguagaaaaaugagaucucaaaggcucuuuucagagccaccaaaaaaaaaaaaaaaaaaaaaaaaaaaaaaaaaaaaaaaaaaaaaaaaaaaaaaaaaaaaaaaaagaauu

SEQ ID NO: 17366 - RNA, 2015 nt, Artificial Sequence
  mRNA product Design b-4 (hSL-A64-N5) comprising derived and/or modified sequence from LASV(Lassa virus/H.sapiens-wt/NGA/2015/ISTH_0543;Clade II)__AVO03640__NP (opt1)
aggagagucccgcagucggcguccagcggcucugcuuguucgugugugugucguugcaggccuuauucaagcuuaccaugagcgccuccaaggaggugaaguccuuccuguggacccagagccuccgccgggagcugagcggcuacugcuccaacaucaagcugcaggucgugaaggacgcccaggcgcuccugcacgggcuggacuucagcgagguguccaacguccagcgccucaugcggaagcagaagcgcgacgacagcgaccugaagcggcugcgcgaccucaaccaggccgugaacaaccugguggagcugaaguccacccagcagaaguccauccuccgggucggcacgcugaccagcgacgaccugcucacccuggccgccgaccuggagaagcucaagagcaaggugauccgcaccgagcggccccuguccagcgggguguacaugggcaaccuguccacgcagcagcucgagcagcgccgggcccugcugaacaugaucgggauggucggcggcgcgcaggggacccagccgggccgcgacgggguggugcgggucugggacgugaagaaccccgaccuccugaacaaccaguucggcaccaugcccagccugacccucgccugccugacgaagcagggccagguggaccugaacgacgccguccucgcccugaccgaccuggggcucaucuacaccgcgaaguaccccaacuccagcgaccuggaccgccugucccagagccacccgauccucaacaugguggacaccaagaaguccagccugaacaucagcggcuacaacuucucccugggggccgccgugaaggccggcgccugcaugcucgacgggggcaacaugcuggagacgaucaaggucacgccccagaccauggacggcauccucaagagcauccugaaggugaagaagucccuggggauguucgugagcgacacccccggcgagcggaaccccuacgagaacauccuguacaagaucugccucuccggggacggcuggccguacaucgcgagccgcaccuccaucgucgggcgggccugggagaacaccaccguggaccuggagagcgacggcaagccccagaaggugggcuccgccgggagcaacaagucccugcagagcgccggcuuccccaccgggcucacguacucccagcugaugacccugaaggacagcaugaugcagcuggaccccuccgccaagaccuggaucgacaucgagggccgcccggaggaccccgucgagaucgcgcucuaccagcccaugagcgggugcuacauccacuucuuccgggagcccaccgaccugaagcaguucaagcaggacgccaaguacucccacggcaucgacguggccgaccuguucccggcccagcccggccucacgagcgccgucaucgaggcgcugccccgcaacauggugcugaccugccaggggagcgacgacaucaagcggcuccuggacucccagggccgcaaggacaucaagcugaucgacaucgcccucagcaaggccgacucccgccgguucgagaacgccgugugggaccagugcaaggaccugugccacaugcacaccggggucgugguggagaagaagaagcgcggcgggaaggaggagaucacgccccacugcgcccugauggacugcaucauguacgacgcggccgucagcggcggccucaacaucccggugcugcgggccgugcugccccgcgacauggucuuccggaccuccagccccaagguggugcucugaggacuaguaauaaggaaacuguaugaaugucugugggcaggaagugaagagauccuucuguaaagguuuuuggaauuaugucugcugaauaauaaacuuuuuugaaauaauaaaucugguagaaaaaugagaucucaaaggcucuuuucagagccaccaaaaaaaaaaaaaaaaaaaaaaaaaaaaaaaaaaaaaaaaaaaaaaaaaaaaaaaaaaaaaaaaagaauu

SEQ ID NO: 17367 - RNA, 2015 nt, Artificial Sequence
  mRNA product Design b-4 (hSL-A64-N5) comprising derived and/or modified sequence from LASV(Lassa virus/H.sapiens-wt/NGA/2016/ISTH_0009;Clade II)__AVO03572__NP (opt1)
aggagagucccgcagucggcguccagcggcucugcuuguucgugugugugucguugcaggccuuauucaagcuuaccaugagcgccuccaaggaggugaaguccuuccuguggacccagagccuccgccgggagcugagcggcuacugcuccaacaucaagcugcaggucgugaaggacgcccaggcgcuccugcacgggcuggacuucagcgagguguccaacguccagcgccucaugcggaagcagaagcgcgacgacagcgaccugaagcggcugcgcgaccucaaccaggccgugaacaaccugguggagcugaaguccacccagcagaaguccauccuccgggucggcacgcugaccagcgacgaccugcucacccuggccgccgaccuggagaagcucaagagcaaggugauccgcaccgagcggccccuguccagcgggguguacaugggcaaccuguccacgcagcagcucgagcagcgccgggcccugcugaacaugaucgggauggucggcggcgcgcaggggacccagccgggccgcgacgggguggugcgggucugggacgugaagaaccccgaccuccugaacaaccaguucggcaccaugcccagccugacccucgccugccugacgaagcagggccagguggaccugaacgacgccguccucgcccugaccgaccuggggcucaucuacaccgcgaaguaccccaacuccagcgaccuggaccgccugucccagagccacccgauccucaacaugguggacaccaagaaguccagccugaacaucagcggcuacaacuucucccugggggccgccgugaaggccggcgccugcaugcucgacgggggcaacaugcuggagacgaucaaggucacgccccagaccauggacggcauccucaagagcauccugaaggugaagaagucccuggggauguucgugagcgacacccccggcgagcggaaccccuacgagaacauccuguacaagaucugccucuccggggacggcuggccguacaucgcgagccgcaccuccaucgucgggcgggccugggagaacaccaccguggaccuggagagcgacggcaagccccagaaggugggcuccgccgggagcaacaagucccugcagagcgccggcuuccccaccgggcucacguacucccagcugaugacccugaaggacagcaugaugcagcuggaccccuccgccaagaccuggaucgacaucgagggccgcccggaggaccccgucgagaucgcgcucuaccagcccaugagcgggugcuacauccacuucuuccgggagcccaccgaccugaagcaguucaagcaggacgccaaguacucccacggcaucgacguggccgaccuguucccggcccagcccggccucacgagcgccgucaucgaggcgcugccccgcaacauggugcugaccugccaggggagcgacgacaucaagcggcuccuggacucccagggccgccgcgacaucaagcugaucgacaucgcccucagcaaggccgacucccggcgcuucgagaacgccgugugggaccagugcaaggaccugugccacaugcacaccggggucgugguggagaagaagaagcggggcgggaaggaggagaucacgccccacugcgcccugauggacugcaucauguacgacgcggccgucagcggcggccucaacaucccggugcugcgcgccgugcugccccgggacauggucuuccgcaccuccagccccaagguggugcucugaggacuaguaauaaggaaacuguaugaaugucugugggcaggaagugaagagauccuucuguaaagguuuuuggaauuaugucugcugaauaauaaacuuuuuugaaauaauaaaucugguagaaaaaugagaucucaaaggcucuuuucagagccaccaaaaaaaaaaaaaaaaaaaaaaaaaaaaaaaaaaaaaaaaaaaaaaaaaaaaaaaaaaaaaaaaagaauu

SEQ ID NO: 17368 - RNA, 2015 nt, Artificial Sequence
  mRNA product Design b-4 (hSL-A64-N5) comprising derived and/or modified sequence from LASV(Lassa virus/H.sapiens-wt/NGA/2016/ISTH_0017;Clade II)__AVO03568__NP (opt1)
aggagagucccgcagucggcguccagcggcucugcuuguucgugugugugucguugcaggccuuauucaagcuuaccaugagcgccuccaaggaggugaaguccuuccuguggacccagagccuccgccgggagcugagcggcuacugcuccagcaucaagcugcaggucgugaaggacgcccaggcgcuccugcacgggcuggacuucuccgaggugagcaacguccagcgccucaugcggaagcagaagcgcgacgacuccgaccugaagcggcugcgcgaccucaaccaggccgugaacaaccugguggagcucaagagcacccagcagaaguccauccugcgggucggcacgcugaccagcgacgaccugcucacccuggccgccgaccuggagaagcucaaguccaaggugauccgcaccgagcggccccugagcuccgggguguacaugggcaaccugagcacgcagcagcucgagcagcgccgggcccugcugaacaugaucgggauggcgggcggcgcccaggggacccagccgggccgcgacggggucgugcgggugugggacgucaagaaccccgaccuccugaacaaccaguucggcaccaugcccucccugacccucgccugccugacgaagcagggccagguggaccugaacgacgccgugcucgcgcugaccgaccuggggcucaucuacaccgccaaguaccccaacagcuccgaccuggaccgccugagccagagccacccgauccucaacauggucgacaccaagaaguccagccugaacaucuccggcuacaacuucagccugggggccgccgugaaggccggcgcgugcaugcucgacgggggcaacaugcuggagacgaucaaggugacgccccagaccauggacggcauccugaaguccauccucaaggucaagcggagccuggggauguucguguccgacgcccccggcgagcgcaaccccuacgagaacauccuguacaagaucugccucagcggggacggcuggccguacaucgccucccggaccagcaucguggggcgcgccugggagaacaccaccgucgaccuggaguccgacggcaagccccagaaggugggcgccaccgggagcaacaagucccugcagagcgcgggcuuccccaccgggcucacguacucccagcugaugacccugaaggacagcaugaugcagcuggaccccuccgccaagaccuggaucgacaucgagggccggccggaggaccccguggaggucgcccucuaccagcccgugagcgggugcuacauccacuucuuccgcgagcccaccgaccugaagcaguucaagcaggacgccaaguacucccacggcaucgacgucgccgaccuguucccggcgcagcccggccucacgagcgccgugaucgaggcccugccccggaacauggugcugaccugccaggggagcgacgacaucaagaagcuccuggacucccagggccgcaaggacaucaagcugaucgacaucgcccucagcaaggccgacucccgccgguucgagaacgcggucugggaccagugcaaggaccugugccacaugcacaccggggugguggucgagaagaagaagcgcggcgggaaggaggagaucacgccccacugcgcccugauggacugcaucauguacgacgccgccgugagcggcggccucaacaucccggugcugcgggcgguccugccccgcgacaugguguuccggaccuccagccccaaggugguccucugaggacuaguaauaaggaaacuguaugaaugucugugggcaggaagugaagagauccuucuguaaagguuuuuggaauuaugucugcugaauaauaaacuuuuuugaaauaauaaaucugguagaaaaaugagaucucaaaggcucuuuucagagccaccaaaaaaaaaaaaaaaaaaaaaaaaaaaaaaaaaaaaaaaaaaaaaaaaaaaaaaaaaaaaaaaaagaauu

SEQ ID NO: 17369 - RNA, 2015 nt, Artificial Sequence
  mRNA product Design b-4 (hSL-A64-N5) comprising derived and/or modified sequence from LASV(Lassa virus/H.sapiens-wt/NGA/2018/ISTH_0959;Clade II)__AVV65100__NP (opt1)
aggagagucccgcagucggcguccagcggcucugcuuguucgugugugugucguugcaggccuuauucaagcuuaccaugagcgccuccaaggaggugaaguccuuccuguggacccagagccuccgccgggagcugagcggcuacugcuccaacaucaagcugcaggucgugaaggacgcccaggcgcuccugcacgggcuggacuucagcgagguguccaacguccagcgccucaugcggaagcagaagcgcgacgacagcgaccugaagcggcugcgcgaccucaaccaggccgugaacaaccugguggagcugaaguccacccagcagaaguccauccuccgggucggcacccugaccagcgacgaccugcucacccuggccgccgaccuggagaagcucaagagcaaggugauccgcaccgagcggccccuguccagcgggguguacaugggcaaccuguccacgcagcagcucgagcagcgccgggcccugcugaaccucaucgggauggucggcggcgcgcaggggacccagccgggccgcgacgggguggugcgggucugggacgugaagaaccccgaccugcugaacaaccaguucggcaccaugcccagccucacccuggccugccugacgaagcagggccagguggaccucaacgacgucgugcuggcccugaccgaccucgggcugaucuacaccgccaaguaccccaacuccagcgaccuggaccgccucucccagagccacccgauccugaacaugguggacaccaagaaguccagccugaacaucagcggcuucaacuucucccucggggcggccgucaaggccggcgccugcaugcuggacgggggcaacaugcuggagacgaucaaggugacgccccagaccauggacggcauccucaagagcauccugaaggugaagaagucccuggggauguucgucagcgacacccccggcgagcggaaccccuacgagaacauccucuacaagaucugccuguccggggacggcuggccguacaucgccagccgcaccuccaucguggggcgggcgugggagaacaccaccguggaccuggagagcgacggcaagccccacaaggucggcaccgccggguccaacaagagccuccaguccgccggcuuccccacggggcugaccuacagccagcugaugacccugaaggacuccaugaugcagcucgaccccagcgccaagaccuggaucgacaucgagggccgcccggaggaccccguggagaucgcccuguaccagcccauguccgggugcuacauccacuucuuccgggagcccacggaccugaagcaguucaagcaggacgcgaaguacagccacggcaucgacgucgccgaccucuucccggcccagcccggccugaccuccgccgugaucgaggcccugccccgcaacauggugcugaccugccaggggagcgacgacaucaagcggcuccuggacagccagggccgcaaggacaucaagcucaucgacaucgcgcuguccaagaccgacagccgccgguucgagaacgccgucugggaccagugcaaggaccugugccacaugcacacgggggugguggucgagaagaagaagcgcggcgggaaggaggagaucacgccccacugcgcccucauggacugcaucauguacgacgccgccguguccggcggccugaacaucccggugcugcgggcgguccucccccgcgacaugguguuccggaccagcucccccaaggugguccugugaggacuaguaauaaggaaacuguaugaaugucugugggcaggaagugaagagauccuucuguaaagguuuuuggaauuaugucugcugaauaauaaacuuuuuugaaauaauaaaucugguagaaaaaugagaucucaaaggcucuuuucagagccaccaaaaaaaaaaaaaaaaaaaaaaaaaaaaaaaaaaaaaaaaaaaaaaaaaaaaaaaaaaaaaaaaagaauu

SEQ ID NO: 17370 - RNA, 2015 nt, Artificial Sequence
  mRNA product Design b-4 (hSL-A64-N5) comprising derived and/or modified sequence from LASV(LASV003-NIG-2008;Clade II)__AIT17581__NP (opt1)
aggagagucccgcagucggcguccagcggcucugcuuguucgugugugugucguugcaggccuuauucaagcuuaccaugagcgccuccaaggaggugaaguccuuccuguggacccagagccuccgccgggagcugagcggcuacugcuccagcaucaagcugcaggucgugaaggacgcccaggcgcuccugcacgggcuggacuucuccgaggugagcaacguccagcgccucaugcggaagcagaagcgcgacgacuccgaccugaagcggcugcgcgaccucaaccaggccgugaacaaccugguggagcucaagagcacccagcagaaguccguccugcgggugggcacccugaccagcgacgaccugcucacccuggccgccgaccuggagaagcucaaguccaaggugauccgcaccgagcggccccugagcuccggggucuacaugggcaaccugagcgcccagcagcucgagcagcgccggacgcugcugaacaugaucgggauggugggcggcgcgcaggggacccagccgggccgcgacggggugguccgggugugggacgugaagaaccccgaccuccugaacaaccaguucggcaccaugcccucccugacccucgccugccugacgaagcaggggcaggucgaccugaacgacguggugcucgcccugaccgaccugggccucaucuacaccgccaaguaccccaacagcuccgaccuggaccgccugagccagagccacccgauccucuccauggucgacaccaagaaguccagccugaacaucagcggcuacaacuucucccugggggcggccgugaaggccggcgccugcaugcucgacgggggcaacaugcuggagacgaucaaggugacgccccagaccauggacggcauccucaagagcauccugaaggucaagaagucccuggggauguucgugagcgacacccccggcgagcggaaccccuacgagaacauccuguacaagaucugccucuccggggacggcuggccguacaucgccagccgcaccuccaucguggggcgggcgugggagaacaccaccgucgaccuggagagcgacggcaagccccagaaggugggcaccgccggguccaacaagagccugcaguccgccggcuuccccacggggcucaccuacagccagcugaugacccugaaggacuccaugaugcagcuggaccccagcgccaagaccuggaucgacaucgagggccgcccggaggaccccgucgagaucgcccucuaccagcccauguccgggugcuacauccacuucuuccgggagcccacggaccugaagcaguucaagcaggacgcgaaguacagccacggcaucgacgugaccgaccuguucccggcccagcccggccucaccagcgccgugaucgaggcccugccccgcaacaugguccugaccugccagggguccgacgacaucaagcggcuccuggacagccagggccgccgcgacaucaagcugaucgacaucgcccucuccaaggcggacagccggcgcuucgagaacgccgugugggaccagugcaaggaccugugccacaugcacacggggguggucguggagaagaagaagcggggcgggaaggaggagaucacgccccacugcgcccugauggacugcaucauguacgacgccgccguguccggcggccucaacaucccgguccugcgcgcggugcugccccgggacaugguguuccgcaccagcucccccaaggucgugcucugaggacuaguaauaaggaaacuguaugaaugucugugggcaggaagugaagagauccuucuguaaagguuuuuggaauuaugucugcugaauaauaaacuuuuuugaaauaauaaaucugguagaaaaaugagaucucaaaggcucuuuucagagccaccaaaaaaaaaaaaaaaaaaaaaaaaaaaaaaaaaaaaaaaaaaaaaaaaaaaaaaaaaaaaaaaaagaauu

SEQ ID NO: 17371 - RNA, 2015 nt, Artificial Sequence
  mRNA product Design b-4 (hSL-A64-N5) comprising derived and/or modified sequence from LASV(LASV035-NIG-2009;Clade II)__AIT17589__NP (opt1)
aggagagucccgcagucggcguccagcggcucugcuuguucgugugugugucguugcaggccuuauucaagcuuaccaugagcgccuccaaggaggugaaguccuuccuguggacccagagccuccgccgggagcugagcggcuacugcuccagcaucaagcugcaggucgugaaggacgcccaggcgcuccugcacgggcuggacuucuccgaggugagcaacguccagcgccucaugcggaagcagaagcgcgacgacuccgaccugaagcggcugcgcgaccucaaccaggccgugaacaaccugguggagcucaagagcacccagcagaaguccauccugcgggucggcacgcugaccagcgacgaccugcucacccuggccgccgaccuggagaagcucaaguccaaggugauccgcaccgagcggccccugagcuccgggguguacaugggcaaccugagcgcccagcagcucgagcagcgccgggcgcugcugaacaugaucgggauggucggcggcgcccaggggacgcagccgggccgcgacgggguggugcgggucugggacgugaagaaccccgaccuccugaacaaccaguucggcaccaugcccucccugacccucgccugccugaccaagcagggccagguggaccugaacgacgccguccucgcgcugacggaccuggggcucaucuacaccgccaaguaccccaacagcuccgaccuggaccgccugagccagagccacccgauccucaacaugguggacaccaagaaguccagccugaacaucuccggcuacaacuucagccugggggccgccgugaaggccggcgcgugcaugcucgacgggggcaacaugcuggagaccaucaaggucacgccccagaccauggacggcauccugaaguccauccucaaggugaagcggagccuggggauguucguguccgacacccccggcgagcgcaaccccuacgagaacauccuguacaagaucugccucagcggggacggcuggccguacaucgccucccggaccagcaucgucgggcgcgccugggagaacacgaccguggaccuggaguccgacggcaagccccagaaggugggcaccaccgggagcaacaagucccugcagagcgccggcuuccccacggggcucaccuacucccagcugaugacccugaaggacagcaugaugcagcuggaccccuccgccaagaccuggaucgacaucgagggccggccggaggaccccgucgagaucgcgcucuaccagcccaugagcgggugcuacauccacuucuuccgcgagcccacggaccugaagcaguucaagcaggacgccaaguacucccacggcaucgacguggccgaccuguucccggcccagcccggccucaccagcgccgucaucgaggcgcugccccggaacauggugcugaccugccaggggagcgacgacaucaagaagcuccuggacucccagggccgccgcgacaucaagcugaucgacaucgcccucagcaaggccgacucccggaaguucgagaacgccgugugggaccagugcaaggaccugugccacaugcacaccggggucgugguggagaagaagaagcgcggcgggaaggaggagaucacgccccacugcgcccugauggacugcaucauguacgacgcggccgucagcggcggccucaacaucccggugcugcgggccgugcugccccgcgacauggucuuccggaccuccagccccaagguggugcucugaggacuaguaauaaggaaacuguaugaaugucugugggcaggaagugaagagauccuucuguaaagguuuuuggaauuaugucugcugaauaauaaacuuuuuugaaauaauaaaucugguagaaaaaugagaucucaaaggcucuuuucagagccaccaaaaaaaaaaaaaaaaaaaaaaaaaaaaaaaaaaaaaaaaaaaaaaaaaaaaaaaaaaaaaaaaagaauu

SEQ ID NO: 17372 - RNA, 2015 nt, Artificial Sequence
  mRNA product Design b-4 (hSL-A64-N5) comprising derived and/or modified sequence from LASV(LASV1000-NIG-2009;Clade II)__AIT17783__NP (opt1)
aggagagucccgcagucggcguccagcggcucugcuuguucgugugugugucguugcaggccuuauucaagcuuaccaugagcgccuccaaggaggugaaguccuuccuguggacccagagccuccgccgggagcugagcggcuacugcuccaacaucaagcugcaggucgugaaggacgcccaggcgcuccugcacgggcuggacuucagcgagguguccaacguccagcgccucaugcggaagcagaagcgcgacgacagcgaccugaagcggcugcgcgaccucaaccaggccgugaacaaccugguggagcugaaguccacccagcagaaguccauccuccgggucggcacgcugaccagcgacgaccugcucacccuggccgccgaccuggagaagcucaagagcaaggugauccgcaccgagcggccccuguccagcgggguguacaugggcaaccuguccacgcagcagcucgagcagcgccgggcccugcugaacaugaucgggauggucggcggcgcgcaggggacccagccgggccgcgacgggguggugcgggucugggacgugaagaaccccgaccuccugaacaaccaguucggcaccaugcccagccugacccucgccugccugacgaagcagggccagguggaccugaacgacgucgugcucgcccugaccgaccuggggcucaucuacaccgccaaguaccccaacuccagcgaccuggaccgccugucccagagccacccgauccucaacaugguggacaccaagaaguccagccugaacaucagcggcuacaacuucucccugggggcggccgucaaggccggcgccugcaugcucgacgggggcaacaugcuggagacgaucaaggugacgccccagaccauggacggcauccucaagagcauccugaaggugaagaagucccuggggauguucgucagcgacacccccggcgagcggaaccccuacgagaacauccuguacaagaucugccucuccggggacggcuggccguacaucgccagccgcaccuccaucguggggcgggcgugggagaacaccaccguggaccuggagagcgacggcaagccccagaaggucggcaccgccggguccaacaagagccugcaguccgccggcuuccccacggggcucaccuacagccagcugaugacccugaaggacuccaugaugcagcuggaccccagcgccaagaccuggaucgacaucgagggccgcccggaggaccccguggagaucgcccucuaccagcccgucuccgggugcuacauccacuucuuccgggagcccacggaccugaagcaguucaagcaggacgcgaaguacagccacggcaucgacguggccgaccuguucccggcccagcccggccucaccuccgccgugaucgaggcccugccccgcaacaugguccugaccugccaggggagcgacgacaucaagcggcuccuggacagccagggccgccgcgacaucaagcugaucgacaucgcgcucuccaaggccgacagccggcgcuucgagaacgccgugugggaccagugcaaggaccugugccacaugcacaccgggguggucguggagaagaagaagcggggcgggaaggaggagaucacgccccacugcgcccugauggacugcaucauguacgacgccgcgguguccggcggccucaacaucccgguccugcgcgccgugcugccccgggacaugguguuccgcaccagcucccccaaggucgugcucugaggacuaguaauaaggaaacuguaugaaugucugugggcaggaagugaagagauccuucuguaaagguuuuuggaauuaugucugcugaauaauaaacuuuuuugaaauaauaaaucugguagaaaaaugagaucucaaaggcucuuuucagagccaccaaaaaaaaaaaaaaaaaaaaaaaaaaaaaaaaaaaaaaaaaaaaaaaaaaaaaaaaaaaaaaaaagaauu

SEQ ID NO: 17373 - RNA, 2015 nt, Artificial Sequence
  mRNA product Design b-4 (hSL-A64-N5) comprising derived and/or modified sequence from LASV(LASV221-NIG-2010;Clade II)__AIT17625__NP (opt1)
aggagagucccgcagucggcguccagcggcucugcuuguucgugugugugucguugcaggccuuauucaagcuuaccaugagcgccuccaaggaggugaaguccuuccuguggacccagagccuccgccgggagcugagcggcuacugcuccagcaucaagcugcaggucgugaaggacgcccaggcgcuccugcacgggcuggacuucuccgaggugagcaacguccagcgccucaugcggaagcagcgccgggacgacuccgaccugaagcgccugcgggaccucaaccaggccgugaacaaccugguggagcucaagagcacccagcagaaguccauccugcgcgucggcacgcugaccagcgacgaccugcucacccuggccgccgaccuggagaagcucaaguccaaggugauccggaccgagcgcccccugagcuccgggguguacaugggcaaccugagcacgcagcagcucgagcagcggcgcgcccugcugaacaugaucgggauggucggcggcgcgcaggggacccagccgggccgggacgggguggugcgcgucugggacgugaagaaccccgaccuccugaacaaccaguucggcaccaugcccucccugacccucgccugccugacgaagcagggccagguggaccugaacgacgccguccucgcccugaccgaccuggggcucaucuacaccgcgaaguaccccaacagcuccgaccuggaccggcugagccagagccacccgauccucaacaugguggacaccaagaaguccagccugaacaucuccggcuacaacuucagccugggggccgccgugaaggccggcgccugcaugcucgacgggggcaacaugcuggagacgaucaaggucacgccccagaccguggacggcauccugaaguccauccucaaggugaagcgcagccuggggauguucgucuccgacacccccggcgagcggaaccccuacgagaacauccuguacaagaucugccucagcggggacggcuggccguacaucgcgucccgcaccagcaucguggggcgggccugggagaacaccaccguggaccuggaguccgacggcaagccccagaaggucggcaccgccgggagcaacaagucccugcagagcgccggcuuccccacggggcucaccuacucccagcugaugacccugaaggacagcaugaugcagcuggaccccuccgccaagaccuggaucgacaucgagggccgcccggaggaccccguggagaucgcgcucuaccagcccaugagcgggugcuacauccacuucuuccgggagcccacggaccugaagcaguucaagcaggacgccaaguacucccacggcaucgacgucgccgaccuguucccggcccagcccggccucaccagcgccgugaucgaggcgcugccccgcaacauggugcugaccugccaggggagcgacgacaucaagcgccuccuggacucccagggccggcgcgacaucaagcugaucgacaucgcccucagcaaggccgacucccggaaguucgagaacgccgucugggaccagugcaaggaccugugccacaugcacaccggggugguggucgagaagaagaagcgcggcgggaaggaggagaucacgccccacugcgcccugauggacugcaucauguacgacgcggccgugagcggcggccucaacaucccggugcugcgggccguccugccccgcgacaugguguuccggaccuccagccccaaggugguccucugaggacuaguaauaaggaaacuguaugaaugucugugggcaggaagugaagagauccuucuguaaagguuuuuggaauuaugucugcugaauaauaaacuuuuuugaaauaauaaaucugguagaaaaaugagaucucaaaggcucuuuucagagccaccaaaaaaaaaaaaaaaaaaaaaaaaaaaaaaaaaaaaaaaaaaaaaaaaaaaaaaaaaaaaaaaaagaauu

SEQ ID NO: 17374 - RNA, 2015 nt, Artificial Sequence
  mRNA product Design b-4 (hSL-A64-N5) comprising derived and/or modified sequence from LASV(LASV237-NIG-2010;Clade II)__AIT17639__NP (opt1)
aggagagucccgcagucggcguccagcggcucugcuuguucgugugugugucguugcaggccuuauucaagcuuaccaugagcgccuccaaggaggugaaguccuuccuguggacccagagccuccgccgggagcugagcggcuacugcuccaacaucaagcugcaggucgugaaggacgcccaggcgcuccugcacgggcuggacuucagcgagguguccaacguccagcgccucaugcggaagcagaagcgcgacgacagcgaccugaagcggcugcgcgaccucaaccaggccgugaacaaccugguggagcugaaguccacccagcagaaguccauccuccgggucggcacccugaccagcgacgaccugcucacccuggccgccgaccuggagaagcucaagagcaaggugauccgcaccgagcggccccuguccagcgggguguacaugggcaaccuguccacgcagcagcucgagcagcgccgggcccugcugaacaugaucgggauggucggcggcgcgcaggggacccagccgggccgcgacgggguggugcgggucugggacgugaagaaccccgaccuccugaacaaccaguucggcaccaugcccagccugacccucgccugccugacgaagcagggccagguggaccugaacgacgccguccucgcccugaccgaccuggggcucaucuacaccgcgaaguaccccaacuccagcgaccuggaccgccugucccagagccacccgauccucaacaugguggacaucaagaaguccagccugaacaucagcggcuacaacuucucccugggggccgccgugaaggccggcgccugcaugcucgacgggggcaacaugcuggagaccaucaaggucacgccccagaccauggacggcauccucaagagcauccugaaggugaagcggucccuggggauguucgugagcgacacccccggcgagcgcaaccccuacgagaacauccuguacaagaucugccucuccggggacggcuggccguacaucgcgagccggaccuccaucgucgggcgcgccugggagaacacgaccguggaccuggagagcgacggcaagccccagaaggugggcuccgccgggagcaacaagucccugcagagcgccggcuuccccaccgggcucaccuacucccagcugaugacgcugaaggacagcaugaugcagcuggaccccuccgccaagaccuggaucgacaucgagggccggccggaggaccccgucgagaucgcgcucuaccagcccaugagcgggugcuacauccacuucuuccgcgagcccaccgaccugaagcaguucaagcaggacgccaaguacucccacggcaucgacguggccgaccuguucccggcccagcccggccucaccagcgccgucaucgaggcgcugccccggaacauggugcugacgugccaggggagcgacgacaucaagcgccuccuggacucccagggccgccgggacaucaagcugaucgacaucgcccucagcaaggccgacucccgccgguucgagaacgccgugugggaccagugcaaggaccugugccacaugcacaccggggucgugguggagaagaagaagcgcggcgggaaggaggagaucacgccccacugcgcccugauggacugcaucauguacgacgcggccgucagcggcggccucaacaucccggugcugcgggccgugcugccccgcgacauggucuuccggaccuccagccccaagguggugcucugaggacuaguaauaaggaaacuguaugaaugucugugggcaggaagugaagagauccuucuguaaagguuuuuggaauuaugucugcugaauaauaaacuuuuuugaaauaauaaaucugguagaaaaaugagaucucaaaggcucuuuucagagccaccaaaaaaaaaaaaaaaaaaaaaaaaaaaaaaaaaaaaaaaaaaaaaaaaaaaaaaaaaaaaaaaaagaauu

SEQ ID NO: 17375 - RNA, 2015 nt, Artificial Sequence
  mRNA product Design b-4 (hSL-A64-N5) comprising derived and/or modified sequence from LASV(LASV253-NIG-2011;Clade II)__AIT17671__NP (opt1)
aggagagucccgcagucggcguccagcggcucugcuuguucgugugugugucguugcaggccuuauucaagcuuaccaugagcgccuccaaggaggugaaguccuuccuguggacccagagccuccgccgggagcugagcggcuacugcuccagcaucaagcugcaggucgugaaggacgcccaggcgcuccugcacgggcuggacuucuccgaggugagcaacguccagcgccucaugcggaagcagaagcgcgacgacuccgaccugaagcggcugcgcgaccucaaccaggccgugaacaaccugguggagcucaagagcacccagcagaaguccguccugcgggugggcacccugaccagcgacgaccugcucacccuggccgccgaccuggagaagcucaaguccaaggugauccgcaccgagcggccccugagcuccggggucuacaugggcaaccugagcacgcagcagcucgagcagcgccgggcccugcugaacaugaucgggauggugggcggcgcgcaggggacccagccgggccgcgacggggugguccgggugugggacgugaagaaccccgaccuccugaacaaccaguucggcaccaugcccucccugacccucgccugccugacgaagcaggggcaggucgaccugaacgacguggugcucgcccugaccgaccugggccucaucuacaccgccaaguaccccaacagcuccgaccuggaccgccugagccagagccacccgauccucaacauggucgacaccaagaaguccagccugaacaucuccggcuacaacuucagccugggggcggccgugaaggccggcgccugcaugcucgacgggggcaacaugcuggagacgaucaaggugacgccccagaccauggacggcauccugaaguccauccucaaggucaagaagucccuggggauguucgugagcgacacccccggcgagcggaaccccuacgagaacauccuguacaagaucugccucagcggggacggcuggccguacaucgccucccgcaccagcaucguggggcgggcgugggagaacaccaccgucgaccuggaguccgacggcaagccccagaaggugggcaccgccgggagcaacaagucccugcagagcgccggcuuccccacggggcucaccuacucccagcugaugacccugaaggacagcaugaugcagcuggaccccuccgccaagaccuggaucgacaucgagggccgcccggaggaccccgucgagaucgcccucuaccagcccaugagcgggugcuacauccacuucuuccgggagcccacggaccugaagcaguucaagcaggacgcgaaguacucccacggcaucgacgugaccgaccuguucccggcccagcccggccucaccagcgccgugaucgaggcccugccccgcaacaugguccugaccugccaggggagcgacgacaucaagcggcuccuggacucccagggccgccgcgacaucaagcugaucgacaucgcccucagcaaggcggacucccggcgcuucgagaacgccgugugggaccagugcaaggaccugugccacaugcacacggggguggucguggagaagaagaagcggggcgggaaggaggagaucacgccccacugcgcccugauggacugcaucauguacgacgccgccgugagcggcggccucaacaucccgguccugcgcgcggugcugccccgggacaugguguuccgcaccuccagccccaaggucgugcucugaggacuaguaauaaggaaacuguaugaaugucugugggcaggaagugaagagauccuucuguaaagguuuuuggaauuaugucugcugaauaauaaacuuuuuugaaauaauaaaucugguagaaaaaugagaucucaaaggcucuuuucagagccaccaaaaaaaaaaaaaaaaaaaaaaaaaaaaaaaaaaaaaaaaaaaaaaaaaaaaaaaaaaaaaaaaagaauu

SEQ ID NO: 17376 - RNA, 2015 nt, Artificial Sequence
  mRNA product Design b-4 (hSL-A64-N5) comprising derived and/or modified sequence from LASV(LASV254-NIG-2011;Clade II)__AIT17675__NP (opt1)
aggagagucccgcagucggcguccagcggcucugcuuguucgugugugugucguugcaggccuuauucaagcuuaccaugagcgccuccaaggaggugaaguccuuccuguggacccagagccuccgccgggagcugagcggcuacugcuccagcaucaagcugcaggucgugaaggacgcccaggcgcuccugcacgggcuggacuucuccgaggugagcaacguccagcgccucaugcggaagcagaagcgcgacgacuccgaccugaagcggcugcgcgaccucaaccaggccgugaacaaccugguggagcucaagagcacccagcagaaguccguccugcgggugggcacgcugaccagcgacgaccugcucacccuggccgccgaccuggagaagcucaaguccaaggugauccgcaccgagcggccccugagcuccggggucuacaugggcaaccugagcacgcagcagcucgagcagcgccgggcccugcugaacaugaucgggauggugggcggcgcgcaggggacccagccgggccgcgacggggugguccgggugugggacgugaagaaccccgaccuccugaacaaccaguucggcaccaugcccucccugacccucgccugccugacgaagcaggggcaggucgaccugaacgacgccgugcucgcccugaccgaccugggccucaucuacaccgcgaaguaccccaacagcuccgaccuggaccgccugagccagagccacccgauccucaacaugguggacaccaagaaguccagccugaacaucuccggcuacaacuucagccugggggccgccgucaaggccggcgccugcaugcucgacgggggcaacaugcuggagacgaucaaggugacgccccagaccauggacggcauccugaaguccauccucaaggugaagaagucccuggggauguucgucagcgacacccccggcgagcggaaccccuacgagaacauccuguacaagaucugccucagcggggacggcuggccguacaucgcgucccgcaccagcaucguggggcgggccugggagaacaccaucguggaccuggaguccgacggcaagccccagaaggucggcaccgccgggagcaacaagucccugcagagcgccggcuuccccaccgggcucacguacucccagcugaugacccugaaggacagcaugaugcagcuggaccccuccgccaagaccuggaucgacaucgagggccgcccggaggaccccguggagaucgcgcucuaccagcccaugagcgggugcuacauccacuucuuccgggagcccaccgaccugaagcaguucaagcaggacgccaaguacucccacggcaucgacgucgccgaccuguucccggcccagcccggccucacgagcgccgugaucgaggcgcugccccgcaacauggugcugaccugccaggggagcgacgacaucaagcggcuccuggacucccagggccgccgcgacaucaagcugaucgacaucgcccucagcaaggccgacucccggcgcuucgagaacgccgucugggaccagugcaaggaccugugccacaugcacaccggggugguggucgagaagaagaagcggggcgggaaggaggagaucacgccccacugcgcccugauggacugcaucauguacgacgcggccgugagcggcggccucaacaucccggugcugcgcgccguccugccccgggacaugguguuccgcaccuccagccccaaggugguccucugaggacuaguaauaaggaaacuguaugaaugucugugggcaggaagugaagagauccuucuguaaagguuuuuggaauuaugucugcugaauaauaaacuuuuuugaaauaauaaaucugguagaaaaaugagaucucaaaggcucuuuucagagccaccaaaaaaaaaaaaaaaaaaaaaaaaaaaaaaaaaaaaaaaaaaaaaaaaaaaaaaaaaaaaaaaaagaauu

SEQ ID NO: 17377 - RNA, 2015 nt, Artificial Sequence
  mRNA product Design b-4 (hSL-A64-N5) comprising derived and/or modified sequence from LASV(Nig08-04;Clade II)__ADU56611__NP (opt1)
aggagagucccgcagucggcguccagcggcucugcuuguucgugugugugucguugcaggccuuauucaagcuuaccaugagcgccuccaaggaggugaaguccuuccuguggacccagagccuccgccgggagcugagcggcuacugcuccaacaucaagcugcaggucgugaaggacgcccaggcgcuccugcacgggcuggacuucagcgagguguccaacguccagcgccucaugcggaagcagaagcgcgacgacggcgaccugaagcggcugcgcgaccucaaccaggccgugaacaaccugguggagcucaagagcacccagcagaaguccguccugcggguggggacccugaccagcgacgaccugcucacccuggccgccgaccuggagaagcucaaguccaaggugauccgcaccgagcggccccugagcuccggcgucuacauggggaaccugagcacgcagcagcucgagcagcgcaaggcccugcuguccaugaucggcauggugggcggggcgcagggcacccagccggggcgggacggcgugguccgcgugugggacgugaagaaccccgaccuccugaacaaccaguucgggaccaugcccagccugacccucgccugccugacgaagcagggccaggucgaccugaacgacgccgugcucgcccugaccgaccugggccucaucuacaccgcgaaguaccccaacuccagcgaccuggaccggcugucccagagccacccgauccucaacaugguggacaccaagaaguccagccugaacaucagcggguacaacuucucccugggcgccgccgucaaggccggggccugcaugcucgacggcggcaacaugcuggagacgaucaaggugacgccccagaccauggacgggauccucaagagcauccugaaggugaagcgcucccugggcauguucgucagcgacacccccggggagcggaaccccuacgagaacauccuguacaagaucugccucuccggcgacggguggccguacaucgcgagccgcaccuccaucgugggccgggccugggagaacaccaccguggaccuggagagcgacggcaagccccagaaggucgggaccgccggcuccaacaagagccugcaguccgccggguuccccacgggccucaccuacagccagcugaugacccugaaggacuccaugaugcagcuggaccccagcgccaagaccuggaucgacaucgaggggcgcccggaggaccccguggagaucgcgcucuaccagcccauguccggcugcuacauccacuucuuccgggagcccacggaccugaagcaguucaagcaggacgccaaguacagccacggcaucgacgucaccgaccuguucuccgcccagccggggcucaccagcgccgugaucgaggcccugccccgcaacauggugcugaccugccagggcagcgacgacaucaagaagcuccuggacucccaggggcggcgcgacaucaagcugaucgacaucagccucaacaaggcggacucccgccgguucgagaacgccgucugggaccagugcaaggaccugugccacaugcacacgggcgugguggucgagaagaagaagcgcgggggcaaggaggagaucacgccccacugcgcccugauggacugcaucauguucgacgccgccgugagcggcgggcucaacauccccauccugcgggcggugcugccgcgcgacauggucuuccggaccuccagccccaagguggugcucugaggacuaguaauaaggaaacuguaugaaugucugugggcaggaagugaagagauccuucuguaaagguuuuuggaauuaugucugcugaauaauaaacuuuuuugaaauaauaaaucugguagaaaaaugagaucucaaaggcucuuuucagagccaccaaaaaaaaaaaaaaaaaaaaaaaaaaaaaaaaaaaaaaaaaaaaaaaaaaaaaaaaaaaaaaaaagaauu

SEQ ID NO: 17378 - RNA, 2018 nt, Artificial Sequence
  mRNA product Design b-4 (hSL-A64-N5) comprising derived and/or modified sequence from LASV(GA391;Clade III)__AAA46284__NP (opt1)
aggagagucccgcagucggcguccagcggcucugcuuguucgugugugugucguugcaggccuuauucaagcuuaccaugagcgccuccaaggaggugcgcagcugccuguggacccagucccuccggcgcgagcugagcggcuacugcuccaacaucaagcugcaggucgugaaggacgcccaggcgcuccugcacgggcuggacuucagcgagguguccaacguccagcggcucaugcgcaagcagaagcgggacgacggcgaccugaagcgccugcgggaccucaaccaggccgugaacaaccugguggagcugaaguccacccagcagaaguccguccuccgcguggggacgcugagcuccgacgaccugcucauccuggccgccgaccuggagaagcucaagagcaaggugacccggaccgagcgcccccuguccagcggcgucuacauggggaaccuguccagccagcagcucgaccagcggcgcgcccugcugaacaugaucggcaugaccggcguguccgggggcgggaagggcgcgagcaacgggaucgugcgggucugggacgugaagaacgccgagcuccugaacaaccaguucggcacgaugccgucccugacccucgccugccugaccaagcagggccagguggaccugaacgacgccguccaggcgcucaccgaccuggggcugaucuacacggccaaguaccccaacagcagcgaccucgaccgccugucccagagccaccccauccugaacaugaucgacaccaagaaguccagccucaacaucuccggcuacaacuucagccugggggccgccgugaaggccggcgcgugcaugcuggacggcgggaacaugcucgagaccaucaaggugagcccccagaccauggacggcauccucaagagcauccugaaggucaagaagucccuggggauguucgugagcgacacgccgggcgagcggaaccccuacgagaacauccuguacaagaucugccuguccggggacggcuggagcuacaucgccucccgcaccagcaucgugggccgggccugggagaacaccgucguggaccucgagcaggacaacaagccccagaagaucgggaacggcggguccaacaagagccugcaguccgccggcuucgccgcggggcugaucuacagccagcucaugacccugaaggacuucaagugcuucaaccugauccccaacgccaagacguggauggacaucgagggccgcccggaggaccccguggagaucgcccuguaccagcccuccagcggcugcuacguccacuucuuccgggagcccaccgaccucaagcaguucaagcaggacgccaaguacagccacgggcgcgacgugaccgaccuguucgccgcgcagccgggccugaccuccgccgucaucgaggcccucccccggaacauggugaucacgugccaggggagcgaggacauccgcaagcugcuggagucccagggccgccgggacaucaagcucaucgacaucacccugagcaaggccgacucccgcaaguucgagaacgccgugugggaccaguucaaggaccugugccacaugcacaccggggucgugguggagaagaagaagcggggcggcaaggaggagaucacgccccacugcgcgcucauggacugcaucauguucgacgccgccgucagcgggggccuggacgccaaggugcugcgcgugguccucccccgggacaugguguuccgcaccuccaccccgaaggugguccugugaggacuaguaauaaggaaacuguaugaaugucugugggcaggaagugaagagauccuucuguaaagguuuuuggaauuaugucugcugaauaauaaacuuuuuugaaauaauaaaucugguagaaaaaugagaucucaaaggcucuuuucagagccaccaaaaaaaaaaaaaaaaaaaaaaaaaaaaaaaaaaaaaaaaaaaaaaaaaaaaaaaaaaaaaaaaagaauu

SEQ ID NO: 17379 - RNA, 2015 nt, Artificial Sequence
  mRNA product Design b-4 (hSL-A64-N5) comprising derived and/or modified sequence from LASV(Nig08-A19;Clade III)__ADU56619__NP (opt1)
aggagagucccgcagucggcguccagcggcucugcuuguucgugugugugucguugcaggccuuauucaagcuuaccaugagcgccuccaaggaggugaaguccuuccuguggacccagucccuccgccgggagcugagcggcuacugcuccaacaucaagcugcaggucgugaaggacgcccaggcgcuccugcacgggcuggacuucagcgagguguccaacguccagcgccucaugcggaagcagaagcgcgacgacggcgaccugaagcggcugcgcgaccucaaccaggccgugaacaaccugguggagcucaagagcacccagcagaaguccguccugcggguggggacccugagcuccgacgaccugcucgugcuggccgccgaccuggagaagcucaagagcaaggucgugcgcaccgagcggccccuguccagcggcaucuacauggggaaccuguccagccagcagcucgaccagcgcaaggcccugcugaacaugaucggcaugaccggcgggaacggcgggcggaacaccacguccgacggcaucgugcgcgucugggacgugaagaacgcggagcuccugaacaaccaguucgggaccaugccgagccugacccucgccugccugaccaagcagggccagguggaccugaacgacgccguccaggcccucacggaccugggccugaucuacaccgcgaaguaccccaacuccagcgaccucgaccggcuggcccagagccaccccauccugaacaugaucgacaccaagaaguccagccucaacaucuccggguacaacuucagccugggcgccgccgugaaggccggggcgugcaugcuggacggcggcaacaugcucgagaccaucaaggugagcccccagacgauggacgggauccucaagagcauccugaaggucaagcgcucccugggcauguucaucagcgacaccccgggggagcggaaccccuacgagaacauccuguacaagaucugccuguccggcgacggguggcccuacaucgccagccgcaccuccaucgugggccgggccugggagaacaccguggucgaccucgagagcgacaacaagccccagaagacgggcaacgggggcuccaacaagagccugcaguccgccggguucgccgcgggccugaccuacagccagcucaugacccugaaggacuccaugcugcagcuggacccgaacgccaagaccuggauggacaucgaggggcgccccgaggaccccguggagaucgcccucuaccagcccagcuccggcugcuacauccacuucuuccgggagccgacggaccugaagcaguucaagcaggacgccaaguacagccacggcaucgacgugaccgaccuguucgccgcgcagcccgggcucaccagcgccgucaucgaggcccugccccgcaacauggugaucacgugccagggcuccgaggacauccggaagcugcucgagagccaggggcgccgcgacaucaagcugaucgacaucucccugagcaaggucgacucccggaaguucgagaacgccgugugggaccaguucaaggaccucugccacaugcacaccggcaucguggucgagaagaagaagcgcgggggcaaggaggagaucacgccccacugcgcccugauggacugcaucauguucgacgcggccgugagcggcgggguggacgccaagguccugcgggccgugcucccgcgcgacaugguguuccggaccuccacccccaaggucgugcugugaggacuaguaauaaggaaacuguaugaaugucugugggcaggaagugaagagauccuucuguaaagguuuuuggaauuaugucugcugaauaauaaacuuuuuugaaauaauaaaucugguagaaaaaugagaucucaaaggcucuuuucagagccaccaaaaaaaaaaaaaaaaaaaaaaaaaaaaaaaaaaaaaaaaaaaaaaaaaaaaaaaaaaaaaaaaagaauu

SEQ ID NO: 17380 - RNA, 2015 nt, Artificial Sequence
  mRNA product Design b-4 (hSL-A64-N5) comprising derived and/or modified sequence from LASV(G1180-SLE-2010;Clade IV)__AIT17169__NP (opt1)
aggagagucccgcagucggcguccagcggcucugcuuguucgugugugugucguugcaggccuuauucaagcuuaccaugagcgccuccaaggagaucaagagcuuccuguggacccagucccuccgccgggagcugagcggcuacugcuccaacaucaagcuccagguggucaaggacgcccaggcgcugcugcacgggcuggacuucagcgagguguccaacgugcagcgccucaugcggaaggagcgccgggacgacaacgaccugaagcgccugcgggaccucaaccaggccgucaacaaccugguggagcucaagagcacccagcagaaguccauccugcgcgugggcacccugaccagcgacgaccugcucauccuggccgccgaccuggagaagcucaaguccaaggucauccggaccgagcgcccccugagcgccgggguguacaugggcaaccuguccagccagcagcucgaccagcggcgcgcgcugcuguccaugaucgggaugagcuccggcaaccagcgggcccaggccggccgcgacggggugguccgggugugggacgugaagaacgucgagcuccugaacaaccaguucggcaccaugccgagccugacgcucgccugccugaccaagcagggccagguggaccugaacgacgcggugcaggcccucaccgaccuggggcugaucuacaccgccaaguaccccaacacguccgaccucgaccgccugacccagagccaccccauccugaacaugaucgacaccaagaaguccagccucaacaucagcggguacaacuucucccugggcgccgccgucaaggcgggcgccugcaugcuggacgggggcaacaugcucgagaccaucaaggugagcccccagacgauggacgggauccugaaguccauccugaaggugaagaaggcccucggcauguucaucagcgacaccccgggcgagcggaaccccuacgagaacauccuguacaagaucugccuguccggggacggcuggcccuacaucgccagccgcaccuccaucaccgggcgggccugggagaacacggucguggaccucgagagcgacggcaagccccagaaggcgggguccaacaacagcaacaagucccugcagagcgugggcuucaccgccggccugaccuacucccagcucaugacccugaaggacgccaugcugcagcuggacccgaacgccaagacguggauggacaucgaggggcgccccgaggaccccgucgagaucgcccucuaccagcccagcuccggcugcuacauccacuucuuccgggagccgaccgaccugaagcaguucaagcaggacgcgaaguacagccacgggaucgacgugaccgaccuguucgccgcccagcccggccucaccuccgccgugaucgacgcccugccccgcaacauggucaucacgugccaggggagcgacgacauccgcaagcugcucgagagccagggccggaaggacaucaagcugaucgacaucgcgcuguccaagaccgacagccgcaaguacgagaacgccgugugggaccaguacaaggaccucugccacaugcacaccggcgucgugguggagaagaagaagcgcgggggcaaggaggagaucacgccccacugcgcccugauggacugcaucauguucgacgccgcggucuccgggggccugaacaccagcgugcuccgggccgugcugccgcgggacauggucuuccgcaccuccacgccccggguggugcugugaggacuaguaauaaggaaacuguaugaaugucugugggcaggaagugaagagauccuucuguaaagguuuuuggaauuaugucugcugaauaauaaacuuuuuugaaauaauaaaucugguagaaaaaugagaucucaaaggcucuuuucagagccaccaaaaaaaaaaaaaaaaaaaaaaaaaaaaaaaaaaaaaaaaaaaaaaaaaaaaaaaaaaaaaaaaagaauu

SEQ ID NO: 17381 - RNA, 2015 nt, Artificial Sequence
  mRNA product Design b-4 (hSL-A64-N5) comprising derived and/or modified sequence from LASV(G1442-SLE-2011;Clade IV)__AIT17181__NP (opt1)
aggagagucccgcagucggcguccagcggcucugcuuguucgugugugugucguugcaggccuuauucaagcuuaccaugagcgccuccaaggaggugaaguccuuccuguggacccagagccuccgccgggagcugagcggcuacugcuccaacaucaagcugcaggucgugaaggacgcccaggcgcuccugcacgggcuggacuucagcgagguguccaacguccagcgccucaugcggaagcagcgccgggacgacaacgaccugaagcgccugcgggaccucaaccaggccgugaacaaccugguggagcucaagagcacccagcagaaguccguccugcgcgugggcacccugaccagcgacgaccugcucgugcuggccgccgaccuggagaagcucaaguccaaggucauccggaccgagcgcccccugagcgccgggguguacaugggcaaccuguccagccagcagcucgaccagcggcgcgcgcugcugaacaugaucgggauguccggcggcauccaggggacccggacgggccgcgacggggugguccgggugugggacgugaagaacgccgaccuccugaacaaccaguucggcaccaugccgagccugacccucgccugccugaccaagcaggggcaggucgaccugaacgacguggugcaggcccucacggaccugggccugaucuacaccgcgaaguaccccaacgccuccgaccucgaccgccugacccagagccaccccauccugaacaugaucgacaccaagaaguccagccucaacaucagcggcuacaacuucucccugggggccgccgucaaggccggcgcgugcaugcuggacgggggcaacaugcucgagacgaucaaggugagcccccagaccauggacggcauccugaaguccauccugaaggugaagaagacccucgggauguucaucagcgacaccccgggcgagcggaaccccuacgagaacauccuguacaagaucugccuguccggggacggcuggcccuacaucgccagccgcacguccaucaccgggcgggccugggagaacaccgucguggaccucgagagcgacggcaagccccagaaggccggcuccaacaacagcaacaagucccugcagagcgccggguucgcggccggccugaccuacucccagcucaugacgcugaaggacgccaugcugcagcuggacccgaacgccaagaccuggauggacaucgaggggcgccccgaggaccccguggagaucgcccucuaccagcccagcuccggcugcuacauccacuucuuccgggagccgaccgaccugaagcaguucaagcaggacgcgaaguacagccacgggaucgacgucaccgaccuguucgccgcccagcccggccucacguccgccgugaucgaggcccugccccgcaacauggucaucacgugccagggcagcgacgacaucaagaagcugcucgagucccaggggcgcaaggacaucaagcugaucgacaucgcgcugagcaagaccgacagccggaaguacgagaacgccgugugggaccaguacaaggaccucugccacaugcacaccggcguggucguggagaagaagaagcgcgggggcaaggaggagaucaccccgcacugcgcccugauggacugcaucauguucgacgccgcgguguccgggggccugaacacccucguccugcgggccgugcugccccgcgacaugguguuccggaccagcacgccccgcgucgugcucugaggacuaguaauaaggaaacuguaugaaugucugugggcaggaagugaagagauccuucuguaaagguuuuuggaauuaugucugcugaauaauaaacuuuuuugaaauaauaaaucugguagaaaaaugagaucucaaaggcucuuuucagagccaccaaaaaaaaaaaaaaaaaaaaaaaaaaaaaaaaaaaaaaaaaaaaaaaaaaaaaaaaaaaaaaaaagaauu

SEQ ID NO: 17382 - RNA, 2015 nt, Artificial Sequence
  mRNA product Design b-4 (hSL-A64-N5) comprising derived and/or modified sequence from LASV(G3010-SLE-2013;Clade IV)__AIT17345__NP (opt1)
aggagagucccgcagucggcguccagcggcucugcuuguucgugugugugucguugcaggccuuauucaagcuuaccaugagcgccuccaaggagaucaagagcuuccuguggacccagucccuccgccgggagcugagcggcuacugcuccaacaucaagcuccagguggucaaggacgcccaggcgcugcugcacgggcuggacuucagcgagguguccaacgugcagcgccucaugcggaaggagcgccgggacgacaacgaccugaagcgccugcgggaccucaaccaggccgucaacaaccugguggagcucaagagcacccagcagaaguccauccugcgcgugggcacccugaccagcgacgaccugcucauccuggccgccgaccuggagaagcucaaguccaaggucacccggaccgagcgcccccugagcgccgggguguacaugggcaaccuguccagccagcagcucgaccagcggcgcgcgcugcuguccaugaucgggaugagcuccggcgugcagggcgcccgggccgggcgcgacggcgucgugcgggugugggacgucaagaacgccgagcuccugaacaaccaguucgggacgaugccgagccugacccucgcgugccugaccaagcagggccagguggaccugaacgacgugguccaggcccucaccgaccuggggcugaucuacacggccaaguaccccaacaccuccgaccucgaccgccugacccagagccaccccauccugaacaugaucgacaccaagaaguccagccucaacaucagcggcuacaacuucucccugggcgccgccgugaaggcgggggccugcaugcuggacggcgggaacaugcucgagacgaucaaggugagcccccagaccauggacggcauccugaaguccauccugaaggucaagaaggcccucggcauguucaucagcgagaccccgggggagcggaaccccuacgagaacauccuguacaagaucugccuguccggcgacggguggcccuacaucgccagccgcaccuccaucacgggccgggccugggagaacaccgugguggaccucgagagcgacgggaagccccagaaggcgggcuccaacaacagcaacaagucccugcagagcgccggcuucaccgccgggcugaccuacucccagcucaugacgcugaaggacgccaugcugcagcuggacccgaacgccaagaccuggauggacaucgagggccgccccgaggaccccgucgagguggcgcucuaccagcccagcuccgggugcuacauccacuucuuccgggagccgaccgaccugaagcaguucaagcaggacgccaaguacagccacggcaucgacgugaccgaccuguucgccgcccagcccgggcucacguccgccgucaucgacgcgcugccccgcaacauggugaucacgugccagggcagcgacgacaucaagaagcugcucgagagccagggccgcaaggacaucaagcugaucgacaucgcccuguccaagaccgacagccggaaguacgagaacgccgucugggaccaguacaaggaccucugccacaugcacaccggggugguggucgagaagaagaagcgcggcgggaaggaggagaucaccccgcacugcgcccugauggacugcaucauguucgacgcggccguguccggcgggcugaacaccagcgugcuccgggccguccugccccgcgacaugguguuccggaccuccacgccccgcgugguccugugaggacuaguaauaaggaaacuguaugaaugucugugggcaggaagugaagagauccuucuguaaagguuuuuggaauuaugucugcugaauaauaaacuuuuuugaaauaauaaaucugguagaaaaaugagaucucaaaggcucuuuucagagccaccaaaaaaaaaaaaaaaaaaaaaaaaaaaaaaaaaaaaaaaaaaaaaaaaaaaaaaaaaaaaaaaaagaauu

SEQ ID NO: 17383 - RNA, 2015 nt, Artificial Sequence
  mRNA product Design b-4 (hSL-A64-N5) comprising derived and/or modified sequence from LASV(G502-SLE-2009;Clade IV)__AIT17127__NP (opt1)
aggagagucccgcagucggcguccagcggcucugcuuguucgugugugugucguugcaggccuuauucaagcuuaccaugagcgccuccaaggagaucaagagcuuccuguggacccagucccuccgccgggagcugagcggcuacugcuccaacaucaagcuccagguggucaaggacgcccaggcgcugcugcacgggcuggacuucagcgagguguccaacgugcagcgccucaugcggaaggagcgccgggacgacaacgaccugaagcgccugcgggaccucaaccaggccgucaacaaccugguggagcucaagagcacccagcagaaguccauccugcgcgugggcacccugaccagcgacgaccugcucauccuggccgccgaccuggagaagcucaaguccaaggucauccggaccgagcgcccccugagcgccgggguguacaugggcaaccuguccagccagcagcucgaccagcggcgcgcgcugcuguccaugaucgggaugagcggcggcaaccagggggugcgggccggcaaggacggggucgugcgcgugugggacgucaagaacgccgagcuccugaacaaccaguucggcaccaugccgucccugacgcucgccugccugaccaagcagggccagguggaccugaacgacgcggugcaggcccucaccgaccuggggcugaucuacaccgccaaguaccccaacacgagcgaccucgaccggcugacccagucccaccccauccugaacaugaucgacaccaagaaguccagccucaacaucuccggcuacaacuucagccugggggccgccgucaaggcgggcgccugcaugcuggacgggggcaacaugcucgagaccaucaaggugagcccccagacgauggacggcauccucaagagcauccugaaggugaagaaggcccuggggauguucaucuccgacaccccgggcgagcgcaaccccuacgagaacauccuguacaagaucugccugagcggggacggcuggcccuacaucgccucccggaccagcaucaccgggcgcgccugggagaacacggucguggaccucgaguccgacggcaagccccagaaggcgggcagcaacaacuccaacaagagccugcaguccgccggguucaccgccggccugaccuacagccagcucaugacccugaaggacgccaugcugcagcuggacccgaacacgaagaccuggauggacaucgaggggcggcccgaggaccccguggagaucgcccucuaccagcccuccagcggcugcuacauccacuucuuccgcgagccgaccgaccugaagcaguucaagcaggacgcgaaguacucccacgggaucgacgucaccgaccuguucgccgcccagcccggccucacgagcgccgugaucgacgcccugccccggaacauggugaucacgugccagggcuccgacgacauccgcaagcugcucgagagccaggggcgcaaggacaucaagcugaucgacaucgcgcugaacaagaccgacagccggaaguacgagaacgccgucugggaccaguacaaggaccucugccacaugcacaccggcguggucguggagaagaagaagcgcgggggcaaggaggagaucaccccgcacugcgcccugauggacugcaucauguucgacgccgcgguguccgggggccugaacaccagcguccuccgggccgugcugccccgcgacaugguguuccggaccuccacgccccgcgucgugcugugaggacuaguaauaaggaaacuguaugaaugucugugggcaggaagugaagagauccuucuguaaagguuuuuggaauuaugucugcugaauaauaaacuuuuuugaaauaauaaaucugguagaaaaaugagaucucaaaggcucuuuucagagccaccaaaaaaaaaaaaaaaaaaaaaaaaaaaaaaaaaaaaaaaaaaaaaaaaaaaaaaaaaaaaaaaaagaauu

SEQ ID NO: 17384 - RNA, 2015 nt, Artificial Sequence
  mRNA product Design b-4 (hSL-A64-N5) comprising derived and/or modified sequence from LASV(G733-SLE-2010;Clade IV)__AIT17155__NP (opt1)
aggagagucccgcagucggcguccagcggcucugcuuguucgugugugugucguugcaggccuuauucaagcuuaccaugagcgccuccaaggagaucaagagcuuccuguggacccagucccuccgccgggagcugagcggcuacugcuccaacaucaagcuccagguggucaaggacgcccaggcgcugcugcacgggcuggacuucagcgagguguccaacgugcagcgccucaugcggaaggagcgccgggacgacaacgaccugaagcgccugcgggaccucaaccaggccgucaacaaccugguggagcucaagagcacccagcagaaguccgugcugcgcgucggcacccugaccagcgacgagcugcucgugcuggccgccgaccuggagaagcucaaguccaaggugauccggaccgagcgcccccugagcgccggggucuacaugggcaaccuguccagccagcagcucgaccagcggcgcgcgcugcuguccaugaucgggaugagcggcggcaaccagggggcccggaccggccgcgacgggguggugcgggucugggacgugaagaacgccgagcuccugaacaaccaguucggcaccaugccgucccugacccucgccugccugaccaagcagggccagguggaccugaacgacgcgguccaggcccucaccgaccuggggcugaucuacacggccaaguaccccaacaccagcgaccucgaccgccugacccagucccaccccauccugaacaugaucgacaccaagaaguccagccucaacaucuccggcuacaacuucagccugggggccgccgugaaggcgggcgccugcaugcuggacgggggcaacaugcucgagacgaucaaggugagcccccagaccauggacggcauccucaagagcauccugaaggucaagaaggcccuggggauguucaucuccgacaccccgggcgagcggaaccccuacgagaacauccuguacaagaucugccugagcggggacggcuggcccuacaucgccucccgcaccagcaucacggggcgggccugggagaacaccgugguggaccucgaguccgacggcaagccccagaaggcgggcagcaacaacuccaacaagagccugcaguccgccggguucaccgccggccugaccuacagccagcucaugacgcugaaggacgccaugcugcagcuggacccgaacgccaagaccuggauggacaucgaggggcgccccgaggaccccgucgagaucgcgcucuaccagcccuccagcggcugcuacauccacuucuuccgggagccgaccgaccugaagcaguucaagcaggacgccaaguacucccacgggaucgacgugaccgaccuguucgccgcccagcccggccucacgagcgccgugaucgacgcgcugccccgcaacauggucaucacgugccagggcuccgacgacauccgcaagcugcucgagagccaggggcggaaggacaucaagcugaucgacaucgcccugagcaagaucgacucccgcaaguacgagaacgccgugugggaccaguacaaggaccucugccacaugcacaccggcgucgugguggagaagaagaagcgcgggggcaaggaggagaucacgccccacugcgcccugauggacugcaucauguucgacgcggccgucagcgggggccugaacucccucgugcugcgggccgugcugccgcgggacauggucuuccgcaccagcacgccccggguggugcucugaggacuaguaauaaggaaacuguaugaaugucugugggcaggaagugaagagauccuucuguaaagguuuuuggaauuaugucugcugaauaauaaacuuuuuugaaauaauaaaucugguagaaaaaugagaucucaaaggcucuuuucagagccaccaaaaaaaaaaaaaaaaaaaaaaaaaaaaaaaaaaaaaaaaaaaaaaaaaaaaaaaaaaaaaaaaagaauu

SEQ ID NO: 17385 - RNA, 2015 nt, Artificial Sequence
  mRNA product Design b-4 (hSL-A64-N5) comprising derived and/or modified sequence from MOPV/LASV reassortant(IGS-1;Clade IV)__AFY05578__NP (opt1)
aggagagucccgcagucggcguccagcggcucugcuuguucgugugugugucguugcaggccuuauucaagcuuaccaugagcgccuccaaggagaucaagagcuuccuguggacccagucccuccgccgggagcugagcggcuacugcuccaacaucaagcuccagguggucaaggacgcccaggcgcugcugcacgggcuggacuucagcgagguguccaacgugcagcgccucaugcggaaggagcgccgggacgacaacgaccugaagcgccugcgggaccucaaccaggccgucaacaaccugguggagcucaagagcacccagcagaaguccauccugcgcgugggcacccugaccagcgacgaccugcucauccuggccgccgaccuggagaagcuccgguccaaggucauccgcaccgagcggccccugagcgccgggguguacaugggcaaccuguccagccagcagcucgaccagcgccgggcgcugcugaacaugaucgggauguccggcggcaaccagggggcccgcgccggccgggacggggugguccgcgugugggacgugaagaacgccgagcuccugagcaaccaguucggcaccaugccgucccugacgcucgcgugccugaccaagcaggggcaggucgaccugaacgacgccgugcaggcccucaccgaccugggccugaucuacaccgccaaguaccccaacacgagcgaccucgaccggcugacccagucccaccccauccugaacaugaucgacaccaagaaguccagccucaacaucuccggcuacaacuucagccugggggccgcggugaaggccggcgccugcaugcuggacgggggcaacaugcucgagaccaucaaggucagcccccagacgauggacggcauccucaagagcauccugaaggugaagaaggcccuggggauguucaucuccgacaccccgggcgagcgcaaccccuacgagaacauccuguacaagaucugccugagcggggacggcuggcccuacaucgccucccggaccagcaucaccgggcgcgcgugggagaacacgguggucgaccucgaguccgacggcaagccccagaaggccgacagcaacaacuccagcaagucccugcagagcgccggcuucaccgccgggcugaccuacucccagcucaugacccugaaggacgccaugcugcagcuggacccgaacgcgaagacguggauggacaucgagggccggcccgaggaccccguggagaucgcccucuaccagcccagcuccgggugcuacauccacuucuuccgcgagccgaccgaccugaagcaguucaagcaggacgccaaguacagccacggcaucgacgugaccgaccuguucgccacccagcccgggcucacguccgccgucaucgacgcgcugccccgcaacauggugaucacgugccagggcagcgacgacauccggaagcugcucgagagccagggccgcaaggacaucaagcugaucgacaucgaccuguccaagaccgacagccggaaguacgagaacgccgugugggaccaguacaaggaccucugccacaugcacaccggggucguggucgagaagaagaagcgcggcgggaaggaggagaucaccccgcacugcgcccugauggacugcaucauguucgacgccgcgguguccggcgggcugaacaccagcgugcuccgggccguccugccccgcgacaugguguuccggaccuccacgccccgcgugguccugugaggacuaguaauaaggaaacuguaugaaugucugugggcaggaagugaagagauccuucuguaaagguuuuuggaauuaugucugcugaauaauaaacuuuuuugaaauaauaaaucugguagaaaaaugagaucucaaaggcucuuuucagagccaccaaaaaaaaaaaaaaaaaaaaaaaaaaaaaaaaaaaaaaaaaaaaaaaaaaaaaaaaaaaaaaaaagaauu

SEQ ID NO: 17386 - RNA, 2015 nt, Artificial Sequence
  mRNA product Design b-4 (hSL-A64-N5) comprising derived and/or modified sequence from LASV(LM765-SLE-2012;Clade IV)__AIT17815__NP (opt1)
aggagagucccgcagucggcguccagcggcucugcuuguucgugugugugucguugcaggccuuauucaagcuuaccaugagcgccuccaaggagaucaagagcuuccuguggacccagucccuccgccgggagcugagcggcuacugcuccaacaucaagcuccagguggucaaggacgcccaggcgcugcugcacgggcuggacuucagcgagguguccaacgugcagcgccucaugcggaaggagcgccgggacgacaacgaccugaagcgccugcgggaccucaaccaggccgucaacaaccugguggagcucaagagcacccagcagaaguccauccugcgcgugggcacccugaccagcgacgaccugcucauccuggccgccgaccuggagaagcucaaguccaaggucacccggaccgagcgcccccugagcgccgggguguacaugggcaaccuguccagccagcagcucgaccagcggcgcgcgcugcuggacaugaucgggauguccggcagcaaccagggcgcccgggccgggcgcgacggcgugguccgggugugggacgugaagaacgccgagcuccugaacaaccaguucgggacgaugccgucccugacccucgcgugccugaccaagcagggccaggucgaccugaacgacgccgugcaggcccucaccgaccuggggcugaucuacacggccaaguaccccaacaccagcgaccucgaccgccugacccagucccaccccauccugaacaugaucgacaccaagaaguccagccucaacaucuccggcuacaacuucagccugggcgccgcggugaaggccggggccugcaugcuggacggcgggaacaugcucgagacgaucaaggucagcccccagaccauggacggcauccucaagagcauccugaaggugaagaaggcccugggcauguucaucuccgacgccccgggggagcggaaccccuacgagaacauccuguacaagaucugccugagcggcgacggguggcccuacaucgcgucccgcaccagcaucaccggccgggccugggagaacacgguggucgaccucgaguccgacgggaagccccagaaggccggcagcaacggcuccaacaagagccugcaguccgccggguucaccgccggccugaccuacagccagcucaugacccugaaggacgcgaugcugcagcuggacccgaacgccaagacguggauggacaucgaggggcgccccgaggaccccguggagaucgcccucuaccagcccuccagcggcugcuacauccacuucuuccgggagccgaccgaccugaagcaguucaagcaggacgccaaguacucccacgggaucgacgugaccgaccuguucgccgcgcagcccggccucaccagcgccgucaucgacgcccugccccgcaacauggugaucacgugccagggcuccgacgacauccgcaagcuguucgagagccaggggcggaaggacaucaagcucaucgacaucgcccugagcaagaccgacucccgcaaguacgagaacgcggugugggaccaguacaaggaccugugccacaugcacaccggcaucgucguggagaagaagaagcgcgggggcaaggaggagaucacgccccacugcgcccucauggacugcaucauguucgacgccgccgucagcgggggccugaacaccuccgugcugcgggccgugcucccgcgggacauggucuuccgcaccagcacgccccggguggugcugugaggacuaguaauaaggaaacuguaugaaugucugugggcaggaagugaagagauccuucuguaaagguuuuuggaauuaugucugcugaauaauaaacuuuuuugaaauaauaaaucugguagaaaaaugagaucucaaaggcucuuuucagagccaccaaaaaaaaaaaaaaaaaaaaaaaaaaaaaaaaaaaaaaaaaaaaaaaaaaaaaaaaaaaaaaaaagaauu

SEQ ID NO: 17387 - RNA, 2015 nt, Artificial Sequence
  mRNA product Design b-4 (hSL-A64-N5) comprising derived and/or modified sequence from LASV(LM776-SLE-2012;Clade IV)__AIT17825__NP (opt1)
aggagagucccgcagucggcguccagcggcucugcuuguucgugugugugucguugcaggccuuauucaagcuuaccaugagcgccuccaaggagaucaagagcuuccuguggacccagucccuccgccgggagcugagcuccuacugcagcaacaucaagcuccagguggucaaggacgcccaggcgcugcugcacggccuggacuucuccgaggugagcaacgugcagcgccucaugcggaaggagcgccgggacgacaacgaccugaagcgccugcgggaccucaaccaggccgucaacaaccugguggagcugaaguccacccagcagaaguccauccuccgcguggggacccugaccuccgacgaccugcucauccuggccgccgaccuggagaagcucaagagcaaggucacccggaccgagcgcccccuguccgccggcguguacauggggaaccugagcucccagcagcucgaccagcggcgcgcgcugcugagcaugaucggcauguccgggagcaaccagggcgcccgggccggccgcgacggggugguccgggugugggacgugaagaacgccgagcuccugaacaaccaguucggcacgaugccgucccugacccucgcgugccugaccaagcaggggcaggucgaccugaacgacgccgugcaggcccucaccgaccugggccugaucuacacggccaaguaccccaacaccagcgaccucgaccgccugacccagagccaccccauccugaacaugaucgacaccaagaaguccagccucaacaucuccggguacaacuucagccugggcgccgcggugaaggccggcgccugcaugcuggacgggggcaacaugcucgagacgaucaaggucagcccccagaccauggacgggauccucaagagcauccugaaggugaagaaggcccugggcauguucaucuccgacaccccgggcgagcggaaccccuacgagaacauccuguacaagaucugccugagcggggacggcuggcccuacaucgccucccgcaccagcaucacggggcgggcgugggagaacaccguggucgaccucgaguccgacggcaagccccagaaggccgggagcaacaacuccaacaagagccugcaguccgccggcuucaccgccggccugaccuacagccagcucaugacgcugaaggacgccaugcugcagcuggacccgaacgcgaagaccuggauggacaucgaggggcgccccgaggaccccguggagguggcccucuaccagcccuccagcggcugcuacauccacuucuuccgggagccgaccgaccugaagcaguucaagcaggacgccaaguacucccacgggaucgacgucaccgaccuguucgccgcccagcccggccucacgagcgcggugaucgacgcccugccccgcaacauggugaucacgugccaggggagcgacgacauccgcaagcugcucgagucccagggccggaaggacaucaagcugaucgacaucgcccugagcaagaccgacucccgcaaguacgagaacgccgucugggaccaguacaaggaccucugccacaugcacaccggcguggucguggagaagaagaagcgcgggggcaaggaggagaucaccccgcacugcgcgcugauggacugcaucauguucgacgccgccgugagcgggggccugaacaccuccguccuccgggccgugcugccccgggacaugguguuccgcaccagcacgccccgggucgugcugugaggacuaguaauaaggaaacuguaugaaugucugugggcaggaagugaagagauccuucuguaaagguuuuuggaauuaugucugcugaauaauaaacuuuuuugaaauaauaaaucugguagaaaaaugagaucucaaaggcucuuuucagagccaccaaaaaaaaaaaaaaaaaaaaaaaaaaaaaaaaaaaaaaaaaaaaaaaaaaaaaaaaaaaaaaaaagaauu

SEQ ID NO: 17388 - RNA, 2015 nt, Artificial Sequence
  mRNA product Design b-4 (hSL-A64-N5) comprising derived and/or modified sequence from LASV(Mad39;Clade IV)__ANH09723__NP (opt1)
aggagagucccgcagucggcguccagcggcucugcuuguucgugugugugucguugcaggccuuauucaagcuuaccaugagcgccuccaaggagaucaagagcuuccuguggacccagucccuccgccgggagcugagcggcuacugcuccaacaucaagcuccagguggucaaggacgcccaggcgcugcugcacgggcuggacuucagcgagguguccaacgugcagcgccucaugcggaagcagcgccgggacgacaacgaccugaagcgccugcgggaccucaaccaggccgucaacaaccugguggagcugaaguccacccagcagaaguccgugcuccgcgucggcacgcugaccagcgacgaccugcucacccuggccgccgaccuggagaagcucaaguccaaggugacccggacggagcgcccccugaccgccgggguguacaugggcaaccugagcucccagcagcucgaccagcggcgcgcgcugcugaacaugaucgggaugagcggcggcaaccagggggcccggaccggccgcgacggggucgugcgggugugggacgucaagaacgccgagcuccugaacaaccaguucggcaccaugccgucccugacgcucgccugccugaccaagcagggccagguggaccugaacgacgugguccaggcgcucaccgaccuggggcugaucuacaccgccaaguaccccaacacgagcgaccucgaccgccugacccagucccaccccauccugaacaugaucgacaccaacaagagcucccucaacaucagcggcuacaacuucagccugggggccgccgugaaggccggcgcgugcaugcuggacgggggcaacaugcucgagaccaucaaggugagcccccagacgauggacggcauccucaagagcauccugaaggucaagaagucccuggggauguucaucagcgacaccccgggcgagcggaaccccuacgagaacauccuguacaagaucugccuguccggggacggcuggcccuacaucgccagccgcaccuccaucaccgggcgggccugggagaacacggugguggaccucgagagcggcggcaagccccagaaggccggguccaacaacagcaacaagucccugcagagcgccggcuucgcggccgggcugaccuacucccagcucaugacccugaaggacgccaugcugcagcuggacccgaacgccaagaccuggauggacaucgagggccgccccgaggaccccgucgagaucgcccucuaccagcccaucagcgggugcuacauccacuucuuccgggagccgacggaccugaagcaguucaagcaggacgcgaaguacucccacggcaucgacgugaccgaccuguucgccgcccagcccggccucaccagcgccgugaucgaggcccugccccgcaacauggucaucacgugccagggguccgacgacauccgcaagcuguucgagagccagggccggaaggacaucaagcucaucgacaucgcgcuguccaagaccgacagccgcaaguacgagaacgccgugugggaccaguacaaggaccugugccacaugcacaccggggucgugguggagaagaagaagaagggcgggaaggaggagaucacgccccacugcgcccucauggacugcaucauguucgacgccgcggucagcggcggccugaacacccuggugcuccgggccgugcugccgcgcgacauggucuuccggaccuccacccccaagguggugcugugaggacuaguaauaaggaaacuguaugaaugucugugggcaggaagugaagagauccuucuguaaagguuuuuggaauuaugucugcugaauaauaaacuuuuuugaaauaauaaaucugguagaaaaaugagaucucaaaggcucuuuucagagccaccaaaaaaaaaaaaaaaaaaaaaaaaaaaaaaaaaaaaaaaaaaaaaaaaaaaaaaaaaaaaaaaaagaauu

SEQ ID NO: 17389 - RNA, 2015 nt, Artificial Sequence
  mRNA product Design b-4 (hSL-A64-N5) comprising derived and/or modified sequence from LASV(Z0947-SLE-2011;Clade IV)__AIT17841__NP (opt1)
aggagagucccgcagucggcguccagcggcucugcuuguucgugugugugucguugcaggccuuauucaagcuuaccaugagcgccuccaaggagaucaagagcuuccuguggacccagucccuccgccgggagcugagcggcuacugcuccaacaucaagcuccagguggucaaggacgcccaggcgcugcugcacgggcuggacuucagcgagguguccaacgugcagcgccucaugcggaaggagcgccgggacgacaacgaccugaagcgccugcgggaccucaaccaggccgucaacaaccugguggagcucaagagcacccagcagaaguccauccugcgcgugggcacccugaccagcgacgaccugcucauccuggccgccgaccuggagaagcucaaguccaaggucacccggaccgagcgcccccugagcgccgggguguacaugggcaaccuguccagccagcagcucgaccagcggcgcgcgcugcugaacaugaucgggauguccggcagcaaccagggcgcccggacggggcgcgacggcgugguccgggugugggacgugaagaacgccgagcuccugaacaaccaguucgggaccaugccgucccugacccucgccugccugaccaagcagggccaggucgaccugaacgacgcggugcaggcccucacggaccuggggcugaucuacaccgccaaguaccccaacaccagcgaccucgaccgccugacccagucccaccccauccugaacaugaucgacacgaagaaguccagccucaacaucuccggcuacaacuucagccugggcgccgccgugaaggcgggggccugcaugcuggacggcgggaacaugcucgagaccaucaaggucagcccccagaccauggacggcauccucaagagcauccugaaggugaagaaggcccugggcauguucaucuccgacgccccgggggagcggaaccccuacgagaacauccuguacaagaucugccugagcggcgacggguggcccuacaucgccucccgcaccagcaucacgggccgggcgugggagaacaccguggucgaccucgaguccgacgggaagccccagaaggccggcagcaacggcuccaacaagagccugcaguccgccggguucaccgccggccugaccuacagccagcucaugacgcugaaggacgccaugcugcagcuggacccgaacgcgaagaccuggauggacaucgaggggcgccccgaggaccccguggagaucgcccucuaccagcccuccagcggcugcuacauccacuucuuccgggagccgaccgaccugaagcaguucaagcaggacgccaaguacucccacgggaucgacgugaccgaccuguucgccgcccagcccggccucacgagcgcggucaucgacgcccugccccgcaacauggugaucacgugccagggcuccgacgacauccgcaagcuguucgagagccaggggcggaaggacaucaagcucaucgacaucgcccugagcaagaccgacucccgcaaguacgagaacgccgugugggaccaguacaaggaccugugccacaugcacaccggcaucgucguggagaagaagaagcgcgggggcaaggaggagaucaccccgcacugcgcgcucauggacugcaucauguucgacgccgccgucagcgggggccugaacaccuccgugcugcgggccgugcucccccgggacauggucuuccgcaccagcacgccccggguggugcugugaggacuaguaauaaggaaacuguaugaaugucugugggcaggaagugaagagauccuucuguaaagguuuuuggaauuaugucugcugaauaauaaacuuuuuugaaauaauaaaucugguagaaaaaugagaucucaaaggcucuuuucagagccaccaaaaaaaaaaaaaaaaaaaaaaaaaaaaaaaaaaaaaaaaaaaaaaaaaaaaaaaaaaaaaaaaagaauu

SEQ ID NO: 17390 - RNA, 2015 nt, Artificial Sequence
  mRNA product Design b-4 (hSL-A64-N5) comprising derived and/or modified sequence from LASV(Josiah;Clade IV)__NP_694869__NP (opt4)
aggagagucccgcagucggcguccagcggcucugcuuguucgugugugugucguugcaggccuuauucaagcuuaccaugagcgccagcaaggagaucaagagcuuccuguggacccagagccugagaagagagcugagcggcuacugcagcaacaucaagcugcagguggugaaggacgcccaggcccugcugcacggccuggacuucagcgaggugagcaacgugcagagacugaugagaaaggagagaagagacgacaacgaccugaagagacugagagaccugaaccaggccgugaacaaccugguggagcugaagagcacccagcagaagagcauccugagagugggcacccugaccagcgacgaccugcugauccuggccgccgaccuggagaagcugaagagcaaggugaucagaaccgagagaccccugagcgccggcguguacaugggcaaccugagcagccagcagcuggaccagagaagagcccugcugaacaugaucggcaugagcggcggcaaccagggcgccagagccggcagagacggcguggugagagugugggacgugaagaacgccgagcugcugaacaaccaguucggcaccaugcccagccugacccuggccugccugaccaagcagggccagguggaccugaacgacgccgugcaggcccugaccgaccugggccugaucuacaccgccaaguaccccaacaccagcgaccuggacagacugacccagagccaccccauccugaacaugaucgacaccaagaagagcagccugaacaucagcggcuacaacuucagccugggcgccgccgugaaggccggcgccugcaugcuggacggcggcaacaugcuggagaccaucaaggugagcccccagaccauggacggcauccugaagagcauccugaaggugaagaaggcccugggcauguucaucagcgacacccccggcgagagaaaccccuacgagaacauccuguacaagaucugccugagcggcgacggcuggcccuacaucgccagcagaaccagcaucaccggcagagccugggagaacaccgugguggaccuggagagcgacggcaagccccagaaggccgacagcaacaacagcagcaagagccugcagagcgccggcuucaccgccggccugaccuacagccagcugaugacccugaaggacgccaugcugcagcuggaccccaacgccaagaccuggauggacaucgagggcagacccgaggaccccguggagaucgcccuguaccagcccagcagcggcugcuacauccacuucuucagagagcccaccgaccugaagcaguucaagcaggacgccaaguacagccacggcaucgacgugaccgaccuguucgccacccagcccggccugaccagcgccgugaucgacgcccugcccagaaacauggugaucaccugccagggcagcgacgacaucagaaagcugcuggagagccagggcagaaaggacaucaagcugaucgacaucgcccugagcaagaccgacagcagaaaguacgagaacgccgugugggaccaguacaaggaccugugccacaugcacaccggcguggugguggagaagaagaagagaggcggcaaggaggagaucaccccccacugcgcccugauggacugcaucauguucgacgccgccgugagcggcggccugaacaccagcgugcugagagccgugcugcccagagacaugguguucagaaccagcacccccagaguggugcugugaggacuaguaauaaggaaacuguaugaaugucugugggcaggaagugaagagauccuucuguaaagguuuuuggaauuaugucugcugaauaauaaacuuuuuugaaauaauaaaucugguagaaaaaugagaucucaaaggcucuuuucagagccaccaaaaaaaaaaaaaaaaaaaaaaaaaaaaaaaaaaaaaaaaaaaaaaaaaaaaaaaaaaaaaaaaagaauu

SEQ ID NO: 17391 - RNA, 2015 nt, Artificial Sequence
  mRNA product Design b-4 (hSL-A64-N5) comprising derived and/or modified sequence from LASV(LP;Clade I)__AAF86702__NP (opt4)
aggagagucccgcagucggcguccagcggcucugcuuguucgugugugugucguugcaggccuuauucaagcuuaccaugagcaacagcaaggagaucaagagcuuccuguggacccagagccugagaagagagcugagcggcuacugcagcaacaucaagcugcagguggugaaggacgcccaggcccugcugcacggccuggacuucagcgaggugagcaacgugcagagacugaugagaaagcagaagagagacgacgccgaccugaagagacugagagaccugaaccaggccgugaacaaccugguggagcugaagagcacccagcagaagaacgugcugagagugggcacccugagcagcgacgaccugaucacccuggccgccgaccuggagaagcugaagagcaaggugaucagaaccgagagaccccugagcagcggcguguacaugggcaaccugagcagccagcagcuggaccagagaagagcccugcugagcaugaucggcaugagcggcggcccccagggcaacagaaccggcggcgacggcguggugagagugugggacgugaagaacgccgagcugcugaacaaccaguucggcaccaugcccagccugacccuggccugccugaccaagcagggccagguggaccugaacgacgccgugcaggcccugaccgaccugggccugaucuacaccgccaaguaccccaacagcagcgaccuggacaugcugacccagagccaccccauccugggcaugguggacaccaagaagagcagccugaacaucagcggcuacaacuucagccugggcgccgccgugaaggccggcgccugcaugcuggacggcggcaacaugcuggagaccaucaaggugagcccccagaccauggacggcauccugaagagcauccugaaggugaagagaagccugggcauguucaucagcgacacccccggcgagagaaaccccuacgagaacauccuguacaagaucugccugagcggcgagggcuggcccuacaucgccagcagaaccagcaucaccggcagagccugggagaacacccugguggaccuggagagcgacaacaagccccccaagcugaacagcgccggcagcaacaagagccugcaggccgccggccugaacgccggccugaccuacagccagcugaugacccugaaggacugcaugcugcagcuggaccccagcagcaagaccuggaucgacaucgagggcagacccgaggaccccguggagaucgcccuguuccagcccagcagcggcugcuacauccacuucuucagagagcccaccgaccugaagcaguucaagcaggacgccaaguacagccacggcaucgacgugaccgaccuguucagcacccagcccggccugaccagcgccgugaucgaggcccugcccagaaacauggugcugaccugccagggcagcgacgacaucaagaagcugcuggagagccagggcagaagagacaucaagcugaucgacaucagccugagcaaggccgacagcagaaaguucgagaacgccgugugggaccaguacaaggaccugugccacaugcacaccggcguggugguggagaagaagaagagaggcggcaaggaggagaucaccccccacugcgcccugcuggacugcaucauguucgacgccgccaccaccggcagccugaacaucaccacccugagagccgugcugcccagagacaugguguucagaaccagcacccccaagguggugcugugaggacuaguaauaaggaaacuguaugaaugucugugggcaggaagugaagagauccuucuguaaagguuuuuggaauuaugucugcugaauaauaaacuuuuuugaaauaauaaaucugguagaaaaaugagaucucaaaggcucuuuucagagccaccaaaaaaaaaaaaaaaaaaaaaaaaaaaaaaaaaaaaaaaaaaaaaaaaaaaaaaaaaaaaaaaaagaauu

SEQ ID NO: 17392 - RNA, 2015 nt, Artificial Sequence
  mRNA product Design b-4 (hSL-A64-N5) comprising derived and/or modified sequence from LASV(803213;Clade II)__AAF86704__NP (opt4)
aggagagucccgcagucggcguccagcggcucugcuuguucgugugugugucguugcaggccuuauucaagcuuaccaugagcgccagcaaggaggugaagagcuuccuguggacccagagccugagaagagagcugagcggcuacugcagcaacaucaagcugcagguggugaaggacgcccaggcccugcugcacggccuggacuucagcgaggugaacaacgugcagagacugaugagaaagcagaagagagacgacggcgaccugaagagacugagagaccugaaccaggccgugaacaaccugguggagcugaagagcacccagcagaagagcauccugagagugggcacccugaccagcgacgaccugcugacccuggccgccgaccuggagaagcugaagagcaaggugaucagaaccgagagaccccugagcagcggcguguacaugggcaaccugagcacccagcagcuggagcagagaagagcccugcugaacaugaucggcauggugggcggcgcccagggcacccagcccggcagagacggcguggugagagugugggacgugaagaaccccgaccugcugaacaaccaguucggcaccaugcccagccugacccuggccugccugaccaagcagggccagguggaccugaacgacgccgugcuggcccugaccgaccugggccugaucuacaccgccaaguaccccaacagcagcgaccuggacagacugagccagagccaccccauccugaacaugguggacaccaagaagagcagccugaacaucagcggcuacaacuucagccugggcgccgccgugaaggccggcgccugcaugcuggacggcggcaacaugcuggagaccaucaaggugaccccccagaccauggacggcauccugaagagcauccugaaggugaagagaagccugggcauguucgugagcgacacccccggcgagagaaaccccuacgagaacauccuguacaagaucugccugagcggcgacggcuggcccuacaucgccagcagaaccagcaucgugggcagagccugggagaacaccaccguggaccuggagagcgacggcaagccccagaaggugggcaccgccggcagcaacaagagccugcagagcgccggcuuccccaccggccugaccuacagccagcugaugacccugaaggacagcaugaugcagcuggaccccagcgccaagaccuggaucgacaucgagggcagacccgaggaccccguggagaucgcccuguaccagcccaugagcggcugcuacauccacuucuucagagagcccaccgaccugaagcaguucaagcaggacgccaaguacagccacggcaucgacguggccgaccuguuccccgcccagcccggccugaccagcgccgugaucgaggcccugcccagaaacauggugcugaccugccagggcagcgacgacaucaagaagcugcuggacagccagggcagaagagacaucaagcugaucgacaucagccugagcaagguggacagcagaaaguucgagaacgccgugugggaccagugcaaggaccugugccacaugcacaccggcguggugguggagaagaagaagagaggcggcaaggaggagaucaccccccacugcgcccugauggacugcaucauguucgacgccgccgugagcggcggccugaacauccccgugcugagagccgugcugcccagagacaugguguucagaaccagcagccccaagguggugcugugaggacuaguaauaaggaaacuguaugaaugucugugggcaggaagugaagagauccuucuguaaagguuuuuggaauuaugucugcugaauaauaaacuuuuuugaaauaauaaaucugguagaaaaaugagaucucaaaggcucuuuucagagccaccaaaaaaaaaaaaaaaaaaaaaaaaaaaaaaaaaaaaaaaaaaaaaaaaaaaaaaaaaaaaaaaaagaauu

SEQ ID NO: 17393 - RNA, 2018 nt, Artificial Sequence
  mRNA product Design b-4 (hSL-A64-N5) comprising derived and/or modified sequence from LASV(GA391;Clade III)__CAA36646__NP (opt4)
aggagagucccgcagucggcguccagcggcucugcuuguucgugugugugucguugcaggccuuauucaagcuuaccaugagcgccagcaaggaggugagaagcuuccuguggacccagagccugagaagagagcugagcggcuacugcagcaacaucaagcugcagguggugaaggacgcccaggcccugcugcacggccuggacuucagcgaggugagcaacgugcagagacugaugagaaagcagaagagagacgacggcgaccugaagagacugagagaccugaaccaggccgugaacaaccugguggagcugaagagcacccagcagaagagcgugcugagagugggcacccugagcagcgacgaccugcugauccuggccgccgaccuggagaagcugaagagcaaggugaccagaaccgagagaccccugagcagcggcguguacaugggcaaccugagcagccagcagcuggaccagagaagagcccugcugaacaugaucggcaugaccggcgugagcggcggcggcaagggcgccagcgacggcaucgugagagugugggacgugaagaacgccgagcugcugaacaaccaguucggcaccaugcccagccugacccuggccugccugaccaagcagggccagguggaccugaacgacgccgugcaggcccugaccgaccugggccugaucuacaccgccaaguaccccaacagcagcgaccuggacagacugagccagagccaccccauccugaacaugaucgacaccaagaagagcagccugaacaucagcggcuacaacuucagccugggcgccgccgugaaggccggcgccugcaugcuggacggcggcaacaugcuggagaccaucaaggugagcccccagaccauggacggcauccugaagagcauccugaaggugaagaagagccugggcauguucgugagcgacacccccggcgagagaaaccccuacgagaacauccuguacaagaucugccugagcggcgacggcuggcccuacaucgccagcagaaccagcaucgugggcagagccugggagaacaccgugguggaccuggagcaggacaacaagccccagaagaucggcaacggcggcagcaacaagagccugcagagcgccggcuucgccgccggccugaccuacagccagcugaugacccugaaggacuucaagugcuucaaccugauccccaacgccaagaccuggauggacaucgagggcagacccgaggaccccguggagaucgcccuguaccagcccagcagcggcugcuacgugcacuucuucagagagcccaccgaccugaagcaguucaagcaggacgccaaguacagccacggcaucgacgugaccgaccuguucgccgcccagcccggccugaccagcgccgugaucgaggcccugcccagaaacauggugaucaccugccagggcagcgaggacaucagaaagcugcuggagagccagggcagaagagacaucaagcugaucgacaucacccugagcaaggccgacagcagaaaguucgagaacgccgugugggaccaguucaaggaccugugccacaugcacaccggcguggugguggagaagaagaagagaggcggcaaggaggagaucaccccccacugcgcccugauggacugcaucauguucgacgccgccgugagcggcggccuggacgccaaggugcugagaguggugcugcccagagacaugguguucagaaccagcacccccaagguggugcugugaggacuaguaauaaggaaacuguaugaaugucugugggcaggaagugaagagauccuucuguaaagguuuuuggaauuaugucugcugaauaauaaacuuuuuugaaauaauaaaucugguagaaaaaugagaucucaaaggcucuuuucagagccaccaaaaaaaaaaaaaaaaaaaaaaaaaaaaaaaaaaaaaaaaaaaaaaaaaaaaaaaaaaaaaaaaagaauu

SEQ ID NO: 17394 - RNA, 2015 nt, Artificial Sequence
  mRNA product Design b-4 (hSL-A64-N5) comprising derived and/or modified sequence from LASV(AV;Clade V)__CCA30315__NP (opt4)
aggagagucccgcagucggcguccagcggcucugcuuguucgugugugugucguugcaggccuuauucaagcuuaccaugagcgccagcaaggaggugaagagcuuccuguggacccagagccugagaagagagcugagcggcuacugcagcaacaucaagcugcagguggugaaggacgcccaggcccugcugcacggccuggacuucagcgaggugagcaacgugcagagacugaugagaaagcagagaagagacgacagcgaccugaagagacugagagaccugaaccaggccgugaacaaccugguggagcugaagagcacccagcagaagagcgugcugagagugggcacccugagcagcgacgaccugcugacccuggccgccgaccuggagaagcugaagagcaaggugaccagaaccgagagaccccugagcagcggcguguacaugggcaaccugagcagccagcagcuggaccagagaagagcccugcugaaccugaucggcaugaccaacggcagccagggcagccaggccggcagagacggcguggugagagugugggacgugaagaacgccgagcugcugaacaaccaguucggcaccaugcccagccugacccuggccugccugaccaagcagggccagguggaccugaacgacguggugcaggcccugaccgaccugggccugaucuacaccgccaaguaccccaacaccagcgaccuggacagacugacccagagccaccccauccugaacaugaucgacaccaagaagagcagccugaacaucagcggcuacaacuucagccugggcgccgccgugaaggccggcgccugcaugcuggacggcggcaacaugcuggagaccaucaaggugagcccccagagcauggacggcauccugaagagcauccugaaggugaagagagcccugggcauguucgugagcgacacccccggcgagagaaaccccuacgagaacauccuguacaagaucugccugagcggcgacggcuggcccuacaucgccagcagaaccagcaucgugggcagagccugggagaacaccgugguggaccuggagaccgacggcaagccccagaagaucggcagcggcaacagcaacaagagccugcagagcgccggcuucagcgccggccugaccuacagccagcugaugacccugaaggacgccaugcugcagcuggaccccaacgccaagaccuggauggacaucgagggcagacccgaggaccccguggagguggcccuguaccagcccaucagcggcugcuacauccacuucuucagagagcccaccgaccugaagcaguucaagcaggacgccaaguacagccacggcaucgacaucgccgaccuguucgccgcccagcccggccugaccagcgccgugaucgaggcccugcccagaaacauggugaucaccugccagggcagcgaggacaucaagaagcugcuggagagccagggcagaaaggacaucaagcugaucgacaucgcccugagcaagaucgacagcagaaaguucgagaacgccgugugggaccaguacaaggaccugugccacaugcacaccggcguggugguggagaagaagaagagaggcggcaaggaggagaucaccccccacugcgcccugauggacugcaucauguucgacgccgccgugagcggcggccugaacacccuggugcugagagccgugcugcccagagacaugguguucagaaccagcacccccagaguggugcugugaggacuaguaauaaggaaacuguaugaaugucugugggcaggaagugaagagauccuucuguaaagguuuuuggaauuaugucugcugaauaauaaacuuuuuugaaauaauaaaucugguagaaaaaugagaucucaaaggcucuuuucagagccaccaaaaaaaaaaaaaaaaaaaaaaaaaaaaaaaaaaaaaaaaaaaaaaaaaaaaaaaaaaaaaaaaagaauu

SEQ ID NO: 17395 - RNA, 2015 nt, Artificial Sequence
  mRNA product Design b-4 (hSL-A64-N5) comprising derived and/or modified sequence from LASV(Togo/2016/7082;Clade VI)__AMR44578__NP (opt4)
aggagagucccgcagucggcguccagcggcucugcuuguucgugugugugucguugcaggccuuauucaagcuuaccaugagcaacagcaaggaggugaagagcuuccuguggacccagagccugagaagagagcugagcggcuacugcagcaacaucaagcugcagguggugaaggacgcccaggcccugcugcacggccuggacuucagcgaggugagcaacgugcagagacugaugagaaagcagaagagagacgacggcgaccugaagagacugagagaccugaaccaggccgugaacaaccugguggagcugaagagcgugcagcagaagagcauccugagagugggcacccugaccagcgacgaccugcugacccuggccgccgaccuggagaagcugaagagcaaggugaccagaaccgagagaccccugagcagcggcguguacaugggcaaccugagcagccagcagcuggaccagagaagagcccugcugagcaugaucggcaugagcggcggcaaccagaacagccagcccaagggcgacggcguggugagagugugggacgugaagaacgccgaccugcugaacaaccaguucggcaccaugcccagccugacccuggccugccugaccaagcagggccagguggaccugaacgacgccgugcaggcccugaccgaccugggccugaucuacaccgccaaguaccccaacagcagcgaccuggacagacugagccagagccaccccauccugaacaugaucgacaccaagaagagcagccugaacaucagcggcuacaacuucagccugggcgccgccaucaagaccggcgccugcaugcuggacggcggcaacaugcuggagaccaucaaggugaccccccagaccauggacggcauccugaagagcauccugaaggugaagagaagccugggcauguucaucagcgacacccccggcgagagaaaccccuacgagaacauccuguacaagaucugccugagcggcgacggcuggcccuacaucgccagcagaaccgccaucaucggcagagccugggagaacaccgugguggaccuggagagcgacagcaagccccagaagaucggcagcaacggcagcaacaagagccugcagagcgccggcuucgcccccggccugaccuacagccagcugaugacccugaaggacagcaugcugcagcuggaccccaacgccaagaccuggaucgacaucgagggcagacccgaggaccccguggagguggcccuguuccagcccaucagcggcugcuacauccacuucuucagagagcccaccgaccugaagcaguucaagcaggacgccaaguacagccacggcaucgacgugaccgaccuguucgccgcccagcccggccugaccagcgccgugaucgaggcccugcccagaaacauggugcugaccugccagggcagcgacgacaucaagaagcugcuggacagccagggcagaagagacaucaagcugaucgacgugagccugaacaagaucgacagcagaaaguucgagaacgccgugugggaccaguacaaggaccugugccacaugcacaccggcguggugguggagaagaagaagaagggcggcaaggaggagaucaccccccacugcgcccugcuggacugcaucauguucgacgccgccgugagcggcggccugaacgccaccgugcugagagccgugcugcccagagacaugguguucagaaccagcagccccaagguggugcugugaggacuaguaauaaggaaacuguaugaaugucugugggcaggaagugaagagauccuucuguaaagguuuuuggaauuaugucugcugaauaauaaacuuuuuugaaauaauaaaucugguagaaaaaugagaucucaaaggcucuuuucagagccaccaaaaaaaaaaaaaaaaaaaaaaaaaaaaaaaaaaaaaaaaaaaaaaaaaaaaaaaaaaaaaaaaagaauu

SEQ ID NO: 17396 - RNA, 2015 nt, Artificial Sequence
  mRNA product Design b-4 (hSL-A64-N5) comprising derived and/or modified sequence from LASV(KAK-428;Clade n.d. (VII))__ANH09741__NP (opt4)
aggagagucccgcagucggcguccagcggcucugcuuguucgugugugugucguugcaggccuuauucaagcuuaccaugagcaacagcaaggaggugaagagcuuccuguggacccagagccugagaagagagcugagcggcuacugcaccaacaucaagcugcagguggugaaggacgcccaggcccugcugcacggccuggacuucagcgaggugagcaacgugcagagacugaugagaaagcagaagagagacgacaacgaccugaagagacugagagaccugaaccaggccgugaacaaccugguggagcugaagagcgugcagcagaagagcgugcugaaggugggcacccugaacagcgacgaccugcugacccuggccgccgaccuggagaagcugaagagcaagguggugagaaccgagagaccccugagcagcggcguguacaugggcaaccugagcagccagcagcuggaccagagaagagcccugcugaacaugaucggcauggccggcggcagccagggcaaccagcccagcagagacggcguggugagagugugggacgugaagaacgccgaccugcugaacaaccaguucggcaccaugcccagccugacccuggccugccugaccaagcagggccagguggaccugaacgacguggugcuggcccugaccgaccugggccugaucuacaccgccaaguaccccaacagcagcgaccuggacagacugagccagaaccaccccgugcugaacaugaucgacgugaacaagagcagccugaacaucagcggcuacaacuucagccugggcgccgccgugaaggccggcgccugcaugcuggacggcggcaacaugcuggagaccaucaagaucagcccccagaccguggacggcauccugaagagcauccugaaggugaagagagcccugggcauguucgugagcgacacccccggcgagagaaaccccuacgagaacauccuguacaaggugugccugagcggcaacggcuggcccuacaucgccagcagaaccagcaucgugggcagagccugggagaacaccgugguggaccuggagagcaacaagaaccagcccaaggugggcaacaacggcagcaacaagaugcugcagagcagcggcuucgccaccggccugaccuacagccagcugaugacccugagagacagcaugcugcagcuggaccccaccgccaagaccuggaucgacaucgagggcagacccgaggaccccguggagcuggcccuguuccagcccagcagcggcugcuacauccacuucuucagagagcccaccgaccugaagcaguucaagcaggacgccaaguacagccacggcaucgacgugaacgaccuguucagcgcccagcccggccugaccagcgccgugcuggaggcccugcccagaaacauggugcugaccugccagggcagcgacgacaucagaaagcugcuggacagccaggacagaaaggacaucaagcugaucgacaucagccugagcaaggccgacgccagaaaguucgagaacgacgugugggaccaguucaaggaccugugccacaugcacaccggcaucgugguggagaagaagaagaagggcggcaagcaggagaugaccccccacugcgcccugcuggacugcaucauguucgacgccgccgugagcggcggccugaacgugcccacccugagagccgugcugcccaccgacaugguguucagaaccaucaccaccaagguggugcugugaggacuaguaauaaggaaacuguaugaaugucugugggcaggaagugaagagauccuucuguaaagguuuuuggaauuaugucugcugaauaauaaacuuuuuugaaauaauaaaucugguagaaaaaugagaucucaaaggcucuuuucagagccaccaaaaaaaaaaaaaaaaaaaaaaaaaaaaaaaaaaaaaaaaaaaaaaaaaaaaaaaaaaaaaaaaagaauu

SEQ ID NO: 17397 - RNA, 2015 nt, Artificial Sequence; identical to SEQ ID NO: 17391
  mRNA product Design b-4 (hSL-A64-N5) comprising derived and/or modified sequence from LASV(Pinneo-NIG-1969;Clade I)__AIT17837__NP (opt4)

SEQ ID NO: 17398 - RNA, 2015 nt, Artificial Sequence
  mRNA product Design b-4 (hSL-A64-N5) comprising derived and/or modified sequence from LASV(ISTH0009-NIG-2011;Clade II)__AIT17405__NP (opt4)
aggagagucccgcagucggcguccagcggcucugcuuguucgugugugugucguugcaggccuuauucaagcuuaccaugagcgugagcaaggaggugaagagcuuccuguggacccagagccugagaagagagcugagcggcuacugcagcaacaucaagcugcagguggugaaggacgcccaggcccugcugcacggccuggacuucagcgaggugagcaacgugcagagacugaugagaaagcagaagagagacgacagcgaccugaagagacugagagaccugaaccaggccgugaacaaccugguggagcugaagagcacccagcagaagagcauccugagagugggcacccugaccagcgacgaccugcugacccuggccgccgaccuggagaagcugaagagcaaggugaucagaaccgagagaccccugagcagcggcguguacaugggcaaccugagcacccagcagcuggagcagagaagagcccugcugaacaugaucggcauggugggcggcgcccagggcacccagcccggcagagacggcguggugagagugugggacgugaagaaccccgaccugcugaacaaccaguucggcaccaugcccagccugacccuggccugccugaccaagcagggccagguggaccugaacgacgccgugcuggcccugaccgaccugggccugaucuacaccgccaaguaccccaacagcagcgaccuggacagacugagccagagccaccccauccugaacaugguggacaucaagaagagcagccugaacaucagcggcuacaacuucagccugggcgccgccgugaaggccggcgccugcaugcuggacggcggcaacaugcuggagaccaucaaggugaccccccagaccauggacggcauccugaagagcauccugaaggugaagagaagccugggcauguucgugagcgacacccccggcgagagaaaccccuacgagaacauccuguacaagaucugccugagcggcgacggcuggcccuacaucgccagcagaaccagcaucgugggcagagccugggagaacaccaccguggaccuggagagcgacggcaagccccagaaggugggcagcgccggcagcaacaagagccugcagagcgccggcuuccccaccggccugaccuacagccagcugaugacccugaaggacagcaugaugcagcuggaccccagcgccaagaccuggaucgacaucgagggcagacccgaggaccccguggagaucgcccuguaccagcccaugagcggcugcuacauccacuucuucagagagcccaccgaccugaagcaguucaagcaggacgccaaguacagccacggcaucgacguggccgaccuguuccccgcccagcccggccugaccagcgccgugaucgaggcccugcccagaaacauggugcugaccugccagggcagcgacgacaucaagagacugcuggacagccagggcagaagagacaucaagcugaucgacaucgcccugagcaaggccgacagcagaagauucgagaacgccgugugggaccagugcaaggaccugugccacaugcacaccggcguggugguggagaagaagaagagaggcggcaaggaggagaucaccccccacugcgcccugauggacugcaucauguacgacgccgccgugagcggcggccugaacauccccgugcugagagccgugcugcccagagacaugguguucagaaccagcagccccaagguggugcugugaggacuaguaauaaggaaacuguaugaaugucugugggcaggaagugaagagauccuucuguaaagguuuuuggaauuaugucugcugaauaauaaacuuuuuugaaauaauaaaucugguagaaaaaugagaucucaaaggcucuuuucagagccaccaaaaaaaaaaaaaaaaaaaaaaaaaaaaaaaaaaaaaaaaaaaaaaaaaaaaaaaaaaaaaaaaagaauu

SEQ ID NO: 17399 - RNA, 2015 nt, Artificial Sequence
  mRNA product Design b-4 (hSL-A64-N5) comprising derived and/or modified sequence from LASV(ISTH2010-NIG-2012;Clade II)__AIT17483__NP (opt4)
aggagagucccgcagucggcguccagcggcucugcuuguucgugugugugucguugcaggccuuauucaagcuuaccaugagcgccagcaaggaggugaagagcuuccuguggacccagagccugagaagagagcugagcggcuacugcagcaacaucaagcugcagguggugaaggacgcccaggcccugcugcacggccuggacuucagcgaggugagcaacgugcagagacugaugagaaagcagaagagagacgacagcgaccugaagagacugagagaccugaaccaggccgugaacaaccugguggagcugaagagcacccagcagaagagcauccugagagugggcacccugaccagcgacgaccugcugacccuggccgccgaccuggagaagcugaagagcaaggugaucagaaccgagagaccccugagcagcggcguguacaugggcaaccugagcacccagcagcuggagcagagaagagcccugcugaaccugaucggcauggugggcggcgcccagggcacccagcccggcagagacggcguggugagagugugggacgugaagaaccccgaccugcugaacaaccaguucggcaccaugcccagccugacccuggccugccugaccaagcagggccagguggaccugaacgacgccgugcuggcccugaccgaccugggccugaucuacaccgccaaguaccccaacagcagcgaccuggacagacugagccagagccaccccauccugaacaugguggacaccaagaagagcagccugaacaucagcggcuucaacuucagccugggcgccgccgugaaggccggcgccugcaugcuggacggcggcaacaugcuggagaccaucaaggugaccccccagaccauggacggcauccugaagagcauccugaaggugaagaagagccugggcauguucgugagcgacacccccggcgagagaaaccccuacgagaacauccuguacaagaucugccugagcggcgacggcuggcccuacaucgccagcagaaccagcaucgugggcagagccugggagaacaccaccguggaccuggagagcgacggcaagccccacaaggugggcaccgccggcagcaacaagagccugcagagcgccggcuuccccaccggccugaccuacagccagcugaugacccugaaggacagcaugaugcagcuggaccccagcgccaagaccuggaucgacaucgagggcagacccgaggaccccguggagaucgcccuguaccagcccaugagcggcugcuacauccacuucuucagagagcccaccgaccugaagcaguucaagcaggacgccaaguacagccacggcaucgacguggccgaccuguuccccgcccagcccggccugaccagcgccgugaucgaggcccugcccagaaacauggugcugaccugccagggcagcgacgacaucaagagacugcuggacagccagggcagaagagacaucaagcugaucgacaucgcccugagcaaggccgacagcagaagauucgagaacgccgugugggaccagugcaaggaccugugccacaugcacaccggcguggugguggagaagaagaagagaggcggcaaggaggagaucaccccccacugcgcccugauggacugcaucauguacgacgccgccgugagcggcggccugaacauccccgugcugagagccgugcugcccagagacaugguguucagaaccagcagccccaagguggugcugugaggacuaguaauaaggaaacuguaugaaugucugugggcaggaagugaagagauccuucuguaaagguuuuuggaauuaugucugcugaauaauaaacuuuuuugaaauaauaaaucugguagaaaaaugagaucucaaaggcucuuuucagagccaccaaaaaaaaaaaaaaaaaaaaaaaaaaaaaaaaaaaaaaaaaaaaaaaaaaaaaaaaaaaaaaaaagaauu

SEQ ID NO: 17400 - RNA, 2015 nt, Artificial Sequence
  mRNA product Design b-4 (hSL-A64-N5) comprising derived and/or modified sequence from LASV(Lassa virus/H.sapiens-wt/NGA/2015/ISTH_0543;Clade II)__AVO03640__NP (opt4)
aggagagucccgcagucggcguccagcggcucugcuuguucgugugugugucguugcaggccuuauucaagcuuaccaugagcgccagcaaggaggugaagagcuuccuguggacccagagccugagaagagagcugagcggcuacugcagcaacaucaagcugcagguggugaaggacgcccaggcccugcugcacggccuggacuucagcgaggugagcaacgugcagagacugaugagaaagcagaagagagacgacagcgaccugaagagacugagagaccugaaccaggccgugaacaaccugguggagcugaagagcacccagcagaagagcauccugagagugggcacccugaccagcgacgaccugcugacccuggccgccgaccuggagaagcugaagagcaaggugaucagaaccgagagaccccugagcagcggcguguacaugggcaaccugagcacccagcagcuggagcagagaagagcccugcugaacaugaucggcauggugggcggcgcccagggcacccagcccggcagagacggcguggugagagugugggacgugaagaaccccgaccugcugaacaaccaguucggcaccaugcccagccugacccuggccugccugaccaagcagggccagguggaccugaacgacgccgugcuggcccugaccgaccugggccugaucuacaccgccaaguaccccaacagcagcgaccuggacagacugagccagagccaccccauccugaacaugguggacaccaagaagagcagccugaacaucagcggcuacaacuucagccugggcgccgccgugaaggccggcgccugcaugcuggacggcggcaacaugcuggagaccaucaaggugaccccccagaccauggacggcauccugaagagcauccugaaggugaagaagagccugggcauguucgugagcgacacccccggcgagagaaaccccuacgagaacauccuguacaagaucugccugagcggcgacggcuggcccuacaucgccagcagaaccagcaucgugggcagagccugggagaacaccaccguggaccuggagagcgacggcaagccccagaaggugggcagcgccggcagcaacaagagccugcagagcgccggcuuccccaccggccugaccuacagccagcugaugacccugaaggacagcaugaugcagcuggaccccagcgccaagaccuggaucgacaucgagggcagacccgaggaccccguggagaucgcccuguaccagcccaugagcggcugcuacauccacuucuucagagagcccaccgaccugaagcaguucaagcaggacgccaaguacagccacggcaucgacguggccgaccuguuccccgcccagcccggccugaccagcgccgugaucgaggcccugcccagaaacauggugcugaccugccagggcagcgacgacaucaagagacugcuggacagccagggcagaaaggacaucaagcugaucgacaucgcccugagcaaggccgacagcagaagauucgagaacgccgugugggaccagugcaaggaccugugccacaugcacaccggcguggugguggagaagaagaagagaggcggcaaggaggagaucaccccccacugcgcccugauggacugcaucauguacgacgccgccgugagcggcggccugaacauccccgugcugagagccgugcugcccagagacaugguguucagaaccagcagccccaagguggugcugugaggacuaguaauaaggaaacuguaugaaugucugugggcaggaagugaagagauccuucuguaaagguuuuuggaauuaugucugcugaauaauaaacuuuuuugaaauaauaaaucugguagaaaaaugagaucucaaaggcucuuuucagagccaccaaaaaaaaaaaaaaaaaaaaaaaaaaaaaaaaaaaaaaaaaaaaaaaaaaaaaaaaaaaaaaaaagaauu

SEQ ID NO: 17401 - RNA, 2015 nt, Artificial Sequence
  mRNA product Design b-4 (hSL-A64-N5) comprising derived and/or modified sequence from LASV(Lassa virus/H.sapiens-wt/NGA/2016/ISTH_0009;Clade II)__AVO03572__NP (opt4)
aggagagucccgcagucggcguccagcggcucugcuuguucgugugugugucguugcaggccuuauucaagcuuaccaugagcgccagcaaggaggugaagagcuuccuguggacccagagccugagaagagagcugagcggcuacugcagcaacaucaagcugcagguggugaaggacgcccaggcccugcugcacggccuggacuucagcgaggugagcaacgugcagagacugaugagaaagcagaagagagacgacagcgaccugaagagacugagagaccugaaccaggccgugaacaaccugguggagcugaagagcacccagcagaagagcauccugagagugggcacccugaccagcgacgaccugcugacccuggccgccgaccuggagaagcugaagagcaaggugaucagaaccgagagaccccugagcagcggcguguacaugggcaaccugagcacccagcagcuggagcagagaagagcccugcugaacaugaucggcauggugggcggcgcccagggcacccagcccggcagagacggcguggugagagugugggacgugaagaaccccgaccugcugaacaaccaguucggcaccaugcccagccugacccuggccugccugaccaagcagggccagguggaccugaacgacgccgugcuggcccugaccgaccugggccugaucuacaccgccaaguaccccaacagcagcgaccuggacagacugagccagagccaccccauccugaacaugguggacaccaagaagagcagccugaacaucagcggcuacaacuucagccugggcgccgccgugaaggccggcgccugcaugcuggacggcggcaacaugcuggagaccaucaaggugaccccccagaccauggacggcauccugaagagcauccugaaggugaagaagagccugggcauguucgugagcgacacccccggcgagagaaaccccuacgagaacauccuguacaagaucugccugagcggcgacggcuggcccuacaucgccagcagaaccagcaucgugggcagagccugggagaacaccaccguggaccuggagagcgacggcaagccccagaaggugggcagcgccggcagcaacaagagccugcagagcgccggcuuccccaccggccugaccuacagccagcugaugacccugaaggacagcaugaugcagcuggaccccagcgccaagaccuggaucgacaucgagggcagacccgaggaccccguggagaucgcccuguaccagcccaugagcggcugcuacauccacuucuucagagagcccaccgaccugaagcaguucaagcaggacgccaaguacagccacggcaucgacguggccgaccuguuccccgcccagcccggccugaccagcgccgugaucgaggcccugcccagaaacauggugcugaccugccagggcagcgacgacaucaagagacugcuggacagccagggcagaagagacaucaagcugaucgacaucgcccugagcaaggccgacagcagaagauucgagaacgccgugugggaccagugcaaggaccugugccacaugcacaccggcguggugguggagaagaagaagagaggcggcaaggaggagaucaccccccacugcgcccugauggacugcaucauguacgacgccgccgugagcggcggccugaacauccccgugcugagagccgugcugcccagagacaugguguucagaaccagcagccccaagguggugcugugaggacuaguaauaaggaaacuguaugaaugucugugggcaggaagugaagagauccuucuguaaagguuuuuggaauuaugucugcugaauaauaaacuuuuuugaaauaauaaaucugguagaaaaaugagaucucaaaggcucuuuucagagccaccaaaaaaaaaaaaaaaaaaaaaaaaaaaaaaaaaaaaaaaaaaaaaaaaaaaaaaaaaaaaaaaaagaauu

SEQ ID NO: 17402 - RNA, 2015 nt, Artificial Sequence
  mRNA product Design b-4 (hSL-A64-N5) comprising derived and/or modified sequence from LASV(Lassa virus/H.sapiens-wt/NGA/2016/ISTH_0017;Clade II)__AVO03568__NP (opt4)
aggagagucccgcagucggcguccagcggcucugcuuguucgugugugugucguugcaggccuuauucaagcuuaccaugagcgccagcaaggaggugaagagcuuccuguggacccagagccugagaagagagcugagcggcuacugcagcagcaucaagcugcagguggugaaggacgcccaggcccugcugcacggccuggacuucagcgaggugagcaacgugcagagacugaugagaaagcagaagagagacgacagcgaccugaagagacugagagaccugaaccaggccgugaacaaccugguggagcugaagagcacccagcagaagagcauccugagagugggcacccugaccagcgacgaccugcugacccuggccgccgaccuggagaagcugaagagcaaggugaucagaaccgagagaccccugagcagcggcguguacaugggcaaccugagcacccagcagcuggagcagagaagagcccugcugaacaugaucggcauggccggcggcgcccagggcacccagcccggcagagacggcguggugagagugugggacgugaagaaccccgaccugcugaacaaccaguucggcaccaugcccagccugacccuggccugccugaccaagcagggccagguggaccugaacgacgccgugcuggcccugaccgaccugggccugaucuacaccgccaaguaccccaacagcagcgaccuggacagacugagccagagccaccccauccugaacaugguggacaccaagaagagcagccugaacaucagcggcuacaacuucagccugggcgccgccgugaaggccggcgccugcaugcuggacggcggcaacaugcuggagaccaucaaggugaccccccagaccauggacggcauccugaagagcauccugaaggugaagagaagccugggcauguucgugagcgacgcccccggcgagagaaaccccuacgagaacauccuguacaagaucugccugagcggcgacggcuggcccuacaucgccagcagaaccagcaucgugggcagagccugggagaacaccaccguggaccuggagagcgacggcaagccccagaaggugggcgccaccggcagcaacaagagccugcagagcgccggcuuccccaccggccugaccuacagccagcugaugacccugaaggacagcaugaugcagcuggaccccagcgccaagaccuggaucgacaucgagggcagacccgaggaccccguggagguggcccuguaccagcccgugagcggcugcuacauccacuucuucagagagcccaccgaccugaagcaguucaagcaggacgccaaguacagccacggcaucgacguggccgaccuguuccccgcccagcccggccugaccagcgccgugaucgaggcccugcccagaaacauggugcugaccugccagggcagcgacgacaucaagaagcugcuggacagccagggcagaaaggacaucaagcugaucgacaucgcccugagcaaggccgacagcagaagauucgagaacgccgugugggaccagugcaaggaccugugccacaugcacaccggcguggugguggagaagaagaagagaggcggcaaggaggagaucaccccccacugcgcccugauggacugcaucauguacgacgccgccgugagcggcggccugaacauccccgugcugagagccgugcugcccagagacaugguguucagaaccagcagccccaagguggugcugugaggacuaguaauaaggaaacuguaugaaugucugugggcaggaagugaagagauccuucuguaaagguuuuuggaauuaugucugcugaauaauaaacuuuuuugaaauaauaaaucugguagaaaaaugagaucucaaaggcucuuuucagagccaccaaaaaaaaaaaaaaaaaaaaaaaaaaaaaaaaaaaaaaaaaaaaaaaaaaaaaaaaaaaaaaaaagaauu

SEQ ID NO: 17403 - RNA, 2015 nt, Artificial Sequence
  mRNA product Design b-4 (hSL-A64-N5) comprising derived and/or modified sequence from LASV(Lassa virus/H.sapiens-wt/NGA/2018/ISTH_0959;Clade II)__AVV65100__NP (opt4)
aggagagucccgcagucggcguccagcggcucugcuuguucgugugugugucguugcaggccuuauucaagcuuaccaugagcgccagcaaggaggugaagagcuuccuguggacccagagccugagaagagagcugagcggcuacugcagcaacaucaagcugcagguggugaaggacgcccaggcccugcugcacggccuggacuucagcgaggugagcaacgugcagagacugaugagaaagcagaagagagacgacagcgaccugaagagacugagagaccugaaccaggccgugaacaaccugguggagcugaagagcacccagcagaagagcauccugagagugggcacccugaccagcgacgaccugcugacccuggccgccgaccuggagaagcugaagagcaaggugaucagaaccgagagaccccugagcagcggcguguacaugggcaaccugagcacccagcagcuggagcagagaagagcccugcugaaccugaucggcauggugggcggcgcccagggcacccagcccggcagagacggcguggugagagugugggacgugaagaaccccgaccugcugaacaaccaguucggcaccaugcccagccugacccuggccugccugaccaagcagggccagguggaccugaacgacguggugcuggcccugaccgaccugggccugaucuacaccgccaaguaccccaacagcagcgaccuggacagacugagccagagccaccccauccugaacaugguggacaccaagaagagcagccugaacaucagcggcuucaacuucagccugggcgccgccgugaaggccggcgccugcaugcuggacggcggcaacaugcuggagaccaucaaggugaccccccagaccauggacggcauccugaagagcauccugaaggugaagaagagccugggcauguucgugagcgacacccccggcgagagaaaccccuacgagaacauccuguacaagaucugccugagcggcgacggcuggcccuacaucgccagcagaaccagcaucgugggcagagccugggagaacaccaccguggaccuggagagcgacggcaagccccacaaggugggcaccgccggcagcaacaagagccugcagagcgccggcuuccccaccggccugaccuacagccagcugaugacccugaaggacagcaugaugcagcuggaccccagcgccaagaccuggaucgacaucgagggcagacccgaggaccccguggagaucgcccuguaccagcccaugagcggcugcuacauccacuucuucagagagcccaccgaccugaagcaguucaagcaggacgccaaguacagccacggcaucgacguggccgaccuguuccccgcccagcccggccugaccagcgccgugaucgaggcccugcccagaaacauggugcugaccugccagggcagcgacgacaucaagagacugcuggacagccagggcagaaaggacaucaagcugaucgacaucgcccugagcaagaccgacagcagaagauucgagaacgccgugugggaccagugcaaggaccugugccacaugcacaccggcguggugguggagaagaagaagagaggcggcaaggaggagaucaccccccacugcgcccugauggacugcaucauguacgacgccgccgugagcggcggccugaacauccccgugcugagagccgugcugcccagagacaugguguucagaaccagcagccccaagguggugcugugaggacuaguaauaaggaaacuguaugaaugucugugggcaggaagugaagagauccuucuguaaagguuuuuggaauuaugucugcugaauaauaaacuuuuuugaaauaauaaaucugguagaaaaaugagaucucaaaggcucuuuucagagccaccaaaaaaaaaaaaaaaaaaaaaaaaaaaaaaaaaaaaaaaaaaaaaaaaaaaaaaaaaaaaaaaaagaauu

SEQ ID NO: 17404 - RNA, 2015 nt, Artificial Sequence
  mRNA product Design b-4 (hSL-A64-N5) comprising derived and/or modified sequence from LASV(LASV003-NIG-2008;Clade II)__AIT17581__NP (opt4)
aggagagucccgcagucggcguccagcggcucugcuuguucgugugugugucguugcaggccuuauucaagcuuaccaugagcgccagcaaggaggugaagagcuuccuguggacccagagccugagaagagagcugagcggcuacugcagcagcaucaagcugcagguggugaaggacgcccaggcccugcugcacggccuggacuucagcgaggugagcaacgugcagagacugaugagaaagcagaagagagacgacagcgaccugaagagacugagagaccugaaccaggccgugaacaaccugguggagcugaagagcacccagcagaagagcgugcugagagugggcacccugaccagcgacgaccugcugacccuggccgccgaccuggagaagcugaagagcaaggugaucagaaccgagagaccccugagcagcggcguguacaugggcaaccugagcgcccagcagcuggagcagagaagaacccugcugaacaugaucggcauggugggcggcgcccagggcacccagcccggcagagacggcguggugagagugugggacgugaagaaccccgaccugcugaacaaccaguucggcaccaugcccagccugacccuggccugccugaccaagcagggccagguggaccugaacgacguggugcuggcccugaccgaccugggccugaucuacaccgccaaguaccccaacagcagcgaccuggacagacugagccagagccaccccauccugagcaugguggacaccaagaagagcagccugaacaucagcggcuacaacuucagccugggcgccgccgugaaggccggcgccugcaugcuggacggcggcaacaugcuggagaccaucaaggugaccccccagaccauggacggcauccugaagagcauccugaaggugaagaagagccugggcauguucgugagcgacacccccggcgagagaaaccccuacgagaacauccuguacaagaucugccugagcggcgacggcuggcccuacaucgccagcagaaccagcaucgugggcagagccugggagaacaccaccguggaccuggagagcgacggcaagccccagaaggugggcaccgccggcagcaacaagagccugcagagcgccggcuuccccaccggccugaccuacagccagcugaugacccugaaggacagcaugaugcagcuggaccccagcgccaagaccuggaucgacaucgagggcagacccgaggaccccguggagaucgcccuguaccagcccaugagcggcugcuacauccacuucuucagagagcccaccgaccugaagcaguucaagcaggacgccaaguacagccacggcaucgacgugaccgaccuguuccccgcccagcccggccugaccagcgccgugaucgaggcccugcccagaaacauggugcugaccugccagggcagcgacgacaucaagagacugcuggacagccagggcagaagagacaucaagcugaucgacaucgcccugagcaaggccgacagcagaagauucgagaacgccgugugggaccagugcaaggaccugugccacaugcacaccggcguggugguggagaagaagaagagaggcggcaaggaggagaucaccccccacugcgcccugauggacugcaucauguacgacgccgccgugagcggcggccugaacauccccgugcugagagccgugcugcccagagacaugguguucagaaccagcagccccaagguggugcugugaggacuaguaauaaggaaacuguaugaaugucugugggcaggaagugaagagauccuucuguaaagguuuuuggaauuaugucugcugaauaauaaacuuuuuugaaauaauaaaucugguagaaaaaugagaucucaaaggcucuuuucagagccaccaaaaaaaaaaaaaaaaaaaaaaaaaaaaaaaaaaaaaaaaaaaaaaaaaaaaaaaaaaaaaaaaagaauu

SEQ ID NO: 17405 - RNA, 2015 nt, Artificial Sequence
  mRNA product Design b-4 (hSL-A64-N5) comprising derived and/or modified sequence from LASV(LASV035-NIG-2009;Clade II)__AIT17589__NP (opt4)
aggagagucccgcagucggcguccagcggcucugcuuguucgugugugugucguugcaggccuuauucaagcuuaccaugagcgccagcaaggaggugaagagcuuccuguggacccagagccugagaagagagcugagcggcuacugcagcagcaucaagcugcagguggugaaggacgcccaggcccugcugcacggccuggacuucagcgaggugagcaacgugcagagacugaugagaaagcagaagagagacgacagcgaccugaagagacugagagaccugaaccaggccgugaacaaccugguggagcugaagagcacccagcagaagagcauccugagagugggcacccugaccagcgacgaccugcugacccuggccgccgaccuggagaagcugaagagcaaggugaucagaaccgagagaccccugagcagcggcguguacaugggcaaccugagcgcccagcagcuggagcagagaagagcccugcugaacaugaucggcauggugggcggcgcccagggcacccagcccggcagagacggcguggugagagugugggacgugaagaaccccgaccugcugaacaaccaguucggcaccaugcccagccugacccuggccugccugaccaagcagggccagguggaccugaacgacgccgugcuggcccugaccgaccugggccugaucuacaccgccaaguaccccaacagcagcgaccuggacagacugagccagagccaccccauccugaacaugguggacaccaagaagagcagccugaacaucagcggcuacaacuucagccugggcgccgccgugaaggccggcgccugcaugcuggacggcggcaacaugcuggagaccaucaaggugaccccccagaccauggacggcauccugaagagcauccugaaggugaagagaagccugggcauguucgugagcgacacccccggcgagagaaaccccuacgagaacauccuguacaagaucugccugagcggcgacggcuggcccuacaucgccagcagaaccagcaucgugggcagagccugggagaacaccaccguggaccuggagagcgacggcaagccccagaaggugggcaccaccggcagcaacaagagccugcagagcgccggcuuccccaccggccugaccuacagccagcugaugacccugaaggacagcaugaugcagcuggaccccagcgccaagaccuggaucgacaucgagggcagacccgaggaccccguggagaucgcccuguaccagcccaugagcggcugcuacauccacuucuucagagagcccaccgaccugaagcaguucaagcaggacgccaaguacagccacggcaucgacguggccgaccuguuccccgcccagcccggccugaccagcgccgugaucgaggcccugcccagaaacauggugcugaccugccagggcagcgacgacaucaagaagcugcuggacagccagggcagaagagacaucaagcugaucgacaucgcccugagcaaggccgacagcagaaaguucgagaacgccgugugggaccagugcaaggaccugugccacaugcacaccggcguggugguggagaagaagaagagaggcggcaaggaggagaucaccccccacugcgcccugauggacugcaucauguacgacgccgccgugagcggcggccugaacauccccgugcugagagccgugcugcccagagacaugguguucagaaccagcagccccaagguggugcugugaggacuaguaauaaggaaacuguaugaaugucugugggcaggaagugaagagauccuucuguaaagguuuuuggaauuaugucugcugaauaauaaacuuuuuugaaauaauaaaucugguagaaaaaugagaucucaaaggcucuuuucagagccaccaaaaaaaaaaaaaaaaaaaaaaaaaaaaaaaaaaaaaaaaaaaaaaaaaaaaaaaaaaaaaaaaagaauu

SEQ ID NO: 17406 - RNA, 2015 nt, Artificial Sequence
  mRNA product Design b-4 (hSL-A64-N5) comprising derived and/or modified sequence from LASV(LASV1000-NIG-2009;Clade II)__AIT17783__NP (opt4)
aggagagucccgcagucggcguccagcggcucugcuuguucgugugugugucguugcaggccuuauucaagcuuaccaugagcgccagcaaggaggugaagagcuuccuguggacccagagccugagaagagagcugagcggcuacugcagcaacaucaagcugcagguggugaaggacgcccaggcccugcugcacggccuggacuucagcgaggugagcaacgugcagagacugaugagaaagcagaagagagacgacagcgaccugaagagacugagagaccugaaccaggccgugaacaaccugguggagcugaagagcacccagcagaagagcauccugagagugggcacccugaccagcgacgaccugcugacccuggccgccgaccuggagaagcugaagagcaaggugaucagaaccgagagaccccugagcagcggcguguacaugggcaaccugagcacccagcagcuggagcagagaagagcccugcugaacaugaucggcauggugggcggcgcccagggcacccagcccggcagagacggcguggugagagugugggacgugaagaaccccgaccugcugaacaaccaguucggcaccaugcccagccugacccuggccugccugaccaagcagggccagguggaccugaacgacguggugcuggcccugaccgaccugggccugaucuacaccgccaaguaccccaacagcagcgaccuggacagacugagccagagccaccccauccugaacaugguggacaccaagaagagcagccugaacaucagcggcuacaacuucagccugggcgccgccgugaaggccggcgccugcaugcuggacggcggcaacaugcuggagaccaucaaggugaccccccagaccauggacggcauccugaagagcauccugaaggugaagaagagccugggcauguucgugagcgacacccccggcgagagaaaccccuacgagaacauccuguacaagaucugccugagcggcgacggcuggcccuacaucgccagcagaaccagcaucgugggcagagccugggagaacaccaccguggaccuggagagcgacggcaagccccagaaggugggcaccgccggcagcaacaagagccugcagagcgccggcuuccccaccggccugaccuacagccagcugaugacccugaaggacagcaugaugcagcuggaccccagcgccaagaccuggaucgacaucgagggcagacccgaggaccccguggagaucgcccuguaccagcccgugagcggcugcuacauccacuucuucagagagcccaccgaccugaagcaguucaagcaggacgccaaguacagccacggcaucgacguggccgaccuguuccccgcccagcccggccugaccagcgccgugaucgaggcccugcccagaaacauggugcugaccugccagggcagcgacgacaucaagagacugcuggacagccagggcagaagagacaucaagcugaucgacaucgcccugagcaaggccgacagcagaagauucgagaacgccgugugggaccagugcaaggaccugugccacaugcacaccggcguggugguggagaagaagaagagaggcggcaaggaggagaucaccccccacugcgcccugauggacugcaucauguacgacgccgccgugagcggcggccugaacauccccgugcugagagccgugcugcccagagacaugguguucagaaccagcagccccaagguggugcugugaggacuaguaauaaggaaacuguaugaaugucugugggcaggaagugaagagauccuucuguaaagguuuuuggaauuaugucugcugaauaauaaacuuuuuugaaauaauaaaucugguagaaaaaugagaucucaaaggcucuuuucagagccaccaaaaaaaaaaaaaaaaaaaaaaaaaaaaaaaaaaaaaaaaaaaaaaaaaaaaaaaaaaaaaaaaagaauu

SEQ ID NO: 17407 - RNA, 2015 nt, Artificial Sequence
  mRNA product Design b-4 (hSL-A64-N5) comprising derived and/or modified sequence from LASV(LASV221-NIG-2010;Clade II)__AIT17625__NP (opt4)
aggagagucccgcagucggcguccagcggcucugcuuguucgugugugugucguugcaggccuuauucaagcuuaccaugagcgccagcaaggaggugaagagcuuccuguggacccagagccugagaagagagcugagcggcuacugcagcagcaucaagcugcagguggugaaggacgcccaggcccugcugcacggccuggacuucagcgaggugagcaacgugcagagacugaugagaaagcagagaagagacgacagcgaccugaagagacugagagaccugaaccaggccgugaacaaccugguggagcugaagagcacccagcagaagagcauccugagagugggcacccugaccagcgacgaccugcugacccuggccgccgaccuggagaagcugaagagcaaggugaucagaaccgagagaccccugagcagcggcguguacaugggcaaccugagcacccagcagcuggagcagagaagagcccugcugaacaugaucggcauggugggcggcgcccagggcacccagcccggcagagacggcguggugagagugugggacgugaagaaccccgaccugcugaacaaccaguucggcaccaugcccagccugacccuggccugccugaccaagcagggccagguggaccugaacgacgccgugcuggcccugaccgaccugggccugaucuacaccgccaaguaccccaacagcagcgaccuggacagacugagccagagccaccccauccugaacaugguggacaccaagaagagcagccugaacaucagcggcuacaacuucagccugggcgccgccgugaaggccggcgccugcaugcuggacggcggcaacaugcuggagaccaucaaggugaccccccagaccguggacggcauccugaagagcauccugaaggugaagagaagccugggcauguucgugagcgacacccccggcgagagaaaccccuacgagaacauccuguacaagaucugccugagcggcgacggcuggcccuacaucgccagcagaaccagcaucgugggcagagccugggagaacaccaccguggaccuggagagcgacggcaagccccagaaggugggcaccgccggcagcaacaagagccugcagagcgccggcuuccccaccggccugaccuacagccagcugaugacccugaaggacagcaugaugcagcuggaccccagcgccaagaccuggaucgacaucgagggcagacccgaggaccccguggagaucgcccuguaccagcccaugagcggcugcuacauccacuucuucagagagcccaccgaccugaagcaguucaagcaggacgccaaguacagccacggcaucgacguggccgaccuguuccccgcccagcccggccugaccagcgccgugaucgaggcccugcccagaaacauggugcugaccugccagggcagcgacgacaucaagagacugcuggacagccagggcagaagagacaucaagcugaucgacaucgcccugagcaaggccgacagcagaaaguucgagaacgccgugugggaccagugcaaggaccugugccacaugcacaccggcguggugguggagaagaagaagagaggcggcaaggaggagaucaccccccacugcgcccugauggacugcaucauguacgacgccgccgugagcggcggccugaacauccccgugcugagagccgugcugcccagagacaugguguucagaaccagcagccccaagguggugcugugaggacuaguaauaaggaaacuguaugaaugucugugggcaggaagugaagagauccuucuguaaagguuuuuggaauuaugucugcugaauaauaaacuuuuuugaaauaauaaaucugguagaaaaaugagaucucaaaggcucuuuucagagccaccaaaaaaaaaaaaaaaaaaaaaaaaaaaaaaaaaaaaaaaaaaaaaaaaaaaaaaaaaaaaaaaaagaauu

SEQ ID NO: 17408 - RNA, 2015 nt, Artificial Sequence
  mRNA product Design b-4 (hSL-A64-N5) comprising derived and/or modified sequence from LASV(LASV237-NIG-2010;Clade II)__AIT17639__NP (opt4)
aggagagucccgcagucggcguccagcggcucugcuuguucgugugugugucguugcaggccuuauucaagcuuaccaugagcgccagcaaggaggugaagagcuuccuguggacccagagccugagaagagagcugagcggcuacugcagcaacaucaagcugcagguggugaaggacgcccaggcccugcugcacggccuggacuucagcgaggugagcaacgugcagagacugaugagaaagcagaagagagacgacagcgaccugaagagacugagagaccugaaccaggccgugaacaaccugguggagcugaagagcacccagcagaagagcauccugagagugggcacccugaccagcgacgaccugcugacccuggccgccgaccuggagaagcugaagagcaaggugaucagaaccgagagaccccugagcagcggcguguacaugggcaaccugagcacccagcagcuggagcagagaagagcccugcugaacaugaucggcauggugggcggcgcccagggcacccagcccggcagagacggcguggugagagugugggacgugaagaaccccgaccugcugaacaaccaguucggcaccaugcccagccugacccuggccugccugaccaagcagggccagguggaccugaacgacgccgugcuggcccugaccgaccugggccugaucuacaccgccaaguaccccaacagcagcgaccuggacagacugagccagagccaccccauccugaacaugguggacaucaagaagagcagccugaacaucagcggcuacaacuucagccugggcgccgccgugaaggccggcgccugcaugcuggacggcggcaacaugcuggagaccaucaaggugaccccccagaccauggacggcauccugaagagcauccugaaggugaagagaagccugggcauguucgugagcgacacccccggcgagagaaaccccuacgagaacauccuguacaagaucugccugagcggcgacggcuggcccuacaucgccagcagaaccagcaucgugggcagagccugggagaacaccaccguggaccuggagagcgacggcaagccccagaaggugggcagcgccggcagcaacaagagccugcagagcgccggcuuccccaccggccugaccuacagccagcugaugacccugaaggacagcaugaugcagcuggaccccagcgccaagaccuggaucgacaucgagggcagacccgaggaccccguggagaucgcccuguaccagcccaugagcggcugcuacauccacuucuucagagagcccaccgaccugaagcaguucaagcaggacgccaaguacagccacggcaucgacguggccgaccuguuccccgcccagcccggccugaccagcgccgugaucgaggcccugcccagaaacauggugcugaccugccagggcagcgacgacaucaagagacugcuggacagccagggcagaagagacaucaagcugaucgacaucgcccugagcaaggccgacagcagaagauucgagaacgccgugugggaccagugcaaggaccugugccacaugcacaccggcguggugguggagaagaagaagagaggcggcaaggaggagaucaccccccacugcgcccugauggacugcaucauguacgacgccgccgugagcggcggccugaacauccccgugcugagagccgugcugcccagagacaugguguucagaaccagcagccccaagguggugcugugaggacuaguaauaaggaaacuguaugaaugucugugggcaggaagugaagagauccuucuguaaagguuuuuggaauuaugucugcugaauaauaaacuuuuuugaaauaauaaaucugguagaaaaaugagaucucaaaggcucuuuucagagccaccaaaaaaaaaaaaaaaaaaaaaaaaaaaaaaaaaaaaaaaaaaaaaaaaaaaaaaaaaaaaaaaaagaauu

SEQ ID NO: 17409 - RNA, 2015 nt, Artificial Sequence
  mRNA product Design b-4 (hSL-A64-N5) comprising derived and/or modified sequence from LASV(LASV253-NIG-2011;Clade II)__AIT17671__NP (opt4)
aggagagucccgcagucggcguccagcggcucugcuuguucgugugugugucguugcaggccuuauucaagcuuaccaugagcgccagcaaggaggugaagagcuuccuguggacccagagccugagaagagagcugagcggcuacugcagcagcaucaagcugcagguggugaaggacgcccaggcccugcugcacggccuggacuucagcgaggugagcaacgugcagagacugaugagaaagcagaagagagacgacagcgaccugaagagacugagagaccugaaccaggccgugaacaaccugguggagcugaagagcacccagcagaagagcgugcugagagugggcacccugaccagcgacgaccugcugacccuggccgccgaccuggagaagcugaagagcaaggugaucagaaccgagagaccccugagcagcggcguguacaugggcaaccugagcacccagcagcuggagcagagaagagcccugcugaacaugaucggcauggugggcggcgcccagggcacccagcccggcagagacggcguggugagagugugggacgugaagaaccccgaccugcugaacaaccaguucggcaccaugcccagccugacccuggccugccugaccaagcagggccagguggaccugaacgacguggugcuggcccugaccgaccugggccugaucuacaccgccaaguaccccaacagcagcgaccuggacagacugagccagagccaccccauccugaacaugguggacaccaagaagagcagccugaacaucagcggcuacaacuucagccugggcgccgccgugaaggccggcgccugcaugcuggacggcggcaacaugcuggagaccaucaaggugaccccccagaccauggacggcauccugaagagcauccugaaggugaagaagagccugggcauguucgugagcgacacccccggcgagagaaaccccuacgagaacauccuguacaagaucugccugagcggcgacggcuggcccuacaucgccagcagaaccagcaucgugggcagagccugggagaacaccaccguggaccuggagagcgacggcaagccccagaaggugggcaccgccggcagcaacaagagccugcagagcgccggcuuccccaccggccugaccuacagccagcugaugacccugaaggacagcaugaugcagcuggaccccagcgccaagaccuggaucgacaucgagggcagacccgaggaccccguggagaucgcccuguaccagcccaugagcggcugcuacauccacuucuucagagagcccaccgaccugaagcaguucaagcaggacgccaaguacagccacggcaucgacgugaccgaccuguuccccgcccagcccggccugaccagcgccgugaucgaggcccugcccagaaacauggugcugaccugccagggcagcgacgacaucaagagacugcuggacagccagggcagaagagacaucaagcugaucgacaucgcccugagcaaggccgacagcagaagauucgagaacgccgugugggaccagugcaaggaccugugccacaugcacaccggcguggugguggagaagaagaagagaggcggcaaggaggagaucaccccccacugcgcccugauggacugcaucauguacgacgccgccgugagcggcggccugaacauccccgugcugagagccgugcugcccagagacaugguguucagaaccagcagccccaagguggugcugugaggacuaguaauaaggaaacuguaugaaugucugugggcaggaagugaagagauccuucuguaaagguuuuuggaauuaugucugcugaauaauaaacuuuuuugaaauaauaaaucugguagaaaaaugagaucucaaaggcucuuuucagagccaccaaaaaaaaaaaaaaaaaaaaaaaaaaaaaaaaaaaaaaaaaaaaaaaaaaaaaaaaaaaaaaaaagaauu

SEQ ID NO: 17410 - RNA, 2015 nt, Artificial Sequence
  mRNA product Design b-4 (hSL-A64-N5) comprising derived and/or modified sequence from LASV(LASV254-NIG-2011;Clade II)__AIT17675__NP (opt4)
aggagagucccgcagucggcguccagcggcucugcuuguucgugugugugucguugcaggccuuauucaagcuuaccaugagcgccagcaaggaggugaagagcuuccuguggacccagagccugagaagagagcugagcggcuacugcagcagcaucaagcugcagguggugaaggacgcccaggcccugcugcacggccuggacuucagcgaggugagcaacgugcagagacugaugagaaagcagaagagagacgacagcgaccugaagagacugagagaccugaaccaggccgugaacaaccugguggagcugaagagcacccagcagaagagcgugcugagagugggcacccugaccagcgacgaccugcugacccuggccgccgaccuggagaagcugaagagcaaggugaucagaaccgagagaccccugagcagcggcguguacaugggcaaccugagcacccagcagcuggagcagagaagagcccugcugaacaugaucggcauggugggcggcgcccagggcacccagcccggcagagacggcguggugagagugugggacgugaagaaccccgaccugcugaacaaccaguucggcaccaugcccagccugacccuggccugccugaccaagcagggccagguggaccugaacgacgccgugcuggcccugaccgaccugggccugaucuacaccgccaaguaccccaacagcagcgaccuggacagacugagccagagccaccccauccugaacaugguggacaccaagaagagcagccugaacaucagcggcuacaacuucagccugggcgccgccgugaaggccggcgccugcaugcuggacggcggcaacaugcuggagaccaucaaggugaccccccagaccauggacggcauccugaagagcauccugaaggugaagaagagccugggcauguucgugagcgacacccccggcgagagaaaccccuacgagaacauccuguacaagaucugccugagcggcgacggcuggcccuacaucgccagcagaaccagcaucgugggcagagccugggagaacaccaucguggaccuggagagcgacggcaagccccagaaggugggcaccgccggcagcaacaagagccugcagagcgccggcuuccccaccggccugaccuacagccagcugaugacccugaaggacagcaugaugcagcuggaccccagcgccaagaccuggaucgacaucgagggcagacccgaggaccccguggagaucgcccuguaccagcccaugagcggcugcuacauccacuucuucagagagcccaccgaccugaagcaguucaagcaggacgccaaguacagccacggcaucgacguggccgaccuguuccccgcccagcccggccugaccagcgccgugaucgaggcccugcccagaaacauggugcugaccugccagggcagcgacgacaucaagagacugcuggacagccagggcagaagagacaucaagcugaucgacaucgcccugagcaaggccgacagcagaagauucgagaacgccgugugggaccagugcaaggaccugugccacaugcacaccggcguggugguggagaagaagaagagaggcggcaaggaggagaucaccccccacugcgcccugauggacugcaucauguacgacgccgccgugagcggcggccugaacauccccgugcugagagccgugcugcccagagacaugguguucagaaccagcagccccaagguggugcugugaggacuaguaauaaggaaacuguaugaaugucugugggcaggaagugaagagauccuucuguaaagguuuuuggaauuaugucugcugaauaauaaacuuuuuugaaauaauaaaucugguagaaaaaugagaucucaaaggcucuuuucagagccaccaaaaaaaaaaaaaaaaaaaaaaaaaaaaaaaaaaaaaaaaaaaaaaaaaaaaaaaaaaaaaaaaagaauu

SEQ ID NO: 17411 - RNA, 2015 nt, Artificial Sequence
  mRNA product Design b-4 (hSL-A64-N5) comprising derived and/or modified sequence from LASV(Nig08-04;Clade II)__ADU56611__NP (opt4)
aggagagucccgcagucggcguccagcggcucugcuuguucgugugugugucguugcaggccuuauucaagcuuaccaugagcgccagcaaggaggugaagagcuuccuguggacccagagccugagaagagagcugagcggcuacugcagcaacaucaagcugcagguggugaaggacgcccaggcccugcugcacggccuggacuucagcgaggugagcaacgugcagagacugaugagaaagcagaagagagacgacggcgaccugaagagacugagagaccugaaccaggccgugaacaaccugguggagcugaagagcacccagcagaagagcgugcugagagugggcacccugaccagcgacgaccugcugacccuggccgccgaccuggagaagcugaagagcaaggugaucagaaccgagagaccccugagcagcggcguguacaugggcaaccugagcacccagcagcuggagcagagaaaggcccugcugagcaugaucggcauggugggcggcgcccagggcacccagcccggcagagacggcguggugagagugugggacgugaagaaccccgaccugcugaacaaccaguucggcaccaugcccagccugacccuggccugccugaccaagcagggccagguggaccugaacgacgccgugcuggcccugaccgaccugggccugaucuacaccgccaaguaccccaacagcagcgaccuggacagacugagccagagccaccccauccugaacaugguggacaccaagaagagcagccugaacaucagcggcuacaacuucagccugggcgccgccgugaaggccggcgccugcaugcuggacggcggcaacaugcuggagaccaucaaggugaccccccagaccauggacggcauccugaagagcauccugaaggugaagagaagccugggcauguucgugagcgacacccccggcgagagaaaccccuacgagaacauccuguacaagaucugccugagcggcgacggcuggcccuacaucgccagcagaaccagcaucgugggcagagccugggagaacaccaccguggaccuggagagcgacggcaagccccagaaggugggcaccgccggcagcaacaagagccugcagagcgccggcuuccccaccggccugaccuacagccagcugaugacccugaaggacagcaugaugcagcuggaccccagcgccaagaccuggaucgacaucgagggcagacccgaggaccccguggagaucgcccuguaccagcccaugagcggcugcuacauccacuucuucagagagcccaccgaccugaagcaguucaagcaggacgccaaguacagccacggcaucgacgugaccgaccuguucagcgcccagcccggccugaccagcgccgugaucgaggcccugcccagaaacauggugcugaccugccagggcagcgacgacaucaagaagcugcuggacagccagggcagaagagacaucaagcugaucgacaucagccugaacaaggccgacagcagaagauucgagaacgccgugugggaccagugcaaggaccugugccacaugcacaccggcguggugguggagaagaagaagagaggcggcaaggaggagaucaccccccacugcgcccugauggacugcaucauguucgacgccgccgugagcggcggccugaacauccccauccugagagccgugcugcccagagacaugguguucagaaccagcagccccaagguggugcugugaggacuaguaauaaggaaacuguaugaaugucugugggcaggaagugaagagauccuucuguaaagguuuuuggaauuaugucugcugaauaauaaacuuuuuugaaauaauaaaucugguagaaaaaugagaucucaaaggcucuuuucagagccaccaaaaaaaaaaaaaaaaaaaaaaaaaaaaaaaaaaaaaaaaaaaaaaaaaaaaaaaaaaaaaaaaagaauu

SEQ ID NO: 17412 - RNA, 2018 nt, Artificial Sequence
  mRNA product Design b-4 (hSL-A64-N5) comprising derived and/or modified sequence from LASV(GA391;Clade III)__AAA46284__NP (opt4)
aggagagucccgcagucggcguccagcggcucugcuuguucgugugugugucguugcaggccuuauucaagcuuaccaugagcgccagcaaggaggugagaagcugccuguggacccagagccugagaagagagcugagcggcuacugcagcaacaucaagcugcagguggugaaggacgcccaggcccugcugcacggccuggacuucagcgaggugagcaacgugcagagacugaugagaaagcagaagagagacgacggcgaccugaagagacugagagaccugaaccaggccgugaacaaccugguggagcugaagagcacccagcagaagagcgugcugagagugggcacccugagcagcgacgaccugcugauccuggccgccgaccuggagaagcugaagagcaaggugaccagaaccgagagaccccugagcagcggcguguacaugggcaaccugagcagccagcagcuggaccagagaagagcccugcugaacaugaucggcaugaccggcgugagcggcggcggcaagggcgccagcaacggcaucgugagagugugggacgugaagaacgccgagcugcugaacaaccaguucggcaccaugcccagccugacccuggccugccugaccaagcagggccagguggaccugaacgacgccgugcaggcccugaccgaccugggccugaucuacaccgccaaguaccccaacagcagcgaccuggacagacugagccagagccaccccauccugaacaugaucgacaccaagaagagcagccugaacaucagcggcuacaacuucagccugggcgccgccgugaaggccggcgccugcaugcuggacggcggcaacaugcuggagaccaucaaggugagcccccagaccauggacggcauccugaagagcauccugaaggugaagaagagccugggcauguucgugagcgacacccccggcgagagaaaccccuacgagaacauccuguacaagaucugccugagcggcgacggcuggagcuacaucgccagcagaaccagcaucgugggcagagccugggagaacaccgugguggaccuggagcaggacaacaagccccagaagaucggcaacggcggcagcaacaagagccugcagagcgccggcuucgccgccggccugaucuacagccagcugaugacccugaaggacuucaagugcuucaaccugauccccaacgccaagaccuggauggacaucgagggcagacccgaggaccccguggagaucgcccuguaccagcccagcagcggcugcuacgugcacuucuucagagagcccaccgaccugaagcaguucaagcaggacgccaaguacagccacggcagagacgugaccgaccuguucgccgcccagcccggccugaccagcgccgugaucgaggcccugcccagaaacauggugaucaccugccagggcagcgaggacaucagaaagcugcuggagagccagggcagaagagacaucaagcugaucgacaucacccugagcaaggccgacagcagaaaguucgagaacgccgugugggaccaguucaaggaccugugccacaugcacaccggcguggugguggagaagaagaagagaggcggcaaggaggagaucaccccccacugcgcccugauggacugcaucauguucgacgccgccgugagcggcggccuggacgccaaggugcugagaguggugcugcccagagacaugguguucagaaccagcacccccaagguggugcugugaggacuaguaauaaggaaacuguaugaaugucugugggcaggaagugaagagauccuucuguaaagguuuuuggaauuaugucugcugaauaauaaacuuuuuugaaauaauaaaucugguagaaaaaugagaucucaaaggcucuuuucagagccaccaaaaaaaaaaaaaaaaaaaaaaaaaaaaaaaaaaaaaaaaaaaaaaaaaaaaaaaaaaaaaaaaagaauu

SEQ ID NO: 17413 - RNA, 2015 nt, Artificial Sequence
  mRNA product Design b-4 (hSL-A64-N5) comprising derived and/or modified sequence from LASV(Nig08-A19;Clade III)__ADU56619__NP (opt4)
aggagagucccgcagucggcguccagcggcucugcuuguucgugugugugucguugcaggccuuauucaagcuuaccaugagcgccagcaaggaggugaagagcuuccuguggacccagagccugagaagagagcugagcggcuacugcagcaacaucaagcugcagguggugaaggacgcccaggcccugcugcacggccuggacuucagcgaggugagcaacgugcagagacugaugagaaagcagaagagagacgacggcgaccugaagagacugagagaccugaaccaggccgugaacaaccugguggagcugaagagcacccagcagaagagcgugcugagagugggcacccugagcagcgacgaccugcuggugcuggccgccgaccuggagaagcugaagagcaagguggugagaaccgagagaccccugagcagcggcaucuacaugggcaaccugagcagccagcagcuggaccagagaaaggcccugcugaacaugaucggcaugaccggcggcaacggcggcagaaacaccaccagcgacggcaucgugagagugugggacgugaagaacgccgagcugcugaacaaccaguucggcaccaugcccagccugacccuggccugccugaccaagcagggccagguggaccugaacgacgccgugcaggcccugaccgaccugggccugaucuacaccgccaaguaccccaacagcagcgaccuggacagacuggcccagagccaccccauccugaacaugaucgacaccaagaagagcagccugaacaucagcggcuacaacuucagccugggcgccgccgugaaggccggcgccugcaugcuggacggcggcaacaugcuggagaccaucaaggugagcccccagaccauggacggcauccugaagagcauccugaaggugaagagaagccugggcauguucaucagcgacacccccggcgagagaaaccccuacgagaacauccuguacaagaucugccugagcggcgacggcuggcccuacaucgccagcagaaccagcaucgugggcagagccugggagaacaccgugguggaccuggagagcgacaacaagccccagaagaccggcaacggcggcagcaacaagagccugcagagcgccggcuucgccgccggccugaccuacagccagcugaugacccugaaggacagcaugcugcagcuggaccccaacgccaagaccuggauggacaucgagggcagacccgaggaccccguggagaucgcccuguaccagcccagcagcggcugcuacauccacuucuucagagagcccaccgaccugaagcaguucaagcaggacgccaaguacagccacggcaucgacgugaccgaccuguucgccgcccagcccggccugaccagcgccgugaucgaggcccugcccagaaacauggugaucaccugccagggcagcgaggacaucagaaagcugcuggagagccagggcagaagagacaucaagcugaucgacaucagccugagcaagguggacagcagaaaguucgagaacgccgugugggaccaguucaaggaccugugccacaugcacaccggcaucgugguggagaagaagaagagaggcggcaaggaggagaucaccccccacugcgcccugauggacugcaucauguucgacgccgccgugagcggcggcguggacgccaaggugcugagagccgugcugcccagagacaugguguucagaaccagcacccccaagguggugcugugaggacuaguaauaaggaaacuguaugaaugucugugggcaggaagugaagagauccuucuguaaagguuuuuggaauuaugucugcugaauaauaaacuuuuuugaaauaauaaaucugguagaaaaaugagaucucaaaggcucuuuucagagccaccaaaaaaaaaaaaaaaaaaaaaaaaaaaaaaaaaaaaaaaaaaaaaaaaaaaaaaaaaaaaaaaaagaauu

SEQ ID NO: 17414 - RNA, 2015 nt, Artificial Sequence
  mRNA product Design b-4 (hSL-A64-N5) comprising derived and/or modified sequence from LASV(G1180-SLE-2010;Clade IV)__AIT17169__NP (opt4)
aggagagucccgcagucggcguccagcggcucugcuuguucgugugugugucguugcaggccuuauucaagcuuaccaugagcgccagcaaggagaucaagagcuuccuguggacccagagccugagaagagagcugagcggcuacugcagcaacaucaagcugcagguggugaaggacgcccaggcccugcugcacggccuggacuucagcgaggugagcaacgugcagagacugaugagaaaggagagaagagacgacaacgaccugaagagacugagagaccugaaccaggccgugaacaaccugguggagcugaagagcacccagcagaagagcauccugagagugggcacccugaccagcgacgaccugcugauccuggccgccgaccuggagaagcugaagagcaaggugaucagaaccgagagaccccugagcgccggcguguacaugggcaaccugagcagccagcagcuggaccagagaagagcccugcugagcaugaucggcaugagcagcggcaaccagagagcccaggccggcagagacggcguggugagagugugggacgugaagaacguggagcugcugaacaaccaguucggcaccaugcccagccugacccuggccugccugaccaagcagggccagguggaccugaacgacgccgugcaggcccugaccgaccugggccugaucuacaccgccaaguaccccaacaccagcgaccuggacagacugacccagagccaccccauccugaacaugaucgacaccaagaagagcagccugaacaucagcggcuacaacuucagccugggcgccgccgugaaggccggcgccugcaugcuggacggcggcaacaugcuggagaccaucaaggugagcccccagaccauggacggcauccugaagagcauccugaaggugaagaaggcccugggcauguucaucagcgacacccccggcgagagaaaccccuacgagaacauccuguacaagaucugccugagcggcgacggcuggcccuacaucgccagcagaaccagcaucaccggcagagccugggagaacaccgugguggaccuggagagcgacggcaagccccagaaggccggcagcaacaacagcaacaagagccugcagagcgugggcuucaccgccggccugaccuacagccagcugaugacccugaaggacgccaugcugcagcuggaccccaacgccaagaccuggauggacaucgagggcagacccgaggaccccguggagaucgcccuguaccagcccagcagcggcugcuacauccacuucuucagagagcccaccgaccugaagcaguucaagcaggacgccaaguacagccacggcaucgacgugaccgaccuguucgccgcccagcccggccugaccagcgccgugaucgacgcccugcccagaaacauggugaucaccugccagggcagcgacgacaucagaaagcugcuggagagccagggcagaaaggacaucaagcugaucgacaucgcccugagcaagaccgacagcagaaaguacgagaacgccgugugggaccaguacaaggaccugugccacaugcacaccggcguggugguggagaagaagaagagaggcggcaaggaggagaucaccccccacugcgcccugauggacugcaucauguucgacgccgccgugagcggcggccugaacaccagcgugcugagagccgugcugcccagagacaugguguucagaaccagcacccccagaguggugcugugaggacuaguaauaaggaaacuguaugaaugucugugggcaggaagugaagagauccuucuguaaagguuuuuggaauuaugucugcugaauaauaaacuuuuuugaaauaauaaaucugguagaaaaaugagaucucaaaggcucuuuucagagccaccaaaaaaaaaaaaaaaaaaaaaaaaaaaaaaaaaaaaaaaaaaaaaaaaaaaaaaaaaaaaaaaaagaauu

SEQ ID NO: 17415 - RNA, 2015 nt, Artificial Sequence
  mRNA product Design b-4 (hSL-A64-N5) comprising derived and/or modified sequence from LASV(G1442-SLE-2011;Clade IV)__AIT17181__NP (opt4)
aggagagucccgcagucggcguccagcggcucugcuuguucgugugugugucguugcaggccuuauucaagcuuaccaugagcgccagcaaggaggugaagagcuuccuguggacccagagccugagaagagagcugagcggcuacugcagcaacaucaagcugcagguggugaaggacgcccaggcccugcugcacggccuggacuucagcgaggugagcaacgugcagagacugaugagaaagcagagaagagacgacaacgaccugaagagacugagagaccugaaccaggccgugaacaaccugguggagcugaagagcacccagcagaagagcgugcugagagugggcacccugaccagcgacgaccugcuggugcuggccgccgaccuggagaagcugaagagcaaggugaucagaaccgagagaccccugagcgccggcguguacaugggcaaccugagcagccagcagcuggaccagagaagagcccugcugaacaugaucggcaugagcggcggcauccagggcaccagaaccggcagagacggcguggugagagugugggacgugaagaacgccgaccugcugaacaaccaguucggcaccaugcccagccugacccuggccugccugaccaagcagggccagguggaccugaacgacguggugcaggcccugaccgaccugggccugaucuacaccgccaaguaccccaacgccagcgaccuggacagacugacccagagccaccccauccugaacaugaucgacaccaagaagagcagccugaacaucagcggcuacaacuucagccugggcgccgccgugaaggccggcgccugcaugcuggacggcggcaacaugcuggagaccaucaaggugagcccccagaccauggacggcauccugaagagcauccugaaggugaagaagacccugggcauguucaucagcgacacccccggcgagagaaaccccuacgagaacauccuguacaagaucugccugagcggcgacggcuggcccuacaucgccagcagaaccagcaucaccggcagagccugggagaacaccgugguggaccuggagagcgacggcaagccccagaaggccggcagcaacaacagcaacaagagccugcagagcgccggcuucgccgccggccugaccuacagccagcugaugacccugaaggacgccaugcugcagcuggaccccaacgccaagaccuggauggacaucgagggcagacccgaggaccccguggagaucgcccuguaccagcccagcagcggcugcuacauccacuucuucagagagcccaccgaccugaagcaguucaagcaggacgccaaguacagccacggcaucgacgugaccgaccuguucgccgcccagcccggccugaccagcgccgugaucgaggcccugcccagaaacauggugaucaccugccagggcagcgacgacaucaagaagcugcuggagagccagggcagaaaggacaucaagcugaucgacaucgcccugagcaagaccgacagcagaaaguacgagaacgccgugugggaccaguacaaggaccugugccacaugcacaccggcguggugguggagaagaagaagagaggcggcaaggaggagaucaccccccacugcgcccugauggacugcaucauguucgacgccgccgugagcggcggccugaacacccuggugcugagagccgugcugcccagagacaugguguucagaaccagcacccccagaguggugcugugaggacuaguaauaaggaaacuguaugaaugucugugggcaggaagugaagagauccuucuguaaagguuuuuggaauuaugucugcugaauaauaaacuuuuuugaaauaauaaaucugguagaaaaaugagaucucaaaggcucuuuucagagccaccaaaaaaaaaaaaaaaaaaaaaaaaaaaaaaaaaaaaaaaaaaaaaaaaaaaaaaaaaaaaaaaaagaauu

SEQ ID NO: 17416 - RNA, 2015 nt, Artificial Sequence
  mRNA product Design b-4 (hSL-A64-N5) comprising derived and/or modified sequence from LASV(G3010-SLE-2013;Clade IV)__AIT17345__NP (opt4)
aggagagucccgcagucggcguccagcggcucugcuuguucgugugugugucguugcaggccuuauucaagcuuaccaugagcgccagcaaggagaucaagagcuuccuguggacccagagccugagaagagagcugagcggcuacugcagcaacaucaagcugcagguggugaaggacgcccaggcccugcugcacggccuggacuucagcgaggugagcaacgugcagagacugaugagaaaggagagaagagacgacaacgaccugaagagacugagagaccugaaccaggccgugaacaaccugguggagcugaagagcacccagcagaagagcauccugagagugggcacccugaccagcgacgaccugcugauccuggccgccgaccuggagaagcugaagagcaaggugaccagaaccgagagaccccugagcgccggcguguacaugggcaaccugagcagccagcagcuggaccagagaagagcccugcugagcaugaucggcaugagcagcggcgugcagggcgccagagccggcagagacggcguggugagagugugggacgugaagaacgccgagcugcugaacaaccaguucggcaccaugcccagccugacccuggccugccugaccaagcagggccagguggaccugaacgacguggugcaggcccugaccgaccugggccugaucuacaccgccaaguaccccaacaccagcgaccuggacagacugacccagagccaccccauccugaacaugaucgacaccaagaagagcagccugaacaucagcggcuacaacuucagccugggcgccgccgugaaggccggcgccugcaugcuggacggcggcaacaugcuggagaccaucaaggugagcccccagaccauggacggcauccugaagagcauccugaaggugaagaaggcccugggcauguucaucagcgagacccccggcgagagaaaccccuacgagaacauccuguacaagaucugccugagcggcgacggcuggcccuacaucgccagcagaaccagcaucaccggcagagccugggagaacaccgugguggaccuggagagcgacggcaagccccagaaggccggcagcaacaacagcaacaagagccugcagagcgccggcuucaccgccggccugaccuacagccagcugaugacccugaaggacgccaugcugcagcuggaccccaacgccaagaccuggauggacaucgagggcagacccgaggaccccguggagguggcccuguaccagcccagcagcggcugcuacauccacuucuucagagagcccaccgaccugaagcaguucaagcaggacgccaaguacagccacggcaucgacgugaccgaccuguucgccgcccagcccggccugaccagcgccgugaucgacgcccugcccagaaacauggugaucaccugccagggcagcgacgacaucaagaagcugcuggagagccagggcagaaaggacaucaagcugaucgacaucgcccugagcaagaccgacagcagaaaguacgagaacgccgugugggaccaguacaaggaccugugccacaugcacaccggcguggugguggagaagaagaagagaggcggcaaggaggagaucaccccccacugcgcccugauggacugcaucauguucgacgccgccgugagcggcggccugaacaccagcgugcugagagccgugcugcccagagacaugguguucagaaccagcacccccagaguggugcugugaggacuaguaauaaggaaacuguaugaaugucugugggcaggaagugaagagauccuucuguaaagguuuuuggaauuaugucugcugaauaauaaacuuuuuugaaauaauaaaucugguagaaaaaugagaucucaaaggcucuuuucagagccaccaaaaaaaaaaaaaaaaaaaaaaaaaaaaaaaaaaaaaaaaaaaaaaaaaaaaaaaaaaaaaaaaagaauu

SEQ ID NO: 17417 - RNA, 2015 nt, Artificial Sequence
  mRNA product Design b-4 (hSL-A64-N5) comprising derived and/or modified sequence from LASV(G502-SLE-2009;Clade IV)__AIT17127__NP (opt4)
aggagagucccgcagucggcguccagcggcucugcuuguucgugugugugucguugcaggccuuauucaagcuuaccaugagcgccagcaaggagaucaagagcuuccuguggacccagagccugagaagagagcugagcggcuacugcagcaacaucaagcugcagguggugaaggacgcccaggcccugcugcacggccuggacuucagcgaggugagcaacgugcagagacugaugagaaaggagagaagagacgacaacgaccugaagagacugagagaccugaaccaggccgugaacaaccugguggagcugaagagcacccagcagaagagcauccugagagugggcacccugaccagcgacgaccugcugauccuggccgccgaccuggagaagcugaagagcaaggugaucagaaccgagagaccccugagcgccggcguguacaugggcaaccugagcagccagcagcuggaccagagaagagcccugcugagcaugaucggcaugagcggcggcaaccagggcgugagagccggcaaggacggcguggugagagugugggacgugaagaacgccgagcugcugaacaaccaguucggcaccaugcccagccugacccuggccugccugaccaagcagggccagguggaccugaacgacgccgugcaggcccugaccgaccugggccugaucuacaccgccaaguaccccaacaccagcgaccuggacagacugacccagagccaccccauccugaacaugaucgacaccaagaagagcagccugaacaucagcggcuacaacuucagccugggcgccgccgugaaggccggcgccugcaugcuggacggcggcaacaugcuggagaccaucaaggugagcccccagaccauggacggcauccugaagagcauccugaaggugaagaaggcccugggcauguucaucagcgacacccccggcgagagaaaccccuacgagaacauccuguacaagaucugccugagcggcgacggcuggcccuacaucgccagcagaaccagcaucaccggcagagccugggagaacaccgugguggaccuggagagcgacggcaagccccagaaggccggcagcaacaacagcaacaagagccugcagagcgccggcuucaccgccggccugaccuacagccagcugaugacccugaaggacgccaugcugcagcuggaccccaacaccaagaccuggauggacaucgagggcagacccgaggaccccguggagaucgcccuguaccagcccagcagcggcugcuacauccacuucuucagagagcccaccgaccugaagcaguucaagcaggacgccaaguacagccacggcaucgacgugaccgaccuguucgccgcccagcccggccugaccagcgccgugaucgacgcccugcccagaaacauggugaucaccugccagggcagcgacgacaucagaaagcugcuggagagccagggcagaaaggacaucaagcugaucgacaucgcccugaacaagaccgacagcagaaaguacgagaacgccgugugggaccaguacaaggaccugugccacaugcacaccggcguggugguggagaagaagaagagaggcggcaaggaggagaucaccccccacugcgcccugauggacugcaucauguucgacgccgccgugagcggcggccugaacaccagcgugcugagagccgugcugcccagagacaugguguucagaaccagcacccccagaguggugcugugaggacuaguaauaaggaaacuguaugaaugucugugggcaggaagugaagagauccuucuguaaagguuuuuggaauuaugucugcugaauaauaaacuuuuuugaaauaauaaaucugguagaaaaaugagaucucaaaggcucuuuucagagccaccaaaaaaaaaaaaaaaaaaaaaaaaaaaaaaaaaaaaaaaaaaaaaaaaaaaaaaaaaaaaaaaaagaauu

SEQ ID NO: 17418 - RNA, 2015 nt, Artificial Sequence
  mRNA product Design b-4 (hSL-A64-N5) comprising derived and/or modified sequence from LASV(G733-SLE-2010;Clade IV)__AIT17155__NP (opt4)
aggagagucccgcagucggcguccagcggcucugcuuguucgugugugugucguugcaggccuuauucaagcuuaccaugagcgccagcaaggagaucaagagcuuccuguggacccagagccugagaagagagcugagcggcuacugcagcaacaucaagcugcagguggugaaggacgcccaggcccugcugcacggccuggacuucagcgaggugagcaacgugcagagacugaugagaaaggagagaagagacgacaacgaccugaagagacugagagaccugaaccaggccgugaacaaccugguggagcugaagagcacccagcagaagagcgugcugagagugggcacccugaccagcgacgagcugcuggugcuggccgccgaccuggagaagcugaagagcaaggugaucagaaccgagagaccccugagcgccggcguguacaugggcaaccugagcagccagcagcuggaccagagaagagcccugcugagcaugaucggcaugagcggcggcaaccagggcgccagaaccggcagagacggcguggugagagugugggacgugaagaacgccgagcugcugaacaaccaguucggcaccaugcccagccugacccuggccugccugaccaagcagggccagguggaccugaacgacgccgugcaggcccugaccgaccugggccugaucuacaccgccaaguaccccaacaccagcgaccuggacagacugacccagagccaccccauccugaacaugaucgacaccaagaagagcagccugaacaucagcggcuacaacuucagccugggcgccgccgugaaggccggcgccugcaugcuggacggcggcaacaugcuggagaccaucaaggugagcccccagaccauggacggcauccugaagagcauccugaaggugaagaaggcccugggcauguucaucagcgacacccccggcgagagaaaccccuacgagaacauccuguacaagaucugccugagcggcgacggcuggcccuacaucgccagcagaaccagcaucaccggcagagccugggagaacaccgugguggaccuggagagcgacggcaagccccagaaggccggcagcaacaacagcaacaagagccugcagagcgccggcuucaccgccggccugaccuacagccagcugaugacccugaaggacgccaugcugcagcuggaccccaacgccaagaccuggauggacaucgagggcagacccgaggaccccguggagaucgcccuguaccagcccagcagcggcugcuacauccacuucuucagagagcccaccgaccugaagcaguucaagcaggacgccaaguacagccacggcaucgacgugaccgaccuguucgccgcccagcccggccugaccagcgccgugaucgacgcccugcccagaaacauggugaucaccugccagggcagcgacgacaucagaaagcugcuggagagccagggcagaaaggacaucaagcugaucgacaucgcccugagcaagaucgacagcagaaaguacgagaacgccgugugggaccaguacaaggaccugugccacaugcacaccggcguggugguggagaagaagaagagaggcggcaaggaggagaucaccccccacugcgcccugauggacugcaucauguucgacgccgccgugagcggcggccugaacagccuggugcugagagccgugcugcccagagacaugguguucagaaccagcacccccagaguggugcugugaggacuaguaauaaggaaacuguaugaaugucugugggcaggaagugaagagauccuucuguaaagguuuuuggaauuaugucugcugaauaauaaacuuuuuugaaauaauaaaucugguagaaaaaugagaucucaaaggcucuuuucagagccaccaaaaaaaaaaaaaaaaaaaaaaaaaaaaaaaaaaaaaaaaaaaaaaaaaaaaaaaaaaaaaaaaagaauu

SEQ ID NO: 17419 - RNA, 2015 nt, Artificial Sequence
  mRNA product Design b-4 (hSL-A64-N5) comprising derived and/or modified sequence from MOPV/LASV reassortant(IGS-1;Clade IV)__AFY05578__NP (opt4)
aggagagucccgcagucggcguccagcggcucugcuuguucgugugugugucguugcaggccuuauucaagcuuaccaugagcgccagcaaggagaucaagagcuuccuguggacccagagccugagaagagagcugagcggcuacugcagcaacaucaagcugcagguggugaaggacgcccaggcccugcugcacggccuggacuucagcgaggugagcaacgugcagagacugaugagaaaggagagaagagacgacaacgaccugaagagacugagagaccugaaccaggccgugaacaaccugguggagcugaagagcacccagcagaagagcauccugagagugggcacccugaccagcgacgaccugcugauccuggccgccgaccuggagaagcugagaagcaaggugaucagaaccgagagaccccugagcgccggcguguacaugggcaaccugagcagccagcagcuggaccagagaagagcccugcugaacaugaucggcaugagcggcggcaaccagggcgccagagccggcagagacggcguggugagagugugggacgugaagaacgccgagcugcugagcaaccaguucggcaccaugcccagccugacccuggccugccugaccaagcagggccagguggaccugaacgacgccgugcaggcccugaccgaccugggccugaucuacaccgccaaguaccccaacaccagcgaccuggacagacugacccagagccaccccauccugaacaugaucgacaccaagaagagcagccugaacaucagcggcuacaacuucagccugggcgccgccgugaaggccggcgccugcaugcuggacggcggcaacaugcuggagaccaucaaggugagcccccagaccauggacggcauccugaagagcauccugaaggugaagaaggcccugggcauguucaucagcgacacccccggcgagagaaaccccuacgagaacauccuguacaagaucugccugagcggcgacggcuggcccuacaucgccagcagaaccagcaucaccggcagagccugggagaacaccgugguggaccuggagagcgacggcaagccccagaaggccgacagcaacaacagcagcaagagccugcagagcgccggcuucaccgccggccugaccuacagccagcugaugacccugaaggacgccaugcugcagcuggaccccaacgccaagaccuggauggacaucgagggcagacccgaggaccccguggagaucgcccuguaccagcccagcagcggcugcuacauccacuucuucagagagcccaccgaccugaagcaguucaagcaggacgccaaguacagccacggcaucgacgugaccgaccuguucgccacccagcccggccugaccagcgccgugaucgacgcccugcccagaaacauggugaucaccugccagggcagcgacgacaucagaaagcugcuggagagccagggcagaaaggacaucaagcugaucgacaucgaccugagcaagaccgacagcagaaaguacgagaacgccgugugggaccaguacaaggaccugugccacaugcacaccggcguggugguggagaagaagaagagaggcggcaaggaggagaucaccccccacugcgcccugauggacugcaucauguucgacgccgccgugagcggcggccugaacaccagcgugcugagagccgugcugcccagagacaugguguucagaaccagcacccccagaguggugcugugaggacuaguaauaaggaaacuguaugaaugucugugggcaggaagugaagagauccuucuguaaagguuuuuggaauuaugucugcugaauaauaaacuuuuuugaaauaauaaaucugguagaaaaaugagaucucaaaggcucuuuucagagccaccaaaaaaaaaaaaaaaaaaaaaaaaaaaaaaaaaaaaaaaaaaaaaaaaaaaaaaaaaaaaaaaaagaauu

SEQ ID NO: 17420 - RNA, 2015 nt, Artificial Sequence
  mRNA product Design b-4 (hSL-A64-N5) comprising derived and/or modified sequence from LASV(LM765-SLE-2012;Clade IV)__AIT17815__NP (opt4)
aggagagucccgcagucggcguccagcggcucugcuuguucgugugugugucguugcaggccuuauucaagcuuaccaugagcgccagcaaggagaucaagagcuuccuguggacccagagccugagaagagagcugagcggcuacugcagcaacaucaagcugcagguggugaaggacgcccaggcccugcugcacggccuggacuucagcgaggugagcaacgugcagagacugaugagaaaggagagaagagacgacaacgaccugaagagacugagagaccugaaccaggccgugaacaaccugguggagcugaagagcacccagcagaagagcauccugagagugggcacccugaccagcgacgaccugcugauccuggccgccgaccuggagaagcugaagagcaaggugaccagaaccgagagaccccugagcgccggcguguacaugggcaaccugagcagccagcagcuggaccagagaagagcccugcuggacaugaucggcaugagcggcagcaaccagggcgccagagccggcagagacggcguggugagagugugggacgugaagaacgccgagcugcugaacaaccaguucggcaccaugcccagccugacccuggccugccugaccaagcagggccagguggaccugaacgacgccgugcaggcccugaccgaccugggccugaucuacaccgccaaguaccccaacaccagcgaccuggacagacugacccagagccaccccauccugaacaugaucgacaccaagaagagcagccugaacaucagcggcuacaacuucagccugggcgccgccgugaaggccggcgccugcaugcuggacggcggcaacaugcuggagaccaucaaggugagcccccagaccauggacggcauccugaagagcauccugaaggugaagaaggcccugggcauguucaucagcgacgcccccggcgagagaaaccccuacgagaacauccuguacaagaucugccugagcggcgacggcuggcccuacaucgccagcagaaccagcaucaccggcagagccugggagaacaccgugguggaccuggagagcgacggcaagccccagaaggccggcagcaacggcagcaacaagagccugcagagcgccggcuucaccgccggccugaccuacagccagcugaugacccugaaggacgccaugcugcagcuggaccccaacgccaagaccuggauggacaucgagggcagacccgaggaccccguggagaucgcccuguaccagcccagcagcggcugcuacauccacuucuucagagagcccaccgaccugaagcaguucaagcaggacgccaaguacagccacggcaucgacgugaccgaccuguucgccgcccagcccggccugaccagcgccgugaucgacgcccugcccagaaacauggugaucaccugccagggcagcgacgacaucagaaagcuguucgagagccagggcagaaaggacaucaagcugaucgacaucgcccugagcaagaccgacagcagaaaguacgagaacgccgugugggaccaguacaaggaccugugccacaugcacaccggcaucgugguggagaagaagaagagaggcggcaaggaggagaucaccccccacugcgcccugauggacugcaucauguucgacgccgccgugagcggcggccugaacaccagcgugcugagagccgugcugcccagagacaugguguucagaaccagcacccccagaguggugcugugaggacuaguaauaaggaaacuguaugaaugucugugggcaggaagugaagagauccuucuguaaagguuuuuggaauuaugucugcugaauaauaaacuuuuuugaaauaauaaaucugguagaaaaaugagaucucaaaggcucuuuucagagccaccaaaaaaaaaaaaaaaaaaaaaaaaaaaaaaaaaaaaaaaaaaaaaaaaaaaaaaaaaaaaaaaaagaauu

SEQ ID NO: 17421 - RNA, 2015 nt, Artificial Sequence
  mRNA product Design b-4 (hSL-A64-N5) comprising derived and/or modified sequence from LASV(LM776-SLE-2012;Clade IV)__AIT17825__NP (opt4)
aggagagucccgcagucggcguccagcggcucugcuuguucgugugugugucguugcaggccuuauucaagcuuaccaugagcgccagcaaggagaucaagagcuuccuguggacccagagccugagaagagagcugagcagcuacugcagcaacaucaagcugcagguggugaaggacgcccaggcccugcugcacggccuggacuucagcgaggugagcaacgugcagagacugaugagaaaggagagaagagacgacaacgaccugaagagacugagagaccugaaccaggccgugaacaaccugguggagcugaagagcacccagcagaagagcauccugagagugggcacccugaccagcgacgaccugcugauccuggccgccgaccuggagaagcugaagagcaaggugaccagaaccgagagaccccugagcgccggcguguacaugggcaaccugagcagccagcagcuggaccagagaagagcccugcugagcaugaucggcaugagcggcagcaaccagggcgccagagccggcagagacggcguggugagagugugggacgugaagaacgccgagcugcugaacaaccaguucggcaccaugcccagccugacccuggccugccugaccaagcagggccagguggaccugaacgacgccgugcaggcccugaccgaccugggccugaucuacaccgccaaguaccccaacaccagcgaccuggacagacugacccagagccaccccauccugaacaugaucgacaccaagaagagcagccugaacaucagcggcuacaacuucagccugggcgccgccgugaaggccggcgccugcaugcuggacggcggcaacaugcuggagaccaucaaggugagcccccagaccauggacggcauccugaagagcauccugaaggugaagaaggcccugggcauguucaucagcgacacccccggcgagagaaaccccuacgagaacauccuguacaagaucugccugagcggcgacggcuggcccuacaucgccagcagaaccagcaucaccggcagagccugggagaacaccgugguggaccuggagagcgacggcaagccccagaaggccggcagcaacaacagcaacaagagccugcagagcgccggcuucaccgccggccugaccuacagccagcugaugacccugaaggacgccaugcugcagcuggaccccaacgccaagaccuggauggacaucgagggcagacccgaggaccccguggagguggcccuguaccagcccagcagcggcugcuacauccacuucuucagagagcccaccgaccugaagcaguucaagcaggacgccaaguacagccacggcaucgacgugaccgaccuguucgccgcccagcccggccugaccagcgccgugaucgacgcccugcccagaaacauggugaucaccugccagggcagcgacgacaucagaaagcugcuggagagccagggcagaaaggacaucaagcugaucgacaucgcccugagcaagaccgacagcagaaaguacgagaacgccgugugggaccaguacaaggaccugugccacaugcacaccggcguggugguggagaagaagaagagaggcggcaaggaggagaucaccccccacugcgcccugauggacugcaucauguucgacgccgccgugagcggcggccugaacaccagcgugcugagagccgugcugcccagagacaugguguucagaaccagcacccccagaguggugcugugaggacuaguaauaaggaaacuguaugaaugucugugggcaggaagugaagagauccuucuguaaagguuuuuggaauuaugucugcugaauaauaaacuuuuuugaaauaauaaaucugguagaaaaaugagaucucaaaggcucuuuucagagccaccaaaaaaaaaaaaaaaaaaaaaaaaaaaaaaaaaaaaaaaaaaaaaaaaaaaaaaaaaaaaaaaaagaauu

SEQ ID NO: 17422 - RNA, 2015 nt, Artificial Sequence
  mRNA product Design b-4 (hSL-A64-N5) comprising derived and/or modified sequence from LASV(Mad39;Clade IV)__ANH09723__NP (opt4)
aggagagucccgcagucggcguccagcggcucugcuuguucgugugugugucguugcaggccuuauucaagcuuaccaugagcgccagcaaggagaucaagagcuuccuguggacccagagccugagaagagagcugagcggcuacugcagcaacaucaagcugcagguggugaaggacgcccaggcccugcugcacggccuggacuucagcgaggugagcaacgugcagagacugaugagaaagcagagaagagacgacaacgaccugaagagacugagagaccugaaccaggccgugaacaaccugguggagcugaagagcacccagcagaagagcgugcugagagugggcacccugaccagcgacgaccugcugacccuggccgccgaccuggagaagcugaagagcaaggugaccagaaccgagagaccccugaccgccggcguguacaugggcaaccugagcagccagcagcuggaccagagaagagcccugcugaacaugaucggcaugagcggcggcaaccagggcgccagaaccggcagagacggcguggugagagugugggacgugaagaacgccgagcugcugaacaaccaguucggcaccaugcccagccugacccuggccugccugaccaagcagggccagguggaccugaacgacguggugcaggcccugaccgaccugggccugaucuacaccgccaaguaccccaacaccagcgaccuggacagacugacccagagccaccccauccugaacaugaucgacaccaacaagagcagccugaacaucagcggcuacaacuucagccugggcgccgccgugaaggccggcgccugcaugcuggacggcggcaacaugcuggagaccaucaaggugagcccccagaccauggacggcauccugaagagcauccugaaggugaagaagagccugggcauguucaucagcgacacccccggcgagagaaaccccuacgagaacauccuguacaagaucugccugagcggcgacggcuggcccuacaucgccagcagaaccagcaucaccggcagagccugggagaacaccgugguggaccuggagagcggcggcaagccccagaaggccggcagcaacaacagcaacaagagccugcagagcgccggcuucgccgccggccugaccuacagccagcugaugacccugaaggacgccaugcugcagcuggaccccaacgccaagaccuggauggacaucgagggcagacccgaggaccccguggagaucgcccuguaccagcccaucagcggcugcuacauccacuucuucagagagcccaccgaccugaagcaguucaagcaggacgccaaguacagccacggcaucgacgugaccgaccuguucgccgcccagcccggccugaccagcgccgugaucgaggcccugcccagaaacauggugaucaccugccagggcagcgacgacaucagaaagcuguucgagagccagggcagaaaggacaucaagcugaucgacaucgcccugagcaagaccgacagcagaaaguacgagaacgccgugugggaccaguacaaggaccugugccacaugcacaccggcguggugguggagaagaagaagaagggcggcaaggaggagaucaccccccacugcgcccugauggacugcaucauguucgacgccgccgugagcggcggccugaacacccuggugcugagagccgugcugcccagagacaugguguucagaaccagcacccccaagguggugcugugaggacuaguaauaaggaaacuguaugaaugucugugggcaggaagugaagagauccuucuguaaagguuuuuggaauuaugucugcugaauaauaaacuuuuuugaaauaauaaaucugguagaaaaaugagaucucaaaggcucuuuucagagccaccaaaaaaaaaaaaaaaaaaaaaaaaaaaaaaaaaaaaaaaaaaaaaaaaaaaaaaaaaaaaaaaaagaauu

SEQ ID NO: 17423 - RNA, 2015 nt, Artificial Sequence
  mRNA product Design b-4 (hSL-A64-N5) comprising derived and/or modified sequence from LASV(Z0947-SLE-2011;Clade IV)__AIT17841__NP (opt4)
aggagagucccgcagucggcguccagcggcucugcuuguucgugugugugucguugcaggccuuauucaagcuuaccaugagcgccagcaaggagaucaagagcuuccuguggacccagagccugagaagagagcugagcggcuacugcagcaacaucaagcugcagguggugaaggacgcccaggcccugcugcacggccuggacuucagcgaggugagcaacgugcagagacugaugagaaaggagagaagagacgacaacgaccugaagagacugagagaccugaaccaggccgugaacaaccugguggagcugaagagcacccagcagaagagcauccugagagugggcacccugaccagcgacgaccugcugauccuggccgccgaccuggagaagcugaagagcaaggugaccagaaccgagagaccccugagcgccggcguguacaugggcaaccugagcagccagcagcuggaccagagaagagcccugcugaacaugaucggcaugagcggcagcaaccagggcgccagaaccggcagagacggcguggugagagugugggacgugaagaacgccgagcugcugaacaaccaguucggcaccaugcccagccugacccuggccugccugaccaagcagggccagguggaccugaacgacgccgugcaggcccugaccgaccugggccugaucuacaccgccaaguaccccaacaccagcgaccuggacagacugacccagagccaccccauccugaacaugaucgacaccaagaagagcagccugaacaucagcggcuacaacuucagccugggcgccgccgugaaggccggcgccugcaugcuggacggcggcaacaugcuggagaccaucaaggugagcccccagaccauggacggcauccugaagagcauccugaaggugaagaaggcccugggcauguucaucagcgacgcccccggcgagagaaaccccuacgagaacauccuguacaagaucugccugagcggcgacggcuggcccuacaucgccagcagaaccagcaucaccggcagagccugggagaacaccgugguggaccuggagagcgacggcaagccccagaaggccggcagcaacggcagcaacaagagccugcagagcgccggcuucaccgccggccugaccuacagccagcugaugacccugaaggacgccaugcugcagcuggaccccaacgccaagaccuggauggacaucgagggcagacccgaggaccccguggagaucgcccuguaccagcccagcagcggcugcuacauccacuucuucagagagcccaccgaccugaagcaguucaagcaggacgccaaguacagccacggcaucgacgugaccgaccuguucgccgcccagcccggccugaccagcgccgugaucgacgcccugcccagaaacauggugaucaccugccagggcagcgacgacaucagaaagcuguucgagagccagggcagaaaggacaucaagcugaucgacaucgcccugagcaagaccgacagcagaaaguacgagaacgccgugugggaccaguacaaggaccugugccacaugcacaccggcaucgugguggagaagaagaagagaggcggcaaggaggagaucaccccccacugcgcccugauggacugcaucauguucgacgccgccgugagcggcggccugaacaccagcgugcugagagccgugcugcccagagacaugguguucagaaccagcacccccagaguggugcugugaggacuaguaauaaggaaacuguaugaaugucugugggcaggaagugaagagauccuucuguaaagguuuuuggaauuaugucugcugaauaauaaacuuuuuugaaauaauaaaucugguagaaaaaugagaucucaaaggcucuuuucagagccaccaaaaaaaaaaaaaaaaaaaaaaaaaaaaaaaaaaaaaaaaaaaaaaaaaaaaaaaaaaaaaaaaagaauu

SEQ ID NO: 17424 - RNA, 2015 nt, Artificial Sequence
  mRNA product Design b-4 (hSL-A64-N5) comprising derived and/or modified sequence from LASV(Josiah;Clade IV)__NP_694869__NP (opt5)
aggagagucccgcagucggcguccagcggcucugcuuguucgugugugugucguugcaggccuuauucaagcuuaccaugagcgccuccaaggagaucaaaucuuuccuguggacccagagccucagacgggaacuguccggcuacugcucuaacauuaagcugcaaguggucaaagacgcucaggcccugcuccacgggcuggauuuuagcgagguuuccaaugugcagcgccuuaugagaaaggaacggcgcgacgauaacgaccugaaaagacuccgggaucugaaucaggcggugaacaaucuggucgagcucaagucuacacaacaaaagagcauccugcgcgugggaacgcuuaccuccgacgaucugcucauucuggcugccgaccuugaaaaacuuaagagcaaaguuaucagaacagagcggccccucucugccggcguguauauggggaaccuguccagccagcagcuggaucagcgcagagcucuccugaauaugauuggaaugucuggcgggaaccagggagcccgggcuggccgcgacggcgucgugagaguuugggaugugaagaaugccgagcuucugaacaaucaguucgggaccaugccuucccucacacuggcgugucuuaccaaacagggacaagucgaccugaacgaugccgugcaggcucucacagaccugggccugaucuacaccgccaaguauccgaauacgagcgaccucgaucggcugacccagucucaucccauccuuaacaugauugacacaaagaaauccagccugaauaucuccggguacaacuuuucucucggagcugccgugaaggcgggcgccugcaugcuggaugggggaaacaugcuugaaaccauuaaagucagcccucaaacaauggacggcauccugaaguccauucucaaaguuaagaaagcucugggcauguucaucagcgauacccccggggagcgcaauccuuaugaaaacauucuguacaagaucugucucucuggagacggcuggcccuauaucgccuccagaacgagcauuacagggcgggcuugggagaauaccgugguggaucuggagucugacggaaagccucagaaagccgauagcaacaauuccucuaagagccuucaguccgccggcuuuacagcugggcugaccuacagccagcucaugacccugaaagacgcgaugcugcaacuugauccgaacgccaagacauggauggacaucgaaggaagacccgaggacccugucgaaauugcucucuaccagcccucuuccggcugcuauauccacuucuuucgcgagccuacggaucugaaacaguucaagcaggacgccaaguacagccauggcauugaugugaccgaccuguuugccacacaacccgggcucaccucugcuguuaucgaugcccugccgcggaauauggugaucacaugucagggauccgacgauauuagaaaacuucuggaaagccagggccgcaaggacaucaaacucauugauaucgcgcuguccaagaccgacucucggaaauaugagaacgcugucugggaucaguacaaggaccugugccacaugcauacgggggugguuguggagaagaaaaagagaggaggcaaagaagagauuacaccucacugugcccuuauggauugcaucauguucgacgccgcugucagcgggggccucaauaccuccgugcugcgcgccguccugccccgggacaugguguuuagaaccucuacaccucgcguugugcucugaggacuaguaauaaggaaacuguaugaaugucugugggcaggaagugaagagauccuucuguaaagguuuuuggaauuaugucugcugaauaauaaacuuuuuugaaauaauaaaucugguagaaaaaugagaucucaaaggcucuuuucagagccaccaaaaaaaaaaaaaaaaaaaaaaaaaaaaaaaaaaaaaaaaaaaaaaaaaaaaaaaaaaaaaaaaagaauu

SEQ ID NO: 17425 - RNA, 2015 nt, Artificial Sequence
  mRNA product Design b-4 (hSL-A64-N5) comprising derived and/or modified sequence from LASV(LP;Clade I)__AAF86702__NP (opt5)
aggagagucccgcagucggcguccagcggcucugcuuguucgugugugugucguugcaggccuuauucaagcuuaccaugagcaacuccaaggagaucaaaucuuuccuguggacccagagccucagacgggaacuguccggcuacugcucuaauauuaagcuccaaguggucaaagacgcccaggcucugcuccacgggcuggauuuuagcgagguuuccaacgugcagcgccuuaugagaaagcagaaacgggacgaugccgaccugaagcgccucagagaucugaaucaagcggugaacaaucuggucgaacucaagucuacacagcagaaaaacgugcugcggguuggaacgcuuagcuccgacgaucugaucacccucgcugccgaccuggagaaacuuaaaagcaaggugauucgcacagaaagaccccugucuuccggcgucuauauggggaaucucagcucucagcaacuggaucagcggcgcgcccugcucuccaugaucggaaugagcggcgggccucagggaaacagaaccggcggcgacggggugguucgggugugggaugucaaaaaugcugagcugcuuaacaaucaguucggaacaaugccgucucugacccucgccugucugacaaagcaaggccagguggaccuuaacgaugcugugcaggcccugaccgaccucgggcugauuuacacggcgaaguaucccaauuccagcgaccuggauaugcucacccaaucccauccuauccugggaauggucgacacaaagaagucuagccuuaacaucuccggcuacaauuuuagccugggggccgcuguuaaagccggagcuugcaugcucgauggcggcaacaugcuggagaccauuaaggugucuccccagacaauggacgggauccuuaaauccauucugaaggugaaacgcagccucggaauguucaucucugauaccccuggcgaaagaaaccccuaugagaauauucuguacaagaucugucugagcggggaaggauggccuuauauugccucccggacgucuaucacaggccgcgcgugggagaacacccucgucgaccuggagagcgauaauaagccgcccaaacuuaacuccgccgggagcaauaagucucugcaggcugccggacucaacgcuggccugacauacucccagcugaugacccuuaaagacugcaugcuccaacuggauccuagcucuaagaccuggaucgacauugaaggcagacccgaggauccuguggaaaucgcccuguuucagcccuccagcggguguuacauucacuucuuucgggagccgacagaccucaaacaguucaagcaggacgccaaguauucccauggaaucgauguuacggaccuguuuucuacccaaccuggccuuacaagcgcugugauugaagcgcugcccagaaauaugguccuuaccugccagggguccgaugacaucaaaaagcugcuggagucucagggacgccgggauaucaaacuuauugacaucagccucuccaaggccgauagcagaaaauucgagaacgcugugugggaccaguacaaggaucugugucacaugcauacaggcguuguggucgaaaagaaaaagcgcgggggcaaagaggaaauuaccccucacugcgcccugcucgacuguaucauguuugaugccgcuacgacaggaucucugaauauuaccacccuucgggccgugcugcccagagacauggucuuccgcacauccacccccaaggugguucucugaggacuaguaauaaggaaacuguaugaaugucugugggcaggaagugaagagauccuucuguaaagguuuuuggaauuaugucugcugaauaauaaacuuuuuugaaauaauaaaucugguagaaaaaugagaucucaaaggcucuuuucagagccaccaaaaaaaaaaaaaaaaaaaaaaaaaaaaaaaaaaaaaaaaaaaaaaaaaaaaaaaaaaaaaaaaagaauu

SEQ ID NO: 17426 - RNA, 2015 nt, Artificial Sequence
  mRNA product Design b-4 (hSL-A64-N5) comprising derived and/or modified sequence from LASV(803213;Clade II)__AAF86704__NP (opt5)
aggagagucccgcagucggcguccagcggcucugcuuguucgugugugugucguugcaggccuuauucaagcuuaccaugagcgccuccaaggaggugaaaucuuuccuguggacccagagccucagacgggaacuguccggcuacugcucuaacaucaaacuucaagucguuaaggacgcucaggcccugcuccacgggcuggauuuuagcgaggugaauaacgugcagcgccuuaugagaaagcagaaacgggacgauggagaccugaagcgccucagagaucugaaucaagcggucaacaaucugguggaacucaaguccacacagcagaaaucuauucugcggguuggcacgcuuaccagcgacgaucugcucacacuggcugccgaccuugagaagcugaaauccaaggugauccgcaccgaaagaccccucagcucuggggucuauaugggaaaccuguccacacagcaacuggagcagcggcgcgcccuccugaauaugauuggcauggugggaggagcucagggcacccagccuggcagagaugggguugugcgggucugggacgugaaaaacccggaucuucugaauaaccaauucggaacaaugcccagccucacccuggccugucuuacgaagcagggccagguggaccugaaugaugcuguccucgcccugaccgaccuggggcucaucuacacagcgaaguauccuaacucuuccgaccuggaucgccuuagccaaucucaucccauucugaauaugguugacaccaaaaaguccagccucaacaucuccggauacaauuuuucucugggcgccgcugugaaagccggggcuugcaugcuugauggaggcaacaugcuggagacaaucaaggugaccccucagacgauggacggcauucucaaaagcauccugaaggucaaaagaucccuggggauguucgugagcgauacacccggagaacggaacccuuaugagaauauucucuacaagaucugucugucuggcgacggguggccguauauugccucccgcaccagcaucguugggagagcgugggaaaacacaaccguggaucuugagucugacggcaagccccagaaagucgggaccgccggaagcaauaagucccugcagucugcuggcuuuccuacaggccucacguacagccaacugaugacccugaaagauuccaugaugcagcuugaccccagcgccaagacauggauugauaucgaggggcggccugaagaccccguggagaucgcucucuaccagccgaugucuggaugcuauauucacuucuuuagagaaccuaccgaccugaaacaguucaagcaagaugccaaguacucccauggcaucgacguugccgaucuguuucccgcucagccugggcucacaagcgcggugauugaggcccugccccgcaacaugguccuuaccugucagggaucugacgauaucaaaaagcugcucgacucccagggccggagagauauuaaacugaucgacaucagccuguccaagguggauucucgcaaauucgaaaaugcugucugggaccaaugcaaggaucuuugucacaugcauacgggggugguuguggagaagaaaaagcggggcggaaaagaggaaauuacaccccacugcgcccucauggacuguaucauguuugaugccgcugucagcggcgggcugaacauuccugugcugagagccguucucccgcgcgacaugguguuccggaccuccucucccaaggucgugcugugaggacuaguaauaaggaaacuguaugaaugucugugggcaggaagugaagagauccuucuguaaagguuuuuggaauuaugucugcugaauaauaaacuuuuuugaaauaauaaaucugguagaaaaaugagaucucaaaggcucuuuucagagccaccaaaaaaaaaaaaaaaaaaaaaaaaaaaaaaaaaaaaaaaaaaaaaaaaaaaaaaaaaaaaaaaaagaauu

SEQ ID NO: 17427 - RNA, 2018 nt, Artificial Sequence
  mRNA product Design b-4 (hSL-A64-N5) comprising derived and/or modified sequence from LASV(GA391;Clade III)__CAA36646__NP (opt5)
aggagagucccgcagucggcguccagcggcucugcuuguucgugugugugucguugcaggccuuauucaagcuuaccaugagcgccuccaaggaggugagaucuuuccuguggacccagagccuccggcgcgaacuguccggcuacugcucuaacaucaaacuucaagucguuaaggacgcucaggcccugcuccacgggcuggauuuuagcgagguguccaaugugcagagacuuaugcggaaacagaagcgcgacgauggagaccugaaaagacuccgggaucugaaccaagcggucaauaaccugguggaacucaagucuacacagcagaaaagcguucugcgcgugggcacgcuuuccagcgacgaucugcucauucuggcugccgaccuugagaaacugaagucuaaagucaccagaacagaacggccccucuccagcgggguguauaugggaaaucugucuucccagcaacuggaucagcgcagagcccuccugaacaugaucggcaugaccgggguuagcggaggcggcaagggggcuucugacggaauugugcgggucugggaugugaaaaaugccgagcuucugaacaaucaguucggcacaaugccuucccucacccuggcuugucuuacaaagcaggggcaaguggaccugaacgaugccguccaggcgcucaccgaccugggacugaucuacacggccaaguauccgaauagcuccgaccucgaucgccugucucagagccaucccauucuuaacaugaucgacaccaaaaaguccagccugaauaucucuggcuacaacuuuucccucggggcugccguuaaagcuggagccugcaugcuggauggcggcaauaugcuugagacaauuaaggugagcccucaaaccauggacgggauccugaaaucuauucucaaggugaaaaagagccugggaauguucgucuccgauacacccggcgaaagaaacccuuaugagaacauccuguacaagauuugucucucuggggacggauggcccuauaucgcgagccggaccuccauugugggccgcgccugggaaaauacgguuguggaucuggagcaggacaacaaaccucagaagaucgggaauggaggcagcaacaaaucucuucaguccgcuggcuuugccgcugggcugacauacagccaacucaugacccugaaggauuucaaaugcuuuaaucugaucccgaacgccaagacauggauggacauugagggaagacccgaagauccugucgagaucgcccuuuaccagcccucuuccggcuguuaugugcacuucuuucgggaaccuaccgaccucaagcaguucaaacaggacgcuaaguacagccaugggauugauguuaccgaccuguuugcggcccaacccggacugacauccgcugugaucgaggcccucccgagaaauauggucauuacgugccagggcucugaagauauccgcaaacugcuugagagccaggggcggagagacaucaagcugauugauaucacccucuccaaagccgacucucgcaaguucgagaacgcugugugggaucaguuuaaggaccugugucacaugcauacaggcgucgugguugaaaagaagaaacggggaggcaaggaggaaauuaccccucacugcgcccugauggauuguaucauguucgacgcggcugugagcgggggacuugaugccaaaguccucagagugguucugccccgcgacaugguguuccggacauccaccccuaaggucgugcugugaggacuaguaauaaggaaacuguaugaaugucugugggcaggaagugaagagauccuucuguaaagguuuuuggaauuaugucugcugaauaauaaacuuuuuugaaauaauaaaucugguagaaaaaugagaucucaaaggcucuuuucagagccaccaaaaaaaaaaaaaaaaaaaaaaaaaaaaaaaaaaaaaaaaaaaaaaaaaaaaaaaaaaaaaaaaagaauu

SEQ ID NO: 17428 - RNA, 2015 nt, Artificial Sequence
  mRNA product Design b-4 (hSL-A64-N5) comprising derived and/or modified sequence from LASV(AV;Clade V)__CCA30315__NP (opt5)
aggagagucccgcagucggcguccagcggcucugcuuguucgugugugugucguugcaggccuuauucaagcuuaccaugagcgccuccaaggaggugaaaucuuuccuguggacccagagccucagacgggaacuguccggcuacugcucuaacaucaaacuucaagucguuaaggacgcucaggcccugcuccacgggcuggauuuuagcgagguguccaaugugcagcgccuuaugagaaagcagcggcgcgacgauucugaccugaaaagacuccgggaucugaaccaagcggucaauaaccugguggaacucaagagcacacagcagaaguccguucugcgcgugggaacgcuuagcucugacgaucugcucacccuggcugccgaccuugagaaacugaaguccaaagucacaagaaccgaacggccccucagcucuggcguguauauggggaaucuguccagccagcaacuggaucagcgcagagcccuccugaaccuuauuggaaugacaaauggcucucaggggucccaggcuggacgggacggcguugugcgcgucugggaugugaagaacgccgagcugcucaauaaccaauucggcaccaugccuagccugacacuugcuugucugaccaaacagggacagguggaccucaaugaugucguucaagcccugacggaccuggggcucaucuacaccgcgaaguauccgaacacauccgaccuggauagacuuacccagucucaucccauucugaauaugaucgacacaaagaaaagcucccucaacauuagcggcuacaauuuuucucugggggccgcugugaaggccggagcuugcaugcuugauggcgggaacaugcuggagaccaucaaaguguccccucagagcauggacggaauccucaagucuauucugaaagucaagcgggcccugggcauguucgugagcgauacgcccggcgaacgcaacccuuaugagaauauccucuacaaaauuugucuguccggggacggauggcccuauaucgcgucuagaacaagcauuguuggccgggccugggaaaacaccguggucgaucuugagacagacgggaagccucagaagaucggauccggcaauagcaacaaaucucugcaauccgcuggguuuagcgccggacucaccuacucucagcugaugacccugaaggaugcuaugcuucagcucgacccgaaugccaaaacauggauggauauugagggcagacccgaagacccuguggagguugcccuguaccagcccaucuccggcugcuauauccacuucuuucgcgaaccuacggaccugaagcaauucaaacaggaugcuaaguacagccaugggauugacaucgcggaucucuuugccgcucagcccggacugaccuccgccgugauugaggcccuuccgcggaacauggucaucacaugucagggcucugaagacauuaagaaacugcucgagagccaagggagaaaggauaucaaacugaucgacauugcucuguccaagaucgauucucgcaaauucgagaaugccgugugggaccaguauaaggaucuuugccacaugcauaccggagucgugguugaaaagaaaaagcggggcgggaaagaggaaauuacaccucacugugcgcucauggacugcaucauguuugaugcugccgugagcggcggacugaacacccugguccucagagccgugcugccccgcgacaugguuuuccggacguccacaccuagagugguccuuugaggacuaguaauaaggaaacuguaugaaugucugugggcaggaagugaagagauccuucuguaaagguuuuuggaauuaugucugcugaauaauaaacuuuuuugaaauaauaaaucugguagaaaaaugagaucucaaaggcucuuuucagagccaccaaaaaaaaaaaaaaaaaaaaaaaaaaaaaaaaaaaaaaaaaaaaaaaaaaaaaaaaaaaaaaaaagaauu

SEQ ID NO: 17429 - RNA, 2015 nt, Artificial Sequence
  mRNA product Design b-4 (hSL-A64-N5) comprising derived and/or modified sequence from LASV(Togo/2016/7082;Clade VI)__AMR44578__NP (opt5)
aggagagucccgcagucggcguccagcggcucugcuuguucgugugugugucguugcaggccuuauucaagcuuaccaugagcaacuccaaggaggugaaaucuuuccuguggacccagagccucagacgggaacuguccggcuacugcucuaauaucaaacuucaagucguuaaagacgcccaggcucugcuccacgggcuggauuuuagcgagguguccaacgugcagcgccuuaugagaaagcagaaacgggacgauggagaccugaagcgccucagagaucugaaucaagccgucaacaaucugguggaacucaagucuguucagcagaaaagcauucugcgggugggcacacuuacguccgacgaucugcucacccuggcggcugaccuugagaagcugaaaagcaaggucacacgcaccgaaagaccccucucuuccgggguguauaugggaaaccugagcucucagcaacuggaucagcggcgcgcccuccuguccaugaucggcaugagcgggggaaaucagaacucucagccuaaaggcgacggcguugugagagucugggaugugaagaaugccgaccuucugaacaaucaauucgggacaaugccgucccucacccuggcuugucuuacaaagcagggacagguggaucugaacgacgccguccaagcucucaccgaccugggccugauuuacacggccaaauaucccaauagcuccgaucucgaccggcugucucagagccauccuauccuuaacaugauugauaccaagaaauccagccugaauaucucuggguacaacuuuucccucggagcggccaucaagacaggcgcuugcaugcuggacgggggaaacaugcuugagaccauuaaaguuacaccccagaccauggauggcauccucaagagcauucugaaagugaagcgcucucugggcauguucaucagcgacacgccuggggagagaaaucccuaugaaaacauucuguacaagaucugucucuccggagauggcuggccuuauauugccucucggacagcuaucaucgggcgcgccugggagaauaccguggucgaccuggaaagcgauuccaaaccgcagaagauuggaagcaacggcucuaauaaaucccuucaaagcgcgggguuugcccccggacugacauacucucagcucaugacccugaaggacuccaugcugcagcuugauccuaacgcuaaaaccuggaucgacauugagggcagacccgaggacccuguggaaguugcccucuuccagcccaucagcggcugcuacauucacuuuuuccgggagccgacagaucugaagcaauuuaagcaggacgcuaaauauucccaugggaucgaugugacggaccuguucgccgcccagccuggacucaccucugcugucaucgaagcgcugcccagaaauauggugcuuacaugucagggcagcgaugacauuaagaaacugcucgauucccaagggcgccgggacaucaagcugauugauguuucucugaacaaaaucgacagcagaaaguuugagaaugccgugugggaucaguacaaggaccuuugccacaugcauaccggagucguggucgaaaagaagaaaaagggcgggaaagaggagauuacaccucacugugcucuccuggauugcaucauguucgacgccgccguguccggcggacugaacgcuaccguucuccgcgccgugcugccccgggacauggucuuuagaacgagcucucccaaggugguucuuugaggacuaguaauaaggaaacuguaugaaugucugugggcaggaagugaagagauccuucuguaaagguuuuuggaauuaugucugcugaauaauaaacuuuuuugaaauaauaaaucugguagaaaaaugagaucucaaaggcucuuuucagagccaccaaaaaaaaaaaaaaaaaaaaaaaaaaaaaaaaaaaaaaaaaaaaaaaaaaaaaaaaaaaaaaaaagaauu

SEQ ID NO: 17430 - RNA, 2015 nt, Artificial Sequence
  mRNA product Design b-4 (hSL-A64-N5) comprising derived and/or modified sequence from LASV(KAK-428;Clade n.d. (VII))__ANH09741__NP (opt5)
aggagagucccgcagucggcguccagcggcucugcuuguucgugugugugucguugcaggccuuauucaagcuuaccaugagcaacuccaaggaggugaaaucuuuccuguggacccagagccucagacgggaacuguccggcuacugcacaaauaucaaacuucaagucguuaaggacgcccaggcucugcuccacgggcuggauuuuucugaggugagcaacgugcagcgccuuaugagaaagcagaaacgggacgauaaugaccugaagcgccucagagaucugaaccaagccgucaauaaccugguggaacucaaguccguucagcagaaaucugugcugaaggucggaacgcuuaauagcgacgaucugcucacccuggcggcugaccuugagaaacugaaguccaaagugguucggacagaacgcccccucagcucuggcguguauauggggaaccuguccagccagcaacuggaucagagacgggcccuccugaauaugauuggaauggccggcgggucucagggaaaccagccuucccgcgacggcgucgugagagugugggaugucaagaaugcugaccuucugaacaaucaauucggcaccaugccgagccucacacuggccugucuuaccaagcaggggcagguugaucugaacgacguggugcucgcucugacagaccugggacucaucuacaccgccaaauaucccaauucuuccgaucuggaccggcuuagccaaaaccauccuguccugaacaugauugaugugaauaaguccucucucaacaucagcggcuacaauuuuucccugggggcggccguuaaagcuggagccugcaugcuugacggcgggaacaugcuggagacgauuaagaucagcccccagaccguggauggaauccucaaaucuauucugaaggucaaacgcgcucugggcauguucguguccgacacaccuggcgagagaaaucccuaugaaaacauccucuacaagguuugucugagcgggaauggauggccuuauauugccucucggaccagcaucgugggccgcgcgugggagaacacagucguggaucuugaauccaauaagaaccagccgaaagucgggaauaacggaucuaauaagaugcugcagagcuccggcuuugccaccgggcucacguacagccaacugaugacacugagagacucuaugcuucagcucgaucccaccgcuaaaacauggauugacaucgagggacggccugaggaucccguggaacuggcccuguuccagccuuccagcggcugcuacauucacuuuuucagagagcccaccgaccucaagcaguuuaaacaagacgcuaaguauucucauggcaucgauguuaacgaccuguucuccgcccagccggggcuuaccagcgccgugcuggaagcucucccucgcaauaugguccugacaugucagggauccgaugacauccggaagcugcuugauucucaggacagaaaagauauuaagcucaucgacauuagccuguccaaagcggaugcccgcaaguuugagaacgacgugugggaucaauucaaagaccugugccacaugcauacgggcaucguuguggaaaagaagaaaaagggagggaaacaggagaugacaccccacugugcucuccuggauugcauuauguuugacgccgccgucucuggcgggcuuaacgugccuacccugcgggcugugcuccccaccgacaugguuuucagaacaaucaccacgaaggucgugcugugaggacuaguaauaaggaaacuguaugaaugucugugggcaggaagugaagagauccuucuguaaagguuuuuggaauuaugucugcugaauaauaaacuuuuuugaaauaauaaaucugguagaaaaaugagaucucaaaggcucuuuucagagccaccaaaaaaaaaaaaaaaaaaaaaaaaaaaaaaaaaaaaaaaaaaaaaaaaaaaaaaaaaaaaaaaaagaauu

SEQ ID NO: 17431 - RNA, 2015 nt, Artificial Sequence; identical to SEQ ID NO: 17425
  mRNA product Design b-4 (hSL-A64-N5) comprising derived and/or modified sequence from LASV(Pinneo-NIG-1969;Clade I)__AIT17837__NP (opt5)

SEQ ID NO: 17432 - RNA, 2015 nt, Artificial Sequence
  mRNA product Design b-4 (hSL-A64-N5) comprising derived and/or modified sequence from LASV(ISTH0009-NIG-2011;Clade II)__AIT17405__NP (opt5)
aggagagucccgcagucggcguccagcggcucugcuuguucgugugugugucguugcaggccuuauucaagcuuaccaugagcguguccaaggaggucaaaucuuuccuguggacccagagccucagacgggaacuguccggcuacugcucuaacaucaaacuucaaguugugaaggacgcccaggcucugcuccacgggcuggauuuuagcgagguguccaauguccagcgccuuaugagaaagcagaaacgggacgauucugaccugaagcgccucagagaucugaaccaagccgugaauaaccugguugaacucaagagcacacagcagaaauccauucugcgggugggaacgcuuaccagcgacgaucugcucacacuggcggcugaccuugagaagcugaaaucuaaggucauccgcaccgaaagaccccucuccagcggcguguauauggggaaucugucuacacagcaacuggagcagcggcgcgcccuccugaacaugauuggaaugguuggcggggcccagggaacccagccuggcagagauggcgugguccgggugugggacgugaaaaauccggaucuucugaacaaucaauucgggacaaugcccucccucacccuggcuugucuuacgaagcagggacaggucgaccugaacgaugccguucucgcucugaccgaccugggccucaucuacacagccaaguauccuaauagcucugaccuggaucgccuuucccaaagccaucccauucugaacaugguggacaucaaaaaguccucucucaauaucagcggguacaacuuuucccugggagcggccgugaaagcuggcgccugcaugcuugaugggggaaauaugcuggagaccauuaaggucacaccucagaccauggacggcauccucaaaagcauucugaaggugaaaagaucucugggcauguucguuuccgauacgcccggggaacggaacccuuaugagaacauccucuacaagauuugucugagcggagacggcuggccguauaucgcuucucgcacaagcauuguggggagagccugggaaaauaccacagucgaucuugaguccgacggaaagccccagaaagugggcucugcggggagcaacaagucccugcagagcgccggauuuccuaccggccucaccuacucucaacugaugacacugaaagauuccaugaugcagcuugaccccagcgcuaagacguggaucgauaucgagggccggccugaagaccccguugagauugcccucuaccagccgaugucugggugcuauauccacuucuuuagagaaccuaccgaccugaaacaguucaagcaagaugcuaaguacucccauggaauugacguggccgaucuguuucccgcccagccuggccucacaagcgcugucaucgaggcgcugccccgcaauauggugcuuaccugucagggguccgacgauauuaaacggcugcucgacucucagggaagacgcgauaucaagcugaucgacauugcccugagcaaagcugauucccggagauucgaaaacgccgucugggaccaaugcaaggaucuuugucacaugcauacaggcgugguuguggagaaaaagaagcgcgggggcaaagaggaaaucacgccccacugcgcccucauggacuguauuauguaugaugcugccgucucuggaggccugaauaucccugugcugcgggcgguucucccgagagacaugguguuucgcaccagcucccccaaggucgugcugugaggacuaguaauaaggaaacuguaugaaugucugugggcaggaagugaagagauccuucuguaaagguuuuuggaauuaugucugcugaauaauaaacuuuuuugaaauaauaaaucugguagaaaaaugagaucucaaaggcucuuuucagagccaccaaaaaaaaaaaaaaaaaaaaaaaaaaaaaaaaaaaaaaaaaaaaaaaaaaaaaaaaaaaaaaaaagaauu

SEQ ID NO: 17433 - RNA, 2015 nt, Artificial Sequence
  mRNA product Design b-4 (hSL-A64-N5) comprising derived and/or modified sequence from LASV(ISTH2010-NIG-2012;Clade II)__AIT17483__NP (opt5)
aggagagucccgcagucggcguccagcggcucugcuuguucgugugugugucguugcaggccuuauucaagcuuaccaugagcgccuccaaggaggugaaaucuuuccuguggacccagagccucagacgggaacuguccggcuacugcucuaacaucaaacuucaagucguuaaggacgcucaggcccugcuccacgggcuggauuuuagcgagguguccaaugugcagcgccuuaugagaaagcagaaacgggacgauucugaccugaagcgccucagagaucugaaccaagcggucaauaaccugguggaacucaagagcacacagcagaaauccauucugcggguuggaacgcuuaccagcgacgaucugcucacacuggcugccgaccuugagaagcugaaaucuaaggugauccgcaccgaaagaccccucuccagcggcgucuauauggggaaucugucuacacagcaacuggagcagcggcgcgcccuccugaaccuuauuggaauggugggcggggcucagggaacccagccuggcagagauggcguugugcgggucugggacgugaaaaauccggaucugcucaacaaucaauucgggacaaugcccucccugacccuugccugucugacgaagcagggacagguggaccucaacgaugcuguccuggcccugaccgaccucggccugaucuacacagcgaaguauccuaauagcucugaccuugaucgccugucccaaagccaucccauucucaacaugguugacaccaaaaaguccucucugaauaucagcggguuuaacuucucccuuggagccgcugugaaagccggcgcuugcaugcuggaugggggaaauaugcucgagacaaucaaggugaccccucagacgauggacggcauucugaaaagcauccugaaggucaaaaagucucucggcauguuuguguccgauacacccggggaaagaaacccuuacgagaacauucuguauaagaucugucuuagcggagacggcuggccguacauugccucucggaccagcaucguugggcgcgcgugggaaaauacaaccguggaucuggaguccgacggaaaaccccacaaggucggcaccgccgggucuaacaaaagccuccaguccgcuggauucccuacaggccugacguauagccagcugaugacccuuaaggauucuaugaugcaacucgaccccuccgccaaaacauggauugauaucgagggcagaccugaagaccccguggagaucgcucuguaccagccgaugagcgggugcuacauucacuuuuuccgggaaccuaccgaccugaagcaguuuaagcaggaugccaaauauucucauggaaucgacguugccgaucucuuccccgcucaaccuggccugacauccgcggugauugaggcccuucccagaaauaugguccugaccugucaggggagcgacgauaucaagcgccuccuggacucccagggacggagagauauuaaacugaucgacaucgcucuuucuaaggccgauagccgccgguuugaaaacgccgugugggaccagugcaaagaucucugucauaugcacacgggcgucgugguugagaagaagaaaagagggggcaaggaggaaauuacaccccacugcgcucugauggacuguaucauguacgaugccgcgguguccggaggccugaauauuccuguccuccgcgcugugcugccgcgggacaugguuuucagaaccucuagccccaaagugguccuuugaggacuaguaauaaggaaacuguaugaaugucugugggcaggaagugaagagauccuucuguaaagguuuuuggaauuaugucugcugaauaauaaacuuuuuugaaauaauaaaucugguagaaaaaugagaucucaaaggcucuuuucagagccaccaaaaaaaaaaaaaaaaaaaaaaaaaaaaaaaaaaaaaaaaaaaaaaaaaaaaaaaaaaaaaaaaagaauu

SEQ ID NO: 17434 - RNA, 2015 nt, Artificial Sequence
  mRNA product Design b-4 (hSL-A64-N5) comprising derived and/or modified sequence from LASV(Lassa virus/H.sapiens-wt/NGA/2015/ISTH_0543;Clade II)__AVO03640__NP (opt5)
aggagagucccgcagucggcguccagcggcucugcuuguucgugugugugucguugcaggccuuauucaagcuuaccaugagcgccuccaaggaggugaaaucuuuccuguggacccagagccucagacgggaacuguccggcuacugcucuaacaucaaacuucaagucguuaaggacgcucaggcccugcuccacgggcuggauuuuagcgagguguccaaugugcagcgccuuaugagaaagcagaaacgggacgauucugaccugaagcgccucagagaucugaaccaagcggucaauaaccugguggaacucaagagcacacagcagaaauccauucugcggguuggaacgcuuaccagcgacgaucugcucacacuggcugccgaccuugagaagcugaaaucuaaggugauccgcaccgaaagaccccucuccagcggcgucuauauggggaaucugucuacacagcaacuggagcagcggcgcgcccuccugaacaugauuggaauggugggcggggcucagggaacccagccuggcagagauggcguugugcgggucugggacgugaaaaauccggaucuucugaacaaucaauucgggacaaugcccucccucacccuggccugucuuacgaagcagggacagguggaccugaacgaugcuguccucgcccugaccgaccugggccucaucuacacagcgaaguauccuaauagcucugaccuggaucgccuuucccaaagccaucccauucugaacaugguugacaccaaaaaguccucucucaauaucagcggguacaacuuuucccugggagccgcugugaaagccggcgcuugcaugcuugaugggggaaauaugcuggagacaaucaaggugaccccucagacgauggacggcauucucaaaagcauccugaaggucaaaaagucucugggcauguucguguccgauacacccggggaaagaaacccuuaugagaacauucucuacaagaucugucugagcggagacggcuggccguauauugccucucggaccagcaucguugggcgcgcgugggaaaauacaaccguggaucuugaguccgacggaaaaccccagaaggucggcucugccgggagcaacaaaucccugcagagcgcuggauuuccuaccggccucacauacucucaacugaugacgcugaaggauuccaugaugcagcuugaccccagcgccaaaaccuggauugauaucgagggcagaccugaagaccccguggagaucgcucucuaccagccgaugucugggugcuauauucacuucuuucgggaaccuacagaccugaagcaguucaagcaagaugccaaauacucccauggaaucgacguugccgaucuguuucccgcucagccuggccucaccagcgcggugauugaggcccugcccagaaauaugguccuuacaugucagggguccgacgauaucaagcgccugcucgacucucagggacggaaagauauuaagcugaucgacaucgcucugagcaaagccgauuccagacgcuucgaaaacgccgugugggaccaaugcaaggaucuuugucacaugcauaccggcgucgugguugagaagaaaaagagagggggcaaagaggaaauuacgccccacugcgcucucauggacuguaucauguaugaugccgcggugucuggaggccugaauauuccuguccugcgggcugugcucccgcgcgacaugguuuuucggacaagcucccccaaggugguccugugaggacuaguaauaaggaaacuguaugaaugucugugggcaggaagugaagagauccuucuguaaagguuuuuggaauuaugucugcugaauaauaaacuuuuuugaaauaauaaaucugguagaaaaaugagaucucaaaggcucuuuucagagccaccaaaaaaaaaaaaaaaaaaaaaaaaaaaaaaaaaaaaaaaaaaaaaaaaaaaaaaaaaaaaaaaaagaauu

SEQ ID NO: 17435 - RNA, 2015 nt, Artificial Sequence
  mRNA product Design b-4 (hSL-A64-N5) comprising derived and/or modified sequence from LASV(Lassa virus/H.sapiens-wt/NGA/2016/ISTH_0009;Clade II)__AVO03572__NP (opt5)
aggagagucccgcagucggcguccagcggcucugcuuguucgugugugugucguugcaggccuuauucaagcuuaccaugagcgccuccaaggaggugaaaucuuuccuguggacccagagccucagacgggaacuguccggcuacugcucuaacaucaaacuucaagucguuaaggacgcucaggcccugcuccacgggcuggauuuuagcgagguguccaaugugcagcgccuuaugagaaagcagaaacgggacgauucugaccugaagcgccucagagaucugaaccaagcggucaauaaccugguggaacucaagagcacacagcagaaauccauucugcggguuggaacgcuuaccagcgacgaucugcucacacuggcugccgaccuugagaagcugaaaucuaaggugauccgcaccgaaagaccccucuccagcggcgucuauauggggaaucugucuacacagcaacuggagcagcggcgcgcccuccugaacaugauuggaauggugggcggggcucagggaacccagccuggcagagauggcguugugcgggucugggacgugaaaaauccggaucuucugaacaaucaauucgggacaaugcccucccucacccuggccugucuuacgaagcagggacagguggaccugaacgaugcuguccucgcccugaccgaccugggccucaucuacacagcgaaguauccuaauagcucugaccuggaucgccuuucccaaagccaucccauucugaacaugguugacaccaaaaaguccucucucaauaucagcggguacaacuuuucccugggagccgcugugaaagccggcgcuugcaugcuugaugggggaaauaugcuggagacaaucaaggugaccccucagacgauggacggcauucucaaaagcauccugaaggucaaaaagucucugggcauguucguguccgauacacccggggaaagaaacccuuaugagaacauucucuacaagaucugucugagcggagacggcuggccguauauugccucucggaccagcaucguugggcgcgcgugggaaaauacaaccguggaucuugaguccgacggaaaaccccagaaggucggcucugccgggagcaacaaaucccugcagagcgcuggauuuccuaccggccucacauacucucaacugaugacgcugaaggauuccaugaugcagcuugaccccagcgccaaaaccuggauugauaucgagggcagaccugaagaccccguggagaucgcucucuaccagccgaugucugggugcuauauucacuucuuucgggaaccuacagaccugaagcaguucaagcaagaugccaaauacucccauggaaucgacguugccgaucuguuucccgcucagccuggccucaccagcgcggugauugaggcccugcccagaaauaugguccuuacaugucagggguccgacgauaucaagcgccugcucgacucucagggacggagagauauuaaacugaucgacaucgcucugagcaaggccgauucccgccgguucgaaaacgccgugugggaccaaugcaaagaucuuugucacaugcauaccggcgucgugguugagaagaagaaaagagggggcaaggaggaaauuacgccccacugcgcucucauggacuguaucauguaugaugccgcggugucuggaggccugaauauuccuguccugcgcgcugugcucccgcgggacaugguuuuuagaacaagcucccccaaagugguccugugaggacuaguaauaaggaaacuguaugaaugucugugggcaggaagugaagagauccuucuguaaagguuuuuggaauuaugucugcugaauaauaaacuuuuuugaaauaauaaaucugguagaaaaaugagaucucaaaggcucuuuucagagccaccaaaaaaaaaaaaaaaaaaaaaaaaaaaaaaaaaaaaaaaaaaaaaaaaaaaaaaaaaaaaaaaaagaauu

SEQ ID NO: 17436 - RNA, 2015 nt, Artificial Sequence
  mRNA product Design b-4 (hSL-A64-N5) comprising derived and/or modified sequence from LASV(Lassa virus/H.sapiens-wt/NGA/2016/ISTH_0017;Clade II)__AVO03568__NP (opt5)
aggagagucccgcagucggcguccagcggcucugcuuguucgugugugugucguugcaggccuuauucaagcuuaccaugagcgccuccaaggaggugaaaucuuuccuguggacccagagccucagacgggaacuguccggcuacugcucuagcaucaaacuucaagucguuaaggacgcucaggcccugcuccacgggcuggauuuuuccgaggugucuaacgugcagcgccuuaugagaaagcagaaacgggacgauagcgaccugaagcgccucagagaucugaaucaagcggucaacaaucugguggaacucaaguccacacagcagaaaagcauucugcggguuggaacgcuuaccucugacgaucugcucacacuggcugccgaccuugagaagcugaaauccaaggugauccgcaccgaaagaccccucagcucuggcgucuauauggggaaccuguccacacagcaacuggagcagcggcgcgcccuccugaauaugauuggaauggcuggcggggcccagggaacccagccuggcagagauggcgugguucgggugugggacgucaaaaacccggaucuucugaauaaccaauucgggacaaugcccagccucacccuggcuugucuuacgaagcagggacagguggaccugaaugaugccgugcucgcgcugaccgaccugggccucaucuacacagccaaguauccuaacucuuccgaccuggaucgccuuagccaaucccaucccauucugaauauggucgacaccaaaaagucuagccucaacaucuccggguacaauuuuagccugggagcugccguuaaagcuggcgccugcaugcuugaugggggaaacaugcuggagacaaucaaggugaccccucagacgauggacggcauucucaaaucuauccugaaggugaaaagaucccugggcauguucgucagcgaugcgcccggggaacggaauccuuaugagaacauucucuacaagaucugucugucuggagacggcuggccguauauugccagccgcacauccaucguggggagagcuugggaaaacaccacaguugaucuugagucugacggaaagccccagaaagugggcgccaccgggagcaauaagucccugcagagcgcuggauuuccuaccggccucacauacucucaacugaugacgcugaaagauuccaugaugcagcuugaccccagcgccaagaccuggauugauaucgagggccggccugaagaccccgucgagguggcccucuaccagccgguuucugggugcuauauccacuucuuuagagaaccuacagaccugaaacaguucaagcaagaugcuaaguacucccauggaauugacguggcggaucuguuucccgcccagccuggccucaccagcgcugucaucgaggcccugccccgcaacauggugcuuacaugucagggguccgacgauauuaaaaagcugcucgacucucagggacggaaagauaucaagcugauugacaucgcccugagcaaagcugauuccagacgcuucgaaaaugccgucugggaccaaugcaaggaucuuugucacaugcauaccggcgugguuguggagaagaaaaagagagggggcaaagaggaaaucacgccccacugcgcgcucauggacuguauuauguaugaugcugccgucucuggaggccugaacaucccugugcugcgggccguucucccgcgcgacaugguguuucggacaagcucccccaaggucgugcugugaggacuaguaauaaggaaacuguaugaaugucugugggcaggaagugaagagauccuucuguaaagguuuuuggaauuaugucugcugaauaauaaacuuuuuugaaauaauaaaucugguagaaaaaugagaucucaaaggcucuuuucagagccaccaaaaaaaaaaaaaaaaaaaaaaaaaaaaaaaaaaaaaaaaaaaaaaaaaaaaaaaaaaaaaaaaagaauu

SEQ ID NO: 17437 - RNA, 2015 nt, Artificial Sequence
  mRNA product Design b-4 (hSL-A64-N5) comprising derived and/or modified sequence from LASV(Lassa virus/H.sapiens-wt/NGA/2018/ISTH_0959;Clade II)__AVV65100__NP (opt5)
aggagagucccgcagucggcguccagcggcucugcuuguucgugugugugucguugcaggccuuauucaagcuuaccaugagcgccuccaaggaggugaaaucuuuccuguggacccagagccucagacgggaacuguccggcuacugcucuaacaucaaacuucaagucguuaaggacgcucaggcccugcuccacgggcuggauuuuagcgagguguccaaugugcagcgccuuaugagaaagcagaaacgggacgauucugaccugaagcgccucagagaucugaaccaagcggucaauaaccugguggaacucaagagcacccagcagaaauccauucugcggguuggaacgcuuaccagcgacgaucugcucacacuggcugccgaccuugagaagcugaaaucuaaggugauccgcaccgaaagaccccucuccagcggcgucuauauggggaaucugucuacacagcaacuggagcagcggcgcgcccuccugaaccuuauuggaauggugggcggggcucagggaacccagccuggcagagauggcguugugcgggucugggacgugaaaaauccggaucugcucaacaaucaauucgggacaaugcccucccugacccuugccugucugacgaagcagggacagguggaccucaacgaugucguucuggcucugaccgaccucggccugaucuacacagccaaguauccuaauagcucugaccuugaucgccugucccaaagccaucccauucucaacaugguggacaccaaaaaguccucucugaauaucagcggguuuaacuucucccuuggagcggccgugaaagcuggcgccugcaugcuggaugggggaaauaugcucgagacaaucaaggucaccccucagacgauggacggcauucugaaaagcauccugaaggugaaaaagucucucggcauguuuguuuccgauacacccggggaaagaaacccuuacgagaacauucuguauaagaucugucuuagcggagacggcuggccguacauugcuucucggaccagcaucguggggcgcgccugggaaaauacaaccgucgaucuggaguccgacggaaaaccccacaaggugggcaccgcggggucuaacaaaagccuccaguccgccggauucccuacaggccugacguauagccagcugaugacccuuaaggauucuaugaugcaacucgaccccuccgcuaaaacauggauugauaucgagggcagaccugaagaccccguugagaucgcccuguaccagccgaugagcgggugcuacauucacuuuuuccgggaaccuaccgaccugaagcaguuuaagcaggaugcuaaauauucucauggaaucgacguggccgaucucuuccccgcccaaccuggccugacauccgcugucauugaggcgcuucccagaaauauggugcugaccugucaggggagcgacgauaucaagcgccuccuggacucccagggacggaaagauauuaagcugaucgacaucgcccuuucuaaaacggauagcagacgcuuugaaaacgcugucugggaccagugcaaggaucucugucauaugcacacaggcgugguuguggagaagaaaaagagagggggcaaagaggaaauuacaccccacugcgcccugauggacuguaucauguacgaugccgcugucuccggaggccugaauauuccugugcuccgggccguucugccgcgcgacaugguguuccggaccucuagccccaaggucgugcuuugaggacuaguaauaaggaaacuguaugaaugucugugggcaggaagugaagagauccuucuguaaagguuuuuggaauuaugucugcugaauaauaaacuuuuuugaaauaauaaaucugguagaaaaaugagaucucaaaggcucuuuucagagccaccaaaaaaaaaaaaaaaaaaaaaaaaaaaaaaaaaaaaaaaaaaaaaaaaaaaaaaaaaaaaaaaaagaauu

SEQ ID NO: 17438 - RNA, 2015 nt, Artificial Sequence
  mRNA product Design b-4 (hSL-A64-N5) comprising derived and/or modified sequence from LASV(LASV003-NIG-2008;Clade II)__AIT17581__NP (opt5)
aggagagucccgcagucggcguccagcggcucugcuuguucgugugugugucguugcaggccuuauucaagcuuaccaugagcgccuccaaggaggugaaaucuuuccuguggacccagagccucagacgggaacuguccggcuacugcucuagcaucaaacuucaagucguuaaggacgcucaggcccugcuccacgggcuggauuuuuccgaggugucuaacgugcagcgccuuaugagaaagcagaaacgggacgauagcgaccugaagcgccucagagaucugaaucaagcggucaacaaucugguggaacucaaguccacccagcagaaaagcguucugcgggugggaacgcuuaccucugacgaucugcucacacuggcugccgaccuugagaagcugaaauccaaggucauucgcaccgaaagaccccucagcucuggcguguauauggggaaccuguccgcccagcaacuggagcagcggcgcacacuccugaauaugaucggaaugguuggcggggcucagggaacccagccuggcagagauggcgugguccgggugugggacgugaaaaacccggaucuucugaauaaccaauucgggacaaugcccagccucacccuggccugucuuacgaagcagggacaggucgaccugaaugauguugugcucgcucugaccgaccugggccucauuuacacagccaaguauccuaacucuuccgaccuggaucgccuuagccaaucccaucccauccugucuaugguggacaccaaaaagagcucccucaauauuagcggguacaacuuuucucugggagcggccgucaaagcuggcgccugcaugcuugaugggggaaauaugcuggagacaaucaaggugaccccucagacgauggacggcauccucaaauccauucugaagguuaaaaagagccugggcauguucgugucugauacacccggggaaagaaacccuuaugagaauauccucuacaagauuugucugagcggagacggcuggccguauaucgcuucccggaccucuauugucgggcgcgccugggaaaacacaaccguggaucuugagagcgacggaaaaccccagaagguuggcaccgcgggguccaacaaaagccugcagucugccggauuuccuacaggccucacguacucccaacugaugacccugaaggauagcaugaugcagcuugaccccucugcuaaaacauggaucgauauugagggcagaccugaagaccccguggagaucgcccucuaccagccgauguccgggugcuauauccacuucuuucgggaaccuaccgaccugaagcaguucaagcaagaugcuaaauacagccauggaauugacgucacagaucuguuucccgcccagccuggccucaccuccgccgugaucgaggcucugcccagaaauaugguccuuacgugucaggggucugacgauauuaagcgccugcucgacagccagggacggagagauaucaaacugauugacaucgcgcuguccaaggccgauucucgccgguucgaaaacgcugugugggaccaaugcaaagaucuuugucacaugcauacaggcguuguggucgagaagaagaaaagagggggcaaggaggaaaucacaccccacugcgcccucauggacuguauuauguaugaugccgcugugagcggaggccugaauaucccuguucugcgcgccgugcucccgcgggacauggucuuuagaaccuccagccccaaaguggugcugugaggacuaguaauaaggaaacuguaugaaugucugugggcaggaagugaagagauccuucuguaaagguuuuuggaauuaugucugcugaauaauaaacuuuuuugaaauaauaaaucugguagaaaaaugagaucucaaaggcucuuuucagagccaccaaaaaaaaaaaaaaaaaaaaaaaaaaaaaaaaaaaaaaaaaaaaaaaaaaaaaaaaaaaaaaaaagaauu

SEQ ID NO: 17439 - RNA, 2015 nt, Artificial Sequence
  mRNA product Design b-4 (hSL-A64-N5) comprising derived and/or modified sequence from LASV(LASV035-NIG-2009;Clade II)__AIT17589__NP (opt5)
aggagagucccgcagucggcguccagcggcucugcuuguucgugugugugucguugcaggccuuauucaagcuuaccaugagcgccuccaaggaggugaaaucuuuccuguggacccagagccucagacgggaacuguccggcuacugcucuagcaucaaacuucaagucguuaaagacgcucaggcccugcuccacgggcuggauuuuuccgaggugucuaacgugcagcgccuuaugagaaagcagaaacgggacgauagcgaccugaagcgccucagagaucugaaucaagcggucaacaaucugguggaacucaaguccacacagcagaaaagcauucugcggguuggaacgcuuaccucugacgaucugcucacacuggcugccgaccuugagaagcugaaauccaaggugauccgcaccgaaagaccccucagcucuggcgucuauauggggaaccuguccgcccagcaacuggagcagcggcgcgcucuccugaauaugauuggaauggugggcggggcccagggaacacagccuggcagagauggcguugugcgggucugggacgugaaaaacccggaucuucugaauaaccaauucgggaccaugcccagccucacacuggcuugucuuaccaagcagggacagguggaccugaaugaugccguccucgcgcugacggaccugggccucaucuacaccgccaaguauccuaacucuuccgaccuggaucgccuuagccaaucccaucccauucugaauaugguugacacaaagaagucuagccucaacaucuccggguacaauuuuagccugggagcugccgugaaagcuggcgccugcaugcuugaugggggaaacaugcuggagaccaucaaggugacaccucagaccauggacggcauucucaaaucuauccugaaggucaaaagaucccugggcauguucgugagcgauacgcccggggaacggaauccuuaugagaacauucucuacaagaucugucugucuggagacggcuggccguauauugcgagccgcacauccaucguugggagagccugggaaaacaccacaguggaucuugagucugacggaaagccccagaaagucggcaccaccgggagcaauaagucccugcagagcgcuggauuuccuacaggccucacguacucucaacugaugacccugaaagauuccaugaugcagcuugaccccagcgccaagacauggauugauaucgagggccggccugaagaccccguggagaucgcucucuaccagccgaugucugggugcuauauucacuucuuuagagaaccuaccgaccugaaacaguucaagcaagaugccaaguacucccauggaaucgacguugccgaucuguuucccgcucagccuggccucacaagcgcggugauugaggcccugccccgcaacaugguccuuaccugucagggguccgacgauaucaaaaagcugcucgacucucagggacggagagauauuaaacugaucgacaucgcucugagcaaggccgauucccgcaaauucgaaaaugccgugugggaccaaugcaaggaucuuugucacaugcauacgggcgucgugguugagaagaaaaagagagggggcaaagaggaaauuacaccccacugcgcucucauggacuguaucauguaugaugccgcggugucuggaggccugaacauuccuguccugcgggcugugcucccgcgcgacaugguuuuucggaccagcucccccaaggugguccugugaggacuaguaauaaggaaacuguaugaaugucugugggcaggaagugaagagauccuucuguaaagguuuuuggaauuaugucugcugaauaauaaacuuuuuugaaauaauaaaucugguagaaaaaugagaucucaaaggcucuuuucagagccaccaaaaaaaaaaaaaaaaaaaaaaaaaaaaaaaaaaaaaaaaaaaaaaaaaaaaaaaaaaaaaaaaagaauu

SEQ ID NO: 17440 - RNA, 2015 nt, Artificial Sequence
  mRNA product Design b-4 (hSL-A64-N5) comprising derived and/or modified sequence from LASV(LASV1000-NIG-2009;Clade II)__AIT17783__NP (opt5)
aggagagucccgcagucggcguccagcggcucugcuuguucgugugugugucguugcaggccuuauucaagcuuaccaugagcgccuccaaggaggugaaaucuuuccuguggacccagagccucagacgggaacuguccggcuacugcucuaacaucaaacuucaagucguuaaggacgcucaggcccugcuccacgggcuggauuuuagcgagguguccaaugugcagcgccuuaugagaaagcagaaacgggacgauucugaccugaagcgccucagagaucugaaccaagcggucaauaaccugguggaacucaagagcacacagcagaaauccauucugcggguuggaacgcuuaccagcgacgaucugcucacacuggcugccgaccuugagaagcugaaaucuaaggugauccgcaccgaaagaccccucuccagcggcgucuauauggggaaucugucuacacagcaacuggagcagcggcgcgcccuccugaacaugauuggaauggugggcggggcucagggaacccagccuggcagagauggcguugugcgggucugggacgugaaaaauccggaucuucugaacaaucaauucgggacaaugcccucccucacccuggccugucuuacgaagcagggacagguggaccugaacgaugucguucucgcucugaccgaccugggccucaucuacacagccaaguauccuaauagcucugaccuggaucgccuuucccaaagccaucccauucugaacaugguggacaccaaaaaguccucucucaauaucagcggguacaacuuuucccugggagcggccgugaaagcuggcgccugcaugcuugaugggggaaauaugcuggagacaaucaaggucaccccucagacgauggacggcauucucaaaagcauccugaaggugaaaaagucucugggcauguucguuuccgauacacccggggaaagaaacccuuaugagaacauucucuacaagaucugucugagcggagacggcuggccguauauugcuucucggaccagcaucguggggcgcgccugggaaaauacaaccgucgaucuugaguccgacggaaaaccccagaaggugggcaccgcggggucuaacaaaagccugcaguccgccggauuuccuacaggccucacguacagccaacugaugacccugaaggauucuaugaugcagcuugaccccuccgcuaaaacauggauugauaucgagggcagaccugaagaccccguugagaucgcccucuaccagccggugagcgggugcuauauucacuucuuucgggaaccuaccgaccugaagcaguucaagcaagaugcuaaauacucucauggaaucgacgucgccgaucuguuucccgcccagccuggccucacauccgcugugauugaggcgcugcccagaaauaugguccuuaccugucaggggagcgacgauaucaagcgccugcucgacucccagggacggagagauauuaaacugaucgacaucgcccugucuaaggcugauagccgccgguucgaaaacgccgugugggaccaaugcaaagaucuuugucacaugcauacgggcguuguggucgagaagaagaaaagagggggcaaggaggaaauuacaccccacugcgcccucauggacuguaucauguaugaugcugccguguccggaggccugaauauuccuguucugcgcgcggugcucccgcgggacauggucuuuagaaccucuagccccaaaguggugcugugaggacuaguaauaaggaaacuguaugaaugucugugggcaggaagugaagagauccuucuguaaagguuuuuggaauuaugucugcugaauaauaaacuuuuuugaaauaauaaaucugguagaaaaaugagaucucaaaggcucuuuucagagccaccaaaaaaaaaaaaaaaaaaaaaaaaaaaaaaaaaaaaaaaaaaaaaaaaaaaaaaaaaaaaaaaaagaauu

SEQ ID NO: 17441 - RNA, 2015 nt, Artificial Sequence
  mRNA product Design b-4 (hSL-A64-N5) comprising derived and/or modified sequence from LASV(LASV221-NIG-2010;Clade II)__AIT17625__NP (opt5)
aggagagucccgcagucggcguccagcggcucugcuuguucgugugugugucguugcaggccuuauucaagcuuaccaugagcgccuccaaggaggugaaaucuuuccuguggacccagagccucagacgggaacuguccggcuacugcucuagcaucaaacuucaagucguuaaggacgcucaggcccugcuccacgggcuggauuuuuccgaggugucuaacgugcagcgccuuaugagaaagcagcggcgcgacgauagcgaccugaaaagacuccgggaucugaaucaagcggucaacaaucugguggaacucaaguccacacagcaaaagagcauucugcgcguuggaacgcuuaccucugacgaucugcucacacuggcugccgaccuugagaaacugaaguccaaagugaucagaaccgaacggccccucagcucuggcgucuauauggggaaccuguccacacagcagcuggagcagcgcagagcccuccugaauaugauuggaauggugggcggggcucagggaacccagccuggccgggauggcguugugcgcgucugggacgugaagaacccggaucuucugaauaaccaauucgggacaaugcccagccucacccuggccugucuuacgaaacagggacagguggaccugaaugaugcuguccucgcccugaccgaccugggccucaucuacacagcgaaguauccuaacucuuccgaccuggauagacuuagccaaucccaucccauucugaauaugguugacaccaagaaaucuagccucaacaucuccggguacaauuuuagccugggagccgcugugaaggccggcgcuugcaugcuugaugggggaaacaugcuggagacaaucaaagugaccccucagacggucgacggcauucucaagucuauccugaaagugaagcggucccugggcauguucguuagcgauacacccggggaacgcaauccuuaugagaacauucucuacaaaaucugucugucuggagacggcuggccguauauugccagcagaaccuccaucguggggcgggcgugggaaaacacaaccgucgaucuugagucugacggaaagccccagaaggugggcaccgccgggagcaauaaaucccugcagagcgcuggauuuccuacaggccucacguacucucaacugaugacccugaaggauuccaugaugcagcuugaccccagcgccaaaacauggauugauaucgagggcagaccugaagaccccguugagaucgcucucuaccagccgaugucugggugcuauauucacuucuuucgcgaaccuaccgaccugaagcaguucaaacaagaugccaaguacucccauggaaucgacguggccgaucuguuucccgcucagccuggccucacaagcgcggucauugaggcccugccccggaacauggugcuuaccugucagggguccgacgauaucaagagacugcucgacucucagggacgccgggauauuaaacugaucgacaucgcucugagcaaggccgauuccagaaaauucgaaaaugccgucugggaccaaugcaaggaucuuugucacaugcauacgggcgugguuguggagaaaaagaagcgcgggggcaaagaggaaauuacaccccacugcgcucucauggacuguaucauguaugaugccgcggucucuggaggccugaacauuccugugcugcgggcuguucucccgagagacaugguguuucgcaccagcucccccaaggucgugcugugaggacuaguaauaaggaaacuguaugaaugucugugggcaggaagugaagagauccuucuguaaagguuuuuggaauuaugucugcugaauaauaaacuuuuuugaaauaauaaaucugguagaaaaaugagaucucaaaggcucuuuucagagccaccaaaaaaaaaaaaaaaaaaaaaaaaaaaaaaaaaaaaaaaaaaaaaaaaaaaaaaaaaaaaaaaaagaauu

SEQ ID NO: 17442 - RNA, 2015 nt, Artificial Sequence
  mRNA product Design b-4 (hSL-A64-N5) comprising derived and/or modified sequence from LASV(LASV237-NIG-2010;Clade II)__AIT17639__NP (opt5)
aggagagucccgcagucggcguccagcggcucugcuuguucgugugugugucguugcaggccuuauucaagcuuaccaugagcgccuccaaggaggugaaaucuuuccuguggacccagagccucagacgggaacuguccggcuacugcucuaacaucaaacuucaagucguuaaggacgcucaggcccugcuccacgggcuggauuuuagcgagguguccaaugugcagcgccuuaugagaaagcagaaacgggacgauucugaccugaagcgccucagagaucugaaccaagcggucaauaaccugguggaacucaagagcacacagcagaaauccauucugcggguuggaacgcuuaccagcgacgaucugcucacacuggcugccgaccuugagaagcugaaaucuaaggugauccgcaccgaaagaccccucuccagcggcgucuauauggggaaucugucuacacagcaacuggagcagcggcgcgcccuccugaacaugauuggaauggugggcggggcucagggaacccagccuggcagagauggcguugugcgggucugggacgugaaaaauccggaucuucugaacaaucaauucgggacaaugcccucccucacccuggccugucuuacgaagcagggacagguggaccugaacgaugcuguccucgcccugaccgaccugggccucaucuacacagcgaaguauccuaauagcucugaccuggaucgccuuucccaaagccaucccauucugaacaugguugacaucaaaaaguccucucucaauaucagcggguacaacuuuucccugggagccgcugugaaagccggcgcuugcaugcuugaugggggaaauaugcuggagaccauuaaggugacaccucagaccauggacggcauccucaaaagcauucugaaggucaaaagaucucugggcauguucguguccgauacgcccggggaacggaacccuuaugagaacauccucuacaagauuugucugagcggagacggcuggccguauaucgccucucgcacaagcauuguugggagagcgugggaaaauaccacaguggaucuugaguccgacggaaagccccagaaagucggcucugccgggagcaacaagucccugcagagcgcuggauuuccuaccggccucaccuacucucaacugaugacacugaaagauuccaugaugcagcuugaccccagcgccaagacguggaucgauaucgagggccggccugaagaccccguggagauugcucucuaccagccgaugucugggugcuauauccacuucuuuagagaaccuaccgaccugaaacaguucaagcaagaugccaaguacucccauggaauugacguugccgaucuguuucccgcucagccuggccucacaagcgcggugaucgaggcccugccccgcaauaugguccuuaccugucagggguccgacgauauuaaacggcugcucgacucucagggaagacgcgauaucaagcugaucgacauugcucugagcaaagccgauucccggagauucgaaaacgccgugugggaccaaugcaaggaucuuugucacaugcauacaggcgucgugguugagaaaaagaagcgcgggggcaaagaggaaaucacgccccacugcgcucucauggacuguauuauguaugaugccgcggugucuggaggccugaauaucccuguccugcgggcugugcucccgagagacaugguuuuucgcaccagcucccccaaggugguccugugaggacuaguaauaaggaaacuguaugaaugucugugggcaggaagugaagagauccuucuguaaagguuuuuggaauuaugucugcugaauaauaaacuuuuuugaaauaauaaaucugguagaaaaaugagaucucaaaggcucuuuucagagccaccaaaaaaaaaaaaaaaaaaaaaaaaaaaaaaaaaaaaaaaaaaaaaaaaaaaaaaaaaaaaaaaaagaauu

SEQ ID NO: 17443 - RNA, 2015 nt, Artificial Sequence
  mRNA product Design b-4 (hSL-A64-N5) comprising derived and/or modified sequence from LASV(LASV253-NIG-2011;Clade II)__AIT17671__NP (opt5)
aggagagucccgcagucggcguccagcggcucugcuuguucgugugugugucguugcaggccuuauucaagcuuaccaugagcgccuccaaggaggugaaaucuuuccuguggacccagagccucagacgggaacuguccggcuacugcucuagcaucaaacuucaagucguuaaggacgcucaggcccugcuccacgggcuggauuuuuccgaggugucuaacgugcagcgccuuaugagaaagcagaaacgggacgauagcgaccugaagcgccucagagaucugaaucaagcggucaacaaucugguggaacucaaguccacccagcagaaaagcguucugcgggugggaacgcuuaccucugacgaucugcucacacuggcugccgaccuugagaagcugaaauccaaggucauucgcaccgaaagaccccucagcucuggcguguauauggggaaccuguccacacagcaacuggagcagcggcgcgcccuccugaauaugaucggaaugguuggcggggcucagggaacccagccuggcagagauggcgugguccgggugugggacgugaaaaacccggaucuucugaauaaccaauucgggacaaugcccagccucacccuggccugucuuacgaagcagggacaggucgaccugaaugauguugugcucgcucugaccgaccugggccucauuuacacagccaaguauccuaacucuuccgaccuggaucgccuuagccaaucccaucccauccugaauaugguggacaccaaaaagucuagccucaacauuuccggguacaauuuuagccugggagcggccgucaaagcuggcgccugcaugcuugaugggggaaacaugcuggagacaaucaaggugaccccucagacgauggacggcauccucaaaucuauucugaagguuaaaaagucccugggcauguucgugagcgauacacccggggaaagaaauccuuaugagaacauccucuacaagauuugucugucuggagacggcuggccguauaucgcuagccggaccuccauugucgggcgcgccugggaaaacacaaccguggaucuugagucugacggaaaaccccagaagguuggcaccgcggggagcaauaaaucccugcagagcgccggauuuccuacaggccucacguacucucaacugaugacccugaaggauuccaugaugcagcuugaccccagcgcuaaaacauggaucgauauugagggcagaccugaagaccccguggagaucgcccucuaccagccgaugucugggugcuauauccacuucuuucgggaaccuaccgaccugaagcaguucaagcaagaugcuaaauacucccauggaauugacgucacagaucuguuucccgcccagccuggccucaccagcgccgugaucgaggcucugcccagaaacaugguccuuacgugucagggguccgacgauauuaagcgccugcucgacucucagggacggagagauaucaaacugauugacaucgcgcugagcaaggccgauucccgccgguucgaaaaugcugugugggaccaaugcaaagaucuuugucacaugcauacaggcguuguggucgagaagaagaaaagagggggcaaggaggaaaucacaccccacugcgcccucauggacuguauuauguaugaugccgcugugucuggaggccugaacaucccuguucugcgcgccgugcucccgcgggacauggucuuuagaaccagcucccccaaaguggugcugugaggacuaguaauaaggaaacuguaugaaugucugugggcaggaagugaagagauccuucuguaaagguuuuuggaauuaugucugcugaauaauaaacuuuuuugaaauaauaaaucugguagaaaaaugagaucucaaaggcucuuuucagagccaccaaaaaaaaaaaaaaaaaaaaaaaaaaaaaaaaaaaaaaaaaaaaaaaaaaaaaaaaaaaaaaaaagaauu

SEQ ID NO: 17444 - RNA, 2015 nt, Artificial Sequence
  mRNA product Design b-4 (hSL-A64-N5) comprising derived and/or modified sequence from LASV(LASV254-NIG-2011;Clade II)__AIT17675__NP (opt5)
aggagagucccgcagucggcguccagcggcucugcuuguucgugugugugucguugcaggccuuauucaagcuuaccaugagcgccuccaaggaggugaaaucuuuccuguggacccagagccucagacgggaacuguccggcuacugcucuagcaucaaacuucaagucguuaaggacgcucaggcccugcuccacgggcuggauuuuuccgaggugucuaacgugcagcgccuuaugagaaagcagaaacgggacgauagcgaccugaagcgccucagagaucugaaucaagcggucaacaaucugguggaacucaaguccacacagcagaaaagcguucugcgggugggaacgcuuaccucugacgaucugcucacacuggcugccgaccuugagaagcugaaauccaaggucauucgcaccgaaagaccccucagcucuggcguguauauggggaaccuguccacacagcaacuggagcagcggcgcgcccuccugaauaugaucggaaugguuggcggggcucagggaacccagccuggcagagauggcgugguccgggugugggacgugaaaaacccggaucuucugaauaaccaauucgggacaaugcccagccucacccuggccugucuuacgaagcagggacaggucgaccugaaugaugcuguucucgcccugaccgaccugggccucauuuacacagcgaaguauccuaacucuuccgaccuggaucgccuuagccaaucccaucccauccugaauaugguggacaccaaaaagucuagccucaacauuuccggguacaauuuuagccugggagccgcugugaaagccggcgcuugcaugcuugaugggggaaacaugcuggagacaaucaaggucaccccucagacgauggacggcauccucaaaucuauucugaaggugaaaaagucccugggcauguucguuagcgauacacccggggaaagaaauccuuaugagaacauccucuacaagauuugucugucuggagacggcuggccguauaucgccagccggaccuccauuguggggcgcgcgugggaaaacacaaucgucgaucuugagucugacggaaaaccccagaaggugggcaccgccgggagcaauaaaucccugcagagcgcuggauuuccuaccggccucacauacucucaacugaugacgcugaaggauuccaugaugcagcuugaccccagcgccaaaaccuggauugauaucgagggcagaccugaagaccccguugagaucgcucucuaccagccgaugucugggugcuauauucacuucuuucgggaaccuacagaccugaagcaguucaagcaagaugccaaauacucccauggaaucgacguggccgaucuguuucccgcucagccuggccucaccagcgcggucauugaggcccugcccagaaacauggugcuuacaugucagggguccgacgauaucaagcgccugcucgacucucagggacggagagauauuaaacugaucgacaucgcucugagcaaggccgauucccgccgguucgaaaaugccgucugggaccaaugcaaagaucuuugucacaugcauaccggcgugguuguggagaagaagaaaagagggggcaaggaggaaauuacgccccacugcgcucucauggacuguaucauguaugaugccgcggucucuggaggccugaacauuccugugcugcgcgcuguucucccgcgggacaugguguuuagaacaagcucccccaaagucgugcugugaggacuaguaauaaggaaacuguaugaaugucugugggcaggaagugaagagauccuucuguaaagguuuuuggaauuaugucugcugaauaauaaacuuuuuugaaauaauaaaucugguagaaaaaugagaucucaaaggcucuuuucagagccaccaaaaaaaaaaaaaaaaaaaaaaaaaaaaaaaaaaaaaaaaaaaaaaaaaaaaaaaaaaaaaaaaagaauu

SEQ ID NO: 17445 - RNA, 2015 nt, Artificial Sequence
  mRNA product Design b-4 (hSL-A64-N5) comprising derived and/or modified sequence from LASV(Nig08-04;Clade II)__ADU56611__NP (opt5)
aggagagucccgcagucggcguccagcggcucugcuuguucgugugugugucguugcaggccuuauucaagcuuaccaugagcgccuccaaggaggugaaaucuuuccuguggacccagagccucagacgggaacuguccggcuacugcucuaacaucaaacuucaagucguuaaggacgcucaggcccugcuccacgggcuggauuuuagcgagguguccaaugugcagcgccuuaugagaaagcagaaacgggacgauggagaccugaagcgccucagagaucugaaccaagcggucaauaaccugguggaacucaagucuacccagcagaaaagcguucugcgggugggcacgcuuaccuccgacgaucugcucacacuggcugccgaccuugagaagcugaaaagcaaggucauucgcaccgaaagaccccucucuuccgggguguauaugggaaaucugagcacacagcaacuggagcagcggaaagcccuccugucuaugaucggcaugguugggggagcucagggcacccagccuggccgcgaugggguggucagagugugggacgugaagaacccggaucuucugaauaaccaauucggaacaaugcccucccucacccuggccugucuuacgaagcagggccaggucgaccugaaugaugcuguucucgcccugaccgaccuggggcucauuuacacagcgaaauauccuaacagcucugaccuggaucggcuuucccaaagccaucccauccugaauaugguggacaccaagaaauccucucucaacauuagcggauacaauuuuucccugggcgccgcugugaaggccggggcuugcaugcuugauggaggcaacaugcuggagacaaucaaagucaccccucagacgauggacggcauccucaagagcauucugaaagugaagcgcucucuggggauguucguuuccgauacacccggagaaagaaauccuuaugagaacauccucuacaagauuugucugagcggcgacggguggccguauaucgccucucggaccagcauugugggacgcgcgugggaaaacacaaccgucgaucuugaguccgacggcaaaccccagaagguggggaccgccggaucuaauaaaagccugcaguccgcuggcuuuccuacaggccucacguacagccaacugaugacccugaaggauucuaugaugcagcuugaccccuccgccaaaacauggaucgauauugaggggagaccugaagaccccguugagaucgcucucuaccagccgaugagcggaugcuauauccacuucuuucgggaaccuaccgaccugaagcaguucaagcaagaugccaaauacucucauggcauugacgugacagaucuguuuuccgcccagcccgggcucaccagcgcugucaucgaggcgcugccuagaaacauggugcuuacgugucagggauccgacgauauuaagaaacugcucgacucucagggccgccgggauaucaagcugauugacaucagccugaauaaagccgauuccagacgcuucgaaaacgcugucugggaccaaugcaaggaucuuugucacaugcauacaggggugguuguggagaagaaaaagcggggcggaaaagaggaaaucacaccccacugcgcccucauggacuguauuauguuugaugccgcugucucuggcgggcugaauauccccauucugagagccgugcucccucgcgacaugguuuuccggaccagcuccccgaaggugguccugugaggacuaguaauaaggaaacuguaugaaugucugugggcaggaagugaagagauccuucuguaaagguuuuuggaauuaugucugcugaauaauaaacuuuuuugaaauaauaaaucugguagaaaaaugagaucucaaaggcucuuuucagagccaccaaaaaaaaaaaaaaaaaaaaaaaaaaaaaaaaaaaaaaaaaaaaaaaaaaaaaaaaaaaaaaaaagaauu

SEQ ID NO: 17446 - RNA, 2018 nt, Artificial Sequence
  mRNA product Design b-4 (hSL-A64-N5) comprising derived and/or modified sequence from LASV(GA391;Clade III)__AAA46284__NP (opt5)
aggagagucccgcagucggcguccagcggcucugcuuguucgugugugugucguugcaggccuuauucaagcuuaccaugagcgccuccaaggaggugagaucuugccuguggacccagagccuccggcgcgaacuguccggcuacuguucuaacaucaaacuucaagucguuaaggacgcucaggcccugcuccacgggcuggauuucagcgagguguccaaugugcagagacuuaugcggaaacagaagcgcgacgauggagaccugaaaagacuccgggaucugaaccaagcggucaauaaccugguggaacucaagucuacacagcagaaaagcguucugcgcgugggcacgcuuuccagcgacgaucugcucauucuggcugccgaccuugagaaacugaagucuaaagucaccagaacagaacggccccucuccagcgggguguauaugggaaaucugucuucccagcaacuggaucagcgcagagcccuccugaacaugaucggcaugaccgggguuagcggaggcggcaagggggcuucuaauggaauugugcgggucugggacgugaaaaacgccgagcuucugaauaaccaguuuggcacaaugccuucccucacccuggcuugccuuacaaagcaggggcaaguggaucugaaugacgccguccaggcgcucaccgaucugggacugaucuacacggccaaguauccgaacagcuccgaccucgaccgccugucucagagccaucccauucuuaauaugaucgauaccaaaaaguccagccugaacaucucuggcuacaauuucucccucggggcugccguuaaagcuggagccuguaugcuggacggcggcaacaugcuugagacaauuaaggugagcccucaaaccauggaugggauccugaaaucuauucucaaggugaaaaagagccugggaauguuugucuccgacacacccggcgaaagaaacccuuaugagaauauccuguacaagauuugccucucuggggauggauggagcuauaucgcgucccggaccagcauugugggccgcgccugggaaaacacgguuguggaccuggagcaggauaauaaaccccagaagaucgggaacggaggcucuaauaaaucccuucagagcgcuggcuucgccgcugggcugaucuacucucaacucaugacacugaaggacuuuaaauguuucaaccugauuccuaaugccaagaccuggauggauaucgagggaagaccggaagaccccgucgagauugcccuuuaccagccuuccagcggcugcuaugugcacuuuuuccgggaacccacagaucucaagcaguuuaaacaggacgcuaaguacucccaugggagagacguuaccgaucuguucgcggcccaaccuggacugaccucugcugugaucgaggcccucccccgcaacauggucauuacaugucagggcagcgaagacauccggaaacugcuugagucccaggggagacgcgauaucaagcugauugacaucacgcucucuaaagccgauagccggaaguuugagaaugcugugugggaccaguucaaggaucugugccacaugcauaccggcgucgugguugaaaagaagaaaagaggaggcaaggaggaaauuacaccgcacugugcccugauggacugcaucauguuugaugcggcuguguccgggggacuugacgccaaaguccuccgcgugguucugccucgggauaugguguucagaaccagcacacccaaggucgugcugugaggacuaguaauaaggaaacuguaugaaugucugugggcaggaagugaagagauccuucuguaaagguuuuuggaauuaugucugcugaauaauaaacuuuuuugaaauaauaaaucugguagaaaaaugagaucucaaaggcucuuuucagagccaccaaaaaaaaaaaaaaaaaaaaaaaaaaaaaaaaaaaaaaaaaaaaaaaaaaaaaaaaaaaaaaaaagaauu

SEQ ID NO: 17447 - RNA, 2015 nt, Artificial Sequence
  mRNA product Design b-4 (hSL-A64-N5) comprising derived and/or modified sequence from LASV(Nig08-A19;Clade III)__ADU56619__NP (opt5)
aggagagucccgcagucggcguccagcggcucugcuuguucgugugugugucguugcaggccuuauucaagcuuaccaugagcgccuccaaggaggugaaaucuuuccuguggacccagagccucagacgggaacuguccggcuacugcucuaacaucaaacuucaagucguuaaggacgcucaggcccugcuccacgggcuggauuuuagcgagguguccaaugugcagcgccuuaugagaaagcagaaacgggacgauggagaccugaagcgccucagagaucugaaccaagcggucaauaaccugguggaacucaagucuacacagcagaaaagcguucugcgggugggcacgcuuuccagcgacgaucugcucguccuggcugccgaccuugagaagcugaaaucuaaggugguucgcaccgaaagaccccucuccagcgggauuuauaugggaaaucugucuucccagcaacuggaucagcggaaagcccuccugaacaugaucggcaugacagggggaaauggcggccgcaacaccacaagcgacgggauugugagagucugggaugugaagaaugcugagcuucugaacaaucaguucggaaccaugccuucucucacacuggccugucuuaccaagcagggccaaguggaccugaacgaugcuguccaggcccucacggaccuggggcugaucuacaccgcgaaauaucccaauuccagcgaccucgaucggcuggcccagucccauccgauucuuaacaugaucgacacaaagaaaucuagccugaauaucuccggauacaacuuuagccucggcgcugccguuaaggcuggggccugcaugcuggauggaggcaacaugcuugagaccauuaaagugucuccucaaacaauggacggcauccugaaguccauucucaaagugaagcgcagccuggggauguucaucucugauacccccggagaaagaaauccuuaugagaacauucuguacaagaucugucucagcggcgacggguggcccuauauugcgucccggacgucuaucgucggacgcgccugggaaaauacagugguugaucuggagagcgacaacaaaccucagaagaccggcaaugggggauccaacaaaagccuucagucugcuggcuuugccgcuggccugacauacucccagcucaugacccugaaggauagcaugcugcaacuugacccgaaugccaaaaccuggauggauaucgaggggagacccgaagacccuguggagauugcccucuaccagcccucuuccggaugcuauauccacuucuuucgggaaccuacagaccugaagcaguucaagcaggaugcuaaauacagccauggcauugacgucacggaucuguuugcggcccaacccgggcucaccuccgcugugaucgaggcccugccgagaaacaugguuauuacaugucagggaucugaagacauccgcaaacuucuggagagccagggccggagagauaucaagcucauugacaucucccugucuaagguggauagccgcaaauucgagaaugccgucugggaccaguuuaaggaucugugccacaugcauaccgggauuguggucgaaaagaaaaagcggggcggaaaagaggaaaucacaccucacugugcucuuauggacugcauuauguucgaugccgcgguguccggcgggguugacgcuaaggugcucagagccguccugccccgcgauaugguguuucggaccagcacgccuaaaguugugcugugaggacuaguaauaaggaaacuguaugaaugucugugggcaggaagugaagagauccuucuguaaagguuuuuggaauuaugucugcugaauaauaaacuuuuuugaaauaauaaaucugguagaaaaaugagaucucaaaggcucuuuucagagccaccaaaaaaaaaaaaaaaaaaaaaaaaaaaaaaaaaaaaaaaaaaaaaaaaaaaaaaaaaaaaaaaaagaauu

SEQ ID NO: 17448 - RNA, 2015 nt, Artificial Sequence
  mRNA product Design b-4 (hSL-A64-N5) comprising derived and/or modified sequence from LASV(G1180-SLE-2010;Clade IV)__AIT17169__NP (opt5)
aggagagucccgcagucggcguccagcggcucugcuuguucgugugugugucguugcaggccuuauucaagcuuaccaugagcgccuccaaggagaucaaaucuuuccuguggacccagagccucagacgggaacuguccggcuacugcucuaacauuaagcugcaaguggucaaagacgcucaggcccugcuccacgggcuggauuuuagcgagguuuccaaugugcagcgccuuaugagaaaggaacggcgcgacgauaacgaccugaaaagacuccgggaucugaaucaggcggugaacaaucuggucgagcucaagucuacacaacaaaagagcauccugcgcgugggaacgcuuaccuccgacgaucugcucauucuggcugccgaccuugaaaaacuuaagagcaaaguuaucagaacagagcggccccucucugccggcguguauauggggaaccuguccagccagcagcuggaucagcgcagagcucuccugucuaugauuggaauguccagcggcaaucagcgggcccaggcugggcgcgacggagucgugagaguuugggaugugaagaacgucgagcuucugaauaaccaguucggcaccaugccuucucucacacuggccugucuuaccaaacaaggccagguggaccugaaugaugcggugcaggcccucacagaccuggggcugaucuacaccgcuaaguauccgaacacguccgaccucgaucggcugacccaaagccaucccauccuuaauaugauugacacaaagaaauccucucugaacaucagcggauacaauuuuucccucggcgccgcugucaaggccggggcgugcaugcuggauggaggcaacaugcuugaaaccauuaaaguuagcccucagacaauggacgggauccugaagucuauucucaaagugaagaaagcccugggaauguucaucuccgauacccccggcgagcgcaacccuuaugaaaauauucuguacaagaucugucucagcggcgacggguggcccuauaucgcuucuagaacgagcauuacaggacgggccugggagaacaccguggucgaucuggaguccgacggcaagccucagaaagcugggucuaauaacagcaauaagucccuucagagcgugggauuuacagccggccugaccuacucucaacucaugacccugaaagaugccaugcugcagcuugacccgaacgcuaagacauggauggauaucgaagggagacccgaggacccuguugaaauugcgcucuaccagcccuccagcggaugcuauauccacuucuuucgcgagccuacggaccugaaacaguucaagcaagaugccaaguacucucauggcauugacgugaccgaucuguuugcugcccagcccggccucacauccgccgucaucgacgcucugccgcggaauauggugaucaccugucaggggagcgaugacauuagaaaacuucuggaaucccagggacgcaaggauaucaaacucauugacaucgcccugucuaagacagauagccggaaauaugagaacgcgguuugggaccaauacaaggaucugugccacaugcauaccggcguggucguggagaagaaaaagagagggggaaaagaagagauuacgccucacugugcucuuauggacugcaucauguucgaugccgccgucuccggcgggcucaauacaucugugcugcgcgcuguucugccccgggacaugguguuuagaaccagcaccccucgcgucgugcucugaggacuaguaauaaggaaacuguaugaaugucugugggcaggaagugaagagauccuucuguaaagguuuuuggaauuaugucugcugaauaauaaacuuuuuugaaauaauaaaucugguagaaaaaugagaucucaaaggcucuuuucagagccaccaaaaaaaaaaaaaaaaaaaaaaaaaaaaaaaaaaaaaaaaaaaaaaaaaaaaaaaaaaaaaaaaagaauu

SEQ ID NO: 17449 - RNA, 2015 nt, Artificial Sequence
  mRNA product Design b-4 (hSL-A64-N5) comprising derived and/or modified sequence from LASV(G1442-SLE-2011;Clade IV)__AIT17181__NP (opt5)
aggagagucccgcagucggcguccagcggcucugcuuguucgugugugugucguugcaggccuuauucaagcuuaccaugagcgccuccaaggaggugaaaucuuuccuguggacccagagccucagacgggaacuguccggcuacugcucuaacaucaaacuucaagucguuaaggacgcucaggcccugcuccacgggcuggauuuuagcgagguguccaaugugcagcgccuuaugagaaagcagcggcgcgacgauaacgaccugaaaagacuccgggaucugaaucaagcggucaacaaucugguggaacucaagucuacacagcaaaagagcguucugcgcgugggaacgcuuaccuccgacgaucugcucguccuggcugccgaccuugagaaacuuaagagcaaagugauuagaacagaacggccccucucugccggcguuuauauggggaaccuguccagccagcagcuggaucagcgcagagcucuccugaauaugaucggaaugucuggcgggauucagggaacccggacaggccgcgacggcguggucagagugugggaugugaagaacgccgaccuucugaauaaccaguucgggaccaugccuucccucacacuggcuugucuuaccaaacaaggacaggucgaucugaaugacguugugcaggcccucacggaccugggccugaucuacaccgcgaaguauccgaacgccagcgaucucgaccggcugacacaaucucaucccauucuuaauaugaucgauaccaagaaauccagccugaacaucuccggguacaauuuuucucucggagcugccgugaaggcuggcgccugcaugcuggacgggggaaacaugcuugagacaauuaaagucagcccucagaccauggauggcauccugaaguccauucucaaagugaagaaaacgcugggcauguucaucagcgacacacccggggagcgcaacccuuaugaaaauauucuguacaagaucugucucucuggagauggcuggcccuauauugcguccagaaccagcaucacagggcgggccugggagaacaccguuguggaccuggaaucugauggaaagccucagaaagcuggcagcaauaacuccaauaagucucuucagagcgccggguuugcugccggacugaccuacucccaacucaugacacugaaagacgccaugcugcagcuugauccgaacgcuaagacguggauggacaucgagggcagacccgaggacccugucgaaauugcgcucuaccagcccagcucuggcugcuauauccacuucuuucgcgagccuaccgaucugaaacaguucaagcaagacgccaaguacucccaugggauugaugugacagaccuguuugcugcccagcccggacucaccagcgccguuaucgaagcucugccgcggaauauggugauuacaugucagggcucugaugacaucaaaaagcugcuggagucccaggggagaaaagauaucaagcucauugacaucgcccugagcaaaaccgauucccgcaaguaugaaaacgcggucugggaccaauacaaggaucugugccacaugcauacgggaguggucguggagaaaaagaaacggggcgggaaggaggaaauuacaccucacugugcucuuauggacugcaucauguucgaugccgccguuucuggcggacucaauacccuggugcugagagcuguccucccccgcgacaugguguuucggaccagcacaccuagaguugugcugugaggacuaguaauaaggaaacuguaugaaugucugugggcaggaagugaagagauccuucuguaaagguuuuuggaauuaugucugcugaauaauaaacuuuuuugaaauaauaaaucugguagaaaaaugagaucucaaaggcucuuuucagagccaccaaaaaaaaaaaaaaaaaaaaaaaaaaaaaaaaaaaaaaaaaaaaaaaaaaaaaaaaaaaaaaaaagaauu

SEQ ID NO: 17450 - RNA, 2015 nt, Artificial Sequence
  mRNA product Design b-4 (hSL-A64-N5) comprising derived and/or modified sequence from LASV(G3010-SLE-2013;Clade IV)__AIT17345__NP (opt5)
aggagagucccgcagucggcguccagcggcucugcuuguucgugugugugucguugcaggccuuauucaagcuuaccaugagcgccuccaaggagaucaaaucuuuccuguggacccagagccucagacgggaacuguccggcuacugcucuaacauuaaacuucaaguggucaaagacgcucaggcccugcuccacgggcuggauuuuagcgagguuuccaaugugcagcgccuuaugagaaaggaacggcgcgacgauaacgaccugaaaagacuccgggaucugaaucaggcggugaacaaucuggucgagcucaagucuacacaacaaaagagcauccugcgcgugggaacgcuuaccuccgacgaucugcucauucuggcugccgaccuugaaaaacuuaagagcaaaguuacaagaaccgagcggccccucucugccggcguguauauggggaaccuguccagccagcagcuggaucagcgcagagcucuccugucuaugaucggaauguccagcggcguccagggggcccgggcuggacgcgacggcgugguuagagugugggaugucaagaaugccgagcuucugaacaaucaguucggcacaaugccuucucucacccuggcgugucuuacaaaacaggggcaaguggaccugaacgaugugguccaggcccucaccgaccugggacugauuuacacggcuaaguauccgaauaccuccgaccucgaucggcugacacagagccaucccauccuuaacaugaucgacaccaagaaauccucucugaauauuagcggcuacaacuuuucccucggggccgcuguuaaggccggagcgugcaugcuggauggcgggaauaugcuugaaacaaucaaagugagcccucaaaccauggacggcauucugaagucuauccucaaagugaagaaagcccugggaauguucauuuccgagacgcccggcgaacgcaacccuuaugagaacauccuguacaagauuugucucagcggggauggauggcccuauaucgcuucuagaacaagcaucaccggccgggccugggagaauacagucguggaccuggaauccgaugggaagccucagaaagcuggaucuaacaauagcaacaagucccuucagagcgccggcuuuaccgccgggcugaccuacucucagcucaugacacugaaagacgcuaugcugcaacuugauccgaaugcgaagacguggauggacauugagggaagacccgaagauccuguugagguggcccucuaccagcccuccagcggcugcuauauccacuucuuucgcgaaccuaccgaccugaaacaguucaagcaggacgcuaaguacucucauggcauugaugucacagaccuguuugccgcccaacccgggcucaccuccgcugugaucgaugcccugccgcggaacaugguuauuacaugucagggaagcgacgauaucaaaaagcugcuggagucccagggcagaaaagacaucaagcucauugauaucgcgcugucuaaaaccgacagccgcaaguaugagaaugcugugugggaucaguacaaggaccugugccacaugcauacgggggucguggucgaaaagaagaaacggggaggcaaggaggaaauuacaccucacugugcccuuauggauugcaucauguucgacgccgcuguguccgggggccucaacaccucuguucugagagccgugcugccccgcgauauggucuuucggaccagcacaccuagagugguucucugaggacuaguaauaaggaaacuguaugaaugucugugggcaggaagugaagagauccuucuguaaagguuuuuggaauuaugucugcugaauaauaaacuuuuuugaaauaauaaaucugguagaaaaaugagaucucaaaggcucuuuucagagccaccaaaaaaaaaaaaaaaaaaaaaaaaaaaaaaaaaaaaaaaaaaaaaaaaaaaaaaaaaaaaaaaaagaauu

SEQ ID NO: 17451 - RNA, 2015 nt, Artificial Sequence
  mRNA product Design b-4 (hSL-A64-N5) comprising derived and/or modified sequence from LASV(G502-SLE-2009;Clade IV)__AIT17127__NP (opt5)
aggagagucccgcagucggcguccagcggcucugcuuguucgugugugugucguugcaggccuuauucaagcuuaccaugagcgccuccaaggagaucaaaucuuuccuguggacccagagccucagacgggaacuguccggcuacugcucuaacauuaagcugcaaguggucaaagacgcucaggcccugcuccacgggcuggauuuuagcgagguuuccaaugugcagcgccuuaugagaaaggaacggcgcgacgauaacgaccugaaaagacuccgggaucugaaucaggcggugaacaaucuggucgagcucaagucuacacaacaaaagagcauccugcgcgugggaacgcuuaccuccgacgaucugcucauucuggcugccgaccuugaaaaacuuaagagcaaaguuaucagaacagagcggccccucucugccggcguguauauggggaaccuguccagccagcagcuggaucagcgcagagcucuccugucuaugauuggaauguccggcgggaaucagggaguccgggccggcaaggacggcgugguucgcgugugggaugucaaaaacgcugagcuucugaauaaccaguucgggaccaugccuagccucacacuggccugucuuaccaagcagggacaaguggaccugaaugaugcggugcaggcccucacagaccugggccugaucuacaccgcuaaguauccgaacacgucugaccucgauagacugacccagucccaucccauccuuaauaugauugacaccaaaaagagcucccugaacaucucuggguacaauuuuagccucggagccgcugucaaagccggcgcgugcaugcuggaugggggaaacaugcuugaaacaauuaagguuuccccucaaacaauggacggcauccugaaaagcauucucaaggugaaaaaggcccugggcauguucaucucugauacccccggggagcggaacccuuaugaaaauauucuguacaagaucugucucuccggagacggcuggcccuauaucgcuagccgcacgucuauuacagggagagccugggagaacaccguggucgaucuggagagcgacggaaaaccucagaaggcuggcuccaauaacucuaauaaaagccuucaguccgccggguuuacagccggacugaccuacagccagcucaugacccugaaggaugcuaugcugcaacuugacccgaacacaaaaacguggauggauaucgaaggccggcccgaggacccuguggaaauugcgcucuaccagcccucuuccggcugcuauauccacuucuuuagagagccuaccgaccugaagcaguucaagcaggaugccaaauacagccaugggauugacguuacagaucuguuugcugcccaacccggacucaccucugccgugaucgacgcucugccgcgcaauauggucaucacaugucagggcuccgaugacauucggaaacuucuggaaagccaggggagaaaggauaucaagcucauugacaucgcccugaacaaaaccgauucccgcaaguaugagaaugcggugugggaccaguacaaggaucugugccacaugcauacgggaguuguggucgagaaaaagaaacggggcgggaaggaagagauuacaccucacugugcucuuauggacugcaucauguucgaugccgccgugucuggcggacucaacaccagcguccugagagcugugcugccccgcgacaugguuuuucggaccuccacaccuagagugguccucugaggacuaguaauaaggaaacuguaugaaugucugugggcaggaagugaagagauccuucuguaaagguuuuuggaauuaugucugcugaauaauaaacuuuuuugaaauaauaaaucugguagaaaaaugagaucucaaaggcucuuuucagagccaccaaaaaaaaaaaaaaaaaaaaaaaaaaaaaaaaaaaaaaaaaaaaaaaaaaaaaaaaaaaaaaaaagaauu

SEQ ID NO: 17452 - RNA, 2015 nt, Artificial Sequence
  mRNA product Design b-4 (hSL-A64-N5) comprising derived and/or modified sequence from LASV(G733-SLE-2010;Clade IV)__AIT17155__NP (opt5)
aggagagucccgcagucggcguccagcggcucugcuuguucgugugugugucguugcaggccuuauucaagcuuaccaugagcgccuccaaggagaucaaaucuuuccuguggacccagagccucagacgggaacuguccggcuacugcucuaacauuaagcugcaaguggucaaagacgcucaggcccugcuccacgggcuggauuuuagcgagguuuccaaugugcagcgccuuaugagaaaggaacggcgcgacgauaacgaccugaaaagacuccgggaucugaaucaggcggugaacaaucuggucgagcucaagucuacacaacaaaagagcgugcugcgcguuggaacgcuuaccuccgacgaacugcucgugcuggcugccgaucuugagaaacuuaagagcaaagucaucagaacagagcggccccucucugccggcguguauauggggaaccuguccagccagcagcuggaccagcgcagagcucuccugucuaugauuggaauguccggcgggaaucagggagcccggaccggccgcgauggcguugugagagucugggacgugaagaacgcugaacuucugaauaaccaguucgggacaaugccuagccucacccuggccugucuuacaaaacagggacaaguggaucugaaugacgcgguccaggcccucaccgaucugggccugaucuacacggcuaaguauccgaacaccucugaccucgaccggcugacacagucccaucccauucuuaauaugaucgauaccaagaaaagcucccugaacaucucuggguacaauuuuagccucggagccgcuguuaaggccggcgcgugcaugcuggacgggggaaacaugcuugagacaauuaaaguguccccucaaaccauggauggcauccucaagagcauucugaaagugaagaaagcccugggcauguucaucucugacacgcccggggaacgcaacccuuaugagaauauucuguacaagaucugucucuccggagauggcuggcccuauauugcuagcagaacaucuaucaccgggcgggccugggagaacacagucguggaccuggaaagcgauggaaagccucagaaagcuggcuccaauaacucuaauaagagccuucaguccgccggguuuaccgccggacugaccuacagccagcucaugacacugaaagacgcuaugcugcaacuugauccgaacgcgaagacguggauggacaucgagggcagacccgaagauccuguugagauugcccucuaccagcccucuuccggcugcuauauccacuucuuucgcgaaccuaccgaccugaaacaguucaagcaggacgcuaaguacagccaugggauugaugugacagaccuguuugccgcccaacccggacucaccucugcugucaucgaugcccugccgcggaauauggugauuacaugucagggcuccgacgauaucagaaaacuucuggagagccaggggcgcaaggacaucaaacucauugauaucgcgcuguccaagauugacucucggaaauaugagaacgcuguuugggaucaguacaaggaccugugccacaugcauaccggaguggucguggaaaagaaaaagagaggcgggaaagaggaaaucacgccucacugugcccuuauggauugcauuauguucgacgccgcugucagcggcggacucaauucccuggugcugcgcgccguucucccccgggauaugguguuuagaacaucuaccccucgcgucgugcugugaggacuaguaauaaggaaacuguaugaaugucugugggcaggaagugaagagauccuucuguaaagguuuuuggaauuaugucugcugaauaauaaacuuuuuugaaauaauaaaucugguagaaaaaugagaucucaaaggcucuuuucagagccaccaaaaaaaaaaaaaaaaaaaaaaaaaaaaaaaaaaaaaaaaaaaaaaaaaaaaaaaaaaaaaaaaagaauu

SEQ ID NO: 17453 - RNA, 2015 nt, Artificial Sequence
  mRNA product Design b-4 (hSL-A64-N5) comprising derived and/or modified sequence from MOPV/LASV reassortant(IGS-1;Clade IV)__AFY05578__NP (opt5)
aggagagucccgcagucggcguccagcggcucugcuuguucgugugugugucguugcaggccuuauucaagcuuaccaugagcgccuccaaggagaucaaaucuuuccuguggacccagagccucagacgggaacuguccggcuacugcucuaacauuaaacuucaaguggucaaggacgcucaggcccugcuccacgggcuggauuuuagcgagguuuccaaugugcagcgccuuaugagaaaggaacggcgcgacgauaacgaccugaaaagacuccgggaucugaaucaggcggugaacaaucuggucgagcucaagucuacacaacaaaagagcauccugcgcgugggaacgcuuaccuccgacgaucugcucauucuggcugccgaccuugaaaaacugagaagcaagguuauccggacagagcgcccccucucugccggcguguauauggggaaccuguccagccagcagcuggaucagagacgggcucuccugaauaugauuggaaugucuggcgggaaccagggagcccgcgcuggcagagacggcgucgugcggguuugggaugugaaaaaugccgagcuucuguccaaccaguucgggaccaugccuagccucacacuggcgugucuuaccaagcagggacaagucgaccugaaugaugccgugcaggcucucacagaccugggccugaucuacaccgccaaauauccgaacacgucugaccucgaucgccugacccagucccaucccauccuuaauaugauugacacaaagaaaagcucccugaacaucucuggguacaauuuuagccucggagcugccgugaaggcgggcgccugcaugcuggaugggggaaacaugcuugaaaccauuaaggucuccccucaaacaauggacggcauccugaaaagcauucucaagguuaaaaaggcucugggcauguucaucucugauacccccggggagagaaacccuuaugaaaauauucuguacaaaaucugucucuccggagacggcuggcccuauaucgccagccggacgucuauuacagggagagcuugggagaacaccgugguggaucuggagagcgacggaaagccucagaaggccgauuccaauaacucuagcaaaucccuucagagcgccggcuuuacagcugggcugaccuacucucagcucaugacccugaaggacgcgaugcugcaacuugauccgaaugccaaaacauggauggacaucgaaggacgccccgaggacccugucgaaauugcucucuaccagcccuccagcggcugcuauauccacuucuuucgggagccuacggaucugaagcaguucaaacaggacgccaaguacucucauggcauugaugugaccgaccuguuugccacacaacccgggcucaccuccgcuguuaucgaugcccugccgagaaacauggugaucacaugucagggaagcgacgauauucgcaaacuucuggaaucccagggccggaaggacaucaagcucauugauaucgaccugucuaaaaccgauagcagaaaguaugagaaugcggucugggaccaguacaaagaucugugccacaugcauacgggggugguuguggagaagaagaaacgcggaggcaaggaagagauuacaccucacugugcucuuauggacugcaucauguucgacgccgccgucuccgggggccucaacaccucugugcugcgggcuguccugcccagagauaugguguuucgcaccagcacaccucggguugugcucugaggacuaguaauaaggaaacuguaugaaugucugugggcaggaagugaagagauccuucuguaaagguuuuuggaauuaugucugcugaauaauaaacuuuuuugaaauaauaaaucugguagaaaaaugagaucucaaaggcucuuuucagagccaccaaaaaaaaaaaaaaaaaaaaaaaaaaaaaaaaaaaaaaaaaaaaaaaaaaaaaaaaaaaaaaaaagaauu

SEQ ID NO: 17454 - RNA, 2015 nt, Artificial Sequence
  mRNA product Design b-4 (hSL-A64-N5) comprising derived and/or modified sequence from LASV(LM765-SLE-2012;Clade IV)__AIT17815__NP (opt5)
aggagagucccgcagucggcguccagcggcucugcuuguucgugugugugucguugcaggccuuauucaagcuuaccaugagcgccuccaaggagaucaaaucuuuccuguggacccagagccucagacgggaacuguccggcuacugcucuaacauuaagcugcaaguggucaaagacgcucaggcccugcuccacgggcuggauuuuagcgagguuuccaaugugcagcgccuuaugagaaaggaacggcgcgacgauaacgaccugaaaagacuccgggaucugaaucaggcggugaacaaucuggucgagcucaagucuacacaacaaaagagcauccugcgcgugggaacgcuuaccuccgacgaucugcucauucuggcugccgaccuugaaaaacuuaagagcaaaguuacaagaaccgagcggccccucucugccggcguguauauggggaaccuguccagccagcagcuggaucagcgcagagcucuccuggacaugaucggaaugucuggcuccaaucagggggcccgggcuggacgcgauggcgucgugagaguuugggacgugaagaacgccgagcuucugaauaaccaguucggcacaaugccuagccucacccuggcgugucuuacaaaacaggggcaagucgaucugaaugacgccgugcaggcucucaccgaccugggacugauuuacacggccaaguauccgaacaccucugaucucgaccggcugacacagucccaucccauccuuaauaugaucgauaccaagaaaagcucccugaacauuucuggcuacaauuuuagccucggggcugccgugaaggcgggagccugcaugcuggacggcgggaacaugcuugaaacaaucaaagucuccccucaaaccauggauggcauucucaagagcauccugaaaguuaagaaagcucugggaauguucauuucugacgcccccggcgagcgcaacccuuaugaaaauauccuguacaagauuugucucuccggggauggauggcccuauaucgcuagcagaacgucuaucacaggccgggccugggagaacaccgugguggaccuggagagcgaugggaagccucagaaagccggauccaauggcucuaacaagagccuucaguccgcuggguuuacagcgggacugaccuacagccagcucaugacccugaaagacgccaugcugcaacuugauccgaaugcuaagacauggauggacauugaaggcagacccgaggacccugucgaaaucgcccucuaccagcccucuuccggcugcuauauucacuucuuucgcgagccuacggaucugaaacaguucaagcaggacgccaaguacagccaugggaucgaugugaccgaccuguuugcugcccaacccggacucacaucugcgguuauugaugcucugccgcggaacauggugaucaccugucagggcuccgacgauaucagaaaacuuuucgaaagccaggggcgcaaggacauuaaacugaucgauauugcccucuccaagacagacucucggaaauaugagaaugccgucugggaucaguacaaggaccugugccacaugcauaccggaaucgugguugagaagaaaaagagaggcgggaaagaagagauuacgccucacugugcucugauggauugcaucauguuugacgccgcugugagcggcggacuuaacacauccguccuccgcgccgugcugccccgggacauggucuucagaaccucuaccccucgcgugguucugugaggacuaguaauaaggaaacuguaugaaugucugugggcaggaagugaagagauccuucuguaaagguuuuuggaauuaugucugcugaauaauaaacuuuuuugaaauaauaaaucugguagaaaaaugagaucucaaaggcucuuuucagagccaccaaaaaaaaaaaaaaaaaaaaaaaaaaaaaaaaaaaaaaaaaaaaaaaaaaaaaaaaaaaaaaaaagaauu

SEQ ID NO: 17455 - RNA, 2015 nt, Artificial Sequence
  mRNA product Design b-4 (hSL-A64-N5) comprising derived and/or modified sequence from LASV(LM776-SLE-2012;Clade IV)__AIT17825__NP (opt5)
aggagagucccgcagucggcguccagcggcucugcuuguucgugugugugucguugcaggccuuauucaagcuuaccaugagcgccuccaaggagaucaaaucuuuccuguggacccagagccucagacgggaacuguccucuuacugcagcaacauuaaacuucaaguggucaaggacgcucaggcccugcuccacggccuggauuuuuccgagguuucuaaugugcagcgccuuaugagaaaggaacggcgcgacgauaacgaccugaaaagacuccgggaucugaaucaggcggugaacaaucuggucgagcucaagagcacacaacagaaguccauccugcgcguggggacgcuuaccagcgacgaucugcucauucuggcugccgaccuugaaaaacugaagucuaaaguuacaagaaccgagcggccccucuccgccggaguguauaugggcaaccugagcucucagcagcuggaucaacgcagagcucuccuguccaugaucgggaugagcggaucuaaucagggcgcccgggcugggcgcgacggagucgugagaguuugggaugugaagaacgccgagcuucugaauaaccaguucggcacaaugccuucccucacccuggcgugucuuacaaaacagggccaagucgaccugaaugaugccgugcaggcucucaccgaccuggggcugauuuacacggccaaguauccgaacaccagcgaccucgaucggcugacacagucccaucccauccuuaauaugaucgacaccaagaaaucuagccugaacauuuccggauacaauuuuagccucggcgcugccgugaaggcgggggccugcaugcuggauggaggcaacaugcuugaaacaaucaaagucucuccucaaaccauggacgggauucugaaguccauccucaaaguuaagaaagcucugggaauguucauuagcgauacgcccggcgagcgcaacccuuaugaaaauauccuguacaagauuugucucucuggcgacggguggcccuauaucgccagcagaacauccaucaccggacgggcuugggagaacacagugguggaucuggagucugacggcaagccucagaaagccgggagcaauaacuccaauaagagccuucagucugccggauuuaccgcuggccugaccuacucccagcucaugacacugaaagaugcgaugcugcaacuugacccgaacgccaagacguggauggauauugaagggagacccgaggacccugucgaaguggcucucuaccagcccagcucuggaugcuauauccacuucuuucgcgagccuaccgaccugaaacaguucaagcaggaugccaaguacucccauggcauugacguuacagaucuguuugccgcucaacccggccucaccagcgccgugaucgacgcgcugccgcggaauauggucauuacaugucagggguccgaugacaucagaaaacuucuggaaucucagggacgcaaggauaucaaacucauugacaucgcucugagcaagaccgauucccggaaauaugagaacgccgugugggaccaguacaaggaucugugccacaugcauacgggcguuguggucgagaagaaaaagagagggggaaaagaagagauuacaccucacugugcccuuauggacugcaucauguucgaugcugccgugucuggcgggcucaauaccagcguccugcgcgcugugcugccccgggacaugguuuuuagaaccuccacaccucgcgugguccucugaggacuaguaauaaggaaacuguaugaaugucugugggcaggaagugaagagauccuucuguaaagguuuuuggaauuaugucugcugaauaauaaacuuuuuugaaauaauaaaucugguagaaaaaugagaucucaaaggcucuuuucagagccaccaaaaaaaaaaaaaaaaaaaaaaaaaaaaaaaaaaaaaaaaaaaaaaaaaaaaaaaaaaaaaaaaagaauu

SEQ ID NO: 17456 - RNA, 2015 nt, Artificial Sequence
  mRNA product Design b-4 (hSL-A64-N5) comprising derived and/or modified sequence from LASV(Mad39;Clade IV)__ANH09723__NP (opt5)
aggagagucccgcagucggcguccagcggcucugcuuguucgugugugugucguugcaggccuuauucaagcuuaccaugagcgccuccaaggagaucaaaucuuuccuguggacccagagccucagacgggaacuguccggcuacugcucuaacauuaagcugcaaguggucaaagacgcucaggcccugcuccacgggcuggauuuuagcgagguuuccaaugugcagcgccuuaugagaaagcagcggcgcgacgauaacgaccugaaaagacuccgggaucugaaucaagcggugaacaaucuggucgaacucaagucuacacagcaaaagagcgugcugcgcguuggaacgcuuaccuccgacgaucugcucacacuggcugccgaccuugagaaacuuaagagcaaagugaccagaacagaacggccccucaccgccggcgucuauauggggaaccugucuucccagcagcuggaucagcgcagagcucuccugaauaugaucggaaugagcggcgggaaccagggagcccggacaggccgcgacggcgugguuagagugugggaugucaagaaugcugagcuucugaacaaucaguucgggaccaugccuucucucacgcuggccugucuuaccaaacaaggacagguggaccugaacgaugugguccaggcgcucacagaccugggccugauuuacaccgccaaguauccgaauacauccgaccucgaucggcugacccaaagccaucccauccuuaacaugauugacacgaauaagucuucccugaacaucagcggguacaacuuuucccucggagcugccguuaaagcuggcgccugcaugcuggaugggggaaauaugcuugagacaaucaaggugucuccucagaccauggacggcauucugaaaagcauccucaaggugaaaaagucccugggcauguucauuagcgauacacccggggaacgcaacccuuaugagaauauccuguacaaaauuugucucucuggagacggcuggcccuauaucgcguccagaaccagcauuaccgggcgggccugggaaaacacagucguggaucuggagucuggaggcaagccucagaaggcugggagcaauaacuccaauaaaucucuucagagcgccggauuugcugccggccugacguacucccaacucaugacccugaaggacgccaugcugcagcuugauccgaacgcuaaaacauggauggacaucgagggcagacccgaagauccuguugagaucgcgcucuaccagcccauuagcgggugcuauauccacuucuuucgcgaaccuaccgaccugaagcaguucaaacaagacgccaaguacucucauggaauugaugugacagaccuguuugcugcccagcccggccucaccuccgccgucaucgaggcucugccgcggaauauggugauuacgugucaggggagcgaugacaucagaaaacuuuucgaaucucagggacgcaaggauaucaagcugauugacaucgcccucuccaaaacagauagccggaaguaugagaacgcgguuugggaccaauacaaagaucugugccacaugcauaccggcguggucguggagaagaagaaaaagggcgggaaagaagagauuaccccucacugugcucugauggacugcaucauguuugaugccgccgucuccggaggccuuaauacacucgugcugagagcuguucugccccgcgacaugguguuccggaccucuacaccuaaggucgugcucugaggacuaguaauaaggaaacuguaugaaugucugugggcaggaagugaagagauccuucuguaaagguuuuuggaauuaugucugcugaauaauaaacuuuuuugaaauaauaaaucugguagaaaaaugagaucucaaaggcucuuuucagagccaccaaaaaaaaaaaaaaaaaaaaaaaaaaaaaaaaaaaaaaaaaaaaaaaaaaaaaaaaaaaaaaaaagaauu

SEQ ID NO: 17457 - RNA, 2015 nt, Artificial Sequence
  mRNA product Design b-4 (hSL-A64-N5) comprising derived and/or modified sequence from LASV(Z0947-SLE-2011;Clade IV)__AIT17841__NP (opt5)
aggagagucccgcagucggcguccagcggcucugcuuguucgugugugugucguugcaggccuuauucaagcuuaccaugagcgccuccaaggagaucaaaucuuuccuguggacccagagccucagacgggaacuguccggcuacugcucuaacauuaagcugcaaguggucaaagacgcucaggcccugcuccacgggcuggauuuuagcgagguuuccaaugugcagcgccuuaugagaaaggaacggcgcgacgauaacgaccugaaaagacuccgggaucugaaucaggcggugaacaaucuggucgagcucaagucuacacaacaaaagagcauccugcgcgugggaacgcuuaccuccgacgaucugcucauucuggcugccgaccuugaaaaacuuaagagcaaaguuacaagaaccgagcggccccucucugccggcguguauauggggaaccuguccagccagcagcuggaucagcgcagagcucuccugaauaugaucggaaugucuggcuccaaccagggggcccggacaggacgcgacggcgucgugagaguuugggaugugaagaaugcugagcuucugaacaaucaguucggcaccaugccuagccucacacuggccugucuuaccaaacaggggcaagucgaccugaacgaugcggugcaggcccucacggaccugggacugauuuacaccgcuaaguauccgaauacaucugaccucgaucggcugacccagucccaucccauccuuaacaugaucgacacaaagaaaagcucccugaauauuucuggcuacaacuuuagccucggggccgcugugaaggccggagcgugcaugcuggauggcgggaacaugcuugaaaccaucaaagucuccccucaaacgauggacggcauucucaagagcauccugaaaguuaagaaagcccugggaauguucauuucugaugcucccggcgagcgcaauccuuaugaaaacauccuguacaagauuugucucuccggggacggauggcccuauaucgccagcagaacaucuaucaccggccgggcuugggagaauacagugguggaucuggagagcgacgggaagccucagaaagccggauccaacggcucuaauaagagccuucaguccgccggguuuaccgcuggacugaccuacagccagcucaugacacugaaagaugcgaugcugcaacuugacccgaacgccaagacguggauggauauugaaggcagacccgaggacccugucgaaaucgcucucuaccagcccucuuccggcugcuauauucacuucuuucgcgagccuaccgaccugaaacaguucaagcaggaugccaaguacagccaugggaucgacgugacagaucuguuugccgcucaacccggacucaccucugccguuauugacgcgcugccgcggaauauggugaucacaugucagggcuccgaugacaucagaaaacuuuucgaaagccaggggcgcaaggauauuaaacugaucgacauugcucucuccaagaccgauucucggaaauaugagaacgccgucugggaccaguacaaggaucugugccacaugcauacgggaaucgugguugagaagaaaaagagaggcgggaaagaagagauuacaccucacugugcccugauggacugcaucauguuugaugcugccgugagcggcggacuuaauaccuccguccuccgcgcugugcugccccgggacauggucuucagaaccucuacaccucgcgugguucugugaggacuaguaauaaggaaacuguaugaaugucugugggcaggaagugaagagauccuucuguaaagguuuuuggaauuaugucugcugaauaauaaacuuuuuugaaauaauaaaucugguagaaaaaugagaucucaaaggcucuuuucagagccaccaaaaaaaaaaaaaaaaaaaaaaaaaaaaaaaaaaaaaaaaaaaaaaaaaaaaaaaaaaaaaaaaagaauu

SEQ ID NO: 17458 - RNA, 2046 nt, Artificial Sequence
  mRNA product Design b-4 (hSL-A100) comprising derived and/or modified sequence from LASV(Josiah;Clade IV)__NP_694869__NP (opt1)
aggagagucccgcagucggcguccagcggcucugcuuguucgugugugugucguugcaggccuuauucaagcuuaccaugagcgccuccaaggagaucaagagcuuccuguggacccagucccuccgccgggagcugagcggcuacugcuccaacaucaagcuccagguggucaaggacgcccaggcgcugcugcacgggcuggacuucagcgagguguccaacgugcagcgccucaugcggaaggagcgccgggacgacaacgaccugaagcgccugcgggaccucaaccaggccgucaacaaccugguggagcucaagagcacccagcagaaguccauccugcgcgugggcacccugaccagcgacgaccugcucauccuggccgccgaccuggagaagcucaaguccaaggucauccggaccgagcgcccccugagcgccgggguguacaugggcaaccuguccagccagcagcucgaccagcggcgcgcgcugcugaacaugaucgggauguccggcggcaaccagggggcccgggccggccgcgacggggugguccgggugugggacgugaagaacgccgagcuccugaacaaccaguucggcaccaugccgagccugacgcucgcgugccugaccaagcaggggcaggucgaccugaacgacgccgugcaggcccucaccgaccugggccugaucuacaccgccaaguaccccaacacguccgaccucgaccgccugacccagagccaccccauccugaacaugaucgacaccaagaaguccagccucaacaucagcggcuacaacuucucccugggggccgcggugaaggccggcgccugcaugcuggacgggggcaacaugcucgagaccaucaaggucagcccccagacgauggacggcauccugaaguccauccugaaggugaagaaggcccucgggauguucaucagcgacaccccgggcgagcggaaccccuacgagaacauccuguacaagaucugccuguccggggacggcuggcccuacaucgccagccgcaccuccaucaccgggcgggcgugggagaacacgguggucgaccucgagagcgacggcaagccccagaaggccgacuccaacaacagcuccaagagccugcaguccgccggcuucaccgccgggcugaccuacagccagcucaugacccugaaggacgccaugcugcagcuggacccgaacgcgaagacguggauggacaucgagggccgccccgaggaccccguggagaucgcccucuaccagcccuccagcgggugcuacauccacuucuuccgggagccgaccgaccugaagcaguucaagcaggacgccaaguacucccacggcaucgacgugaccgaccuguucgccacccagcccgggcucacgagcgccgucaucgacgcgcugccccgcaacauggugaucacgugccagggcuccgacgacauccgcaagcugcucgagagccagggccggaaggacaucaagcugaucgacaucgcccugagcaagaccgacucccgcaaguacgagaacgccgugugggaccaguacaaggaccucugccacaugcacaccggggucguggucgagaagaagaagcggggcgggaaggaggagaucaccccgcacugcgcccugauggacugcaucauguucgacgcggccgugagcggcgggcugaacaccuccgugcuccgcgccguccugccccgggacaugguguuccgcaccagcacgccccgggugguccugugaggacuaguaauaaggaaacuguaugaaugucugugggcaggaagugaagagauccuucuguaaagguuuuuggaauuaugucugcugaauaauaaacuuuuuugaaauaauaaaucugguagaaaaaugagaucucaaaggcucuuuucagagccaccaaaaaaaaaaaaaaaaaaaaaaaaaaaaaaaaaaaaaaaaaaaaaaaaaaaaaaaaaaaaaaaaaaaaaaaaaaaaaaaaaaaaaaaaaaaaaaaaaaaaa

SEQ ID NO: 17459 - RNA, 2046 nt, Artificial Sequence
  mRNA product Design b-4 (hSL-A100) comprising derived and/or modified sequence from LASV(LP;Clade I)__AAF86702__NP (opt1)
aggagagucccgcagucggcguccagcggcucugcuuguucgugugugugucguugcaggccuuauucaagcuuaccaugagcaacuccaaggagaucaagagcuuccuguggacccagucccuccgccgggagcugagcggcuacugcuccaacaucaagcuccagguggucaaggacgcccaggcccugcugcacgggcuggacuucagcgagguguccaacgugcagcgccucaugcggaagcagaagcgcgacgacgcggaccugaagcggcugcgcgaccucaaccaggccgucaacaaccugguggagcucaagagcacccagcagaagaacgugcugcgggucggcacgcuguccagcgacgaccugaucacccucgccgccgaccuggagaagcugaaguccaaggugauccgcaccgagcggccccucagcuccgggguguacaugggcaaccugagcucccagcagcuggaccagcgccgggcccuccugagcaugaucgggauguccggcggcccgcaggggaaccgcaccggcggggacggcgucgugcgggugugggacgucaagaacgcggagcugcucaacaaccaguucgggacgaugcccagccugacccuggccugccucaccaagcagggccagguggaccugaacgacgccgugcaggcccugaccgaccucggccugaucuacacggcgaaguaccccaacuccagcgaccuggacaugcucacccagagccaccccauccuggggauggucgacaccaagaaguccagccugaacaucuccggcuacaacuucagccucggggccgccgugaaggccggcgccugcaugcuggacggcgggaacaugcuggagaccaucaagguguccccgcagacgauggacggcauccucaagagcauccugaaggucaagcgcucccuggggauguucaucagcgacacccccggcgagcggaaccccuacgagaacauccucuacaagaucugccuguccggggagggcuggcccuacaucgcgagccgcaccuccaucaccggccgggccugggagaacacgcugguggaccucgagagcgacaacaagccgcccaagcugaacuccgccgggagcaacaagucccugcaggccgccggccucaacgcggggcugaccuacagccagcugaugacccugaaggacugcaugcuccagcuggaccccuccagcaagaccuggaucgacaucgagggccgccccgaggacccgguggagaucgcccuguuccagcccuccagcgggugcuacauccacuucuuccgggagcccacggaccucaagcaguucaagcaggacgccaaguacagccacggcaucgacgucaccgaccuguucuccacccagcccggccugaccagcgccgugaucgaggcccucccgcgcaacauggugcugacgugccagggguccgacgacaucaagaagcugcucgagagccagggccggcgcgacaucaagcugaucgacaucucccugagcaaggcggacucccgcaaguucgagaacgccgucugggaccaguacaaggaccucugccacaugcacaccgggguggucguggagaagaagaagcggggcgggaaggaggagaucacgccccacugcgcccugcuggacugcaucauguucgacgccgccaccaccggcagccucaacaucaccacccugcgcgcggugcugccccgggacauggucuuccgcaccuccacgcccaagguggugcucugaggacuaguaauaaggaaacuguaugaaugucugugggcaggaagugaagagauccuucuguaaagguuuuuggaauuaugucugcugaauaauaaacuuuuuugaaauaauaaaucugguagaaaaaugagaucucaaaggcucuuuucagagccaccaaaaaaaaaaaaaaaaaaaaaaaaaaaaaaaaaaaaaaaaaaaaaaaaaaaaaaaaaaaaaaaaaaaaaaaaaaaaaaaaaaaaaaaaaaaaaaaaaaaaa

SEQ ID NO: 17460 - RNA, 2046 nt, Artificial Sequence
  mRNA product Design b-4 (hSL-A100) comprising derived and/or modified sequence from LASV(803213;Clade II)__AAF86704__NP (opt1)
aggagagucccgcagucggcguccagcggcucugcuuguucgugugugugucguugcaggccuuauucaagcuuaccaugagcgccuccaaggaggugaaguccuuccuguggacccagagccuccgccgggagcugagcggcuacugcuccaacaucaagcugcaggucgugaaggacgcccaggcgcuccugcacgggcuggacuucagcgaggugaacaacguccagcgccucaugcggaagcagaagcgcgacgacggcgaccugaagcggcugcgcgaccucaaccaggccgugaacaaccugguggagcugaaguccacccagcagaaguccauccuccgggucgggacgcugaccagcgacgaccugcucacccuggccgccgaccuggagaagcucaagagcaaggugauccgcaccgagcggccccuguccagcggcguguacauggggaaccuguccacgcagcagcucgagcagcgccgggcccugcugaacaugaucggcauggucggcggggcgcagggcacccagccggggcgcgacggcguggugcgggucugggacgugaagaaccccgaccuccugaacaaccaguucgggaccaugcccagccugacccucgccugccugacgaagcagggccagguggaccugaacgacgccguccucgcccugaccgaccugggccucaucuacaccgcgaaguaccccaacuccagcgaccuggaccgccugucccagagccacccgauccucaacaugguggacaccaagaaguccagccugaacaucagcggguacaacuucucccugggcgccgccgugaaggccggggccugcaugcucgacggcggcaacaugcuggagacgaucaaggucacgccccagaccauggacgggauccucaagagcauccugaaggugaagcggucccugggcauguucgugagcgacacccccggggagcgcaaccccuacgagaacauccuguacaagaucugccucuccggcgacggguggccguacaucgcgagccggaccuccaucgucggccgcgccugggagaacaccaccguggaccuggagagcgacggcaagccccagaagguggggaccgccggcuccaacaagagccugcaguccgccggguuccccacgggccucaccuacagccagcugaugacccugaaggacuccaugaugcagcuggaccccagcgccaagaccuggaucgacaucgaggggcggccggaggaccccgucgagaucgcgcucuaccagcccauguccggcugcuacauccacuucuuccgcgagcccacggaccugaagcaguucaagcaggacgccaaguacagccacggcaucgacguggccgaccuguucccggcccagcccgggcucaccuccgccgucaucgaggcgcugccccggaacauggugcugaccugccagggcagcgacgacaucaagaagcuccuggacucccaggggcgccgcgacaucaagcugaucgacaucagccucagcaagguggacucccggaaguucgagaacgccgucugggaccagugcaaggaccugugccacaugcacaccggcgugguggucgagaagaagaagcgcgggggcaaggaggagaucacgccccacugcgcccugauggacugcaucauguucgacgccgccgugagcggcgggcucaacaucccggugcugcgggcgguccugccccgcgacaugguguuccggaccuccagccccaaggugguccucugaggacuaguaauaaggaaacuguaugaaugucugugggcaggaagugaagagauccuucuguaaagguuuuuggaauuaugucugcugaauaauaaacuuuuuugaaauaauaaaucugguagaaaaaugagaucucaaaggcucuuuucagagccaccaaaaaaaaaaaaaaaaaaaaaaaaaaaaaaaaaaaaaaaaaaaaaaaaaaaaaaaaaaaaaaaaaaaaaaaaaaaaaaaaaaaaaaaaaaaaaaaaaaaaa

SEQ ID NO: 17461 - RNA, 2049 nt, Artificial Sequence
  mRNA product Design b-4 (hSL-A100) comprising derived and/or modified sequence from LASV(GA391;Clade III)__CAA36646__NP (opt1)
aggagagucccgcagucggcguccagcggcucugcuuguucgugugugugucguugcaggccuuauucaagcuuaccaugagcgccuccaaggaggugcgcagcuuccuguggacccagucccuccggcgcgagcugagcggcuacugcuccaacaucaagcugcaggucgugaaggacgcccaggcgcuccugcacgggcuggacuucagcgagguguccaacguccagcggcucaugcgcaagcagaagcgggacgacggcgaccugaagcgccugcgggaccucaaccaggccgugaacaaccugguggagcucaagagcacccagcagaaguccguccugcgcguggggacccugagcuccgacgaccugcucauccuggccgccgaccuggagaagcucaagagcaaggugacccggaccgagcgcccccuguccagcggcgucuacauggggaaccuguccagccagcagcucgaccagcggcgcgcccugcugaacaugaucggcaugaccggcguguccgggggcgggaagggcgcgagcgacgggaucgugcgggucugggacgugaagaacgccgagcuccugaacaaccaguucggcacgaugccgucccugacccucgccugccugaccaagcagggccagguggaccugaacgacgccguccaggcgcucaccgaccuggggcugaucuacacggccaaguaccccaacagcagcgaccucgaccgccugucccagagccaccccauccugaacaugaucgacaccaagaaguccagccucaacaucuccggcuacaacuucagccugggggccgccgugaaggccggcgcgugcaugcuggacggcgggaacaugcucgagaccaucaaggugagcccccagaccauggacggcauccucaaguccauccugaaggucaagaagucccuggggauguucgugagcgacacgccgggcgagcggaaccccuacgagaacauccuguacaagaucugccuguccggggacggcuggcccuacaucgccagccgcaccuccaucgugggccgggccugggagaacaccgucguggaccucgagcaggacaacaagccccagaagaucgggaacggcgggagcaacaagucccugcagagcgccggcuucgccgcggggcugaccuacucccagcucaugacgcugaaggacuucaagugcuucaaccugaucccgaacgccaagaccuggauggacaucgagggccgccccgaggaccccguggagaucgcccuguaccagcccagcuccggcugcuacguccacuucuuccgggagccgaccgaccucaagcaguucaagcaggacgccaaguacagccacgggaucgacgugaccgaccuguucgccgcgcagcccggccugacgagcgccgucaucgaggcccucccccgcaacauggugaucacgugccagggguccgaggacauccggaagcugcuggagagccagggccgccgcgacaucaagcucaucgacaucacccuguccaaggccgacagccggaaguucgagaacgccgugugggaccaguucaaggaccugugccacaugcacaccggggucgugguggagaagaagaagcgcggcggcaaggaggagaucacgccccacugcgcgcucauggacugcaucauguucgacgccgccgucuccgggggccuggacgccaaggugcugcgggugguccucccgcgcgacaugguguuccggaccagcacccccaaggugguccugugaggacuaguaauaaggaaacuguaugaaugucugugggcaggaagugaagagauccuucuguaaagguuuuuggaauuaugucugcugaauaauaaacuuuuuugaaauaauaaaucugguagaaaaaugagaucucaaaggcucuuuucagagccaccaaaaaaaaaaaaaaaaaaaaaaaaaaaaaaaaaaaaaaaaaaaaaaaaaaaaaaaaaaaaaaaaaaaaaaaaaaaaaaaaaaaaaaaaaaaaaaaaaaaaa

SEQ ID NO: 17462 - RNA, 2046 nt, Artificial Sequence
  mRNA product Design b-4 (hSL-A100) comprising derived and/or modified sequence from LASV(AV;Clade V)__CCA30315__NP (opt1)
aggagagucccgcagucggcguccagcggcucugcuuguucgugugugugucguugcaggccuuauucaagcuuaccaugagcgccuccaaggaggugaaguccuuccuguggacccagagccuccgccgggagcugagcggcuacugcuccaacaucaagcugcaggucgugaaggacgcccaggcgcuccugcacgggcuggacuucagcgagguguccaacguccagcgccucaugcggaagcagcgccgggacgacagcgaccugaagcgccugcgggaccucaaccaggccgugaacaaccugguggagcugaaguccacccagcagaaguccguccuccgcgugggcacgcugagcagcgacgaccugcucacccuggccgccgaccuggagaagcucaaguccaaggugacccggaccgagcgcccccugagcuccggggucuacaugggcaaccugagcucccagcagcucgaccagcggcgcgcccugcugaaccucaucgggaugacgaacggcagccagggcucccaggcggggcgggacggcguggugcgcgucugggacgugaagaacgccgagcugcugaacaaccaguucgggaccaugccgagccucacccuggccugccugaccaagcagggccagguggaccucaacgacgucgugcaggcccugacggaccuggggcucaucuacaccgcgaaguaccccaacaccagcgaccuggaccggcugacccagucccaccccauccucaacaugaucgacacgaagaaguccagccugaacaucagcggcuacaacuucucccugggcgccgccgugaaggccggggccugcaugcucgacggcgggaacaugcuggagaccaucaaggucagcccccaguccauggacggcauccucaagagcauccugaaggugaagcgcgcgcugggcauguucguguccgacaccccgggggagcggaaccccuacgagaacauccuguacaagaucugccucagcggcgacggguggcccuacaucgccucccgcaccagcaucgucggccgggccugggagaacacggugguggaccuggagaccgacgggaagccccagaagaucggcuccggcaacagcaacaagucccugcagagcgccggguucuccgccggccucaccuacagccagcugaugacccugaaggacgcgaugcugcagcucgacccgaacgccaagacguggauggacaucgaggggcgccccgaggaccccgucgagguggcccuguaccagcccaucuccggcugcuacauccacuucuuccgggagccgaccgaccugaagcaguucaagcaggacgccaaguacagccacgggaucgacaucgccgaccucuucgcggcccagcccggccugaccagcgccgucaucgaggcccugccccgcaacauggugaucacgugccagggcuccgaggacaucaagaagcuccuggagagccaggggcgcaaggacaucaagcugaucgacaucgcccucuccaagaucgacagccggaaguucgagaacgcggugugggaccaguacaaggaccugugccacaugcacaccggcgucgugguggagaagaagaagcgcgggggcaaggaggagaucaccccgcacugcgcccugauggacugcaucauguucgacgccgccgucuccgggggccucaacacccuggugcugcgggcggugcucccccgcgacauggucuuccggaccagcacgccccgcguggugcugugaggacuaguaauaaggaaacuguaugaaugucugugggcaggaagugaagagauccuucuguaaagguuuuuggaauuaugucugcugaauaauaaacuuuuuugaaauaauaaaucugguagaaaaaugagaucucaaaggcucuuuucagagccaccaaaaaaaaaaaaaaaaaaaaaaaaaaaaaaaaaaaaaaaaaaaaaaaaaaaaaaaaaaaaaaaaaaaaaaaaaaaaaaaaaaaaaaaaaaaaaaaaaaaaa

SEQ ID NO: 17463 - RNA, 2046 nt, Artificial Sequence
  mRNA product Design b-4 (hSL-A100) comprising derived and/or modified sequence from LASV(Togo/2016/7082;Clade VI)__AMR44578__NP (opt1)
aggagagucccgcagucggcguccagcggcucugcuuguucgugugugugucguugcaggccuuauucaagcuuaccaugagcaacuccaaggaggugaaguccuuccuguggacccagagccuccgccgggagcugagcggcuacugcuccaacaucaagcugcaggucgugaaggacgcccaggcccuccugcacgggcuggacuucagcgagguguccaacguccagcgccucaugcggaagcagaagcgcgacgacggcgaccugaagcggcugcgcgaccucaaccaggcggugaacaaccugguggagcucaagagcguccagcagaaguccauccugcggguggggacccugaccagcgacgaccugcucacccuggccgccgaccuggagaagcucaaguccaaggugacccgcaccgagcggccccugagcuccggcgucuacauggggaaccugagcucccagcagcucgaccagcgccgggcccugcugagcaugaucggcauguccggcgggaaccagaacagccagccgaagggcgacgggguggugcgcgucugggacgugaagaacgccgaccuccugaacaaccaguucggcacgaugcccucccugacccucgcgugccugaccaagcagggccagguggaccugaacgacgccguccaggcccucaccgaccuggggcugaucuacacggccaaguaccccaacagcagcgaccucgaccggcugucccagagccaccccauccugaacaugaucgacaccaagaaguccagccucaacaucuccggcuacaacuucagccugggggcggccaucaagaccggcgccugcaugcuggacgggggcaacaugcucgagaccaucaaggugacgccgcagaccauggacggcauccugaaguccauccugaaggugaagcgcagccucgggauguucaucuccgacacccccggcgagcggaaccccuacgagaacauccuguacaagaucugccugagcggggacggcuggcccuacaucgccucccgcaccgccaucaucgggcgggcgugggagaacacggucguggaccucgagagcgacuccaagccgcagaagaucggcagcaacggcuccaacaagagccugcaguccgccggguucgcccccggccugaccuacagccagcucaugacccugaaggacuccaugcugcagcuggaccccaacgccaagaccuggaucgacaucgaggggcgccccgaggacccgguggaggucgcccucuuccagcccaucagcggcugcuacauccacuucuuccgggagcccacggaccugaagcaguucaagcaggacgcgaaguacagccacgggaucgacgugaccgaccuguucgccgcccagcccggccucaccuccgccgugaucgaggcccugccgcgcaacaugguccugaccugccagggcagcgacgacaucaagaagcuccuggacucccaggggcggcgcgacaucaagcugaucgacgugagccucaacaagaucgacucccgcaaguucgagaacgcggucugggaccaguacaaggaccugugccacaugcacacgggcgugguggucgagaagaagaagaagggcgggaaggaggagaucacgccccacugcgcccugcucgacugcaucauguucgacgccgccgugagcgggggccugaacgccaccgugcugcgggcgguccucccccgcgacaugguguuccggaccuccagccccaaggugguccugugaggacuaguaauaaggaaacuguaugaaugucugugggcaggaagugaagagauccuucuguaaagguuuuuggaauuaugucugcugaauaauaaacuuuuuugaaauaauaaaucugguagaaaaaugagaucucaaaggcucuuuucagagccaccaaaaaaaaaaaaaaaaaaaaaaaaaaaaaaaaaaaaaaaaaaaaaaaaaaaaaaaaaaaaaaaaaaaaaaaaaaaaaaaaaaaaaaaaaaaaaaaaaaaaa

SEQ ID NO: 17464 - RNA, 2046 nt, Artificial Sequence
  mRNA product Design b-4 (hSL-A100) comprising derived and/or modified sequence from LASV(KAK-428;Clade n.d. (VII))__ANH09741__NP (opt1)
aggagagucccgcagucggcguccagcggcucugcuuguucgugugugugucguugcaggccuuauucaagcuuaccaugagcaacuccaaggaggugaaguccuuccuguggacccagagccuccgccgggagcugagcggcuacugcaccaacaucaagcugcaggucgugaaggacgcccaggcccuccugcacgggcuggacuucuccgaggugagcaacguccagcgccucaugcggaagcagaagcgcgacgacaacgaccugaagcggcugcgcgaccucaaccaggcggugaacaaccugguggagcugaaguccguccagcagaaguccgugcucaaggugggcacgcugaacagcgacgaccugcucacccuggccgccgaccuggagaagcucaagagcaaggucgugcggaccgagcgcccccuguccagcgggguguacaugggcaaccuguccagccagcagcucgaccagcggcgcgcccugcugaacaugaucgggauggccggcggcucccaggggaaccagccgagccgggacggcgucgugcgcgugugggacgucaagaacgcggaccuccugaacaaccaguucgggaccaugcccucccugacgcucgccugccugaccaagcagggccagguggaccugaacgacgugguccucgcccugaccgaccuggggcucaucuacaccgccaaguaccccaacagcuccgaccuggaccggcugagccagaaccaccccgugcucaacaugaucgacgugaacaagagcucccugaacaucagcggcuacaacuucucccugggcgcggccgucaaggccggggccugcaugcucgacggcgggaacaugcuggagacgaucaagaucagcccgcagaccguggacggcauccugaaguccauccucaaggugaagcgcgcccugggcauguucgucagcgacacccccggggagcggaaccccuacgagaacauccuguacaaggugugccucuccggcaacggguggcccuacaucgcgagccgcaccuccaucgucggccgggccugggagaacacggugguggaccuggagagcaacaagaaccagccgaaggucgggaacaacggcuccaacaagaugcugcagagcuccggcuucgccaccgggcucaccuacagccagcugaugacccugcgcgacuccaugcugcagcucgaccccacggccaagaccuggaucgacaucgagggccggcccgaggaccccguggagcuggcccuguuccagccgagcuccgggugcuacauccacuucuuccgcgagcccaccgaccucaagcaguucaagcaggacgcgaaguacagccacggcaucgacgugaacgaccuguucuccgcccagcccgggcugaccagcgccguccucgaggcccugccccggaacauggugcugacgugccagggcagcgacgacauccgcaagcuccuggacucccaggaccgcaaggacaucaagcugaucgacaucagccucuccaaggccgacgcgcggaaguucgagaacgacgugugggaccaguucaaggaccugugccacaugcacaccggcaucgucguggagaagaagaagaagggcgggaagcaggagaugaccccgcacugcgcccugcucgacugcaucauguucgacgccgccgugagcgggggccugaacguccccacccugcgcgccgugcuccccacggacaugguguuccggaccaucaccaccaaggucgugcugugaggacuaguaauaaggaaacuguaugaaugucugugggcaggaagugaagagauccuucuguaaagguuuuuggaauuaugucugcugaauaauaaacuuuuuugaaauaauaaaucugguagaaaaaugagaucucaaaggcucuuuucagagccaccaaaaaaaaaaaaaaaaaaaaaaaaaaaaaaaaaaaaaaaaaaaaaaaaaaaaaaaaaaaaaaaaaaaaaaaaaaaaaaaaaaaaaaaaaaaaaaaaaaaaa

SEQ ID NO: 17465 - RNA, 2046 nt, Artificial Sequence; identical to SEQ ID NO: 17459
  mRNA product Design b-4 (hSL-A100) comprising derived and/or modified sequence from LASV(Pinneo-NIG-1969;Clade I)__AIT17837__NP (opt1)

SEQ ID NO: 17466 - RNA, 2046 nt, Artificial Sequence
  mRNA product Design b-4 (hSL-A100) comprising derived and/or modified sequence from LASV(ISTH0009-NIG-2011;Clade II)__AIT17405__NP (opt1)
aggagagucccgcagucggcguccagcggcucugcuuguucgugugugugucguugcaggccuuauucaagcuuaccaugagcguguccaaggaggucaagagcuuccuguggacccagucccuccgccgggagcugagcggcuacugcuccaacaucaagcuccagguggugaaggacgcccaggcccugcugcacgggcuggacuucagcgaggucuccaacgugcagcgccucaugcggaagcagaagcgcgacgacagcgaccugaagcggcugcgcgaccucaaccaggcggugaacaaccuggucgagcugaaguccacccagcagaaguccauccuccgggugggcacccugaccagcgacgaccugcucacccuggccgccgaccuggagaagcucaagagcaaggugauccgcaccgagcggccccuguccagcggggucuacaugggcaaccuguccacgcagcagcucgagcagcgccgggcccugcugaacaugaucgggauggugggcggcgcccaggggacccagccgggccgcgacggggugguccgggugugggacgugaagaaccccgaccuccugaacaaccaguucggcaccaugcccagccugacccucgcgugccugacgaagcaggggcaggucgaccugaacgacgccgugcucgcccugaccgaccugggccucaucuacaccgccaaguaccccaacuccagcgaccuggaccgccugucccagagccacccgauccucaacaugguggacaucaagaaguccagccugaacaucagcggcuacaacuucucccugggggcggccgucaaggccggcgccugcaugcucgacgggggcaacaugcuggagaccaucaaggugacgccccagaccauggacggcauccucaagagcauccugaaggugaagcggucccuggggauguucgucagcgacacccccggcgagcgcaaccccuacgagaacauccuguacaagaucugccucuccggggacggcuggccguacaucgccagccggaccuccaucguggggcgcgcgugggagaacacgaccguggaccuggagagcgacggcaagccccagaaggucggcuccgccgggagcaacaagucccugcagagcgccggcuuccccaccgggcucaccuacucccagcugaugacgcugaaggacagcaugaugcagcuggaccccuccgccaagaccuggaucgacaucgagggccggccggaggaccccguggagaucgcccucuaccagcccaugagcgggugcuacauccacuucuuccgcgagcccaccgaccugaagcaguucaagcaggacgcgaaguacucccacggcaucgacgucgccgaccuguucccggcccagcccggccucaccagcgccgugaucgaggcccugccccggaacauggugcugacgugccaggggagcgacgacaucaagcgccuccuggacucccagggccgccgggacaucaagcugaucgacaucgcgcucagcaaggccgacucccgccgguucgagaacgccgucugggaccagugcaaggaccugugccacaugcacaccggggugguggucgagaagaagaagcgcggcgggaaggaggagaucacgccccacugcgcccugauggacugcaucauguacgacgccgcggugagcggcggccucaacaucccggugcugcgggccguccugccccgcgacaugguguuccggaccuccagccccaaggugguccucugaggacuaguaauaaggaaacuguaugaaugucugugggcaggaagugaagagauccuucuguaaagguuuuuggaauuaugucugcugaauaauaaacuuuuuugaaauaauaaaucugguagaaaaaugagaucucaaaggcucuuuucagagccaccaaaaaaaaaaaaaaaaaaaaaaaaaaaaaaaaaaaaaaaaaaaaaaaaaaaaaaaaaaaaaaaaaaaaaaaaaaaaaaaaaaaaaaaaaaaaaaaaaaaaa

SEQ ID NO: 17467 - RNA, 2046 nt, Artificial Sequence
  mRNA product Design b-4 (hSL-A100) comprising derived and/or modified sequence from LASV(ISTH2010-NIG-2012;Clade II)__AIT17483__NP (opt1)
aggagagucccgcagucggcguccagcggcucugcuuguucgugugugugucguugcaggccuuauucaagcuuaccaugagcgccuccaaggaggugaaguccuuccuguggacccagagccuccgccgggagcugagcggcuacugcuccaacaucaagcugcaggucgugaaggacgcccaggcgcuccugcacgggcuggacuucagcgagguguccaacguccagcgccucaugcggaagcagaagcgcgacgacagcgaccugaagcggcugcgcgaccucaaccaggccgugaacaaccugguggagcugaaguccacccagcagaaguccauccuccgggucggcacgcugaccagcgacgaccugcucacccuggccgccgaccuggagaagcucaagagcaaggugauccgcaccgagcggccccuguccagcgggguguacaugggcaaccuguccacgcagcagcucgagcagcgccgggcccugcugaaccucaucgggauggucggcggcgcgcaggggacccagccgggccgcgacgggguggugcgggucugggacgugaagaaccccgaccugcugaacaaccaguucggcaccaugcccagccucacccuggccugccugacgaagcagggccagguggaccucaacgacgccguccuggcccugaccgaccucgggcugaucuacaccgcgaaguaccccaacuccagcgaccuggaccgccucucccagagccacccgauccugaacaugguggacaccaagaaguccagccugaacaucagcggcuucaacuucucccucggggccgccgugaaggccggcgccugcaugcuggacgggggcaacaugcuggagacgaucaaggucacgccccagaccauggacggcauccucaagagcauccugaaggugaagaagucccuggggauguucgugagcgacacccccggcgagcggaaccccuacgagaacauccucuacaagaucugccuguccggggacggcuggccguacaucgcgagccgcaccuccaucgucgggcgggccugggagaacaccaccguggaccuggagagcgacggcaagccccacaaggugggcaccgccggguccaacaagagccuccaguccgccggcuuccccacggggcugaccuacagccagcugaugacccugaaggacuccaugaugcagcucgaccccagcgccaagaccuggaucgacaucgagggccgcccggaggaccccgucgagaucgcgcuguaccagcccauguccgggugcuacauccacuucuuccgggagcccacggaccugaagcaguucaagcaggacgccaaguacagccacggcaucgacguggccgaccucuucccggcccagcccggccugaccuccgccgucaucgaggcgcugccccgcaacauggugcugaccugccaggggagcgacgacaucaagcggcuccuggacagccagggccgccgcgacaucaagcucaucgacaucgcccuguccaaggccgacagccggcgcuucgagaacgccgugugggaccagugcaaggaccugugccacaugcacaccggggucgugguggagaagaagaagcggggcgggaaggaggagaucacgccccacugcgcccucauggacugcaucauguacgacgcggccgucuccggcggccugaacaucccggugcugcgcgccgugcucccccgggacauggucuuccgcaccagcucccccaagguggugcugugaggacuaguaauaaggaaacuguaugaaugucugugggcaggaagugaagagauccuucuguaaagguuuuuggaauuaugucugcugaauaauaaacuuuuuugaaauaauaaaucugguagaaaaaugagaucucaaaggcucuuuucagagccaccaaaaaaaaaaaaaaaaaaaaaaaaaaaaaaaaaaaaaaaaaaaaaaaaaaaaaaaaaaaaaaaaaaaaaaaaaaaaaaaaaaaaaaaaaaaaaaaaaaaaa

SEQ ID NO: 17468 - RNA, 2046 nt, Artificial Sequence
  mRNA product Design b-4 (hSL-A100) comprising derived and/or modified sequence from LASV(Lassa virus/H.sapiens-wt/NGA/2015/ISTH_0543;Clade II)__AVO03640__NP (opt1)
aggagagucccgcagucggcguccagcggcucugcuuguucgugugugugucguugcaggccuuauucaagcuuaccaugagcgccuccaaggaggugaaguccuuccuguggacccagagccuccgccgggagcugagcggcuacugcuccaacaucaagcugcaggucgugaaggacgcccaggcgcuccugcacgggcuggacuucagcgagguguccaacguccagcgccucaugcggaagcagaagcgcgacgacagcgaccugaagcggcugcgcgaccucaaccaggccgugaacaaccugguggagcugaaguccacccagcagaaguccauccuccgggucggcacgcugaccagcgacgaccugcucacccuggccgccgaccuggagaagcucaagagcaaggugauccgcaccgagcggccccuguccagcgggguguacaugggcaaccuguccacgcagcagcucgagcagcgccgggcccugcugaacaugaucgggauggucggcggcgcgcaggggacccagccgggccgcgacgggguggugcgggucugggacgugaagaaccccgaccuccugaacaaccaguucggcaccaugcccagccugacccucgccugccugacgaagcagggccagguggaccugaacgacgccguccucgcccugaccgaccuggggcucaucuacaccgcgaaguaccccaacuccagcgaccuggaccgccugucccagagccacccgauccucaacaugguggacaccaagaaguccagccugaacaucagcggcuacaacuucucccugggggccgccgugaaggccggcgccugcaugcucgacgggggcaacaugcuggagacgaucaaggucacgccccagaccauggacggcauccucaagagcauccugaaggugaagaagucccuggggauguucgugagcgacacccccggcgagcggaaccccuacgagaacauccuguacaagaucugccucuccggggacggcuggccguacaucgcgagccgcaccuccaucgucgggcgggccugggagaacaccaccguggaccuggagagcgacggcaagccccagaaggugggcuccgccgggagcaacaagucccugcagagcgccggcuuccccaccgggcucacguacucccagcugaugacccugaaggacagcaugaugcagcuggaccccuccgccaagaccuggaucgacaucgagggccgcccggaggaccccgucgagaucgcgcucuaccagcccaugagcgggugcuacauccacuucuuccgggagcccaccgaccugaagcaguucaagcaggacgccaaguacucccacggcaucgacguggccgaccuguucccggcccagcccggccucacgagcgccgucaucgaggcgcugccccgcaacauggugcugaccugccaggggagcgacgacaucaagcggcuccuggacucccagggccgcaaggacaucaagcugaucgacaucgcccucagcaaggccgacucccgccgguucgagaacgccgugugggaccagugcaaggaccugugccacaugcacaccggggucgugguggagaagaagaagcgcggcgggaaggaggagaucacgccccacugcgcccugauggacugcaucauguacgacgcggccgucagcggcggccucaacaucccggugcugcgggccgugcugccccgcgacauggucuuccggaccuccagccccaagguggugcucugaggacuaguaauaaggaaacuguaugaaugucugugggcaggaagugaagagauccuucuguaaagguuuuuggaauuaugucugcugaauaauaaacuuuuuugaaauaauaaaucugguagaaaaaugagaucucaaaggcucuuuucagagccaccaaaaaaaaaaaaaaaaaaaaaaaaaaaaaaaaaaaaaaaaaaaaaaaaaaaaaaaaaaaaaaaaaaaaaaaaaaaaaaaaaaaaaaaaaaaaaaaaaaaaa

SEQ ID NO: 17469 - RNA, 2046 nt, Artificial Sequence
  mRNA product Design b-4 (hSL-A100) comprising derived and/or modified sequence from LASV(Lassa virus/H.sapiens-wt/NGA/2016/ISTH_0009;Clade II)__AVO03572__NP (opt1)
aggagagucccgcagucggcguccagcggcucugcuuguucgugugugugucguugcaggccuuauucaagcuuaccaugagcgccuccaaggaggugaaguccuuccuguggacccagagccuccgccgggagcugagcggcuacugcuccaacaucaagcugcaggucgugaaggacgcccaggcgcuccugcacgggcuggacuucagcgagguguccaacguccagcgccucaugcggaagcagaagcgcgacgacagcgaccugaagcggcugcgcgaccucaaccaggccgugaacaaccugguggagcugaaguccacccagcagaaguccauccuccgggucggcacgcugaccagcgacgaccugcucacccuggccgccgaccuggagaagcucaagagcaaggugauccgcaccgagcggccccuguccagcgggguguacaugggcaaccuguccacgcagcagcucgagcagcgccgggcccugcugaacaugaucgggauggucggcggcgcgcaggggacccagccgggccgcgacgggguggugcgggucugggacgugaagaaccccgaccuccugaacaaccaguucggcaccaugcccagccugacccucgccugccugacgaagcagggccagguggaccugaacgacgccguccucgcccugaccgaccuggggcucaucuacaccgcgaaguaccccaacuccagcgaccuggaccgccugucccagagccacccgauccucaacaugguggacaccaagaaguccagccugaacaucagcggcuacaacuucucccugggggccgccgugaaggccggcgccugcaugcucgacgggggcaacaugcuggagacgaucaaggucacgccccagaccauggacggcauccucaagagcauccugaaggugaagaagucccuggggauguucgugagcgacacccccggcgagcggaaccccuacgagaacauccuguacaagaucugccucuccggggacggcuggccguacaucgcgagccgcaccuccaucgucgggcgggccugggagaacaccaccguggaccuggagagcgacggcaagccccagaaggugggcuccgccgggagcaacaagucccugcagagcgccggcuuccccaccgggcucacguacucccagcugaugacccugaaggacagcaugaugcagcuggaccccuccgccaagaccuggaucgacaucgagggccgcccggaggaccccgucgagaucgcgcucuaccagcccaugagcgggugcuacauccacuucuuccgggagcccaccgaccugaagcaguucaagcaggacgccaaguacucccacggcaucgacguggccgaccuguucccggcccagcccggccucacgagcgccgucaucgaggcgcugccccgcaacauggugcugaccugccaggggagcgacgacaucaagcggcuccuggacucccagggccgccgcgacaucaagcugaucgacaucgcccucagcaaggccgacucccggcgcuucgagaacgccgugugggaccagugcaaggaccugugccacaugcacaccggggucgugguggagaagaagaagcggggcgggaaggaggagaucacgccccacugcgcccugauggacugcaucauguacgacgcggccgucagcggcggccucaacaucccggugcugcgcgccgugcugccccgggacauggucuuccgcaccuccagccccaagguggugcucugaggacuaguaauaaggaaacuguaugaaugucugugggcaggaagugaagagauccuucuguaaagguuuuuggaauuaugucugcugaauaauaaacuuuuuugaaauaauaaaucugguagaaaaaugagaucucaaaggcucuuuucagagccaccaaaaaaaaaaaaaaaaaaaaaaaaaaaaaaaaaaaaaaaaaaaaaaaaaaaaaaaaaaaaaaaaaaaaaaaaaaaaaaaaaaaaaaaaaaaaaaaaaaaaa

SEQ ID NO: 17470 - RNA, 2046 nt, Artificial Sequence
  mRNA product Design b-4 (hSL-A100) comprising derived and/or modified sequence from LASV(Lassa virus/H.sapiens-wt/NGA/2016/ISTH_0017;Clade II)__AVO03568__NP (opt1)
aggagagucccgcagucggcguccagcggcucugcuuguucgugugugugucguugcaggccuuauucaagcuuaccaugagcgccuccaaggaggugaaguccuuccuguggacccagagccuccgccgggagcugagcggcuacugcuccagcaucaagcugcaggucgugaaggacgcccaggcgcuccugcacgggcuggacuucuccgaggugagcaacguccagcgccucaugcggaagcagaagcgcgacgacuccgaccugaagcggcugcgcgaccucaaccaggccgugaacaaccugguggagcucaagagcacccagcagaaguccauccugcgggucggcacgcugaccagcgacgaccugcucacccuggccgccgaccuggagaagcucaaguccaaggugauccgcaccgagcggccccugagcuccgggguguacaugggcaaccugagcacgcagcagcucgagcagcgccgggcccugcugaacaugaucgggauggcgggcggcgcccaggggacccagccgggccgcgacggggucgugcgggugugggacgucaagaaccccgaccuccugaacaaccaguucggcaccaugcccucccugacccucgccugccugacgaagcagggccagguggaccugaacgacgccgugcucgcgcugaccgaccuggggcucaucuacaccgccaaguaccccaacagcuccgaccuggaccgccugagccagagccacccgauccucaacauggucgacaccaagaaguccagccugaacaucuccggcuacaacuucagccugggggccgccgugaaggccggcgcgugcaugcucgacgggggcaacaugcuggagacgaucaaggugacgccccagaccauggacggcauccugaaguccauccucaaggucaagcggagccuggggauguucguguccgacgcccccggcgagcgcaaccccuacgagaacauccuguacaagaucugccucagcggggacggcuggccguacaucgccucccggaccagcaucguggggcgcgccugggagaacaccaccgucgaccuggaguccgacggcaagccccagaaggugggcgccaccgggagcaacaagucccugcagagcgcgggcuuccccaccgggcucacguacucccagcugaugacccugaaggacagcaugaugcagcuggaccccuccgccaagaccuggaucgacaucgagggccggccggaggaccccguggaggucgcccucuaccagcccgugagcgggugcuacauccacuucuuccgcgagcccaccgaccugaagcaguucaagcaggacgccaaguacucccacggcaucgacgucgccgaccuguucccggcgcagcccggccucacgagcgccgugaucgaggcccugccccggaacauggugcugaccugccaggggagcgacgacaucaagaagcuccuggacucccagggccgcaaggacaucaagcugaucgacaucgcccucagcaaggccgacucccgccgguucgagaacgcggucugggaccagugcaaggaccugugccacaugcacaccggggugguggucgagaagaagaagcgcggcgggaaggaggagaucacgccccacugcgcccugauggacugcaucauguacgacgccgccgugagcggcggccucaacaucccggugcugcgggcgguccugccccgcgacaugguguuccggaccuccagccccaaggugguccucugaggacuaguaauaaggaaacuguaugaaugucugugggcaggaagugaagagauccuucuguaaagguuuuuggaauuaugucugcugaauaauaaacuuuuuugaaauaauaaaucugguagaaaaaugagaucucaaaggcucuuuucagagccaccaaaaaaaaaaaaaaaaaaaaaaaaaaaaaaaaaaaaaaaaaaaaaaaaaaaaaaaaaaaaaaaaaaaaaaaaaaaaaaaaaaaaaaaaaaaaaaaaaaaaa

SEQ ID NO: 17471 - RNA, 2046 nt, Artificial Sequence
  mRNA product Design b-4 (hSL-A100) comprising derived and/or modified sequence from LASV(Lassa virus/H.sapiens-wt/NGA/2018/ISTH_0959;Clade II)__AVV65100__NP (opt1)
aggagagucccgcagucggcguccagcggcucugcuuguucgugugugugucguugcaggccuuauucaagcuuaccaugagcgccuccaaggaggugaaguccuuccuguggacccagagccuccgccgggagcugagcggcuacugcuccaacaucaagcugcaggucgugaaggacgcccaggcgcuccugcacgggcuggacuucagcgagguguccaacguccagcgccucaugcggaagcagaagcgcgacgacagcgaccugaagcggcugcgcgaccucaaccaggccgugaacaaccugguggagcugaaguccacccagcagaaguccauccuccgggucggcacccugaccagcgacgaccugcucacccuggccgccgaccuggagaagcucaagagcaaggugauccgcaccgagcggccccuguccagcgggguguacaugggcaaccuguccacgcagcagcucgagcagcgccgggcccugcugaaccucaucgggauggucggcggcgcgcaggggacccagccgggccgcgacgggguggugcgggucugggacgugaagaaccccgaccugcugaacaaccaguucggcaccaugcccagccucacccuggccugccugacgaagcagggccagguggaccucaacgacgucgugcuggcccugaccgaccucgggcugaucuacaccgccaaguaccccaacuccagcgaccuggaccgccucucccagagccacccgauccugaacaugguggacaccaagaaguccagccugaacaucagcggcuucaacuucucccucggggcggccgucaaggccggcgccugcaugcuggacgggggcaacaugcuggagacgaucaaggugacgccccagaccauggacggcauccucaagagcauccugaaggugaagaagucccuggggauguucgucagcgacacccccggcgagcggaaccccuacgagaacauccucuacaagaucugccuguccggggacggcuggccguacaucgccagccgcaccuccaucguggggcgggcgugggagaacaccaccguggaccuggagagcgacggcaagccccacaaggucggcaccgccggguccaacaagagccuccaguccgccggcuuccccacggggcugaccuacagccagcugaugacccugaaggacuccaugaugcagcucgaccccagcgccaagaccuggaucgacaucgagggccgcccggaggaccccguggagaucgcccuguaccagcccauguccgggugcuacauccacuucuuccgggagcccacggaccugaagcaguucaagcaggacgcgaaguacagccacggcaucgacgucgccgaccucuucccggcccagcccggccugaccuccgccgugaucgaggcccugccccgcaacauggugcugaccugccaggggagcgacgacaucaagcggcuccuggacagccagggccgcaaggacaucaagcucaucgacaucgcgcuguccaagaccgacagccgccgguucgagaacgccgucugggaccagugcaaggaccugugccacaugcacacgggggugguggucgagaagaagaagcgcggcgggaaggaggagaucacgccccacugcgcccucauggacugcaucauguacgacgccgccguguccggcggccugaacaucccggugcugcgggcgguccucccccgcgacaugguguuccggaccagcucccccaaggugguccugugaggacuaguaauaaggaaacuguaugaaugucugugggcaggaagugaagagauccuucuguaaagguuuuuggaauuaugucugcugaauaauaaacuuuuuugaaauaauaaaucugguagaaaaaugagaucucaaaggcucuuuucagagccaccaaaaaaaaaaaaaaaaaaaaaaaaaaaaaaaaaaaaaaaaaaaaaaaaaaaaaaaaaaaaaaaaaaaaaaaaaaaaaaaaaaaaaaaaaaaaaaaaaaaaa

SEQ ID NO: 17472 - RNA, 2046 nt, Artificial Sequence
  mRNA product Design b-4 (hSL-A100) comprising derived and/or modified sequence from LASV(LASV003-NIG-2008;Clade II)__AIT17581__NP (opt1)
aggagagucccgcagucggcguccagcggcucugcuuguucgugugugugucguugcaggccuuauucaagcuuaccaugagcgccuccaaggaggugaaguccuuccuguggacccagagccuccgccgggagcugagcggcuacugcuccagcaucaagcugcaggucgugaaggacgcccaggcgcuccugcacgggcuggacuucuccgaggugagcaacguccagcgccucaugcggaagcagaagcgcgacgacuccgaccugaagcggcugcgcgaccucaaccaggccgugaacaaccugguggagcucaagagcacccagcagaaguccguccugcgggugggcacccugaccagcgacgaccugcucacccuggccgccgaccuggagaagcucaaguccaaggugauccgcaccgagcggccccugagcuccggggucuacaugggcaaccugagcgcccagcagcucgagcagcgccggacgcugcugaacaugaucgggauggugggcggcgcgcaggggacccagccgggccgcgacggggugguccgggugugggacgugaagaaccccgaccuccugaacaaccaguucggcaccaugcccucccugacccucgccugccugacgaagcaggggcaggucgaccugaacgacguggugcucgcccugaccgaccugggccucaucuacaccgccaaguaccccaacagcuccgaccuggaccgccugagccagagccacccgauccucuccauggucgacaccaagaaguccagccugaacaucagcggcuacaacuucucccugggggcggccgugaaggccggcgccugcaugcucgacgggggcaacaugcuggagacgaucaaggugacgccccagaccauggacggcauccucaagagcauccugaaggucaagaagucccuggggauguucgugagcgacacccccggcgagcggaaccccuacgagaacauccuguacaagaucugccucuccggggacggcuggccguacaucgccagccgcaccuccaucguggggcgggcgugggagaacaccaccgucgaccuggagagcgacggcaagccccagaaggugggcaccgccggguccaacaagagccugcaguccgccggcuuccccacggggcucaccuacagccagcugaugacccugaaggacuccaugaugcagcuggaccccagcgccaagaccuggaucgacaucgagggccgcccggaggaccccgucgagaucgcccucuaccagcccauguccgggugcuacauccacuucuuccgggagcccacggaccugaagcaguucaagcaggacgcgaaguacagccacggcaucgacgugaccgaccuguucccggcccagcccggccucaccagcgccgugaucgaggcccugccccgcaacaugguccugaccugccagggguccgacgacaucaagcggcuccuggacagccagggccgccgcgacaucaagcugaucgacaucgcccucuccaaggcggacagccggcgcuucgagaacgccgugugggaccagugcaaggaccugugccacaugcacacggggguggucguggagaagaagaagcggggcgggaaggaggagaucacgccccacugcgcccugauggacugcaucauguacgacgccgccguguccggcggccucaacaucccgguccugcgcgcggugcugccccgggacaugguguuccgcaccagcucccccaaggucgugcucugaggacuaguaauaaggaaacuguaugaaugucugugggcaggaagugaagagauccuucuguaaagguuuuuggaauuaugucugcugaauaauaaacuuuuuugaaauaauaaaucugguagaaaaaugagaucucaaaggcucuuuucagagccaccaaaaaaaaaaaaaaaaaaaaaaaaaaaaaaaaaaaaaaaaaaaaaaaaaaaaaaaaaaaaaaaaaaaaaaaaaaaaaaaaaaaaaaaaaaaaaaaaaaaaa

SEQ ID NO: 17473 - RNA, 2046 nt, Artificial Sequence
  mRNA product Design b-4 (hSL-A100) comprising derived and/or modified sequence from LASV(LASV035-NIG-2009;Clade II)__AIT17589__NP (opt1)
aggagagucccgcagucggcguccagcggcucugcuuguucgugugugugucguugcaggccuuauucaagcuuaccaugagcgccuccaaggaggugaaguccuuccuguggacccagagccuccgccgggagcugagcggcuacugcuccagcaucaagcugcaggucgugaaggacgcccaggcgcuccugcacgggcuggacuucuccgaggugagcaacguccagcgccucaugcggaagcagaagcgcgacgacuccgaccugaagcggcugcgcgaccucaaccaggccgugaacaaccugguggagcucaagagcacccagcagaaguccauccugcgggucggcacgcugaccagcgacgaccugcucacccuggccgccgaccuggagaagcucaaguccaaggugauccgcaccgagcggccccugagcuccgggguguacaugggcaaccugagcgcccagcagcucgagcagcgccgggcgcugcugaacaugaucgggauggucggcggcgcccaggggacgcagccgggccgcgacgggguggugcgggucugggacgugaagaaccccgaccuccugaacaaccaguucggcaccaugcccucccugacccucgccugccugaccaagcagggccagguggaccugaacgacgccguccucgcgcugacggaccuggggcucaucuacaccgccaaguaccccaacagcuccgaccuggaccgccugagccagagccacccgauccucaacaugguggacaccaagaaguccagccugaacaucuccggcuacaacuucagccugggggccgccgugaaggccggcgcgugcaugcucgacgggggcaacaugcuggagaccaucaaggucacgccccagaccauggacggcauccugaaguccauccucaaggugaagcggagccuggggauguucguguccgacacccccggcgagcgcaaccccuacgagaacauccuguacaagaucugccucagcggggacggcuggccguacaucgccucccggaccagcaucgucgggcgcgccugggagaacacgaccguggaccuggaguccgacggcaagccccagaaggugggcaccaccgggagcaacaagucccugcagagcgccggcuuccccacggggcucaccuacucccagcugaugacccugaaggacagcaugaugcagcuggaccccuccgccaagaccuggaucgacaucgagggccggccggaggaccccgucgagaucgcgcucuaccagcccaugagcgggugcuacauccacuucuuccgcgagcccacggaccugaagcaguucaagcaggacgccaaguacucccacggcaucgacguggccgaccuguucccggcccagcccggccucaccagcgccgucaucgaggcgcugccccggaacauggugcugaccugccaggggagcgacgacaucaagaagcuccuggacucccagggccgccgcgacaucaagcugaucgacaucgcccucagcaaggccgacucccggaaguucgagaacgccgugugggaccagugcaaggaccugugccacaugcacaccggggucgugguggagaagaagaagcgcggcgggaaggaggagaucacgccccacugcgcccugauggacugcaucauguacgacgcggccgucagcggcggccucaacaucccggugcugcgggccgugcugccccgcgacauggucuuccggaccuccagccccaagguggugcucugaggacuaguaauaaggaaacuguaugaaugucugugggcaggaagugaagagauccuucuguaaagguuuuuggaauuaugucugcugaauaauaaacuuuuuugaaauaauaaaucugguagaaaaaugagaucucaaaggcucuuuucagagccaccaaaaaaaaaaaaaaaaaaaaaaaaaaaaaaaaaaaaaaaaaaaaaaaaaaaaaaaaaaaaaaaaaaaaaaaaaaaaaaaaaaaaaaaaaaaaaaaaaaaaa

SEQ ID NO: 17474 - RNA, 2046 nt, Artificial Sequence
  mRNA product Design b-4 (hSL-A100) comprising derived and/or modified sequence from LASV(LASV1000-NIG-2009;Clade II)__AIT17783__NP (opt1)
aggagagucccgcagucggcguccagcggcucugcuuguucgugugugugucguugcaggccuuauucaagcuuaccaugagcgccuccaaggaggugaaguccuuccuguggacccagagccuccgccgggagcugagcggcuacugcuccaacaucaagcugcaggucgugaaggacgcccaggcgcuccugcacgggcuggacuucagcgagguguccaacguccagcgccucaugcggaagcagaagcgcgacgacagcgaccugaagcggcugcgcgaccucaaccaggccgugaacaaccugguggagcugaaguccacccagcagaaguccauccuccgggucggcacgcugaccagcgacgaccugcucacccuggccgccgaccuggagaagcucaagagcaaggugauccgcaccgagcggccccuguccagcgggguguacaugggcaaccuguccacgcagcagcucgagcagcgccgggcccugcugaacaugaucgggauggucggcggcgcgcaggggacccagccgggccgcgacgggguggugcgggucugggacgugaagaaccccgaccuccugaacaaccaguucggcaccaugcccagccugacccucgccugccugacgaagcagggccagguggaccugaacgacgucgugcucgcccugaccgaccuggggcucaucuacaccgccaaguaccccaacuccagcgaccuggaccgccugucccagagccacccgauccucaacaugguggacaccaagaaguccagccugaacaucagcggcuacaacuucucccugggggcggccgucaaggccggcgccugcaugcucgacgggggcaacaugcuggagacgaucaaggugacgccccagaccauggacggcauccucaagagcauccugaaggugaagaagucccuggggauguucgucagcgacacccccggcgagcggaaccccuacgagaacauccuguacaagaucugccucuccggggacggcuggccguacaucgccagccgcaccuccaucguggggcgggcgugggagaacaccaccguggaccuggagagcgacggcaagccccagaaggucggcaccgccggguccaacaagagccugcaguccgccggcuuccccacggggcucaccuacagccagcugaugacccugaaggacuccaugaugcagcuggaccccagcgccaagaccuggaucgacaucgagggccgcccggaggaccccguggagaucgcccucuaccagcccgucuccgggugcuacauccacuucuuccgggagcccacggaccugaagcaguucaagcaggacgcgaaguacagccacggcaucgacguggccgaccuguucccggcccagcccggccucaccuccgccgugaucgaggcccugccccgcaacaugguccugaccugccaggggagcgacgacaucaagcggcuccuggacagccagggccgccgcgacaucaagcugaucgacaucgcgcucuccaaggccgacagccggcgcuucgagaacgccgugugggaccagugcaaggaccugugccacaugcacaccgggguggucguggagaagaagaagcggggcgggaaggaggagaucacgccccacugcgcccugauggacugcaucauguacgacgccgcgguguccggcggccucaacaucccgguccugcgcgccgugcugccccgggacaugguguuccgcaccagcucccccaaggucgugcucugaggacuaguaauaaggaaacuguaugaaugucugugggcaggaagugaagagauccuucuguaaagguuuuuggaauuaugucugcugaauaauaaacuuuuuugaaauaauaaaucugguagaaaaaugagaucucaaaggcucuuuucagagccaccaaaaaaaaaaaaaaaaaaaaaaaaaaaaaaaaaaaaaaaaaaaaaaaaaaaaaaaaaaaaaaaaaaaaaaaaaaaaaaaaaaaaaaaaaaaaaaaaaaaaa

SEQ ID NO: 17475 - RNA, 2046 nt, Artificial Sequence
  mRNA product Design b-4 (hSL-A100) comprising derived and/or modified sequence from LASV(LASV221-NIG-2010;Clade II)__AIT17625__NP (opt1)
aggagagucccgcagucggcguccagcggcucugcuuguucgugugugugucguugcaggccuuauucaagcuuaccaugagcgccuccaaggaggugaaguccuuccuguggacccagagccuccgccgggagcugagcggcuacugcuccagcaucaagcugcaggucgugaaggacgcccaggcgcuccugcacgggcuggacuucuccgaggugagcaacguccagcgccucaugcggaagcagcgccgggacgacuccgaccugaagcgccugcgggaccucaaccaggccgugaacaaccugguggagcucaagagcacccagcagaaguccauccugcgcgucggcacgcugaccagcgacgaccugcucacccuggccgccgaccuggagaagcucaaguccaaggugauccggaccgagcgcccccugagcuccgggguguacaugggcaaccugagcacgcagcagcucgagcagcggcgcgcccugcugaacaugaucgggauggucggcggcgcgcaggggacccagccgggccgggacgggguggugcgcgucugggacgugaagaaccccgaccuccugaacaaccaguucggcaccaugcccucccugacccucgccugccugacgaagcagggccagguggaccugaacgacgccguccucgcccugaccgaccuggggcucaucuacaccgcgaaguaccccaacagcuccgaccuggaccggcugagccagagccacccgauccucaacaugguggacaccaagaaguccagccugaacaucuccggcuacaacuucagccugggggccgccgugaaggccggcgccugcaugcucgacgggggcaacaugcuggagacgaucaaggucacgccccagaccguggacggcauccugaaguccauccucaaggugaagcgcagccuggggauguucgucuccgacacccccggcgagcggaaccccuacgagaacauccuguacaagaucugccucagcggggacggcuggccguacaucgcgucccgcaccagcaucguggggcgggccugggagaacaccaccguggaccuggaguccgacggcaagccccagaaggucggcaccgccgggagcaacaagucccugcagagcgccggcuuccccacggggcucaccuacucccagcugaugacccugaaggacagcaugaugcagcuggaccccuccgccaagaccuggaucgacaucgagggccgcccggaggaccccguggagaucgcgcucuaccagcccaugagcgggugcuacauccacuucuuccgggagcccacggaccugaagcaguucaagcaggacgccaaguacucccacggcaucgacgucgccgaccuguucccggcccagcccggccucaccagcgccgugaucgaggcgcugccccgcaacauggugcugaccugccaggggagcgacgacaucaagcgccuccuggacucccagggccggcgcgacaucaagcugaucgacaucgcccucagcaaggccgacucccggaaguucgagaacgccgucugggaccagugcaaggaccugugccacaugcacaccggggugguggucgagaagaagaagcgcggcgggaaggaggagaucacgccccacugcgcccugauggacugcaucauguacgacgcggccgugagcggcggccucaacaucccggugcugcgggccguccugccccgcgacaugguguuccggaccuccagccccaaggugguccucugaggacuaguaauaaggaaacuguaugaaugucugugggcaggaagugaagagauccuucuguaaagguuuuuggaauuaugucugcugaauaauaaacuuuuuugaaauaauaaaucugguagaaaaaugagaucucaaaggcucuuuucagagccaccaaaaaaaaaaaaaaaaaaaaaaaaaaaaaaaaaaaaaaaaaaaaaaaaaaaaaaaaaaaaaaaaaaaaaaaaaaaaaaaaaaaaaaaaaaaaaaaaaaaaa

SEQ ID NO: 17476 - RNA, 2046 nt, Artificial Sequence
  mRNA product Design b-4 (hSL-A100) comprising derived and/or modified sequence from LASV(LASV237-NIG-2010;Clade II)__AIT17639__NP (opt1)
aggagagucccgcagucggcguccagcggcucugcuuguucgugugugugucguugcaggccuuauucaagcuuaccaugagcgccuccaaggaggugaaguccuuccuguggacccagagccuccgccgggagcugagcggcuacugcuccaacaucaagcugcaggucgugaaggacgcccaggcgcuccugcacgggcuggacuucagcgagguguccaacguccagcgccucaugcggaagcagaagcgcgacgacagcgaccugaagcggcugcgcgaccucaaccaggccgugaacaaccugguggagcugaaguccacccagcagaaguccauccuccgggucggcacccugaccagcgacgaccugcucacccuggccgccgaccuggagaagcucaagagcaaggugauccgcaccgagcggccccuguccagcgggguguacaugggcaaccuguccacgcagcagcucgagcagcgccgggcccugcugaacaugaucgggauggucggcggcgcgcaggggacccagccgggccgcgacgggguggugcgggucugggacgugaagaaccccgaccuccugaacaaccaguucggcaccaugcccagccugacccucgccugccugacgaagcagggccagguggaccugaacgacgccguccucgcccugaccgaccuggggcucaucuacaccgcgaaguaccccaacuccagcgaccuggaccgccugucccagagccacccgauccucaacaugguggacaucaagaaguccagccugaacaucagcggcuacaacuucucccugggggccgccgugaaggccggcgccugcaugcucgacgggggcaacaugcuggagaccaucaaggucacgccccagaccauggacggcauccucaagagcauccugaaggugaagcggucccuggggauguucgugagcgacacccccggcgagcgcaaccccuacgagaacauccuguacaagaucugccucuccggggacggcuggccguacaucgcgagccggaccuccaucgucgggcgcgccugggagaacacgaccguggaccuggagagcgacggcaagccccagaaggugggcuccgccgggagcaacaagucccugcagagcgccggcuuccccaccgggcucaccuacucccagcugaugacgcugaaggacagcaugaugcagcuggaccccuccgccaagaccuggaucgacaucgagggccggccggaggaccccgucgagaucgcgcucuaccagcccaugagcgggugcuacauccacuucuuccgcgagcccaccgaccugaagcaguucaagcaggacgccaaguacucccacggcaucgacguggccgaccuguucccggcccagcccggccucaccagcgccgucaucgaggcgcugccccggaacauggugcugacgugccaggggagcgacgacaucaagcgccuccuggacucccagggccgccgggacaucaagcugaucgacaucgcccucagcaaggccgacucccgccgguucgagaacgccgugugggaccagugcaaggaccugugccacaugcacaccggggucgugguggagaagaagaagcgcggcgggaaggaggagaucacgccccacugcgcccugauggacugcaucauguacgacgcggccgucagcggcggccucaacaucccggugcugcgggccgugcugccccgcgacauggucuuccggaccuccagccccaagguggugcucugaggacuaguaauaaggaaacuguaugaaugucugugggcaggaagugaagagauccuucuguaaagguuuuuggaauuaugucugcugaauaauaaacuuuuuugaaauaauaaaucugguagaaaaaugagaucucaaaggcucuuuucagagccaccaaaaaaaaaaaaaaaaaaaaaaaaaaaaaaaaaaaaaaaaaaaaaaaaaaaaaaaaaaaaaaaaaaaaaaaaaaaaaaaaaaaaaaaaaaaaaaaaaaaaa

SEQ ID NO: 17477 - RNA, 2046 nt, Artificial Sequence
  mRNA product Design b-4 (hSL-A100) comprising derived and/or modified sequence from LASV(LASV253-NIG-2011;Clade II)__AIT17671__NP (opt1)
aggagagucccgcagucggcguccagcggcucugcuuguucgugugugugucguugcaggccuuauucaagcuuaccaugagcgccuccaaggaggugaaguccuuccuguggacccagagccuccgccgggagcugagcggcuacugcuccagcaucaagcugcaggucgugaaggacgcccaggcgcuccugcacgggcuggacuucuccgaggugagcaacguccagcgccucaugcggaagcagaagcgcgacgacuccgaccugaagcggcugcgcgaccucaaccaggccgugaacaaccugguggagcucaagagcacccagcagaaguccguccugcgggugggcacccugaccagcgacgaccugcucacccuggccgccgaccuggagaagcucaaguccaaggugauccgcaccgagcggccccugagcuccggggucuacaugggcaaccugagcacgcagcagcucgagcagcgccgggcccugcugaacaugaucgggauggugggcggcgcgcaggggacccagccgggccgcgacggggugguccgggugugggacgugaagaaccccgaccuccugaacaaccaguucggcaccaugcccucccugacccucgccugccugacgaagcaggggcaggucgaccugaacgacguggugcucgcccugaccgaccugggccucaucuacaccgccaaguaccccaacagcuccgaccuggaccgccugagccagagccacccgauccucaacauggucgacaccaagaaguccagccugaacaucuccggcuacaacuucagccugggggcggccgugaaggccggcgccugcaugcucgacgggggcaacaugcuggagacgaucaaggugacgccccagaccauggacggcauccugaaguccauccucaaggucaagaagucccuggggauguucgugagcgacacccccggcgagcggaaccccuacgagaacauccuguacaagaucugccucagcggggacggcuggccguacaucgccucccgcaccagcaucguggggcgggcgugggagaacaccaccgucgaccuggaguccgacggcaagccccagaaggugggcaccgccgggagcaacaagucccugcagagcgccggcuuccccacggggcucaccuacucccagcugaugacccugaaggacagcaugaugcagcuggaccccuccgccaagaccuggaucgacaucgagggccgcccggaggaccccgucgagaucgcccucuaccagcccaugagcgggugcuacauccacuucuuccgggagcccacggaccugaagcaguucaagcaggacgcgaaguacucccacggcaucgacgugaccgaccuguucccggcccagcccggccucaccagcgccgugaucgaggcccugccccgcaacaugguccugaccugccaggggagcgacgacaucaagcggcuccuggacucccagggccgccgcgacaucaagcugaucgacaucgcccucagcaaggcggacucccggcgcuucgagaacgccgugugggaccagugcaaggaccugugccacaugcacacggggguggucguggagaagaagaagcggggcgggaaggaggagaucacgccccacugcgcccugauggacugcaucauguacgacgccgccgugagcggcggccucaacaucccgguccugcgcgcggugcugccccgggacaugguguuccgcaccuccagccccaaggucgugcucugaggacuaguaauaaggaaacuguaugaaugucugugggcaggaagugaagagauccuucuguaaagguuuuuggaauuaugucugcugaauaauaaacuuuuuugaaauaauaaaucugguagaaaaaugagaucucaaaggcucuuuucagagccaccaaaaaaaaaaaaaaaaaaaaaaaaaaaaaaaaaaaaaaaaaaaaaaaaaaaaaaaaaaaaaaaaaaaaaaaaaaaaaaaaaaaaaaaaaaaaaaaaaaaaa

SEQ ID NO: 17478 - RNA, 2046 nt, Artificial Sequence
  mRNA product Design b-4 (hSL-A100) comprising derived and/or modified sequence from LASV(LASV254-NIG-2011;Clade II)__AIT17675__NP (opt1)
aggagagucccgcagucggcguccagcggcucugcuuguucgugugugugucguugcaggccuuauucaagcuuaccaugagcgccuccaaggaggugaaguccuuccuguggacccagagccuccgccgggagcugagcggcuacugcuccagcaucaagcugcaggucgugaaggacgcccaggcgcuccugcacgggcuggacuucuccgaggugagcaacguccagcgccucaugcggaagcagaagcgcgacgacuccgaccugaagcggcugcgcgaccucaaccaggccgugaacaaccugguggagcucaagagcacccagcagaaguccguccugcgggugggcacgcugaccagcgacgaccugcucacccuggccgccgaccuggagaagcucaaguccaaggugauccgcaccgagcggccccugagcuccggggucuacaugggcaaccugagcacgcagcagcucgagcagcgccgggcccugcugaacaugaucgggauggugggcggcgcgcaggggacccagccgggccgcgacggggugguccgggugugggacgugaagaaccccgaccuccugaacaaccaguucggcaccaugcccucccugacccucgccugccugacgaagcaggggcaggucgaccugaacgacgccgugcucgcccugaccgaccugggccucaucuacaccgcgaaguaccccaacagcuccgaccuggaccgccugagccagagccacccgauccucaacaugguggacaccaagaaguccagccugaacaucuccggcuacaacuucagccugggggccgccgucaaggccggcgccugcaugcucgacgggggcaacaugcuggagacgaucaaggugacgccccagaccauggacggcauccugaaguccauccucaaggugaagaagucccuggggauguucgucagcgacacccccggcgagcggaaccccuacgagaacauccuguacaagaucugccucagcggggacggcuggccguacaucgcgucccgcaccagcaucguggggcgggccugggagaacaccaucguggaccuggaguccgacggcaagccccagaaggucggcaccgccgggagcaacaagucccugcagagcgccggcuuccccaccgggcucacguacucccagcugaugacccugaaggacagcaugaugcagcuggaccccuccgccaagaccuggaucgacaucgagggccgcccggaggaccccguggagaucgcgcucuaccagcccaugagcgggugcuacauccacuucuuccgggagcccaccgaccugaagcaguucaagcaggacgccaaguacucccacggcaucgacgucgccgaccuguucccggcccagcccggccucacgagcgccgugaucgaggcgcugccccgcaacauggugcugaccugccaggggagcgacgacaucaagcggcuccuggacucccagggccgccgcgacaucaagcugaucgacaucgcccucagcaaggccgacucccggcgcuucgagaacgccgucugggaccagugcaaggaccugugccacaugcacaccggggugguggucgagaagaagaagcggggcgggaaggaggagaucacgccccacugcgcccugauggacugcaucauguacgacgcggccgugagcggcggccucaacaucccggugcugcgcgccguccugccccgggacaugguguuccgcaccuccagccccaaggugguccucugaggacuaguaauaaggaaacuguaugaaugucugugggcaggaagugaagagauccuucuguaaagguuuuuggaauuaugucugcugaauaauaaacuuuuuugaaauaauaaaucugguagaaaaaugagaucucaaaggcucuuuucagagccaccaaaaaaaaaaaaaaaaaaaaaaaaaaaaaaaaaaaaaaaaaaaaaaaaaaaaaaaaaaaaaaaaaaaaaaaaaaaaaaaaaaaaaaaaaaaaaaaaaaaaa

SEQ ID NO: 17479 - RNA, 2046 nt, Artificial Sequence
  mRNA product Design b-4 (hSL-A100) comprising derived and/or modified sequence from LASV(Nig08-04;Clade II)__ADU56611__NP (opt1)
aggagagucccgcagucggcguccagcggcucugcuuguucgugugugugucguugcaggccuuauucaagcuuaccaugagcgccuccaaggaggugaaguccuuccuguggacccagagccuccgccgggagcugagcggcuacugcuccaacaucaagcugcaggucgugaaggacgcccaggcgcuccugcacgggcuggacuucagcgagguguccaacguccagcgccucaugcggaagcagaagcgcgacgacggcgaccugaagcggcugcgcgaccucaaccaggccgugaacaaccugguggagcucaagagcacccagcagaaguccguccugcggguggggacccugaccagcgacgaccugcucacccuggccgccgaccuggagaagcucaaguccaaggugauccgcaccgagcggccccugagcuccggcgucuacauggggaaccugagcacgcagcagcucgagcagcgcaaggcccugcuguccaugaucggcauggugggcggggcgcagggcacccagccggggcgggacggcgugguccgcgugugggacgugaagaaccccgaccuccugaacaaccaguucgggaccaugcccagccugacccucgccugccugacgaagcagggccaggucgaccugaacgacgccgugcucgcccugaccgaccugggccucaucuacaccgcgaaguaccccaacuccagcgaccuggaccggcugucccagagccacccgauccucaacaugguggacaccaagaaguccagccugaacaucagcggguacaacuucucccugggcgccgccgucaaggccggggccugcaugcucgacggcggcaacaugcuggagacgaucaaggugacgccccagaccauggacgggauccucaagagcauccugaaggugaagcgcucccugggcauguucgucagcgacacccccggggagcggaaccccuacgagaacauccuguacaagaucugccucuccggcgacggguggccguacaucgcgagccgcaccuccaucgugggccgggccugggagaacaccaccguggaccuggagagcgacggcaagccccagaaggucgggaccgccggcuccaacaagagccugcaguccgccggguuccccacgggccucaccuacagccagcugaugacccugaaggacuccaugaugcagcuggaccccagcgccaagaccuggaucgacaucgaggggcgcccggaggaccccguggagaucgcgcucuaccagcccauguccggcugcuacauccacuucuuccgggagcccacggaccugaagcaguucaagcaggacgccaaguacagccacggcaucgacgucaccgaccuguucuccgcccagccggggcucaccagcgccgugaucgaggcccugccccgcaacauggugcugaccugccagggcagcgacgacaucaagaagcuccuggacucccaggggcggcgcgacaucaagcugaucgacaucagccucaacaaggcggacucccgccgguucgagaacgccgucugggaccagugcaaggaccugugccacaugcacacgggcgugguggucgagaagaagaagcgcgggggcaaggaggagaucacgccccacugcgcccugauggacugcaucauguucgacgccgccgugagcggcgggcucaacauccccauccugcgggcggugcugccgcgcgacauggucuuccggaccuccagccccaagguggugcucugaggacuaguaauaaggaaacuguaugaaugucugugggcaggaagugaagagauccuucuguaaagguuuuuggaauuaugucugcugaauaauaaacuuuuuugaaauaauaaaucugguagaaaaaugagaucucaaaggcucuuuucagagccaccaaaaaaaaaaaaaaaaaaaaaaaaaaaaaaaaaaaaaaaaaaaaaaaaaaaaaaaaaaaaaaaaaaaaaaaaaaaaaaaaaaaaaaaaaaaaaaaaaaaaa

SEQ ID NO: 17480 - RNA, 2049 nt, Artificial Sequence
  mRNA product Design b-4 (hSL-A100) comprising derived and/or modified sequence from LASV(GA391;Clade III)__AAA46284__NP (opt1)
aggagagucccgcagucggcguccagcggcucugcuuguucgugugugugucguugcaggccuuauucaagcuuaccaugagcgccuccaaggaggugcgcagcugccuguggacccagucccuccggcgcgagcugagcggcuacugcuccaacaucaagcugcaggucgugaaggacgcccaggcgcuccugcacgggcuggacuucagcgagguguccaacguccagcggcucaugcgcaagcagaagcgggacgacggcgaccugaagcgccugcgggaccucaaccaggccgugaacaaccugguggagcugaaguccacccagcagaaguccguccuccgcguggggacgcugagcuccgacgaccugcucauccuggccgccgaccuggagaagcucaagagcaaggugacccggaccgagcgcccccuguccagcggcgucuacauggggaaccuguccagccagcagcucgaccagcggcgcgcccugcugaacaugaucggcaugaccggcguguccgggggcgggaagggcgcgagcaacgggaucgugcgggucugggacgugaagaacgccgagcuccugaacaaccaguucggcacgaugccgucccugacccucgccugccugaccaagcagggccagguggaccugaacgacgccguccaggcgcucaccgaccuggggcugaucuacacggccaaguaccccaacagcagcgaccucgaccgccugucccagagccaccccauccugaacaugaucgacaccaagaaguccagccucaacaucuccggcuacaacuucagccugggggccgccgugaaggccggcgcgugcaugcuggacggcgggaacaugcucgagaccaucaaggugagcccccagaccauggacggcauccucaagagcauccugaaggucaagaagucccuggggauguucgugagcgacacgccgggcgagcggaaccccuacgagaacauccuguacaagaucugccuguccggggacggcuggagcuacaucgccucccgcaccagcaucgugggccgggccugggagaacaccgucguggaccucgagcaggacaacaagccccagaagaucgggaacggcggguccaacaagagccugcaguccgccggcuucgccgcggggcugaucuacagccagcucaugacccugaaggacuucaagugcuucaaccugauccccaacgccaagacguggauggacaucgagggccgcccggaggaccccguggagaucgcccuguaccagcccuccagcggcugcuacguccacuucuuccgggagcccaccgaccucaagcaguucaagcaggacgccaaguacagccacgggcgcgacgugaccgaccuguucgccgcgcagccgggccugaccuccgccgucaucgaggcccucccccggaacauggugaucacgugccaggggagcgaggacauccgcaagcugcuggagucccagggccgccgggacaucaagcucaucgacaucacccugagcaaggccgacucccgcaaguucgagaacgccgugugggaccaguucaaggaccugugccacaugcacaccggggucgugguggagaagaagaagcggggcggcaaggaggagaucacgccccacugcgcgcucauggacugcaucauguucgacgccgccgucagcgggggccuggacgccaaggugcugcgcgugguccucccccgggacaugguguuccgcaccuccaccccgaaggugguccugugaggacuaguaauaaggaaacuguaugaaugucugugggcaggaagugaagagauccuucuguaaagguuuuuggaauuaugucugcugaauaauaaacuuuuuugaaauaauaaaucugguagaaaaaugagaucucaaaggcucuuuucagagccaccaaaaaaaaaaaaaaaaaaaaaaaaaaaaaaaaaaaaaaaaaaaaaaaaaaaaaaaaaaaaaaaaaaaaaaaaaaaaaaaaaaaaaaaaaaaaaaaaaaaaa

SEQ ID NO: 17481 - RNA, 2046 nt, Artificial Sequence
  mRNA product Design b-4 (hSL-A100) comprising derived and/or modified sequence from LASV(Nig08-A19;Clade III)__ADU56619__NP (opt1)
aggagagucccgcagucggcguccagcggcucugcuuguucgugugugugucguugcaggccuuauucaagcuuaccaugagcgccuccaaggaggugaaguccuuccuguggacccagucccuccgccgggagcugagcggcuacugcuccaacaucaagcugcaggucgugaaggacgcccaggcgcuccugcacgggcuggacuucagcgagguguccaacguccagcgccucaugcggaagcagaagcgcgacgacggcgaccugaagcggcugcgcgaccucaaccaggccgugaacaaccugguggagcucaagagcacccagcagaaguccguccugcggguggggacccugagcuccgacgaccugcucgugcuggccgccgaccuggagaagcucaagagcaaggucgugcgcaccgagcggccccuguccagcggcaucuacauggggaaccuguccagccagcagcucgaccagcgcaaggcccugcugaacaugaucggcaugaccggcgggaacggcgggcggaacaccacguccgacggcaucgugcgcgucugggacgugaagaacgcggagcuccugaacaaccaguucgggaccaugccgagccugacccucgccugccugaccaagcagggccagguggaccugaacgacgccguccaggcccucacggaccugggccugaucuacaccgcgaaguaccccaacuccagcgaccucgaccggcuggcccagagccaccccauccugaacaugaucgacaccaagaaguccagccucaacaucuccggguacaacuucagccugggcgccgccgugaaggccggggcgugcaugcuggacggcggcaacaugcucgagaccaucaaggugagcccccagacgauggacgggauccucaagagcauccugaaggucaagcgcucccugggcauguucaucagcgacaccccgggggagcggaaccccuacgagaacauccuguacaagaucugccuguccggcgacggguggcccuacaucgccagccgcaccuccaucgugggccgggccugggagaacaccguggucgaccucgagagcgacaacaagccccagaagacgggcaacgggggcuccaacaagagccugcaguccgccggguucgccgcgggccugaccuacagccagcucaugacccugaaggacuccaugcugcagcuggacccgaacgccaagaccuggauggacaucgaggggcgccccgaggaccccguggagaucgcccucuaccagcccagcuccggcugcuacauccacuucuuccgggagccgacggaccugaagcaguucaagcaggacgccaaguacagccacggcaucgacgugaccgaccuguucgccgcgcagcccgggcucaccagcgccgucaucgaggcccugccccgcaacauggugaucacgugccagggcuccgaggacauccggaagcugcucgagagccaggggcgccgcgacaucaagcugaucgacaucucccugagcaaggucgacucccggaaguucgagaacgccgugugggaccaguucaaggaccucugccacaugcacaccggcaucguggucgagaagaagaagcgcgggggcaaggaggagaucacgccccacugcgcccugauggacugcaucauguucgacgcggccgugagcggcgggguggacgccaagguccugcgggccgugcucccgcgcgacaugguguuccggaccuccacccccaaggucgugcugugaggacuaguaauaaggaaacuguaugaaugucugugggcaggaagugaagagauccuucuguaaagguuuuuggaauuaugucugcugaauaauaaacuuuuuugaaauaauaaaucugguagaaaaaugagaucucaaaggcucuuuucagagccaccaaaaaaaaaaaaaaaaaaaaaaaaaaaaaaaaaaaaaaaaaaaaaaaaaaaaaaaaaaaaaaaaaaaaaaaaaaaaaaaaaaaaaaaaaaaaaaaaaaaaa

SEQ ID NO: 17482 - RNA, 2046 nt, Artificial Sequence
  mRNA product Design b-4 (hSL-A100) comprising derived and/or modified sequence from LASV(G1180-SLE-2010;Clade IV)__AIT17169__NP (opt1)
aggagagucccgcagucggcguccagcggcucugcuuguucgugugugugucguugcaggccuuauucaagcuuaccaugagcgccuccaaggagaucaagagcuuccuguggacccagucccuccgccgggagcugagcggcuacugcuccaacaucaagcuccagguggucaaggacgcccaggcgcugcugcacgggcuggacuucagcgagguguccaacgugcagcgccucaugcggaaggagcgccgggacgacaacgaccugaagcgccugcgggaccucaaccaggccgucaacaaccugguggagcucaagagcacccagcagaaguccauccugcgcgugggcacccugaccagcgacgaccugcucauccuggccgccgaccuggagaagcucaaguccaaggucauccggaccgagcgcccccugagcgccgggguguacaugggcaaccuguccagccagcagcucgaccagcggcgcgcgcugcuguccaugaucgggaugagcuccggcaaccagcgggcccaggccggccgcgacggggugguccgggugugggacgugaagaacgucgagcuccugaacaaccaguucggcaccaugccgagccugacgcucgccugccugaccaagcagggccagguggaccugaacgacgcggugcaggcccucaccgaccuggggcugaucuacaccgccaaguaccccaacacguccgaccucgaccgccugacccagagccaccccauccugaacaugaucgacaccaagaaguccagccucaacaucagcggguacaacuucucccugggcgccgccgucaaggcgggcgccugcaugcuggacgggggcaacaugcucgagaccaucaaggugagcccccagacgauggacgggauccugaaguccauccugaaggugaagaaggcccucggcauguucaucagcgacaccccgggcgagcggaaccccuacgagaacauccuguacaagaucugccuguccggggacggcuggcccuacaucgccagccgcaccuccaucaccgggcgggccugggagaacacggucguggaccucgagagcgacggcaagccccagaaggcgggguccaacaacagcaacaagucccugcagagcgugggcuucaccgccggccugaccuacucccagcucaugacccugaaggacgccaugcugcagcuggacccgaacgccaagacguggauggacaucgaggggcgccccgaggaccccgucgagaucgcccucuaccagcccagcuccggcugcuacauccacuucuuccgggagccgaccgaccugaagcaguucaagcaggacgcgaaguacagccacgggaucgacgugaccgaccuguucgccgcccagcccggccucaccuccgccgugaucgacgcccugccccgcaacauggucaucacgugccaggggagcgacgacauccgcaagcugcucgagagccagggccggaaggacaucaagcugaucgacaucgcgcuguccaagaccgacagccgcaaguacgagaacgccgugugggaccaguacaaggaccucugccacaugcacaccggcgucgugguggagaagaagaagcgcgggggcaaggaggagaucacgccccacugcgcccugauggacugcaucauguucgacgccgcggucuccgggggccugaacaccagcgugcuccgggccgugcugccgcgggacauggucuuccgcaccuccacgccccggguggugcugugaggacuaguaauaaggaaacuguaugaaugucugugggcaggaagugaagagauccuucuguaaagguuuuuggaauuaugucugcugaauaauaaacuuuuuugaaauaauaaaucugguagaaaaaugagaucucaaaggcucuuuucagagccaccaaaaaaaaaaaaaaaaaaaaaaaaaaaaaaaaaaaaaaaaaaaaaaaaaaaaaaaaaaaaaaaaaaaaaaaaaaaaaaaaaaaaaaaaaaaaaaaaaaaaa

SEQ ID NO: 17483 - RNA, 2046 nt, Artificial Sequence
  mRNA product Design b-4 (hSL-A100) comprising derived and/or modified sequence from LASV(G1442-SLE-2011;Clade IV)__AIT17181__NP (opt1)
aggagagucccgcagucggcguccagcggcucugcuuguucgugugugugucguugcaggccuuauucaagcuuaccaugagcgccuccaaggaggugaaguccuuccuguggacccagagccuccgccgggagcugagcggcuacugcuccaacaucaagcugcaggucgugaaggacgcccaggcgcuccugcacgggcuggacuucagcgagguguccaacguccagcgccucaugcggaagcagcgccgggacgacaacgaccugaagcgccugcgggaccucaaccaggccgugaacaaccugguggagcucaagagcacccagcagaaguccguccugcgcgugggcacccugaccagcgacgaccugcucgugcuggccgccgaccuggagaagcucaaguccaaggucauccggaccgagcgcccccugagcgccgggguguacaugggcaaccuguccagccagcagcucgaccagcggcgcgcgcugcugaacaugaucgggauguccggcggcauccaggggacccggacgggccgcgacggggugguccgggugugggacgugaagaacgccgaccuccugaacaaccaguucggcaccaugccgagccugacccucgccugccugaccaagcaggggcaggucgaccugaacgacguggugcaggcccucacggaccugggccugaucuacaccgcgaaguaccccaacgccuccgaccucgaccgccugacccagagccaccccauccugaacaugaucgacaccaagaaguccagccucaacaucagcggcuacaacuucucccugggggccgccgucaaggccggcgcgugcaugcuggacgggggcaacaugcucgagacgaucaaggugagcccccagaccauggacggcauccugaaguccauccugaaggugaagaagacccucgggauguucaucagcgacaccccgggcgagcggaaccccuacgagaacauccuguacaagaucugccuguccggggacggcuggcccuacaucgccagccgcacguccaucaccgggcgggccugggagaacaccgucguggaccucgagagcgacggcaagccccagaaggccggcuccaacaacagcaacaagucccugcagagcgccggguucgcggccggccugaccuacucccagcucaugacgcugaaggacgccaugcugcagcuggacccgaacgccaagaccuggauggacaucgaggggcgccccgaggaccccguggagaucgcccucuaccagcccagcuccggcugcuacauccacuucuuccgggagccgaccgaccugaagcaguucaagcaggacgcgaaguacagccacgggaucgacgucaccgaccuguucgccgcccagcccggccucacguccgccgugaucgaggcccugccccgcaacauggucaucacgugccagggcagcgacgacaucaagaagcugcucgagucccaggggcgcaaggacaucaagcugaucgacaucgcgcugagcaagaccgacagccggaaguacgagaacgccgugugggaccaguacaaggaccucugccacaugcacaccggcguggucguggagaagaagaagcgcgggggcaaggaggagaucaccccgcacugcgcccugauggacugcaucauguucgacgccgcgguguccgggggccugaacacccucguccugcgggccgugcugccccgcgacaugguguuccggaccagcacgccccgcgucgugcucugaggacuaguaauaaggaaacuguaugaaugucugugggcaggaagugaagagauccuucuguaaagguuuuuggaauuaugucugcugaauaauaaacuuuuuugaaauaauaaaucugguagaaaaaugagaucucaaaggcucuuuucagagccaccaaaaaaaaaaaaaaaaaaaaaaaaaaaaaaaaaaaaaaaaaaaaaaaaaaaaaaaaaaaaaaaaaaaaaaaaaaaaaaaaaaaaaaaaaaaaaaaaaaaaa

SEQ ID NO: 17484 - RNA, 2046 nt, Artificial Sequence
  mRNA product Design b-4 (hSL-A100) comprising derived and/or modified sequence from LASV(G3010-SLE-2013;Clade IV)__AIT17345__NP (opt1)
aggagagucccgcagucggcguccagcggcucugcuuguucgugugugugucguugcaggccuuauucaagcuuaccaugagcgccuccaaggagaucaagagcuuccuguggacccagucccuccgccgggagcugagcggcuacugcuccaacaucaagcuccagguggucaaggacgcccaggcgcugcugcacgggcuggacuucagcgagguguccaacgugcagcgccucaugcggaaggagcgccgggacgacaacgaccugaagcgccugcgggaccucaaccaggccgucaacaaccugguggagcucaagagcacccagcagaaguccauccugcgcgugggcacccugaccagcgacgaccugcucauccuggccgccgaccuggagaagcucaaguccaaggucacccggaccgagcgcccccugagcgccgggguguacaugggcaaccuguccagccagcagcucgaccagcggcgcgcgcugcuguccaugaucgggaugagcuccggcgugcagggcgcccgggccgggcgcgacggcgucgugcgggugugggacgucaagaacgccgagcuccugaacaaccaguucgggacgaugccgagccugacccucgcgugccugaccaagcagggccagguggaccugaacgacgugguccaggcccucaccgaccuggggcugaucuacacggccaaguaccccaacaccuccgaccucgaccgccugacccagagccaccccauccugaacaugaucgacaccaagaaguccagccucaacaucagcggcuacaacuucucccugggcgccgccgugaaggcgggggccugcaugcuggacggcgggaacaugcucgagacgaucaaggugagcccccagaccauggacggcauccugaaguccauccugaaggucaagaaggcccucggcauguucaucagcgagaccccgggggagcggaaccccuacgagaacauccuguacaagaucugccuguccggcgacggguggcccuacaucgccagccgcaccuccaucacgggccgggccugggagaacaccgugguggaccucgagagcgacgggaagccccagaaggcgggcuccaacaacagcaacaagucccugcagagcgccggcuucaccgccgggcugaccuacucccagcucaugacgcugaaggacgccaugcugcagcuggacccgaacgccaagaccuggauggacaucgagggccgccccgaggaccccgucgagguggcgcucuaccagcccagcuccgggugcuacauccacuucuuccgggagccgaccgaccugaagcaguucaagcaggacgccaaguacagccacggcaucgacgugaccgaccuguucgccgcccagcccgggcucacguccgccgucaucgacgcgcugccccgcaacauggugaucacgugccagggcagcgacgacaucaagaagcugcucgagagccagggccgcaaggacaucaagcugaucgacaucgcccuguccaagaccgacagccggaaguacgagaacgccgucugggaccaguacaaggaccucugccacaugcacaccggggugguggucgagaagaagaagcgcggcgggaaggaggagaucaccccgcacugcgcccugauggacugcaucauguucgacgcggccguguccggcgggcugaacaccagcgugcuccgggccguccugccccgcgacaugguguuccggaccuccacgccccgcgugguccugugaggacuaguaauaaggaaacuguaugaaugucugugggcaggaagugaagagauccuucuguaaagguuuuuggaauuaugucugcugaauaauaaacuuuuuugaaauaauaaaucugguagaaaaaugagaucucaaaggcucuuuucagagccaccaaaaaaaaaaaaaaaaaaaaaaaaaaaaaaaaaaaaaaaaaaaaaaaaaaaaaaaaaaaaaaaaaaaaaaaaaaaaaaaaaaaaaaaaaaaaaaaaaaaaa

SEQ ID NO: 17485 - RNA, 2046 nt, Artificial Sequence
  mRNA product Design b-4 (hSL-A100) comprising derived and/or modified sequence from LASV(G502-SLE-2009;Clade IV)__AIT17127__NP (opt1)
aggagagucccgcagucggcguccagcggcucugcuuguucgugugugugucguugcaggccuuauucaagcuuaccaugagcgccuccaaggagaucaagagcuuccuguggacccagucccuccgccgggagcugagcggcuacugcuccaacaucaagcuccagguggucaaggacgcccaggcgcugcugcacgggcuggacuucagcgagguguccaacgugcagcgccucaugcggaaggagcgccgggacgacaacgaccugaagcgccugcgggaccucaaccaggccgucaacaaccugguggagcucaagagcacccagcagaaguccauccugcgcgugggcacccugaccagcgacgaccugcucauccuggccgccgaccuggagaagcucaaguccaaggucauccggaccgagcgcccccugagcgccgggguguacaugggcaaccuguccagccagcagcucgaccagcggcgcgcgcugcuguccaugaucgggaugagcggcggcaaccagggggugcgggccggcaaggacggggucgugcgcgugugggacgucaagaacgccgagcuccugaacaaccaguucggcaccaugccgucccugacgcucgccugccugaccaagcagggccagguggaccugaacgacgcggugcaggcccucaccgaccuggggcugaucuacaccgccaaguaccccaacacgagcgaccucgaccggcugacccagucccaccccauccugaacaugaucgacaccaagaaguccagccucaacaucuccggcuacaacuucagccugggggccgccgucaaggcgggcgccugcaugcuggacgggggcaacaugcucgagaccaucaaggugagcccccagacgauggacggcauccucaagagcauccugaaggugaagaaggcccuggggauguucaucuccgacaccccgggcgagcgcaaccccuacgagaacauccuguacaagaucugccugagcggggacggcuggcccuacaucgccucccggaccagcaucaccgggcgcgccugggagaacacggucguggaccucgaguccgacggcaagccccagaaggcgggcagcaacaacuccaacaagagccugcaguccgccggguucaccgccggccugaccuacagccagcucaugacccugaaggacgccaugcugcagcuggacccgaacacgaagaccuggauggacaucgaggggcggcccgaggaccccguggagaucgcccucuaccagcccuccagcggcugcuacauccacuucuuccgcgagccgaccgaccugaagcaguucaagcaggacgcgaaguacucccacgggaucgacgucaccgaccuguucgccgcccagcccggccucacgagcgccgugaucgacgcccugccccggaacauggugaucacgugccagggcuccgacgacauccgcaagcugcucgagagccaggggcgcaaggacaucaagcugaucgacaucgcgcugaacaagaccgacagccggaaguacgagaacgccgucugggaccaguacaaggaccucugccacaugcacaccggcguggucguggagaagaagaagcgcgggggcaaggaggagaucaccccgcacugcgcccugauggacugcaucauguucgacgccgcgguguccgggggccugaacaccagcguccuccgggccgugcugccccgcgacaugguguuccggaccuccacgccccgcgucgugcugugaggacuaguaauaaggaaacuguaugaaugucugugggcaggaagugaagagauccuucuguaaagguuuuuggaauuaugucugcugaauaauaaacuuuuuugaaauaauaaaucugguagaaaaaugagaucucaaaggcucuuuucagagccaccaaaaaaaaaaaaaaaaaaaaaaaaaaaaaaaaaaaaaaaaaaaaaaaaaaaaaaaaaaaaaaaaaaaaaaaaaaaaaaaaaaaaaaaaaaaaaaaaaaaaa

SEQ ID NO: 17486 - RNA, 2046 nt, Artificial Sequence
  mRNA product Design b-4 (hSL-A100) comprising derived and/or modified sequence from LASV(G733-SLE-2010;Clade IV)__AIT17155__NP (opt1)
aggagagucccgcagucggcguccagcggcucugcuuguucgugugugugucguugcaggccuuauucaagcuuaccaugagcgccuccaaggagaucaagagcuuccuguggacccagucccuccgccgggagcugagcggcuacugcuccaacaucaagcuccagguggucaaggacgcccaggcgcugcugcacgggcuggacuucagcgagguguccaacgugcagcgccucaugcggaaggagcgccgggacgacaacgaccugaagcgccugcgggaccucaaccaggccgucaacaaccugguggagcucaagagcacccagcagaaguccgugcugcgcgucggcacccugaccagcgacgagcugcucgugcuggccgccgaccuggagaagcucaaguccaaggugauccggaccgagcgcccccugagcgccggggucuacaugggcaaccuguccagccagcagcucgaccagcggcgcgcgcugcuguccaugaucgggaugagcggcggcaaccagggggcccggaccggccgcgacgggguggugcgggucugggacgugaagaacgccgagcuccugaacaaccaguucggcaccaugccgucccugacccucgccugccugaccaagcagggccagguggaccugaacgacgcgguccaggcccucaccgaccuggggcugaucuacacggccaaguaccccaacaccagcgaccucgaccgccugacccagucccaccccauccugaacaugaucgacaccaagaaguccagccucaacaucuccggcuacaacuucagccugggggccgccgugaaggcgggcgccugcaugcuggacgggggcaacaugcucgagacgaucaaggugagcccccagaccauggacggcauccucaagagcauccugaaggucaagaaggcccuggggauguucaucuccgacaccccgggcgagcggaaccccuacgagaacauccuguacaagaucugccugagcggggacggcuggcccuacaucgccucccgcaccagcaucacggggcgggccugggagaacaccgugguggaccucgaguccgacggcaagccccagaaggcgggcagcaacaacuccaacaagagccugcaguccgccggguucaccgccggccugaccuacagccagcucaugacgcugaaggacgccaugcugcagcuggacccgaacgccaagaccuggauggacaucgaggggcgccccgaggaccccgucgagaucgcgcucuaccagcccuccagcggcugcuacauccacuucuuccgggagccgaccgaccugaagcaguucaagcaggacgccaaguacucccacgggaucgacgugaccgaccuguucgccgcccagcccggccucacgagcgccgugaucgacgcgcugccccgcaacauggucaucacgugccagggcuccgacgacauccgcaagcugcucgagagccaggggcggaaggacaucaagcugaucgacaucgcccugagcaagaucgacucccgcaaguacgagaacgccgugugggaccaguacaaggaccucugccacaugcacaccggcgucgugguggagaagaagaagcgcgggggcaaggaggagaucacgccccacugcgcccugauggacugcaucauguucgacgcggccgucagcgggggccugaacucccucgugcugcgggccgugcugccgcgggacauggucuuccgcaccagcacgccccggguggugcucugaggacuaguaauaaggaaacuguaugaaugucugugggcaggaagugaagagauccuucuguaaagguuuuuggaauuaugucugcugaauaauaaacuuuuuugaaauaauaaaucugguagaaaaaugagaucucaaaggcucuuuucagagccaccaaaaaaaaaaaaaaaaaaaaaaaaaaaaaaaaaaaaaaaaaaaaaaaaaaaaaaaaaaaaaaaaaaaaaaaaaaaaaaaaaaaaaaaaaaaaaaaaaaaaa

SEQ ID NO: 17487 - RNA, 2046 nt, Artificial Sequence
  mRNA product Design b-4 (hSL-A100) comprising derived and/or modified sequence from MOPV/LASV reassortant(IGS-1;Clade IV)__AFY05578__NP (opt1)
aggagagucccgcagucggcguccagcggcucugcuuguucgugugugugucguugcaggccuuauucaagcuuaccaugagcgccuccaaggagaucaagagcuuccuguggacccagucccuccgccgggagcugagcggcuacugcuccaacaucaagcuccagguggucaaggacgcccaggcgcugcugcacgggcuggacuucagcgagguguccaacgugcagcgccucaugcggaaggagcgccgggacgacaacgaccugaagcgccugcgggaccucaaccaggccgucaacaaccugguggagcucaagagcacccagcagaaguccauccugcgcgugggcacccugaccagcgacgaccugcucauccuggccgccgaccuggagaagcuccgguccaaggucauccgcaccgagcggccccugagcgccgggguguacaugggcaaccuguccagccagcagcucgaccagcgccgggcgcugcugaacaugaucgggauguccggcggcaaccagggggcccgcgccggccgggacggggugguccgcgugugggacgugaagaacgccgagcuccugagcaaccaguucggcaccaugccgucccugacgcucgcgugccugaccaagcaggggcaggucgaccugaacgacgccgugcaggcccucaccgaccugggccugaucuacaccgccaaguaccccaacacgagcgaccucgaccggcugacccagucccaccccauccugaacaugaucgacaccaagaaguccagccucaacaucuccggcuacaacuucagccugggggccgcggugaaggccggcgccugcaugcuggacgggggcaacaugcucgagaccaucaaggucagcccccagacgauggacggcauccucaagagcauccugaaggugaagaaggcccuggggauguucaucuccgacaccccgggcgagcgcaaccccuacgagaacauccuguacaagaucugccugagcggggacggcuggcccuacaucgccucccggaccagcaucaccgggcgcgcgugggagaacacgguggucgaccucgaguccgacggcaagccccagaaggccgacagcaacaacuccagcaagucccugcagagcgccggcuucaccgccgggcugaccuacucccagcucaugacccugaaggacgccaugcugcagcuggacccgaacgcgaagacguggauggacaucgagggccggcccgaggaccccguggagaucgcccucuaccagcccagcuccgggugcuacauccacuucuuccgcgagccgaccgaccugaagcaguucaagcaggacgccaaguacagccacggcaucgacgugaccgaccuguucgccacccagcccgggcucacguccgccgucaucgacgcgcugccccgcaacauggugaucacgugccagggcagcgacgacauccggaagcugcucgagagccagggccgcaaggacaucaagcugaucgacaucgaccuguccaagaccgacagccggaaguacgagaacgccgugugggaccaguacaaggaccucugccacaugcacaccggggucguggucgagaagaagaagcgcggcgggaaggaggagaucaccccgcacugcgcccugauggacugcaucauguucgacgccgcgguguccggcgggcugaacaccagcgugcuccgggccguccugccccgcgacaugguguuccggaccuccacgccccgcgugguccugugaggacuaguaauaaggaaacuguaugaaugucugugggcaggaagugaagagauccuucuguaaagguuuuuggaauuaugucugcugaauaauaaacuuuuuugaaauaauaaaucugguagaaaaaugagaucucaaaggcucuuuucagagccaccaaaaaaaaaaaaaaaaaaaaaaaaaaaaaaaaaaaaaaaaaaaaaaaaaaaaaaaaaaaaaaaaaaaaaaaaaaaaaaaaaaaaaaaaaaaaaaaaaaaaa

SEQ ID NO: 17488 - RNA, 2046 nt, Artificial Sequence
  mRNA product Design b-4 (hSL-A100) comprising derived and/or modified sequence from LASV(LM765-SLE-2012;Clade IV)__AIT17815__NP (opt1)
aggagagucccgcagucggcguccagcggcucugcuuguucgugugugugucguugcaggccuuauucaagcuuaccaugagcgccuccaaggagaucaagagcuuccuguggacccagucccuccgccgggagcugagcggcuacugcuccaacaucaagcuccagguggucaaggacgcccaggcgcugcugcacgggcuggacuucagcgagguguccaacgugcagcgccucaugcggaaggagcgccgggacgacaacgaccugaagcgccugcgggaccucaaccaggccgucaacaaccugguggagcucaagagcacccagcagaaguccauccugcgcgugggcacccugaccagcgacgaccugcucauccuggccgccgaccuggagaagcucaaguccaaggucacccggaccgagcgcccccugagcgccgggguguacaugggcaaccuguccagccagcagcucgaccagcggcgcgcgcugcuggacaugaucgggauguccggcagcaaccagggcgcccgggccgggcgcgacggcgugguccgggugugggacgugaagaacgccgagcuccugaacaaccaguucgggacgaugccgucccugacccucgcgugccugaccaagcagggccaggucgaccugaacgacgccgugcaggcccucaccgaccuggggcugaucuacacggccaaguaccccaacaccagcgaccucgaccgccugacccagucccaccccauccugaacaugaucgacaccaagaaguccagccucaacaucuccggcuacaacuucagccugggcgccgcggugaaggccggggccugcaugcuggacggcgggaacaugcucgagacgaucaaggucagcccccagaccauggacggcauccucaagagcauccugaaggugaagaaggcccugggcauguucaucuccgacgccccgggggagcggaaccccuacgagaacauccuguacaagaucugccugagcggcgacggguggcccuacaucgcgucccgcaccagcaucaccggccgggccugggagaacacgguggucgaccucgaguccgacgggaagccccagaaggccggcagcaacggcuccaacaagagccugcaguccgccggguucaccgccggccugaccuacagccagcucaugacccugaaggacgcgaugcugcagcuggacccgaacgccaagacguggauggacaucgaggggcgccccgaggaccccguggagaucgcccucuaccagcccuccagcggcugcuacauccacuucuuccgggagccgaccgaccugaagcaguucaagcaggacgccaaguacucccacgggaucgacgugaccgaccuguucgccgcgcagcccggccucaccagcgccgucaucgacgcccugccccgcaacauggugaucacgugccagggcuccgacgacauccgcaagcuguucgagagccaggggcggaaggacaucaagcucaucgacaucgcccugagcaagaccgacucccgcaaguacgagaacgcggugugggaccaguacaaggaccugugccacaugcacaccggcaucgucguggagaagaagaagcgcgggggcaaggaggagaucacgccccacugcgcccucauggacugcaucauguucgacgccgccgucagcgggggccugaacaccuccgugcugcgggccgugcucccgcgggacauggucuuccgcaccagcacgccccggguggugcugugaggacuaguaauaaggaaacuguaugaaugucugugggcaggaagugaagagauccuucuguaaagguuuuuggaauuaugucugcugaauaauaaacuuuuuugaaauaauaaaucugguagaaaaaugagaucucaaaggcucuuuucagagccaccaaaaaaaaaaaaaaaaaaaaaaaaaaaaaaaaaaaaaaaaaaaaaaaaaaaaaaaaaaaaaaaaaaaaaaaaaaaaaaaaaaaaaaaaaaaaaaaaaaaaa

SEQ ID NO: 17489 - RNA, 2046 nt, Artificial Sequence
  mRNA product Design b-4 (hSL-A100) comprising derived and/or modified sequence from LASV(LM776-SLE-2012;Clade IV)__AIT17825__NP (opt1)
aggagagucccgcagucggcguccagcggcucugcuuguucgugugugugucguugcaggccuuauucaagcuuaccaugagcgccuccaaggagaucaagagcuuccuguggacccagucccuccgccgggagcugagcuccuacugcagcaacaucaagcuccagguggucaaggacgcccaggcgcugcugcacggccuggacuucuccgaggugagcaacgugcagcgccucaugcggaaggagcgccgggacgacaacgaccugaagcgccugcgggaccucaaccaggccgucaacaaccugguggagcugaaguccacccagcagaaguccauccuccgcguggggacccugaccuccgacgaccugcucauccuggccgccgaccuggagaagcucaagagcaaggucacccggaccgagcgcccccuguccgccggcguguacauggggaaccugagcucccagcagcucgaccagcggcgcgcgcugcugagcaugaucggcauguccgggagcaaccagggcgcccgggccggccgcgacggggugguccgggugugggacgugaagaacgccgagcuccugaacaaccaguucggcacgaugccgucccugacccucgcgugccugaccaagcaggggcaggucgaccugaacgacgccgugcaggcccucaccgaccugggccugaucuacacggccaaguaccccaacaccagcgaccucgaccgccugacccagagccaccccauccugaacaugaucgacaccaagaaguccagccucaacaucuccggguacaacuucagccugggcgccgcggugaaggccggcgccugcaugcuggacgggggcaacaugcucgagacgaucaaggucagcccccagaccauggacgggauccucaagagcauccugaaggugaagaaggcccugggcauguucaucuccgacaccccgggcgagcggaaccccuacgagaacauccuguacaagaucugccugagcggggacggcuggcccuacaucgccucccgcaccagcaucacggggcgggcgugggagaacaccguggucgaccucgaguccgacggcaagccccagaaggccgggagcaacaacuccaacaagagccugcaguccgccggcuucaccgccggccugaccuacagccagcucaugacgcugaaggacgccaugcugcagcuggacccgaacgcgaagaccuggauggacaucgaggggcgccccgaggaccccguggagguggcccucuaccagcccuccagcggcugcuacauccacuucuuccgggagccgaccgaccugaagcaguucaagcaggacgccaaguacucccacgggaucgacgucaccgaccuguucgccgcccagcccggccucacgagcgcggugaucgacgcccugccccgcaacauggugaucacgugccaggggagcgacgacauccgcaagcugcucgagucccagggccggaaggacaucaagcugaucgacaucgcccugagcaagaccgacucccgcaaguacgagaacgccgucugggaccaguacaaggaccucugccacaugcacaccggcguggucguggagaagaagaagcgcgggggcaaggaggagaucaccccgcacugcgcgcugauggacugcaucauguucgacgccgccgugagcgggggccugaacaccuccguccuccgggccgugcugccccgggacaugguguuccgcaccagcacgccccgggucgugcugugaggacuaguaauaaggaaacuguaugaaugucugugggcaggaagugaagagauccuucuguaaagguuuuuggaauuaugucugcugaauaauaaacuuuuuugaaauaauaaaucugguagaaaaaugagaucucaaaggcucuuuucagagccaccaaaaaaaaaaaaaaaaaaaaaaaaaaaaaaaaaaaaaaaaaaaaaaaaaaaaaaaaaaaaaaaaaaaaaaaaaaaaaaaaaaaaaaaaaaaaaaaaaaaaa

SEQ ID NO: 17490 - RNA, 2046 nt, Artificial Sequence
  mRNA product Design b-4 (hSL-A100) comprising derived and/or modified sequence from LASV(Mad39;Clade IV)__ANH09723__NP (opt1)
aggagagucccgcagucggcguccagcggcucugcuuguucgugugugugucguugcaggccuuauucaagcuuaccaugagcgccuccaaggagaucaagagcuuccuguggacccagucccuccgccgggagcugagcggcuacugcuccaacaucaagcuccagguggucaaggacgcccaggcgcugcugcacgggcuggacuucagcgagguguccaacgugcagcgccucaugcggaagcagcgccgggacgacaacgaccugaagcgccugcgggaccucaaccaggccgucaacaaccugguggagcugaaguccacccagcagaaguccgugcuccgcgucggcacgcugaccagcgacgaccugcucacccuggccgccgaccuggagaagcucaaguccaaggugacccggacggagcgcccccugaccgccgggguguacaugggcaaccugagcucccagcagcucgaccagcggcgcgcgcugcugaacaugaucgggaugagcggcggcaaccagggggcccggaccggccgcgacggggucgugcgggugugggacgucaagaacgccgagcuccugaacaaccaguucggcaccaugccgucccugacgcucgccugccugaccaagcagggccagguggaccugaacgacgugguccaggcgcucaccgaccuggggcugaucuacaccgccaaguaccccaacacgagcgaccucgaccgccugacccagucccaccccauccugaacaugaucgacaccaacaagagcucccucaacaucagcggcuacaacuucagccugggggccgccgugaaggccggcgcgugcaugcuggacgggggcaacaugcucgagaccaucaaggugagcccccagacgauggacggcauccucaagagcauccugaaggucaagaagucccuggggauguucaucagcgacaccccgggcgagcggaaccccuacgagaacauccuguacaagaucugccuguccggggacggcuggcccuacaucgccagccgcaccuccaucaccgggcgggccugggagaacacggugguggaccucgagagcggcggcaagccccagaaggccggguccaacaacagcaacaagucccugcagagcgccggcuucgcggccgggcugaccuacucccagcucaugacccugaaggacgccaugcugcagcuggacccgaacgccaagaccuggauggacaucgagggccgccccgaggaccccgucgagaucgcccucuaccagcccaucagcgggugcuacauccacuucuuccgggagccgacggaccugaagcaguucaagcaggacgcgaaguacucccacggcaucgacgugaccgaccuguucgccgcccagcccggccucaccagcgccgugaucgaggcccugccccgcaacauggucaucacgugccagggguccgacgacauccgcaagcuguucgagagccagggccggaaggacaucaagcucaucgacaucgcgcuguccaagaccgacagccgcaaguacgagaacgccgugugggaccaguacaaggaccugugccacaugcacaccggggucgugguggagaagaagaagaagggcgggaaggaggagaucacgccccacugcgcccucauggacugcaucauguucgacgccgcggucagcggcggccugaacacccuggugcuccgggccgugcugccgcgcgacauggucuuccggaccuccacccccaagguggugcugugaggacuaguaauaaggaaacuguaugaaugucugugggcaggaagugaagagauccuucuguaaagguuuuuggaauuaugucugcugaauaauaaacuuuuuugaaauaauaaaucugguagaaaaaugagaucucaaaggcucuuuucagagccaccaaaaaaaaaaaaaaaaaaaaaaaaaaaaaaaaaaaaaaaaaaaaaaaaaaaaaaaaaaaaaaaaaaaaaaaaaaaaaaaaaaaaaaaaaaaaaaaaaaaaa

SEQ ID NO: 17491 - RNA, 2046 nt, Artificial Sequence
  mRNA product Design b-4 (hSL-A100) comprising derived and/or modified sequence from LASV(Z0947-SLE-2011;Clade IV)__AIT17841__NP (opt1)
aggagagucccgcagucggcguccagcggcucugcuuguucgugugugugucguugcaggccuuauucaagcuuaccaugagcgccuccaaggagaucaagagcuuccuguggacccagucccuccgccgggagcugagcggcuacugcuccaacaucaagcuccagguggucaaggacgcccaggcgcugcugcacgggcuggacuucagcgagguguccaacgugcagcgccucaugcggaaggagcgccgggacgacaacgaccugaagcgccugcgggaccucaaccaggccgucaacaaccugguggagcucaagagcacccagcagaaguccauccugcgcgugggcacccugaccagcgacgaccugcucauccuggccgccgaccuggagaagcucaaguccaaggucacccggaccgagcgcccccugagcgccgggguguacaugggcaaccuguccagccagcagcucgaccagcggcgcgcgcugcugaacaugaucgggauguccggcagcaaccagggcgcccggacggggcgcgacggcgugguccgggugugggacgugaagaacgccgagcuccugaacaaccaguucgggaccaugccgucccugacccucgccugccugaccaagcagggccaggucgaccugaacgacgcggugcaggcccucacggaccuggggcugaucuacaccgccaaguaccccaacaccagcgaccucgaccgccugacccagucccaccccauccugaacaugaucgacacgaagaaguccagccucaacaucuccggcuacaacuucagccugggcgccgccgugaaggcgggggccugcaugcuggacggcgggaacaugcucgagaccaucaaggucagcccccagaccauggacggcauccucaagagcauccugaaggugaagaaggcccugggcauguucaucuccgacgccccgggggagcggaaccccuacgagaacauccuguacaagaucugccugagcggcgacggguggcccuacaucgccucccgcaccagcaucacgggccgggcgugggagaacaccguggucgaccucgaguccgacgggaagccccagaaggccggcagcaacggcuccaacaagagccugcaguccgccggguucaccgccggccugaccuacagccagcucaugacgcugaaggacgccaugcugcagcuggacccgaacgcgaagaccuggauggacaucgaggggcgccccgaggaccccguggagaucgcccucuaccagcccuccagcggcugcuacauccacuucuuccgggagccgaccgaccugaagcaguucaagcaggacgccaaguacucccacgggaucgacgugaccgaccuguucgccgcccagcccggccucacgagcgcggucaucgacgcccugccccgcaacauggugaucacgugccagggcuccgacgacauccgcaagcuguucgagagccaggggcggaaggacaucaagcucaucgacaucgcccugagcaagaccgacucccgcaaguacgagaacgccgugugggaccaguacaaggaccugugccacaugcacaccggcaucgucguggagaagaagaagcgcgggggcaaggaggagaucaccccgcacugcgcgcucauggacugcaucauguucgacgccgccgucagcgggggccugaacaccuccgugcugcgggccgugcucccccgggacauggucuuccgcaccagcacgccccggguggugcugugaggacuaguaauaaggaaacuguaugaaugucugugggcaggaagugaagagauccuucuguaaagguuuuuggaauuaugucugcugaauaauaaacuuuuuugaaauaauaaaucugguagaaaaaugagaucucaaaggcucuuuucagagccaccaaaaaaaaaaaaaaaaaaaaaaaaaaaaaaaaaaaaaaaaaaaaaaaaaaaaaaaaaaaaaaaaaaaaaaaaaaaaaaaaaaaaaaaaaaaaaaaaaaaaa

SEQ ID NO: 17492 - RNA, 2046 nt, Artificial Sequence
  mRNA product Design b-4 (hSL-A100) comprising derived and/or modified sequence from LASV(Josiah;Clade IV)__NP_694869__NP (opt4)
aggagagucccgcagucggcguccagcggcucugcuuguucgugugugugucguugcaggccuuauucaagcuuaccaugagcgccagcaaggagaucaagagcuuccuguggacccagagccugagaagagagcugagcggcuacugcagcaacaucaagcugcagguggugaaggacgcccaggcccugcugcacggccuggacuucagcgaggugagcaacgugcagagacugaugagaaaggagagaagagacgacaacgaccugaagagacugagagaccugaaccaggccgugaacaaccugguggagcugaagagcacccagcagaagagcauccugagagugggcacccugaccagcgacgaccugcugauccuggccgccgaccuggagaagcugaagagcaaggugaucagaaccgagagaccccugagcgccggcguguacaugggcaaccugagcagccagcagcuggaccagagaagagcccugcugaacaugaucggcaugagcggcggcaaccagggcgccagagccggcagagacggcguggugagagugugggacgugaagaacgccgagcugcugaacaaccaguucggcaccaugcccagccugacccuggccugccugaccaagcagggccagguggaccugaacgacgccgugcaggcccugaccgaccugggccugaucuacaccgccaaguaccccaacaccagcgaccuggacagacugacccagagccaccccauccugaacaugaucgacaccaagaagagcagccugaacaucagcggcuacaacuucagccugggcgccgccgugaaggccggcgccugcaugcuggacggcggcaacaugcuggagaccaucaaggugagcccccagaccauggacggcauccugaagagcauccugaaggugaagaaggcccugggcauguucaucagcgacacccccggcgagagaaaccccuacgagaacauccuguacaagaucugccugagcggcgacggcuggcccuacaucgccagcagaaccagcaucaccggcagagccugggagaacaccgugguggaccuggagagcgacggcaagccccagaaggccgacagcaacaacagcagcaagagccugcagagcgccggcuucaccgccggccugaccuacagccagcugaugacccugaaggacgccaugcugcagcuggaccccaacgccaagaccuggauggacaucgagggcagacccgaggaccccguggagaucgcccuguaccagcccagcagcggcugcuacauccacuucuucagagagcccaccgaccugaagcaguucaagcaggacgccaaguacagccacggcaucgacgugaccgaccuguucgccacccagcccggccugaccagcgccgugaucgacgcccugcccagaaacauggugaucaccugccagggcagcgacgacaucagaaagcugcuggagagccagggcagaaaggacaucaagcugaucgacaucgcccugagcaagaccgacagcagaaaguacgagaacgccgugugggaccaguacaaggaccugugccacaugcacaccggcguggugguggagaagaagaagagaggcggcaaggaggagaucaccccccacugcgcccugauggacugcaucauguucgacgccgccgugagcggcggccugaacaccagcgugcugagagccgugcugcccagagacaugguguucagaaccagcacccccagaguggugcugugaggacuaguaauaaggaaacuguaugaaugucugugggcaggaagugaagagauccuucuguaaagguuuuuggaauuaugucugcugaauaauaaacuuuuuugaaauaauaaaucugguagaaaaaugagaucucaaaggcucuuuucagagccaccaaaaaaaaaaaaaaaaaaaaaaaaaaaaaaaaaaaaaaaaaaaaaaaaaaaaaaaaaaaaaaaaaaaaaaaaaaaaaaaaaaaaaaaaaaaaaaaaaaaaa

SEQ ID NO: 17493 - RNA, 2046 nt, Artificial Sequence
  mRNA product Design b-4 (hSL-A100) comprising derived and/or modified sequence from LASV(LP;Clade I)__AAF86702__NP (opt4)
aggagagucccgcagucggcguccagcggcucugcuuguucgugugugugucguugcaggccuuauucaagcuuaccaugagcaacagcaaggagaucaagagcuuccuguggacccagagccugagaagagagcugagcggcuacugcagcaacaucaagcugcagguggugaaggacgcccaggcccugcugcacggccuggacuucagcgaggugagcaacgugcagagacugaugagaaagcagaagagagacgacgccgaccugaagagacugagagaccugaaccaggccgugaacaaccugguggagcugaagagcacccagcagaagaacgugcugagagugggcacccugagcagcgacgaccugaucacccuggccgccgaccuggagaagcugaagagcaaggugaucagaaccgagagaccccugagcagcggcguguacaugggcaaccugagcagccagcagcuggaccagagaagagcccugcugagcaugaucggcaugagcggcggcccccagggcaacagaaccggcggcgacggcguggugagagugugggacgugaagaacgccgagcugcugaacaaccaguucggcaccaugcccagccugacccuggccugccugaccaagcagggccagguggaccugaacgacgccgugcaggcccugaccgaccugggccugaucuacaccgccaaguaccccaacagcagcgaccuggacaugcugacccagagccaccccauccugggcaugguggacaccaagaagagcagccugaacaucagcggcuacaacuucagccugggcgccgccgugaaggccggcgccugcaugcuggacggcggcaacaugcuggagaccaucaaggugagcccccagaccauggacggcauccugaagagcauccugaaggugaagagaagccugggcauguucaucagcgacacccccggcgagagaaaccccuacgagaacauccuguacaagaucugccugagcggcgagggcuggcccuacaucgccagcagaaccagcaucaccggcagagccugggagaacacccugguggaccuggagagcgacaacaagccccccaagcugaacagcgccggcagcaacaagagccugcaggccgccggccugaacgccggccugaccuacagccagcugaugacccugaaggacugcaugcugcagcuggaccccagcagcaagaccuggaucgacaucgagggcagacccgaggaccccguggagaucgcccuguuccagcccagcagcggcugcuacauccacuucuucagagagcccaccgaccugaagcaguucaagcaggacgccaaguacagccacggcaucgacgugaccgaccuguucagcacccagcccggccugaccagcgccgugaucgaggcccugcccagaaacauggugcugaccugccagggcagcgacgacaucaagaagcugcuggagagccagggcagaagagacaucaagcugaucgacaucagccugagcaaggccgacagcagaaaguucgagaacgccgugugggaccaguacaaggaccugugccacaugcacaccggcguggugguggagaagaagaagagaggcggcaaggaggagaucaccccccacugcgcccugcuggacugcaucauguucgacgccgccaccaccggcagccugaacaucaccacccugagagccgugcugcccagagacaugguguucagaaccagcacccccaagguggugcugugaggacuaguaauaaggaaacuguaugaaugucugugggcaggaagugaagagauccuucuguaaagguuuuuggaauuaugucugcugaauaauaaacuuuuuugaaauaauaaaucugguagaaaaaugagaucucaaaggcucuuuucagagccaccaaaaaaaaaaaaaaaaaaaaaaaaaaaaaaaaaaaaaaaaaaaaaaaaaaaaaaaaaaaaaaaaaaaaaaaaaaaaaaaaaaaaaaaaaaaaaaaaaaaaa

SEQ ID NO: 17494 - RNA, 2046 nt, Artificial Sequence
  mRNA product Design b-4 (hSL-A100) comprising derived and/or modified sequence from LASV(803213;Clade II)__AAF86704__NP (opt4)
aggagagucccgcagucggcguccagcggcucugcuuguucgugugugugucguugcaggccuuauucaagcuuaccaugagcgccagcaaggaggugaagagcuuccuguggacccagagccugagaagagagcugagcggcuacugcagcaacaucaagcugcagguggugaaggacgcccaggcccugcugcacggccuggacuucagcgaggugaacaacgugcagagacugaugagaaagcagaagagagacgacggcgaccugaagagacugagagaccugaaccaggccgugaacaaccugguggagcugaagagcacccagcagaagagcauccugagagugggcacccugaccagcgacgaccugcugacccuggccgccgaccuggagaagcugaagagcaaggugaucagaaccgagagaccccugagcagcggcguguacaugggcaaccugagcacccagcagcuggagcagagaagagcccugcugaacaugaucggcauggugggcggcgcccagggcacccagcccggcagagacggcguggugagagugugggacgugaagaaccccgaccugcugaacaaccaguucggcaccaugcccagccugacccuggccugccugaccaagcagggccagguggaccugaacgacgccgugcuggcccugaccgaccugggccugaucuacaccgccaaguaccccaacagcagcgaccuggacagacugagccagagccaccccauccugaacaugguggacaccaagaagagcagccugaacaucagcggcuacaacuucagccugggcgccgccgugaaggccggcgccugcaugcuggacggcggcaacaugcuggagaccaucaaggugaccccccagaccauggacggcauccugaagagcauccugaaggugaagagaagccugggcauguucgugagcgacacccccggcgagagaaaccccuacgagaacauccuguacaagaucugccugagcggcgacggcuggcccuacaucgccagcagaaccagcaucgugggcagagccugggagaacaccaccguggaccuggagagcgacggcaagccccagaaggugggcaccgccggcagcaacaagagccugcagagcgccggcuuccccaccggccugaccuacagccagcugaugacccugaaggacagcaugaugcagcuggaccccagcgccaagaccuggaucgacaucgagggcagacccgaggaccccguggagaucgcccuguaccagcccaugagcggcugcuacauccacuucuucagagagcccaccgaccugaagcaguucaagcaggacgccaaguacagccacggcaucgacguggccgaccuguuccccgcccagcccggccugaccagcgccgugaucgaggcccugcccagaaacauggugcugaccugccagggcagcgacgacaucaagaagcugcuggacagccagggcagaagagacaucaagcugaucgacaucagccugagcaagguggacagcagaaaguucgagaacgccgugugggaccagugcaaggaccugugccacaugcacaccggcguggugguggagaagaagaagagaggcggcaaggaggagaucaccccccacugcgcccugauggacugcaucauguucgacgccgccgugagcggcggccugaacauccccgugcugagagccgugcugcccagagacaugguguucagaaccagcagccccaagguggugcugugaggacuaguaauaaggaaacuguaugaaugucugugggcaggaagugaagagauccuucuguaaagguuuuuggaauuaugucugcugaauaauaaacuuuuuugaaauaauaaaucugguagaaaaaugagaucucaaaggcucuuuucagagccaccaaaaaaaaaaaaaaaaaaaaaaaaaaaaaaaaaaaaaaaaaaaaaaaaaaaaaaaaaaaaaaaaaaaaaaaaaaaaaaaaaaaaaaaaaaaaaaaaaaaaa

SEQ ID NO: 17495 - RNA, 2049 nt, Artificial Sequence
  mRNA product Design b-4 (hSL-A100) comprising derived and/or modified sequence from LASV(GA391;Clade III)__CAA36646__NP (opt4)
aggagagucccgcagucggcguccagcggcucugcuuguucgugugugugucguugcaggccuuauucaagcuuaccaugagcgccagcaaggaggugagaagcuuccuguggacccagagccugagaagagagcugagcggcuacugcagcaacaucaagcugcagguggugaaggacgcccaggcccugcugcacggccuggacuucagcgaggugagcaacgugcagagacugaugagaaagcagaagagagacgacggcgaccugaagagacugagagaccugaaccaggccgugaacaaccugguggagcugaagagcacccagcagaagagcgugcugagagugggcacccugagcagcgacgaccugcugauccuggccgccgaccuggagaagcugaagagcaaggugaccagaaccgagagaccccugagcagcggcguguacaugggcaaccugagcagccagcagcuggaccagagaagagcccugcugaacaugaucggcaugaccggcgugagcggcggcggcaagggcgccagcgacggcaucgugagagugugggacgugaagaacgccgagcugcugaacaaccaguucggcaccaugcccagccugacccuggccugccugaccaagcagggccagguggaccugaacgacgccgugcaggcccugaccgaccugggccugaucuacaccgccaaguaccccaacagcagcgaccuggacagacugagccagagccaccccauccugaacaugaucgacaccaagaagagcagccugaacaucagcggcuacaacuucagccugggcgccgccgugaaggccggcgccugcaugcuggacggcggcaacaugcuggagaccaucaaggugagcccccagaccauggacggcauccugaagagcauccugaaggugaagaagagccugggcauguucgugagcgacacccccggcgagagaaaccccuacgagaacauccuguacaagaucugccugagcggcgacggcuggcccuacaucgccagcagaaccagcaucgugggcagagccugggagaacaccgugguggaccuggagcaggacaacaagccccagaagaucggcaacggcggcagcaacaagagccugcagagcgccggcuucgccgccggccugaccuacagccagcugaugacccugaaggacuucaagugcuucaaccugauccccaacgccaagaccuggauggacaucgagggcagacccgaggaccccguggagaucgcccuguaccagcccagcagcggcugcuacgugcacuucuucagagagcccaccgaccugaagcaguucaagcaggacgccaaguacagccacggcaucgacgugaccgaccuguucgccgcccagcccggccugaccagcgccgugaucgaggcccugcccagaaacauggugaucaccugccagggcagcgaggacaucagaaagcugcuggagagccagggcagaagagacaucaagcugaucgacaucacccugagcaaggccgacagcagaaaguucgagaacgccgugugggaccaguucaaggaccugugccacaugcacaccggcguggugguggagaagaagaagagaggcggcaaggaggagaucaccccccacugcgcccugauggacugcaucauguucgacgccgccgugagcggcggccuggacgccaaggugcugagaguggugcugcccagagacaugguguucagaaccagcacccccaagguggugcugugaggacuaguaauaaggaaacuguaugaaugucugugggcaggaagugaagagauccuucuguaaagguuuuuggaauuaugucugcugaauaauaaacuuuuuugaaauaauaaaucugguagaaaaaugagaucucaaaggcucuuuucagagccaccaaaaaaaaaaaaaaaaaaaaaaaaaaaaaaaaaaaaaaaaaaaaaaaaaaaaaaaaaaaaaaaaaaaaaaaaaaaaaaaaaaaaaaaaaaaaaaaaaaaaa

SEQ ID NO: 17496 - RNA, 2046 nt, Artificial Sequence
  mRNA product Design b-4 (hSL-A100) comprising derived and/or modified sequence from LASV(AV;Clade V)__CCA30315__NP (opt4)
aggagagucccgcagucggcguccagcggcucugcuuguucgugugugugucguugcaggccuuauucaagcuuaccaugagcgccagcaaggaggugaagagcuuccuguggacccagagccugagaagagagcugagcggcuacugcagcaacaucaagcugcagguggugaaggacgcccaggcccugcugcacggccuggacuucagcgaggugagcaacgugcagagacugaugagaaagcagagaagagacgacagcgaccugaagagacugagagaccugaaccaggccgugaacaaccugguggagcugaagagcacccagcagaagagcgugcugagagugggcacccugagcagcgacgaccugcugacccuggccgccgaccuggagaagcugaagagcaaggugaccagaaccgagagaccccugagcagcggcguguacaugggcaaccugagcagccagcagcuggaccagagaagagcccugcugaaccugaucggcaugaccaacggcagccagggcagccaggccggcagagacggcguggugagagugugggacgugaagaacgccgagcugcugaacaaccaguucggcaccaugcccagccugacccuggccugccugaccaagcagggccagguggaccugaacgacguggugcaggcccugaccgaccugggccugaucuacaccgccaaguaccccaacaccagcgaccuggacagacugacccagagccaccccauccugaacaugaucgacaccaagaagagcagccugaacaucagcggcuacaacuucagccugggcgccgccgugaaggccggcgccugcaugcuggacggcggcaacaugcuggagaccaucaaggugagcccccagagcauggacggcauccugaagagcauccugaaggugaagagagcccugggcauguucgugagcgacacccccggcgagagaaaccccuacgagaacauccuguacaagaucugccugagcggcgacggcuggcccuacaucgccagcagaaccagcaucgugggcagagccugggagaacaccgugguggaccuggagaccgacggcaagccccagaagaucggcagcggcaacagcaacaagagccugcagagcgccggcuucagcgccggccugaccuacagccagcugaugacccugaaggacgccaugcugcagcuggaccccaacgccaagaccuggauggacaucgagggcagacccgaggaccccguggagguggcccuguaccagcccaucagcggcugcuacauccacuucuucagagagcccaccgaccugaagcaguucaagcaggacgccaaguacagccacggcaucgacaucgccgaccuguucgccgcccagcccggccugaccagcgccgugaucgaggcccugcccagaaacauggugaucaccugccagggcagcgaggacaucaagaagcugcuggagagccagggcagaaaggacaucaagcugaucgacaucgcccugagcaagaucgacagcagaaaguucgagaacgccgugugggaccaguacaaggaccugugccacaugcacaccggcguggugguggagaagaagaagagaggcggcaaggaggagaucaccccccacugcgcccugauggacugcaucauguucgacgccgccgugagcggcggccugaacacccuggugcugagagccgugcugcccagagacaugguguucagaaccagcacccccagaguggugcugugaggacuaguaauaaggaaacuguaugaaugucugugggcaggaagugaagagauccuucuguaaagguuuuuggaauuaugucugcugaauaauaaacuuuuuugaaauaauaaaucugguagaaaaaugagaucucaaaggcucuuuucagagccaccaaaaaaaaaaaaaaaaaaaaaaaaaaaaaaaaaaaaaaaaaaaaaaaaaaaaaaaaaaaaaaaaaaaaaaaaaaaaaaaaaaaaaaaaaaaaaaaaaaaaa

SEQ ID NO: 17497 - RNA, 2046 nt, Artificial Sequence
  mRNA product Design b-4 (hSL-A100) comprising derived and/or modified sequence from LASV(Togo/2016/7082;Clade VI)__AMR44578__NP (opt4)
aggagagucccgcagucggcguccagcggcucugcuuguucgugugugugucguugcaggccuuauucaagcuuaccaugagcaacagcaaggaggugaagagcuuccuguggacccagagccugagaagagagcugagcggcuacugcagcaacaucaagcugcagguggugaaggacgcccaggcccugcugcacggccuggacuucagcgaggugagcaacgugcagagacugaugagaaagcagaagagagacgacggcgaccugaagagacugagagaccugaaccaggccgugaacaaccugguggagcugaagagcgugcagcagaagagcauccugagagugggcacccugaccagcgacgaccugcugacccuggccgccgaccuggagaagcugaagagcaaggugaccagaaccgagagaccccugagcagcggcguguacaugggcaaccugagcagccagcagcuggaccagagaagagcccugcugagcaugaucggcaugagcggcggcaaccagaacagccagcccaagggcgacggcguggugagagugugggacgugaagaacgccgaccugcugaacaaccaguucggcaccaugcccagccugacccuggccugccugaccaagcagggccagguggaccugaacgacgccgugcaggcccugaccgaccugggccugaucuacaccgccaaguaccccaacagcagcgaccuggacagacugagccagagccaccccauccugaacaugaucgacaccaagaagagcagccugaacaucagcggcuacaacuucagccugggcgccgccaucaagaccggcgccugcaugcuggacggcggcaacaugcuggagaccaucaaggugaccccccagaccauggacggcauccugaagagcauccugaaggugaagagaagccugggcauguucaucagcgacacccccggcgagagaaaccccuacgagaacauccuguacaagaucugccugagcggcgacggcuggcccuacaucgccagcagaaccgccaucaucggcagagccugggagaacaccgugguggaccuggagagcgacagcaagccccagaagaucggcagcaacggcagcaacaagagccugcagagcgccggcuucgcccccggccugaccuacagccagcugaugacccugaaggacagcaugcugcagcuggaccccaacgccaagaccuggaucgacaucgagggcagacccgaggaccccguggagguggcccuguuccagcccaucagcggcugcuacauccacuucuucagagagcccaccgaccugaagcaguucaagcaggacgccaaguacagccacggcaucgacgugaccgaccuguucgccgcccagcccggccugaccagcgccgugaucgaggcccugcccagaaacauggugcugaccugccagggcagcgacgacaucaagaagcugcuggacagccagggcagaagagacaucaagcugaucgacgugagccugaacaagaucgacagcagaaaguucgagaacgccgugugggaccaguacaaggaccugugccacaugcacaccggcguggugguggagaagaagaagaagggcggcaaggaggagaucaccccccacugcgcccugcuggacugcaucauguucgacgccgccgugagcggcggccugaacgccaccgugcugagagccgugcugcccagagacaugguguucagaaccagcagccccaagguggugcugugaggacuaguaauaaggaaacuguaugaaugucugugggcaggaagugaagagauccuucuguaaagguuuuuggaauuaugucugcugaauaauaaacuuuuuugaaauaauaaaucugguagaaaaaugagaucucaaaggcucuuuucagagccaccaaaaaaaaaaaaaaaaaaaaaaaaaaaaaaaaaaaaaaaaaaaaaaaaaaaaaaaaaaaaaaaaaaaaaaaaaaaaaaaaaaaaaaaaaaaaaaaaaaaaa

SEQ ID NO: 17498 - RNA, 2046 nt, Artificial Sequence
  mRNA product Design b-4 (hSL-A100) comprising derived and/or modified sequence from LASV(KAK-428;Clade n.d. (VII))__ANH09741__NP (opt4)
aggagagucccgcagucggcguccagcggcucugcuuguucgugugugugucguugcaggccuuauucaagcuuaccaugagcaacagcaaggaggugaagagcuuccuguggacccagagccugagaagagagcugagcggcuacugcaccaacaucaagcugcagguggugaaggacgcccaggcccugcugcacggccuggacuucagcgaggugagcaacgugcagagacugaugagaaagcagaagagagacgacaacgaccugaagagacugagagaccugaaccaggccgugaacaaccugguggagcugaagagcgugcagcagaagagcgugcugaaggugggcacccugaacagcgacgaccugcugacccuggccgccgaccuggagaagcugaagagcaagguggugagaaccgagagaccccugagcagcggcguguacaugggcaaccugagcagccagcagcuggaccagagaagagcccugcugaacaugaucggcauggccggcggcagccagggcaaccagcccagcagagacggcguggugagagugugggacgugaagaacgccgaccugcugaacaaccaguucggcaccaugcccagccugacccuggccugccugaccaagcagggccagguggaccugaacgacguggugcuggcccugaccgaccugggccugaucuacaccgccaaguaccccaacagcagcgaccuggacagacugagccagaaccaccccgugcugaacaugaucgacgugaacaagagcagccugaacaucagcggcuacaacuucagccugggcgccgccgugaaggccggcgccugcaugcuggacggcggcaacaugcuggagaccaucaagaucagcccccagaccguggacggcauccugaagagcauccugaaggugaagagagcccugggcauguucgugagcgacacccccggcgagagaaaccccuacgagaacauccuguacaaggugugccugagcggcaacggcuggcccuacaucgccagcagaaccagcaucgugggcagagccugggagaacaccgugguggaccuggagagcaacaagaaccagcccaaggugggcaacaacggcagcaacaagaugcugcagagcagcggcuucgccaccggccugaccuacagccagcugaugacccugagagacagcaugcugcagcuggaccccaccgccaagaccuggaucgacaucgagggcagacccgaggaccccguggagcuggcccuguuccagcccagcagcggcugcuacauccacuucuucagagagcccaccgaccugaagcaguucaagcaggacgccaaguacagccacggcaucgacgugaacgaccuguucagcgcccagcccggccugaccagcgccgugcuggaggcccugcccagaaacauggugcugaccugccagggcagcgacgacaucagaaagcugcuggacagccaggacagaaaggacaucaagcugaucgacaucagccugagcaaggccgacgccagaaaguucgagaacgacgugugggaccaguucaaggaccugugccacaugcacaccggcaucgugguggagaagaagaagaagggcggcaagcaggagaugaccccccacugcgcccugcuggacugcaucauguucgacgccgccgugagcggcggccugaacgugcccacccugagagccgugcugcccaccgacaugguguucagaaccaucaccaccaagguggugcugugaggacuaguaauaaggaaacuguaugaaugucugugggcaggaagugaagagauccuucuguaaagguuuuuggaauuaugucugcugaauaauaaacuuuuuugaaauaauaaaucugguagaaaaaugagaucucaaaggcucuuuucagagccaccaaaaaaaaaaaaaaaaaaaaaaaaaaaaaaaaaaaaaaaaaaaaaaaaaaaaaaaaaaaaaaaaaaaaaaaaaaaaaaaaaaaaaaaaaaaaaaaaaaaaa

SEQ ID NO: 17499 - RNA, 2046 nt, Artificial Sequence; identical to SEQ ID NO: 17493
  mRNA product Design b-4 (hSL-A100) comprising derived and/or modified sequence from LASV(Pinneo-NIG-1969;Clade I)__AIT17837__NP (opt4)

SEQ ID NO: 17500 - RNA, 2046 nt, Artificial Sequence
  mRNA product Design b-4 (hSL-A100) comprising derived and/or modified sequence from LASV(ISTH0009-NIG-2011;Clade II)__AIT17405__NP (opt4)
aggagagucccgcagucggcguccagcggcucugcuuguucgugugugugucguugcaggccuuauucaagcuuaccaugagcgugagcaaggaggugaagagcuuccuguggacccagagccugagaagagagcugagcggcuacugcagcaacaucaagcugcagguggugaaggacgcccaggcccugcugcacggccuggacuucagcgaggugagcaacgugcagagacugaugagaaagcagaagagagacgacagcgaccugaagagacugagagaccugaaccaggccgugaacaaccugguggagcugaagagcacccagcagaagagcauccugagagugggcacccugaccagcgacgaccugcugacccuggccgccgaccuggagaagcugaagagcaaggugaucagaaccgagagaccccugagcagcggcguguacaugggcaaccugagcacccagcagcuggagcagagaagagcccugcugaacaugaucggcauggugggcggcgcccagggcacccagcccggcagagacggcguggugagagugugggacgugaagaaccccgaccugcugaacaaccaguucggcaccaugcccagccugacccuggccugccugaccaagcagggccagguggaccugaacgacgccgugcuggcccugaccgaccugggccugaucuacaccgccaaguaccccaacagcagcgaccuggacagacugagccagagccaccccauccugaacaugguggacaucaagaagagcagccugaacaucagcggcuacaacuucagccugggcgccgccgugaaggccggcgccugcaugcuggacggcggcaacaugcuggagaccaucaaggugaccccccagaccauggacggcauccugaagagcauccugaaggugaagagaagccugggcauguucgugagcgacacccccggcgagagaaaccccuacgagaacauccuguacaagaucugccugagcggcgacggcuggcccuacaucgccagcagaaccagcaucgugggcagagccugggagaacaccaccguggaccuggagagcgacggcaagccccagaaggugggcagcgccggcagcaacaagagccugcagagcgccggcuuccccaccggccugaccuacagccagcugaugacccugaaggacagcaugaugcagcuggaccccagcgccaagaccuggaucgacaucgagggcagacccgaggaccccguggagaucgcccuguaccagcccaugagcggcugcuacauccacuucuucagagagcccaccgaccugaagcaguucaagcaggacgccaaguacagccacggcaucgacguggccgaccuguuccccgcccagcccggccugaccagcgccgugaucgaggcccugcccagaaacauggugcugaccugccagggcagcgacgacaucaagagacugcuggacagccagggcagaagagacaucaagcugaucgacaucgcccugagcaaggccgacagcagaagauucgagaacgccgugugggaccagugcaaggaccugugccacaugcacaccggcguggugguggagaagaagaagagaggcggcaaggaggagaucaccccccacugcgcccugauggacugcaucauguacgacgccgccgugagcggcggccugaacauccccgugcugagagccgugcugcccagagacaugguguucagaaccagcagccccaagguggugcugugaggacuaguaauaaggaaacuguaugaaugucugugggcaggaagugaagagauccuucuguaaagguuuuuggaauuaugucugcugaauaauaaacuuuuuugaaauaauaaaucugguagaaaaaugagaucucaaaggcucuuuucagagccaccaaaaaaaaaaaaaaaaaaaaaaaaaaaaaaaaaaaaaaaaaaaaaaaaaaaaaaaaaaaaaaaaaaaaaaaaaaaaaaaaaaaaaaaaaaaaaaaaaaaaa

SEQ ID NO: 17501 - RNA, 2046 nt, Artificial Sequence
  mRNA product Design b-4 (hSL-A100) comprising derived and/or modified sequence from LASV(ISTH2010-NIG-2012;Clade II)__AIT17483__NP (opt4)
aggagagucccgcagucggcguccagcggcucugcuuguucgugugugugucguugcaggccuuauucaagcuuaccaugagcgccagcaaggaggugaagagcuuccuguggacccagagccugagaagagagcugagcggcuacugcagcaacaucaagcugcagguggugaaggacgcccaggcccugcugcacggccuggacuucagcgaggugagcaacgugcagagacugaugagaaagcagaagagagacgacagcgaccugaagagacugagagaccugaaccaggccgugaacaaccugguggagcugaagagcacccagcagaagagcauccugagagugggcacccugaccagcgacgaccugcugacccuggccgccgaccuggagaagcugaagagcaaggugaucagaaccgagagaccccugagcagcggcguguacaugggcaaccugagcacccagcagcuggagcagagaagagcccugcugaaccugaucggcauggugggcggcgcccagggcacccagcccggcagagacggcguggugagagugugggacgugaagaaccccgaccugcugaacaaccaguucggcaccaugcccagccugacccuggccugccugaccaagcagggccagguggaccugaacgacgccgugcuggcccugaccgaccugggccugaucuacaccgccaaguaccccaacagcagcgaccuggacagacugagccagagccaccccauccugaacaugguggacaccaagaagagcagccugaacaucagcggcuucaacuucagccugggcgccgccgugaaggccggcgccugcaugcuggacggcggcaacaugcuggagaccaucaaggugaccccccagaccauggacggcauccugaagagcauccugaaggugaagaagagccugggcauguucgugagcgacacccccggcgagagaaaccccuacgagaacauccuguacaagaucugccugagcggcgacggcuggcccuacaucgccagcagaaccagcaucgugggcagagccugggagaacaccaccguggaccuggagagcgacggcaagccccacaaggugggcaccgccggcagcaacaagagccugcagagcgccggcuuccccaccggccugaccuacagccagcugaugacccugaaggacagcaugaugcagcuggaccccagcgccaagaccuggaucgacaucgagggcagacccgaggaccccguggagaucgcccuguaccagcccaugagcggcugcuacauccacuucuucagagagcccaccgaccugaagcaguucaagcaggacgccaaguacagccacggcaucgacguggccgaccuguuccccgcccagcccggccugaccagcgccgugaucgaggcccugcccagaaacauggugcugaccugccagggcagcgacgacaucaagagacugcuggacagccagggcagaagagacaucaagcugaucgacaucgcccugagcaaggccgacagcagaagauucgagaacgccgugugggaccagugcaaggaccugugccacaugcacaccggcguggugguggagaagaagaagagaggcggcaaggaggagaucaccccccacugcgcccugauggacugcaucauguacgacgccgccgugagcggcggccugaacauccccgugcugagagccgugcugcccagagacaugguguucagaaccagcagccccaagguggugcugugaggacuaguaauaaggaaacuguaugaaugucugugggcaggaagugaagagauccuucuguaaagguuuuuggaauuaugucugcugaauaauaaacuuuuuugaaauaauaaaucugguagaaaaaugagaucucaaaggcucuuuucagagccaccaaaaaaaaaaaaaaaaaaaaaaaaaaaaaaaaaaaaaaaaaaaaaaaaaaaaaaaaaaaaaaaaaaaaaaaaaaaaaaaaaaaaaaaaaaaaaaaaaaaaa

SEQ ID NO: 17502 - RNA, 2046 nt, Artificial Sequence
  mRNA product Design b-4 (hSL-A100) comprising derived and/or modified sequence from LASV(Lassa virus/H.sapiens-wt/NGA/2015/ISTH_0543;Clade II)__AVO03640__NP (opt4)
aggagagucccgcagucggcguccagcggcucugcuuguucgugugugugucguugcaggccuuauucaagcuuaccaugagcgccagcaaggaggugaagagcuuccuguggacccagagccugagaagagagcugagcggcuacugcagcaacaucaagcugcagguggugaaggacgcccaggcccugcugcacggccuggacuucagcgaggugagcaacgugcagagacugaugagaaagcagaagagagacgacagcgaccugaagagacugagagaccugaaccaggccgugaacaaccugguggagcugaagagcacccagcagaagagcauccugagagugggcacccugaccagcgacgaccugcugacccuggccgccgaccuggagaagcugaagagcaaggugaucagaaccgagagaccccugagcagcggcguguacaugggcaaccugagcacccagcagcuggagcagagaagagcccugcugaacaugaucggcauggugggcggcgcccagggcacccagcccggcagagacggcguggugagagugugggacgugaagaaccccgaccugcugaacaaccaguucggcaccaugcccagccugacccuggccugccugaccaagcagggccagguggaccugaacgacgccgugcuggcccugaccgaccugggccugaucuacaccgccaaguaccccaacagcagcgaccuggacagacugagccagagccaccccauccugaacaugguggacaccaagaagagcagccugaacaucagcggcuacaacuucagccugggcgccgccgugaaggccggcgccugcaugcuggacggcggcaacaugcuggagaccaucaaggugaccccccagaccauggacggcauccugaagagcauccugaaggugaagaagagccugggcauguucgugagcgacacccccggcgagagaaaccccuacgagaacauccuguacaagaucugccugagcggcgacggcuggcccuacaucgccagcagaaccagcaucgugggcagagccugggagaacaccaccguggaccuggagagcgacggcaagccccagaaggugggcagcgccggcagcaacaagagccugcagagcgccggcuuccccaccggccugaccuacagccagcugaugacccugaaggacagcaugaugcagcuggaccccagcgccaagaccuggaucgacaucgagggcagacccgaggaccccguggagaucgcccuguaccagcccaugagcggcugcuacauccacuucuucagagagcccaccgaccugaagcaguucaagcaggacgccaaguacagccacggcaucgacguggccgaccuguuccccgcccagcccggccugaccagcgccgugaucgaggcccugcccagaaacauggugcugaccugccagggcagcgacgacaucaagagacugcuggacagccagggcagaaaggacaucaagcugaucgacaucgcccugagcaaggccgacagcagaagauucgagaacgccgugugggaccagugcaaggaccugugccacaugcacaccggcguggugguggagaagaagaagagaggcggcaaggaggagaucaccccccacugcgcccugauggacugcaucauguacgacgccgccgugagcggcggccugaacauccccgugcugagagccgugcugcccagagacaugguguucagaaccagcagccccaagguggugcugugaggacuaguaauaaggaaacuguaugaaugucugugggcaggaagugaagagauccuucuguaaagguuuuuggaauuaugucugcugaauaauaaacuuuuuugaaauaauaaaucugguagaaaaaugagaucucaaaggcucuuuucagagccaccaaaaaaaaaaaaaaaaaaaaaaaaaaaaaaaaaaaaaaaaaaaaaaaaaaaaaaaaaaaaaaaaaaaaaaaaaaaaaaaaaaaaaaaaaaaaaaaaaaaaa

SEQ ID NO: 17503 - RNA, 2046 nt, Artificial Sequence
  mRNA product Design b-4 (hSL-A100) comprising derived and/or modified sequence from LASV(Lassa virus/H.sapiens-wt/NGA/2016/ISTH_0009;Clade II)__AVO03572__NP (opt4)
aggagagucccgcagucggcguccagcggcucugcuuguucgugugugugucguugcaggccuuauucaagcuuaccaugagcgccagcaaggaggugaagagcuuccuguggacccagagccugagaagagagcugagcggcuacugcagcaacaucaagcugcagguggugaaggacgcccaggcccugcugcacggccuggacuucagcgaggugagcaacgugcagagacugaugagaaagcagaagagagacgacagcgaccugaagagacugagagaccugaaccaggccgugaacaaccugguggagcugaagagcacccagcagaagagcauccugagagugggcacccugaccagcgacgaccugcugacccuggccgccgaccuggagaagcugaagagcaaggugaucagaaccgagagaccccugagcagcggcguguacaugggcaaccugagcacccagcagcuggagcagagaagagcccugcugaacaugaucggcauggugggcggcgcccagggcacccagcccggcagagacggcguggugagagugugggacgugaagaaccccgaccugcugaacaaccaguucggcaccaugcccagccugacccuggccugccugaccaagcagggccagguggaccugaacgacgccgugcuggcccugaccgaccugggccugaucuacaccgccaaguaccccaacagcagcgaccuggacagacugagccagagccaccccauccugaacaugguggacaccaagaagagcagccugaacaucagcggcuacaacuucagccugggcgccgccgugaaggccggcgccugcaugcuggacggcggcaacaugcuggagaccaucaaggugaccccccagaccauggacggcauccugaagagcauccugaaggugaagaagagccugggcauguucgugagcgacacccccggcgagagaaaccccuacgagaacauccuguacaagaucugccugagcggcgacggcuggcccuacaucgccagcagaaccagcaucgugggcagagccugggagaacaccaccguggaccuggagagcgacggcaagccccagaaggugggcagcgccggcagcaacaagagccugcagagcgccggcuuccccaccggccugaccuacagccagcugaugacccugaaggacagcaugaugcagcuggaccccagcgccaagaccuggaucgacaucgagggcagacccgaggaccccguggagaucgcccuguaccagcccaugagcggcugcuacauccacuucuucagagagcccaccgaccugaagcaguucaagcaggacgccaaguacagccacggcaucgacguggccgaccuguuccccgcccagcccggccugaccagcgccgugaucgaggcccugcccagaaacauggugcugaccugccagggcagcgacgacaucaagagacugcuggacagccagggcagaagagacaucaagcugaucgacaucgcccugagcaaggccgacagcagaagauucgagaacgccgugugggaccagugcaaggaccugugccacaugcacaccggcguggugguggagaagaagaagagaggcggcaaggaggagaucaccccccacugcgcccugauggacugcaucauguacgacgccgccgugagcggcggccugaacauccccgugcugagagccgugcugcccagagacaugguguucagaaccagcagccccaagguggugcugugaggacuaguaauaaggaaacuguaugaaugucugugggcaggaagugaagagauccuucuguaaagguuuuuggaauuaugucugcugaauaauaaacuuuuuugaaauaauaaaucugguagaaaaaugagaucucaaaggcucuuuucagagccaccaaaaaaaaaaaaaaaaaaaaaaaaaaaaaaaaaaaaaaaaaaaaaaaaaaaaaaaaaaaaaaaaaaaaaaaaaaaaaaaaaaaaaaaaaaaaaaaaaaaaa

SEQ ID NO: 17504 - RNA, 2046 nt, Artificial Sequence
  mRNA product Design b-4 (hSL-A100) comprising derived and/or modified sequence from LASV(Lassa virus/H.sapiens-wt/NGA/2016/ISTH_0017;Clade II)__AVO03568__NP (opt4)
aggagagucccgcagucggcguccagcggcucugcuuguucgugugugugucguugcaggccuuauucaagcuuaccaugagcgccagcaaggaggugaagagcuuccuguggacccagagccugagaagagagcugagcggcuacugcagcagcaucaagcugcagguggugaaggacgcccaggcccugcugcacggccuggacuucagcgaggugagcaacgugcagagacugaugagaaagcagaagagagacgacagcgaccugaagagacugagagaccugaaccaggccgugaacaaccugguggagcugaagagcacccagcagaagagcauccugagagugggcacccugaccagcgacgaccugcugacccuggccgccgaccuggagaagcugaagagcaaggugaucagaaccgagagaccccugagcagcggcguguacaugggcaaccugagcacccagcagcuggagcagagaagagcccugcugaacaugaucggcauggccggcggcgcccagggcacccagcccggcagagacggcguggugagagugugggacgugaagaaccccgaccugcugaacaaccaguucggcaccaugcccagccugacccuggccugccugaccaagcagggccagguggaccugaacgacgccgugcuggcccugaccgaccugggccugaucuacaccgccaaguaccccaacagcagcgaccuggacagacugagccagagccaccccauccugaacaugguggacaccaagaagagcagccugaacaucagcggcuacaacuucagccugggcgccgccgugaaggccggcgccugcaugcuggacggcggcaacaugcuggagaccaucaaggugaccccccagaccauggacggcauccugaagagcauccugaaggugaagagaagccugggcauguucgugagcgacgcccccggcgagagaaaccccuacgagaacauccuguacaagaucugccugagcggcgacggcuggcccuacaucgccagcagaaccagcaucgugggcagagccugggagaacaccaccguggaccuggagagcgacggcaagccccagaaggugggcgccaccggcagcaacaagagccugcagagcgccggcuuccccaccggccugaccuacagccagcugaugacccugaaggacagcaugaugcagcuggaccccagcgccaagaccuggaucgacaucgagggcagacccgaggaccccguggagguggcccuguaccagcccgugagcggcugcuacauccacuucuucagagagcccaccgaccugaagcaguucaagcaggacgccaaguacagccacggcaucgacguggccgaccuguuccccgcccagcccggccugaccagcgccgugaucgaggcccugcccagaaacauggugcugaccugccagggcagcgacgacaucaagaagcugcuggacagccagggcagaaaggacaucaagcugaucgacaucgcccugagcaaggccgacagcagaagauucgagaacgccgugugggaccagugcaaggaccugugccacaugcacaccggcguggugguggagaagaagaagagaggcggcaaggaggagaucaccccccacugcgcccugauggacugcaucauguacgacgccgccgugagcggcggccugaacauccccgugcugagagccgugcugcccagagacaugguguucagaaccagcagccccaagguggugcugugaggacuaguaauaaggaaacuguaugaaugucugugggcaggaagugaagagauccuucuguaaagguuuuuggaauuaugucugcugaauaauaaacuuuuuugaaauaauaaaucugguagaaaaaugagaucucaaaggcucuuuucagagccaccaaaaaaaaaaaaaaaaaaaaaaaaaaaaaaaaaaaaaaaaaaaaaaaaaaaaaaaaaaaaaaaaaaaaaaaaaaaaaaaaaaaaaaaaaaaaaaaaaaaaa

SEQ ID NO: 17505 - RNA, 2046 nt, Artificial Sequence
  mRNA product Design b-4 (hSL-A100) comprising derived and/or modified sequence from LASV(Lassa virus/H.sapiens-wt/NGA/2018/ISTH_0959;Clade II)__AVV65100__NP (opt4)
aggagagucccgcagucggcguccagcggcucugcuuguucgugugugugucguugcaggccuuauucaagcuuaccaugagcgccagcaaggaggugaagagcuuccuguggacccagagccugagaagagagcugagcggcuacugcagcaacaucaagcugcagguggugaaggacgcccaggcccugcugcacggccuggacuucagcgaggugagcaacgugcagagacugaugagaaagcagaagagagacgacagcgaccugaagagacugagagaccugaaccaggccgugaacaaccugguggagcugaagagcacccagcagaagagcauccugagagugggcacccugaccagcgacgaccugcugacccuggccgccgaccuggagaagcugaagagcaaggugaucagaaccgagagaccccugagcagcggcguguacaugggcaaccugagcacccagcagcuggagcagagaagagcccugcugaaccugaucggcauggugggcggcgcccagggcacccagcccggcagagacggcguggugagagugugggacgugaagaaccccgaccugcugaacaaccaguucggcaccaugcccagccugacccuggccugccugaccaagcagggccagguggaccugaacgacguggugcuggcccugaccgaccugggccugaucuacaccgccaaguaccccaacagcagcgaccuggacagacugagccagagccaccccauccugaacaugguggacaccaagaagagcagccugaacaucagcggcuucaacuucagccugggcgccgccgugaaggccggcgccugcaugcuggacggcggcaacaugcuggagaccaucaaggugaccccccagaccauggacggcauccugaagagcauccugaaggugaagaagagccugggcauguucgugagcgacacccccggcgagagaaaccccuacgagaacauccuguacaagaucugccugagcggcgacggcuggcccuacaucgccagcagaaccagcaucgugggcagagccugggagaacaccaccguggaccuggagagcgacggcaagccccacaaggugggcaccgccggcagcaacaagagccugcagagcgccggcuuccccaccggccugaccuacagccagcugaugacccugaaggacagcaugaugcagcuggaccccagcgccaagaccuggaucgacaucgagggcagacccgaggaccccguggagaucgcccuguaccagcccaugagcggcugcuacauccacuucuucagagagcccaccgaccugaagcaguucaagcaggacgccaaguacagccacggcaucgacguggccgaccuguuccccgcccagcccggccugaccagcgccgugaucgaggcccugcccagaaacauggugcugaccugccagggcagcgacgacaucaagagacugcuggacagccagggcagaaaggacaucaagcugaucgacaucgcccugagcaagaccgacagcagaagauucgagaacgccgugugggaccagugcaaggaccugugccacaugcacaccggcguggugguggagaagaagaagagaggcggcaaggaggagaucaccccccacugcgcccugauggacugcaucauguacgacgccgccgugagcggcggccugaacauccccgugcugagagccgugcugcccagagacaugguguucagaaccagcagccccaagguggugcugugaggacuaguaauaaggaaacuguaugaaugucugugggcaggaagugaagagauccuucuguaaagguuuuuggaauuaugucugcugaauaauaaacuuuuuugaaauaauaaaucugguagaaaaaugagaucucaaaggcucuuuucagagccaccaaaaaaaaaaaaaaaaaaaaaaaaaaaaaaaaaaaaaaaaaaaaaaaaaaaaaaaaaaaaaaaaaaaaaaaaaaaaaaaaaaaaaaaaaaaaaaaaaaaaa

SEQ ID NO: 17506 - RNA, 2046 nt, Artificial Sequence
  mRNA product Design b-4 (hSL-A100) comprising derived and/or modified sequence from LASV(LASV003-NIG-2008;Clade II)__AIT17581__NP (opt4)
aggagagucccgcagucggcguccagcggcucugcuuguucgugugugugucguugcaggccuuauucaagcuuaccaugagcgccagcaaggaggugaagagcuuccuguggacccagagccugagaagagagcugagcggcuacugcagcagcaucaagcugcagguggugaaggacgcccaggcccugcugcacggccuggacuucagcgaggugagcaacgugcagagacugaugagaaagcagaagagagacgacagcgaccugaagagacugagagaccugaaccaggccgugaacaaccugguggagcugaagagcacccagcagaagagcgugcugagagugggcacccugaccagcgacgaccugcugacccuggccgccgaccuggagaagcugaagagcaaggugaucagaaccgagagaccccugagcagcggcguguacaugggcaaccugagcgcccagcagcuggagcagagaagaacccugcugaacaugaucggcauggugggcggcgcccagggcacccagcccggcagagacggcguggugagagugugggacgugaagaaccccgaccugcugaacaaccaguucggcaccaugcccagccugacccuggccugccugaccaagcagggccagguggaccugaacgacguggugcuggcccugaccgaccugggccugaucuacaccgccaaguaccccaacagcagcgaccuggacagacugagccagagccaccccauccugagcaugguggacaccaagaagagcagccugaacaucagcggcuacaacuucagccugggcgccgccgugaaggccggcgccugcaugcuggacggcggcaacaugcuggagaccaucaaggugaccccccagaccauggacggcauccugaagagcauccugaaggugaagaagagccugggcauguucgugagcgacacccccggcgagagaaaccccuacgagaacauccuguacaagaucugccugagcggcgacggcuggcccuacaucgccagcagaaccagcaucgugggcagagccugggagaacaccaccguggaccuggagagcgacggcaagccccagaaggugggcaccgccggcagcaacaagagccugcagagcgccggcuuccccaccggccugaccuacagccagcugaugacccugaaggacagcaugaugcagcuggaccccagcgccaagaccuggaucgacaucgagggcagacccgaggaccccguggagaucgcccuguaccagcccaugagcggcugcuacauccacuucuucagagagcccaccgaccugaagcaguucaagcaggacgccaaguacagccacggcaucgacgugaccgaccuguuccccgcccagcccggccugaccagcgccgugaucgaggcccugcccagaaacauggugcugaccugccagggcagcgacgacaucaagagacugcuggacagccagggcagaagagacaucaagcugaucgacaucgcccugagcaaggccgacagcagaagauucgagaacgccgugugggaccagugcaaggaccugugccacaugcacaccggcguggugguggagaagaagaagagaggcggcaaggaggagaucaccccccacugcgcccugauggacugcaucauguacgacgccgccgugagcggcggccugaacauccccgugcugagagccgugcugcccagagacaugguguucagaaccagcagccccaagguggugcugugaggacuaguaauaaggaaacuguaugaaugucugugggcaggaagugaagagauccuucuguaaagguuuuuggaauuaugucugcugaauaauaaacuuuuuugaaauaauaaaucugguagaaaaaugagaucucaaaggcucuuuucagagccaccaaaaaaaaaaaaaaaaaaaaaaaaaaaaaaaaaaaaaaaaaaaaaaaaaaaaaaaaaaaaaaaaaaaaaaaaaaaaaaaaaaaaaaaaaaaaaaaaaaaaa

SEQ ID NO: 17507 - RNA, 2046 nt, Artificial Sequence
  mRNA product Design b-4 (hSL-A100) comprising derived and/or modified sequence from LASV(LASV035-NIG-2009;Clade II)__AIT17589__NP (opt4)
aggagagucccgcagucggcguccagcggcucugcuuguucgugugugugucguugcaggccuuauucaagcuuaccaugagcgccagcaaggaggugaagagcuuccuguggacccagagccugagaagagagcugagcggcuacugcagcagcaucaagcugcagguggugaaggacgcccaggcccugcugcacggccuggacuucagcgaggugagcaacgugcagagacugaugagaaagcagaagagagacgacagcgaccugaagagacugagagaccugaaccaggccgugaacaaccugguggagcugaagagcacccagcagaagagcauccugagagugggcacccugaccagcgacgaccugcugacccuggccgccgaccuggagaagcugaagagcaaggugaucagaaccgagagaccccugagcagcggcguguacaugggcaaccugagcgcccagcagcuggagcagagaagagcccugcugaacaugaucggcauggugggcggcgcccagggcacccagcccggcagagacggcguggugagagugugggacgugaagaaccccgaccugcugaacaaccaguucggcaccaugcccagccugacccuggccugccugaccaagcagggccagguggaccugaacgacgccgugcuggcccugaccgaccugggccugaucuacaccgccaaguaccccaacagcagcgaccuggacagacugagccagagccaccccauccugaacaugguggacaccaagaagagcagccugaacaucagcggcuacaacuucagccugggcgccgccgugaaggccggcgccugcaugcuggacggcggcaacaugcuggagaccaucaaggugaccccccagaccauggacggcauccugaagagcauccugaaggugaagagaagccugggcauguucgugagcgacacccccggcgagagaaaccccuacgagaacauccuguacaagaucugccugagcggcgacggcuggcccuacaucgccagcagaaccagcaucgugggcagagccugggagaacaccaccguggaccuggagagcgacggcaagccccagaaggugggcaccaccggcagcaacaagagccugcagagcgccggcuuccccaccggccugaccuacagccagcugaugacccugaaggacagcaugaugcagcuggaccccagcgccaagaccuggaucgacaucgagggcagacccgaggaccccguggagaucgcccuguaccagcccaugagcggcugcuacauccacuucuucagagagcccaccgaccugaagcaguucaagcaggacgccaaguacagccacggcaucgacguggccgaccuguuccccgcccagcccggccugaccagcgccgugaucgaggcccugcccagaaacauggugcugaccugccagggcagcgacgacaucaagaagcugcuggacagccagggcagaagagacaucaagcugaucgacaucgcccugagcaaggccgacagcagaaaguucgagaacgccgugugggaccagugcaaggaccugugccacaugcacaccggcguggugguggagaagaagaagagaggcggcaaggaggagaucaccccccacugcgcccugauggacugcaucauguacgacgccgccgugagcggcggccugaacauccccgugcugagagccgugcugcccagagacaugguguucagaaccagcagccccaagguggugcugugaggacuaguaauaaggaaacuguaugaaugucugugggcaggaagugaagagauccuucuguaaagguuuuuggaauuaugucugcugaauaauaaacuuuuuugaaauaauaaaucugguagaaaaaugagaucucaaaggcucuuuucagagccaccaaaaaaaaaaaaaaaaaaaaaaaaaaaaaaaaaaaaaaaaaaaaaaaaaaaaaaaaaaaaaaaaaaaaaaaaaaaaaaaaaaaaaaaaaaaaaaaaaaaaa

SEQ ID NO: 17508 - RNA, 2046 nt, Artificial Sequence
  mRNA product Design b-4 (hSL-A100) comprising derived and/or modified sequence from LASV(LASV1000-NIG-2009;Clade II)__AIT17783__NP (opt4)
aggagagucccgcagucggcguccagcggcucugcuuguucgugugugugucguugcaggccuuauucaagcuuaccaugagcgccagcaaggaggugaagagcuuccuguggacccagagccugagaagagagcugagcggcuacugcagcaacaucaagcugcagguggugaaggacgcccaggcccugcugcacggccuggacuucagcgaggugagcaacgugcagagacugaugagaaagcagaagagagacgacagcgaccugaagagacugagagaccugaaccaggccgugaacaaccugguggagcugaagagcacccagcagaagagcauccugagagugggcacccugaccagcgacgaccugcugacccuggccgccgaccuggagaagcugaagagcaaggugaucagaaccgagagaccccugagcagcggcguguacaugggcaaccugagcacccagcagcuggagcagagaagagcccugcugaacaugaucggcauggugggcggcgcccagggcacccagcccggcagagacggcguggugagagugugggacgugaagaaccccgaccugcugaacaaccaguucggcaccaugcccagccugacccuggccugccugaccaagcagggccagguggaccugaacgacguggugcuggcccugaccgaccugggccugaucuacaccgccaaguaccccaacagcagcgaccuggacagacugagccagagccaccccauccugaacaugguggacaccaagaagagcagccugaacaucagcggcuacaacuucagccugggcgccgccgugaaggccggcgccugcaugcuggacggcggcaacaugcuggagaccaucaaggugaccccccagaccauggacggcauccugaagagcauccugaaggugaagaagagccugggcauguucgugagcgacacccccggcgagagaaaccccuacgagaacauccuguacaagaucugccugagcggcgacggcuggcccuacaucgccagcagaaccagcaucgugggcagagccugggagaacaccaccguggaccuggagagcgacggcaagccccagaaggugggcaccgccggcagcaacaagagccugcagagcgccggcuuccccaccggccugaccuacagccagcugaugacccugaaggacagcaugaugcagcuggaccccagcgccaagaccuggaucgacaucgagggcagacccgaggaccccguggagaucgcccuguaccagcccgugagcggcugcuacauccacuucuucagagagcccaccgaccugaagcaguucaagcaggacgccaaguacagccacggcaucgacguggccgaccuguuccccgcccagcccggccugaccagcgccgugaucgaggcccugcccagaaacauggugcugaccugccagggcagcgacgacaucaagagacugcuggacagccagggcagaagagacaucaagcugaucgacaucgcccugagcaaggccgacagcagaagauucgagaacgccgugugggaccagugcaaggaccugugccacaugcacaccggcguggugguggagaagaagaagagaggcggcaaggaggagaucaccccccacugcgcccugauggacugcaucauguacgacgccgccgugagcggcggccugaacauccccgugcugagagccgugcugcccagagacaugguguucagaaccagcagccccaagguggugcugugaggacuaguaauaaggaaacuguaugaaugucugugggcaggaagugaagagauccuucuguaaagguuuuuggaauuaugucugcugaauaauaaacuuuuuugaaauaauaaaucugguagaaaaaugagaucucaaaggcucuuuucagagccaccaaaaaaaaaaaaaaaaaaaaaaaaaaaaaaaaaaaaaaaaaaaaaaaaaaaaaaaaaaaaaaaaaaaaaaaaaaaaaaaaaaaaaaaaaaaaaaaaaaaaa

SEQ ID NO: 17509 - RNA, 2046 nt, Artificial Sequence
  mRNA product Design b-4 (hSL-A100) comprising derived and/or modified sequence from LASV(LASV221-NIG-2010;Clade II)__AIT17625__NP (opt4)
aggagagucccgcagucggcguccagcggcucugcuuguucgugugugugucguugcaggccuuauucaagcuuaccaugagcgccagcaaggaggugaagagcuuccuguggacccagagccugagaagagagcugagcggcuacugcagcagcaucaagcugcagguggugaaggacgcccaggcccugcugcacggccuggacuucagcgaggugagcaacgugcagagacugaugagaaagcagagaagagacgacagcgaccugaagagacugagagaccugaaccaggccgugaacaaccugguggagcugaagagcacccagcagaagagcauccugagagugggcacccugaccagcgacgaccugcugacccuggccgccgaccuggagaagcugaagagcaaggugaucagaaccgagagaccccugagcagcggcguguacaugggcaaccugagcacccagcagcuggagcagagaagagcccugcugaacaugaucggcauggugggcggcgcccagggcacccagcccggcagagacggcguggugagagugugggacgugaagaaccccgaccugcugaacaaccaguucggcaccaugcccagccugacccuggccugccugaccaagcagggccagguggaccugaacgacgccgugcuggcccugaccgaccugggccugaucuacaccgccaaguaccccaacagcagcgaccuggacagacugagccagagccaccccauccugaacaugguggacaccaagaagagcagccugaacaucagcggcuacaacuucagccugggcgccgccgugaaggccggcgccugcaugcuggacggcggcaacaugcuggagaccaucaaggugaccccccagaccguggacggcauccugaagagcauccugaaggugaagagaagccugggcauguucgugagcgacacccccggcgagagaaaccccuacgagaacauccuguacaagaucugccugagcggcgacggcuggcccuacaucgccagcagaaccagcaucgugggcagagccugggagaacaccaccguggaccuggagagcgacggcaagccccagaaggugggcaccgccggcagcaacaagagccugcagagcgccggcuuccccaccggccugaccuacagccagcugaugacccugaaggacagcaugaugcagcuggaccccagcgccaagaccuggaucgacaucgagggcagacccgaggaccccguggagaucgcccuguaccagcccaugagcggcugcuacauccacuucuucagagagcccaccgaccugaagcaguucaagcaggacgccaaguacagccacggcaucgacguggccgaccuguuccccgcccagcccggccugaccagcgccgugaucgaggcccugcccagaaacauggugcugaccugccagggcagcgacgacaucaagagacugcuggacagccagggcagaagagacaucaagcugaucgacaucgcccugagcaaggccgacagcagaaaguucgagaacgccgugugggaccagugcaaggaccugugccacaugcacaccggcguggugguggagaagaagaagagaggcggcaaggaggagaucaccccccacugcgcccugauggacugcaucauguacgacgccgccgugagcggcggccugaacauccccgugcugagagccgugcugcccagagacaugguguucagaaccagcagccccaagguggugcugugaggacuaguaauaaggaaacuguaugaaugucugugggcaggaagugaagagauccuucuguaaagguuuuuggaauuaugucugcugaauaauaaacuuuuuugaaauaauaaaucugguagaaaaaugagaucucaaaggcucuuuucagagccaccaaaaaaaaaaaaaaaaaaaaaaaaaaaaaaaaaaaaaaaaaaaaaaaaaaaaaaaaaaaaaaaaaaaaaaaaaaaaaaaaaaaaaaaaaaaaaaaaaaaaa

SEQ ID NO: 17510 - RNA, 2046 nt, Artificial Sequence
  mRNA product Design b-4 (hSL-A100) comprising derived and/or modified sequence from LASV(LASV237-NIG-2010;Clade II)__AIT17639__NP (opt4)
aggagagucccgcagucggcguccagcggcucugcuuguucgugugugugucguugcaggccuuauucaagcuuaccaugagcgccagcaaggaggugaagagcuuccuguggacccagagccugagaagagagcugagcggcuacugcagcaacaucaagcugcagguggugaaggacgcccaggcccugcugcacggccuggacuucagcgaggugagcaacgugcagagacugaugagaaagcagaagagagacgacagcgaccugaagagacugagagaccugaaccaggccgugaacaaccugguggagcugaagagcacccagcagaagagcauccugagagugggcacccugaccagcgacgaccugcugacccuggccgccgaccuggagaagcugaagagcaaggugaucagaaccgagagaccccugagcagcggcguguacaugggcaaccugagcacccagcagcuggagcagagaagagcccugcugaacaugaucggcauggugggcggcgcccagggcacccagcccggcagagacggcguggugagagugugggacgugaagaaccccgaccugcugaacaaccaguucggcaccaugcccagccugacccuggccugccugaccaagcagggccagguggaccugaacgacgccgugcuggcccugaccgaccugggccugaucuacaccgccaaguaccccaacagcagcgaccuggacagacugagccagagccaccccauccugaacaugguggacaucaagaagagcagccugaacaucagcggcuacaacuucagccugggcgccgccgugaaggccggcgccugcaugcuggacggcggcaacaugcuggagaccaucaaggugaccccccagaccauggacggcauccugaagagcauccugaaggugaagagaagccugggcauguucgugagcgacacccccggcgagagaaaccccuacgagaacauccuguacaagaucugccugagcggcgacggcuggcccuacaucgccagcagaaccagcaucgugggcagagccugggagaacaccaccguggaccuggagagcgacggcaagccccagaaggugggcagcgccggcagcaacaagagccugcagagcgccggcuuccccaccggccugaccuacagccagcugaugacccugaaggacagcaugaugcagcuggaccccagcgccaagaccuggaucgacaucgagggcagacccgaggaccccguggagaucgcccuguaccagcccaugagcggcugcuacauccacuucuucagagagcccaccgaccugaagcaguucaagcaggacgccaaguacagccacggcaucgacguggccgaccuguuccccgcccagcccggccugaccagcgccgugaucgaggcccugcccagaaacauggugcugaccugccagggcagcgacgacaucaagagacugcuggacagccagggcagaagagacaucaagcugaucgacaucgcccugagcaaggccgacagcagaagauucgagaacgccgugugggaccagugcaaggaccugugccacaugcacaccggcguggugguggagaagaagaagagaggcggcaaggaggagaucaccccccacugcgcccugauggacugcaucauguacgacgccgccgugagcggcggccugaacauccccgugcugagagccgugcugcccagagacaugguguucagaaccagcagccccaagguggugcugugaggacuaguaauaaggaaacuguaugaaugucugugggcaggaagugaagagauccuucuguaaagguuuuuggaauuaugucugcugaauaauaaacuuuuuugaaauaauaaaucugguagaaaaaugagaucucaaaggcucuuuucagagccaccaaaaaaaaaaaaaaaaaaaaaaaaaaaaaaaaaaaaaaaaaaaaaaaaaaaaaaaaaaaaaaaaaaaaaaaaaaaaaaaaaaaaaaaaaaaaaaaaaaaaa

SEQ ID NO: 17511 - RNA, 2046 nt, Artificial Sequence
  mRNA product Design b-4 (hSL-A100) comprising derived and/or modified sequence from LASV(LASV253-NIG-2011;Clade II)__AIT17671__NP (opt4)
aggagagucccgcagucggcguccagcggcucugcuuguucgugugugugucguugcaggccuuauucaagcuuaccaugagcgccagcaaggaggugaagagcuuccuguggacccagagccugagaagagagcugagcggcuacugcagcagcaucaagcugcagguggugaaggacgcccaggcccugcugcacggccuggacuucagcgaggugagcaacgugcagagacugaugagaaagcagaagagagacgacagcgaccugaagagacugagagaccugaaccaggccgugaacaaccugguggagcugaagagcacccagcagaagagcgugcugagagugggcacccugaccagcgacgaccugcugacccuggccgccgaccuggagaagcugaagagcaaggugaucagaaccgagagaccccugagcagcggcguguacaugggcaaccugagcacccagcagcuggagcagagaagagcccugcugaacaugaucggcauggugggcggcgcccagggcacccagcccggcagagacggcguggugagagugugggacgugaagaaccccgaccugcugaacaaccaguucggcaccaugcccagccugacccuggccugccugaccaagcagggccagguggaccugaacgacguggugcuggcccugaccgaccugggccugaucuacaccgccaaguaccccaacagcagcgaccuggacagacugagccagagccaccccauccugaacaugguggacaccaagaagagcagccugaacaucagcggcuacaacuucagccugggcgccgccgugaaggccggcgccugcaugcuggacggcggcaacaugcuggagaccaucaaggugaccccccagaccauggacggcauccugaagagcauccugaaggugaagaagagccugggcauguucgugagcgacacccccggcgagagaaaccccuacgagaacauccuguacaagaucugccugagcggcgacggcuggcccuacaucgccagcagaaccagcaucgugggcagagccugggagaacaccaccguggaccuggagagcgacggcaagccccagaaggugggcaccgccggcagcaacaagagccugcagagcgccggcuuccccaccggccugaccuacagccagcugaugacccugaaggacagcaugaugcagcuggaccccagcgccaagaccuggaucgacaucgagggcagacccgaggaccccguggagaucgcccuguaccagcccaugagcggcugcuacauccacuucuucagagagcccaccgaccugaagcaguucaagcaggacgccaaguacagccacggcaucgacgugaccgaccuguuccccgcccagcccggccugaccagcgccgugaucgaggcccugcccagaaacauggugcugaccugccagggcagcgacgacaucaagagacugcuggacagccagggcagaagagacaucaagcugaucgacaucgcccugagcaaggccgacagcagaagauucgagaacgccgugugggaccagugcaaggaccugugccacaugcacaccggcguggugguggagaagaagaagagaggcggcaaggaggagaucaccccccacugcgcccugauggacugcaucauguacgacgccgccgugagcggcggccugaacauccccgugcugagagccgugcugcccagagacaugguguucagaaccagcagccccaagguggugcugugaggacuaguaauaaggaaacuguaugaaugucugugggcaggaagugaagagauccuucuguaaagguuuuuggaauuaugucugcugaauaauaaacuuuuuugaaauaauaaaucugguagaaaaaugagaucucaaaggcucuuuucagagccaccaaaaaaaaaaaaaaaaaaaaaaaaaaaaaaaaaaaaaaaaaaaaaaaaaaaaaaaaaaaaaaaaaaaaaaaaaaaaaaaaaaaaaaaaaaaaaaaaaaaaa

SEQ ID NO: 17512 - RNA, 2046 nt, Artificial Sequence
  mRNA product Design b-4 (hSL-A100) comprising derived and/or modified sequence from LASV(LASV254-NIG-2011;Clade II)__AIT17675__NP (opt4)
aggagagucccgcagucggcguccagcggcucugcuuguucgugugugugucguugcaggccuuauucaagcuuaccaugagcgccagcaaggaggugaagagcuuccuguggacccagagccugagaagagagcugagcggcuacugcagcagcaucaagcugcagguggugaaggacgcccaggcccugcugcacggccuggacuucagcgaggugagcaacgugcagagacugaugagaaagcagaagagagacgacagcgaccugaagagacugagagaccugaaccaggccgugaacaaccugguggagcugaagagcacccagcagaagagcgugcugagagugggcacccugaccagcgacgaccugcugacccuggccgccgaccuggagaagcugaagagcaaggugaucagaaccgagagaccccugagcagcggcguguacaugggcaaccugagcacccagcagcuggagcagagaagagcccugcugaacaugaucggcauggugggcggcgcccagggcacccagcccggcagagacggcguggugagagugugggacgugaagaaccccgaccugcugaacaaccaguucggcaccaugcccagccugacccuggccugccugaccaagcagggccagguggaccugaacgacgccgugcuggcccugaccgaccugggccugaucuacaccgccaaguaccccaacagcagcgaccuggacagacugagccagagccaccccauccugaacaugguggacaccaagaagagcagccugaacaucagcggcuacaacuucagccugggcgccgccgugaaggccggcgccugcaugcuggacggcggcaacaugcuggagaccaucaaggugaccccccagaccauggacggcauccugaagagcauccugaaggugaagaagagccugggcauguucgugagcgacacccccggcgagagaaaccccuacgagaacauccuguacaagaucugccugagcggcgacggcuggcccuacaucgccagcagaaccagcaucgugggcagagccugggagaacaccaucguggaccuggagagcgacggcaagccccagaaggugggcaccgccggcagcaacaagagccugcagagcgccggcuuccccaccggccugaccuacagccagcugaugacccugaaggacagcaugaugcagcuggaccccagcgccaagaccuggaucgacaucgagggcagacccgaggaccccguggagaucgcccuguaccagcccaugagcggcugcuacauccacuucuucagagagcccaccgaccugaagcaguucaagcaggacgccaaguacagccacggcaucgacguggccgaccuguuccccgcccagcccggccugaccagcgccgugaucgaggcccugcccagaaacauggugcugaccugccagggcagcgacgacaucaagagacugcuggacagccagggcagaagagacaucaagcugaucgacaucgcccugagcaaggccgacagcagaagauucgagaacgccgugugggaccagugcaaggaccugugccacaugcacaccggcguggugguggagaagaagaagagaggcggcaaggaggagaucaccccccacugcgcccugauggacugcaucauguacgacgccgccgugagcggcggccugaacauccccgugcugagagccgugcugcccagagacaugguguucagaaccagcagccccaagguggugcugugaggacuaguaauaaggaaacuguaugaaugucugugggcaggaagugaagagauccuucuguaaagguuuuuggaauuaugucugcugaauaauaaacuuuuuugaaauaauaaaucugguagaaaaaugagaucucaaaggcucuuuucagagccaccaaaaaaaaaaaaaaaaaaaaaaaaaaaaaaaaaaaaaaaaaaaaaaaaaaaaaaaaaaaaaaaaaaaaaaaaaaaaaaaaaaaaaaaaaaaaaaaaaaaaa

SEQ ID NO: 17513 - RNA, 2046 nt, Artificial Sequence
  mRNA product Design b-4 (hSL-A100) comprising derived and/or modified sequence from LASV(Nig08-04;Clade II)__ADU56611__NP (opt4)
aggagagucccgcagucggcguccagcggcucugcuuguucgugugugugucguugcaggccuuauucaagcuuaccaugagcgccagcaaggaggugaagagcuuccuguggacccagagccugagaagagagcugagcggcuacugcagcaacaucaagcugcagguggugaaggacgcccaggcccugcugcacggccuggacuucagcgaggugagcaacgugcagagacugaugagaaagcagaagagagacgacggcgaccugaagagacugagagaccugaaccaggccgugaacaaccugguggagcugaagagcacccagcagaagagcgugcugagagugggcacccugaccagcgacgaccugcugacccuggccgccgaccuggagaagcugaagagcaaggugaucagaaccgagagaccccugagcagcggcguguacaugggcaaccugagcacccagcagcuggagcagagaaaggcccugcugagcaugaucggcauggugggcggcgcccagggcacccagcccggcagagacggcguggugagagugugggacgugaagaaccccgaccugcugaacaaccaguucggcaccaugcccagccugacccuggccugccugaccaagcagggccagguggaccugaacgacgccgugcuggcccugaccgaccugggccugaucuacaccgccaaguaccccaacagcagcgaccuggacagacugagccagagccaccccauccugaacaugguggacaccaagaagagcagccugaacaucagcggcuacaacuucagccugggcgccgccgugaaggccggcgccugcaugcuggacggcggcaacaugcuggagaccaucaaggugaccccccagaccauggacggcauccugaagagcauccugaaggugaagagaagccugggcauguucgugagcgacacccccggcgagagaaaccccuacgagaacauccuguacaagaucugccugagcggcgacggcuggcccuacaucgccagcagaaccagcaucgugggcagagccugggagaacaccaccguggaccuggagagcgacggcaagccccagaaggugggcaccgccggcagcaacaagagccugcagagcgccggcuuccccaccggccugaccuacagccagcugaugacccugaaggacagcaugaugcagcuggaccccagcgccaagaccuggaucgacaucgagggcagacccgaggaccccguggagaucgcccuguaccagcccaugagcggcugcuacauccacuucuucagagagcccaccgaccugaagcaguucaagcaggacgccaaguacagccacggcaucgacgugaccgaccuguucagcgcccagcccggccugaccagcgccgugaucgaggcccugcccagaaacauggugcugaccugccagggcagcgacgacaucaagaagcugcuggacagccagggcagaagagacaucaagcugaucgacaucagccugaacaaggccgacagcagaagauucgagaacgccgugugggaccagugcaaggaccugugccacaugcacaccggcguggugguggagaagaagaagagaggcggcaaggaggagaucaccccccacugcgcccugauggacugcaucauguucgacgccgccgugagcggcggccugaacauccccauccugagagccgugcugcccagagacaugguguucagaaccagcagccccaagguggugcugugaggacuaguaauaaggaaacuguaugaaugucugugggcaggaagugaagagauccuucuguaaagguuuuuggaauuaugucugcugaauaauaaacuuuuuugaaauaauaaaucugguagaaaaaugagaucucaaaggcucuuuucagagccaccaaaaaaaaaaaaaaaaaaaaaaaaaaaaaaaaaaaaaaaaaaaaaaaaaaaaaaaaaaaaaaaaaaaaaaaaaaaaaaaaaaaaaaaaaaaaaaaaaaaaa

SEQ ID NO: 17514 - RNA, 2049 nt, Artificial Sequence
  mRNA product Design b-4 (hSL-A100) comprising derived and/or modified sequence from LASV(GA391;Clade III)__AAA46284__NP (opt4)
aggagagucccgcagucggcguccagcggcucugcuuguucgugugugugucguugcaggccuuauucaagcuuaccaugagcgccagcaaggaggugagaagcugccuguggacccagagccugagaagagagcugagcggcuacugcagcaacaucaagcugcagguggugaaggacgcccaggcccugcugcacggccuggacuucagcgaggugagcaacgugcagagacugaugagaaagcagaagagagacgacggcgaccugaagagacugagagaccugaaccaggccgugaacaaccugguggagcugaagagcacccagcagaagagcgugcugagagugggcacccugagcagcgacgaccugcugauccuggccgccgaccuggagaagcugaagagcaaggugaccagaaccgagagaccccugagcagcggcguguacaugggcaaccugagcagccagcagcuggaccagagaagagcccugcugaacaugaucggcaugaccggcgugagcggcggcggcaagggcgccagcaacggcaucgugagagugugggacgugaagaacgccgagcugcugaacaaccaguucggcaccaugcccagccugacccuggccugccugaccaagcagggccagguggaccugaacgacgccgugcaggcccugaccgaccugggccugaucuacaccgccaaguaccccaacagcagcgaccuggacagacugagccagagccaccccauccugaacaugaucgacaccaagaagagcagccugaacaucagcggcuacaacuucagccugggcgccgccgugaaggccggcgccugcaugcuggacggcggcaacaugcuggagaccaucaaggugagcccccagaccauggacggcauccugaagagcauccugaaggugaagaagagccugggcauguucgugagcgacacccccggcgagagaaaccccuacgagaacauccuguacaagaucugccugagcggcgacggcuggagcuacaucgccagcagaaccagcaucgugggcagagccugggagaacaccgugguggaccuggagcaggacaacaagccccagaagaucggcaacggcggcagcaacaagagccugcagagcgccggcuucgccgccggccugaucuacagccagcugaugacccugaaggacuucaagugcuucaaccugauccccaacgccaagaccuggauggacaucgagggcagacccgaggaccccguggagaucgcccuguaccagcccagcagcggcugcuacgugcacuucuucagagagcccaccgaccugaagcaguucaagcaggacgccaaguacagccacggcagagacgugaccgaccuguucgccgcccagcccggccugaccagcgccgugaucgaggcccugcccagaaacauggugaucaccugccagggcagcgaggacaucagaaagcugcuggagagccagggcagaagagacaucaagcugaucgacaucacccugagcaaggccgacagcagaaaguucgagaacgccgugugggaccaguucaaggaccugugccacaugcacaccggcguggugguggagaagaagaagagaggcggcaaggaggagaucaccccccacugcgcccugauggacugcaucauguucgacgccgccgugagcggcggccuggacgccaaggugcugagaguggugcugcccagagacaugguguucagaaccagcacccccaagguggugcugugaggacuaguaauaaggaaacuguaugaaugucugugggcaggaagugaagagauccuucuguaaagguuuuuggaauuaugucugcugaauaauaaacuuuuuugaaauaauaaaucugguagaaaaaugagaucucaaaggcucuuuucagagccaccaaaaaaaaaaaaaaaaaaaaaaaaaaaaaaaaaaaaaaaaaaaaaaaaaaaaaaaaaaaaaaaaaaaaaaaaaaaaaaaaaaaaaaaaaaaaaaaaaaaaa

SEQ ID NO: 17515 - RNA, 2046 nt, Artificial Sequence
  mRNA product Design b-4 (hSL-A100) comprising derived and/or modified sequence from LASV(Nig08-A19;Clade III)__ADU56619__NP (opt4)
aggagagucccgcagucggcguccagcggcucugcuuguucgugugugugucguugcaggccuuauucaagcuuaccaugagcgccagcaaggaggugaagagcuuccuguggacccagagccugagaagagagcugagcggcuacugcagcaacaucaagcugcagguggugaaggacgcccaggcccugcugcacggccuggacuucagcgaggugagcaacgugcagagacugaugagaaagcagaagagagacgacggcgaccugaagagacugagagaccugaaccaggccgugaacaaccugguggagcugaagagcacccagcagaagagcgugcugagagugggcacccugagcagcgacgaccugcuggugcuggccgccgaccuggagaagcugaagagcaagguggugagaaccgagagaccccugagcagcggcaucuacaugggcaaccugagcagccagcagcuggaccagagaaaggcccugcugaacaugaucggcaugaccggcggcaacggcggcagaaacaccaccagcgacggcaucgugagagugugggacgugaagaacgccgagcugcugaacaaccaguucggcaccaugcccagccugacccuggccugccugaccaagcagggccagguggaccugaacgacgccgugcaggcccugaccgaccugggccugaucuacaccgccaaguaccccaacagcagcgaccuggacagacuggcccagagccaccccauccugaacaugaucgacaccaagaagagcagccugaacaucagcggcuacaacuucagccugggcgccgccgugaaggccggcgccugcaugcuggacggcggcaacaugcuggagaccaucaaggugagcccccagaccauggacggcauccugaagagcauccugaaggugaagagaagccugggcauguucaucagcgacacccccggcgagagaaaccccuacgagaacauccuguacaagaucugccugagcggcgacggcuggcccuacaucgccagcagaaccagcaucgugggcagagccugggagaacaccgugguggaccuggagagcgacaacaagccccagaagaccggcaacggcggcagcaacaagagccugcagagcgccggcuucgccgccggccugaccuacagccagcugaugacccugaaggacagcaugcugcagcuggaccccaacgccaagaccuggauggacaucgagggcagacccgaggaccccguggagaucgcccuguaccagcccagcagcggcugcuacauccacuucuucagagagcccaccgaccugaagcaguucaagcaggacgccaaguacagccacggcaucgacgugaccgaccuguucgccgcccagcccggccugaccagcgccgugaucgaggcccugcccagaaacauggugaucaccugccagggcagcgaggacaucagaaagcugcuggagagccagggcagaagagacaucaagcugaucgacaucagccugagcaagguggacagcagaaaguucgagaacgccgugugggaccaguucaaggaccugugccacaugcacaccggcaucgugguggagaagaagaagagaggcggcaaggaggagaucaccccccacugcgcccugauggacugcaucauguucgacgccgccgugagcggcggcguggacgccaaggugcugagagccgugcugcccagagacaugguguucagaaccagcacccccaagguggugcugugaggacuaguaauaaggaaacuguaugaaugucugugggcaggaagugaagagauccuucuguaaagguuuuuggaauuaugucugcugaauaauaaacuuuuuugaaauaauaaaucugguagaaaaaugagaucucaaaggcucuuuucagagccaccaaaaaaaaaaaaaaaaaaaaaaaaaaaaaaaaaaaaaaaaaaaaaaaaaaaaaaaaaaaaaaaaaaaaaaaaaaaaaaaaaaaaaaaaaaaaaaaaaaaaa

SEQ ID NO: 17516 - RNA, 2046 nt, Artificial Sequence
  mRNA product Design b-4 (hSL-A100) comprising derived and/or modified sequence from LASV(G1180-SLE-2010;Clade IV)__AIT17169__NP (opt4)
aggagagucccgcagucggcguccagcggcucugcuuguucgugugugugucguugcaggccuuauucaagcuuaccaugagcgccagcaaggagaucaagagcuuccuguggacccagagccugagaagagagcugagcggcuacugcagcaacaucaagcugcagguggugaaggacgcccaggcccugcugcacggccuggacuucagcgaggugagcaacgugcagagacugaugagaaaggagagaagagacgacaacgaccugaagagacugagagaccugaaccaggccgugaacaaccugguggagcugaagagcacccagcagaagagcauccugagagugggcacccugaccagcgacgaccugcugauccuggccgccgaccuggagaagcugaagagcaaggugaucagaaccgagagaccccugagcgccggcguguacaugggcaaccugagcagccagcagcuggaccagagaagagcccugcugagcaugaucggcaugagcagcggcaaccagagagcccaggccggcagagacggcguggugagagugugggacgugaagaacguggagcugcugaacaaccaguucggcaccaugcccagccugacccuggccugccugaccaagcagggccagguggaccugaacgacgccgugcaggcccugaccgaccugggccugaucuacaccgccaaguaccccaacaccagcgaccuggacagacugacccagagccaccccauccugaacaugaucgacaccaagaagagcagccugaacaucagcggcuacaacuucagccugggcgccgccgugaaggccggcgccugcaugcuggacggcggcaacaugcuggagaccaucaaggugagcccccagaccauggacggcauccugaagagcauccugaaggugaagaaggcccugggcauguucaucagcgacacccccggcgagagaaaccccuacgagaacauccuguacaagaucugccugagcggcgacggcuggcccuacaucgccagcagaaccagcaucaccggcagagccugggagaacaccgugguggaccuggagagcgacggcaagccccagaaggccggcagcaacaacagcaacaagagccugcagagcgugggcuucaccgccggccugaccuacagccagcugaugacccugaaggacgccaugcugcagcuggaccccaacgccaagaccuggauggacaucgagggcagacccgaggaccccguggagaucgcccuguaccagcccagcagcggcugcuacauccacuucuucagagagcccaccgaccugaagcaguucaagcaggacgccaaguacagccacggcaucgacgugaccgaccuguucgccgcccagcccggccugaccagcgccgugaucgacgcccugcccagaaacauggugaucaccugccagggcagcgacgacaucagaaagcugcuggagagccagggcagaaaggacaucaagcugaucgacaucgcccugagcaagaccgacagcagaaaguacgagaacgccgugugggaccaguacaaggaccugugccacaugcacaccggcguggugguggagaagaagaagagaggcggcaaggaggagaucaccccccacugcgcccugauggacugcaucauguucgacgccgccgugagcggcggccugaacaccagcgugcugagagccgugcugcccagagacaugguguucagaaccagcacccccagaguggugcugugaggacuaguaauaaggaaacuguaugaaugucugugggcaggaagugaagagauccuucuguaaagguuuuuggaauuaugucugcugaauaauaaacuuuuuugaaauaauaaaucugguagaaaaaugagaucucaaaggcucuuuucagagccaccaaaaaaaaaaaaaaaaaaaaaaaaaaaaaaaaaaaaaaaaaaaaaaaaaaaaaaaaaaaaaaaaaaaaaaaaaaaaaaaaaaaaaaaaaaaaaaaaaaaaa

SEQ ID NO: 17517 - RNA, 2046 nt, Artificial Sequence
  mRNA product Design b-4 (hSL-A100) comprising derived and/or modified sequence from LASV(G1442-SLE-2011;Clade IV)__AIT17181__NP (opt4)
aggagagucccgcagucggcguccagcggcucugcuuguucgugugugugucguugcaggccuuauucaagcuuaccaugagcgccagcaaggaggugaagagcuuccuguggacccagagccugagaagagagcugagcggcuacugcagcaacaucaagcugcagguggugaaggacgcccaggcccugcugcacggccuggacuucagcgaggugagcaacgugcagagacugaugagaaagcagagaagagacgacaacgaccugaagagacugagagaccugaaccaggccgugaacaaccugguggagcugaagagcacccagcagaagagcgugcugagagugggcacccugaccagcgacgaccugcuggugcuggccgccgaccuggagaagcugaagagcaaggugaucagaaccgagagaccccugagcgccggcguguacaugggcaaccugagcagccagcagcuggaccagagaagagcccugcugaacaugaucggcaugagcggcggcauccagggcaccagaaccggcagagacggcguggugagagugugggacgugaagaacgccgaccugcugaacaaccaguucggcaccaugcccagccugacccuggccugccugaccaagcagggccagguggaccugaacgacguggugcaggcccugaccgaccugggccugaucuacaccgccaaguaccccaacgccagcgaccuggacagacugacccagagccaccccauccugaacaugaucgacaccaagaagagcagccugaacaucagcggcuacaacuucagccugggcgccgccgugaaggccggcgccugcaugcuggacggcggcaacaugcuggagaccaucaaggugagcccccagaccauggacggcauccugaagagcauccugaaggugaagaagacccugggcauguucaucagcgacacccccggcgagagaaaccccuacgagaacauccuguacaagaucugccugagcggcgacggcuggcccuacaucgccagcagaaccagcaucaccggcagagccugggagaacaccgugguggaccuggagagcgacggcaagccccagaaggccggcagcaacaacagcaacaagagccugcagagcgccggcuucgccgccggccugaccuacagccagcugaugacccugaaggacgccaugcugcagcuggaccccaacgccaagaccuggauggacaucgagggcagacccgaggaccccguggagaucgcccuguaccagcccagcagcggcugcuacauccacuucuucagagagcccaccgaccugaagcaguucaagcaggacgccaaguacagccacggcaucgacgugaccgaccuguucgccgcccagcccggccugaccagcgccgugaucgaggcccugcccagaaacauggugaucaccugccagggcagcgacgacaucaagaagcugcuggagagccagggcagaaaggacaucaagcugaucgacaucgcccugagcaagaccgacagcagaaaguacgagaacgccgugugggaccaguacaaggaccugugccacaugcacaccggcguggugguggagaagaagaagagaggcggcaaggaggagaucaccccccacugcgcccugauggacugcaucauguucgacgccgccgugagcggcggccugaacacccuggugcugagagccgugcugcccagagacaugguguucagaaccagcacccccagaguggugcugugaggacuaguaauaaggaaacuguaugaaugucugugggcaggaagugaagagauccuucuguaaagguuuuuggaauuaugucugcugaauaauaaacuuuuuugaaauaauaaaucugguagaaaaaugagaucucaaaggcucuuuucagagccaccaaaaaaaaaaaaaaaaaaaaaaaaaaaaaaaaaaaaaaaaaaaaaaaaaaaaaaaaaaaaaaaaaaaaaaaaaaaaaaaaaaaaaaaaaaaaaaaaaaaaa

SEQ ID NO: 17518 - RNA, 2046 nt, Artificial Sequence
  mRNA product Design b-4 (hSL-A100) comprising derived and/or modified sequence from LASV(G3010-SLE-2013;Clade IV)__AIT17345__NP (opt4)
aggagagucccgcagucggcguccagcggcucugcuuguucgugugugugucguugcaggccuuauucaagcuuaccaugagcgccagcaaggagaucaagagcuuccuguggacccagagccugagaagagagcugagcggcuacugcagcaacaucaagcugcagguggugaaggacgcccaggcccugcugcacggccuggacuucagcgaggugagcaacgugcagagacugaugagaaaggagagaagagacgacaacgaccugaagagacugagagaccugaaccaggccgugaacaaccugguggagcugaagagcacccagcagaagagcauccugagagugggcacccugaccagcgacgaccugcugauccuggccgccgaccuggagaagcugaagagcaaggugaccagaaccgagagaccccugagcgccggcguguacaugggcaaccugagcagccagcagcuggaccagagaagagcccugcugagcaugaucggcaugagcagcggcgugcagggcgccagagccggcagagacggcguggugagagugugggacgugaagaacgccgagcugcugaacaaccaguucggcaccaugcccagccugacccuggccugccugaccaagcagggccagguggaccugaacgacguggugcaggcccugaccgaccugggccugaucuacaccgccaaguaccccaacaccagcgaccuggacagacugacccagagccaccccauccugaacaugaucgacaccaagaagagcagccugaacaucagcggcuacaacuucagccugggcgccgccgugaaggccggcgccugcaugcuggacggcggcaacaugcuggagaccaucaaggugagcccccagaccauggacggcauccugaagagcauccugaaggugaagaaggcccugggcauguucaucagcgagacccccggcgagagaaaccccuacgagaacauccuguacaagaucugccugagcggcgacggcuggcccuacaucgccagcagaaccagcaucaccggcagagccugggagaacaccgugguggaccuggagagcgacggcaagccccagaaggccggcagcaacaacagcaacaagagccugcagagcgccggcuucaccgccggccugaccuacagccagcugaugacccugaaggacgccaugcugcagcuggaccccaacgccaagaccuggauggacaucgagggcagacccgaggaccccguggagguggcccuguaccagcccagcagcggcugcuacauccacuucuucagagagcccaccgaccugaagcaguucaagcaggacgccaaguacagccacggcaucgacgugaccgaccuguucgccgcccagcccggccugaccagcgccgugaucgacgcccugcccagaaacauggugaucaccugccagggcagcgacgacaucaagaagcugcuggagagccagggcagaaaggacaucaagcugaucgacaucgcccugagcaagaccgacagcagaaaguacgagaacgccgugugggaccaguacaaggaccugugccacaugcacaccggcguggugguggagaagaagaagagaggcggcaaggaggagaucaccccccacugcgcccugauggacugcaucauguucgacgccgccgugagcggcggccugaacaccagcgugcugagagccgugcugcccagagacaugguguucagaaccagcacccccagaguggugcugugaggacuaguaauaaggaaacuguaugaaugucugugggcaggaagugaagagauccuucuguaaagguuuuuggaauuaugucugcugaauaauaaacuuuuuugaaauaauaaaucugguagaaaaaugagaucucaaaggcucuuuucagagccaccaaaaaaaaaaaaaaaaaaaaaaaaaaaaaaaaaaaaaaaaaaaaaaaaaaaaaaaaaaaaaaaaaaaaaaaaaaaaaaaaaaaaaaaaaaaaaaaaaaaaa

SEQ ID NO: 17519 - RNA, 2046 nt, Artificial Sequence
  mRNA product Design b-4 (hSL-A100) comprising derived and/or modified sequence from LASV(G502-SLE-2009;Clade IV)__AIT17127__NP (opt4)
aggagagucccgcagucggcguccagcggcucugcuuguucgugugugugucguugcaggccuuauucaagcuuaccaugagcgccagcaaggagaucaagagcuuccuguggacccagagccugagaagagagcugagcggcuacugcagcaacaucaagcugcagguggugaaggacgcccaggcccugcugcacggccuggacuucagcgaggugagcaacgugcagagacugaugagaaaggagagaagagacgacaacgaccugaagagacugagagaccugaaccaggccgugaacaaccugguggagcugaagagcacccagcagaagagcauccugagagugggcacccugaccagcgacgaccugcugauccuggccgccgaccuggagaagcugaagagcaaggugaucagaaccgagagaccccugagcgccggcguguacaugggcaaccugagcagccagcagcuggaccagagaagagcccugcugagcaugaucggcaugagcggcggcaaccagggcgugagagccggcaaggacggcguggugagagugugggacgugaagaacgccgagcugcugaacaaccaguucggcaccaugcccagccugacccuggccugccugaccaagcagggccagguggaccugaacgacgccgugcaggcccugaccgaccugggccugaucuacaccgccaaguaccccaacaccagcgaccuggacagacugacccagagccaccccauccugaacaugaucgacaccaagaagagcagccugaacaucagcggcuacaacuucagccugggcgccgccgugaaggccggcgccugcaugcuggacggcggcaacaugcuggagaccaucaaggugagcccccagaccauggacggcauccugaagagcauccugaaggugaagaaggcccugggcauguucaucagcgacacccccggcgagagaaaccccuacgagaacauccuguacaagaucugccugagcggcgacggcuggcccuacaucgccagcagaaccagcaucaccggcagagccugggagaacaccgugguggaccuggagagcgacggcaagccccagaaggccggcagcaacaacagcaacaagagccugcagagcgccggcuucaccgccggccugaccuacagccagcugaugacccugaaggacgccaugcugcagcuggaccccaacaccaagaccuggauggacaucgagggcagacccgaggaccccguggagaucgcccuguaccagcccagcagcggcugcuacauccacuucuucagagagcccaccgaccugaagcaguucaagcaggacgccaaguacagccacggcaucgacgugaccgaccuguucgccgcccagcccggccugaccagcgccgugaucgacgcccugcccagaaacauggugaucaccugccagggcagcgacgacaucagaaagcugcuggagagccagggcagaaaggacaucaagcugaucgacaucgcccugaacaagaccgacagcagaaaguacgagaacgccgugugggaccaguacaaggaccugugccacaugcacaccggcguggugguggagaagaagaagagaggcggcaaggaggagaucaccccccacugcgcccugauggacugcaucauguucgacgccgccgugagcggcggccugaacaccagcgugcugagagccgugcugcccagagacaugguguucagaaccagcacccccagaguggugcugugaggacuaguaauaaggaaacuguaugaaugucugugggcaggaagugaagagauccuucuguaaagguuuuuggaauuaugucugcugaauaauaaacuuuuuugaaauaauaaaucugguagaaaaaugagaucucaaaggcucuuuucagagccaccaaaaaaaaaaaaaaaaaaaaaaaaaaaaaaaaaaaaaaaaaaaaaaaaaaaaaaaaaaaaaaaaaaaaaaaaaaaaaaaaaaaaaaaaaaaaaaaaaaaaa

SEQ ID NO: 17520 - RNA, 2046 nt, Artificial Sequence
  mRNA product Design b-4 (hSL-A100) comprising derived and/or modified sequence from LASV(G733-SLE-2010;Clade IV)__AIT17155__NP (opt4)
aggagagucccgcagucggcguccagcggcucugcuuguucgugugugugucguugcaggccuuauucaagcuuaccaugagcgccagcaaggagaucaagagcuuccuguggacccagagccugagaagagagcugagcggcuacugcagcaacaucaagcugcagguggugaaggacgcccaggcccugcugcacggccuggacuucagcgaggugagcaacgugcagagacugaugagaaaggagagaagagacgacaacgaccugaagagacugagagaccugaaccaggccgugaacaaccugguggagcugaagagcacccagcagaagagcgugcugagagugggcacccugaccagcgacgagcugcuggugcuggccgccgaccuggagaagcugaagagcaaggugaucagaaccgagagaccccugagcgccggcguguacaugggcaaccugagcagccagcagcuggaccagagaagagcccugcugagcaugaucggcaugagcggcggcaaccagggcgccagaaccggcagagacggcguggugagagugugggacgugaagaacgccgagcugcugaacaaccaguucggcaccaugcccagccugacccuggccugccugaccaagcagggccagguggaccugaacgacgccgugcaggcccugaccgaccugggccugaucuacaccgccaaguaccccaacaccagcgaccuggacagacugacccagagccaccccauccugaacaugaucgacaccaagaagagcagccugaacaucagcggcuacaacuucagccugggcgccgccgugaaggccggcgccugcaugcuggacggcggcaacaugcuggagaccaucaaggugagcccccagaccauggacggcauccugaagagcauccugaaggugaagaaggcccugggcauguucaucagcgacacccccggcgagagaaaccccuacgagaacauccuguacaagaucugccugagcggcgacggcuggcccuacaucgccagcagaaccagcaucaccggcagagccugggagaacaccgugguggaccuggagagcgacggcaagccccagaaggccggcagcaacaacagcaacaagagccugcagagcgccggcuucaccgccggccugaccuacagccagcugaugacccugaaggacgccaugcugcagcuggaccccaacgccaagaccuggauggacaucgagggcagacccgaggaccccguggagaucgcccuguaccagcccagcagcggcugcuacauccacuucuucagagagcccaccgaccugaagcaguucaagcaggacgccaaguacagccacggcaucgacgugaccgaccuguucgccgcccagcccggccugaccagcgccgugaucgacgcccugcccagaaacauggugaucaccugccagggcagcgacgacaucagaaagcugcuggagagccagggcagaaaggacaucaagcugaucgacaucgcccugagcaagaucgacagcagaaaguacgagaacgccgugugggaccaguacaaggaccugugccacaugcacaccggcguggugguggagaagaagaagagaggcggcaaggaggagaucaccccccacugcgcccugauggacugcaucauguucgacgccgccgugagcggcggccugaacagccuggugcugagagccgugcugcccagagacaugguguucagaaccagcacccccagaguggugcugugaggacuaguaauaaggaaacuguaugaaugucugugggcaggaagugaagagauccuucuguaaagguuuuuggaauuaugucugcugaauaauaaacuuuuuugaaauaauaaaucugguagaaaaaugagaucucaaaggcucuuuucagagccaccaaaaaaaaaaaaaaaaaaaaaaaaaaaaaaaaaaaaaaaaaaaaaaaaaaaaaaaaaaaaaaaaaaaaaaaaaaaaaaaaaaaaaaaaaaaaaaaaaaaaa

SEQ ID NO: 17521 - RNA, 2046 nt, Artificial Sequence
  mRNA product Design b-4 (hSL-A100) comprising derived and/or modified sequence from MOPV/LASV reassortant(IGS-1;Clade IV)__AFY05578__NP (opt4)
aggagagucccgcagucggcguccagcggcucugcuuguucgugugugugucguugcaggccuuauucaagcuuaccaugagcgccagcaaggagaucaagagcuuccuguggacccagagccugagaagagagcugagcggcuacugcagcaacaucaagcugcagguggugaaggacgcccaggcccugcugcacggccuggacuucagcgaggugagcaacgugcagagacugaugagaaaggagagaagagacgacaacgaccugaagagacugagagaccugaaccaggccgugaacaaccugguggagcugaagagcacccagcagaagagcauccugagagugggcacccugaccagcgacgaccugcugauccuggccgccgaccuggagaagcugagaagcaaggugaucagaaccgagagaccccugagcgccggcguguacaugggcaaccugagcagccagcagcuggaccagagaagagcccugcugaacaugaucggcaugagcggcggcaaccagggcgccagagccggcagagacggcguggugagagugugggacgugaagaacgccgagcugcugagcaaccaguucggcaccaugcccagccugacccuggccugccugaccaagcagggccagguggaccugaacgacgccgugcaggcccugaccgaccugggccugaucuacaccgccaaguaccccaacaccagcgaccuggacagacugacccagagccaccccauccugaacaugaucgacaccaagaagagcagccugaacaucagcggcuacaacuucagccugggcgccgccgugaaggccggcgccugcaugcuggacggcggcaacaugcuggagaccaucaaggugagcccccagaccauggacggcauccugaagagcauccugaaggugaagaaggcccugggcauguucaucagcgacacccccggcgagagaaaccccuacgagaacauccuguacaagaucugccugagcggcgacggcuggcccuacaucgccagcagaaccagcaucaccggcagagccugggagaacaccgugguggaccuggagagcgacggcaagccccagaaggccgacagcaacaacagcagcaagagccugcagagcgccggcuucaccgccggccugaccuacagccagcugaugacccugaaggacgccaugcugcagcuggaccccaacgccaagaccuggauggacaucgagggcagacccgaggaccccguggagaucgcccuguaccagcccagcagcggcugcuacauccacuucuucagagagcccaccgaccugaagcaguucaagcaggacgccaaguacagccacggcaucgacgugaccgaccuguucgccacccagcccggccugaccagcgccgugaucgacgcccugcccagaaacauggugaucaccugccagggcagcgacgacaucagaaagcugcuggagagccagggcagaaaggacaucaagcugaucgacaucgaccugagcaagaccgacagcagaaaguacgagaacgccgugugggaccaguacaaggaccugugccacaugcacaccggcguggugguggagaagaagaagagaggcggcaaggaggagaucaccccccacugcgcccugauggacugcaucauguucgacgccgccgugagcggcggccugaacaccagcgugcugagagccgugcugcccagagacaugguguucagaaccagcacccccagaguggugcugugaggacuaguaauaaggaaacuguaugaaugucugugggcaggaagugaagagauccuucuguaaagguuuuuggaauuaugucugcugaauaauaaacuuuuuugaaauaauaaaucugguagaaaaaugagaucucaaaggcucuuuucagagccaccaaaaaaaaaaaaaaaaaaaaaaaaaaaaaaaaaaaaaaaaaaaaaaaaaaaaaaaaaaaaaaaaaaaaaaaaaaaaaaaaaaaaaaaaaaaaaaaaaaaaa

SEQ ID NO: 17522 - RNA, 2046 nt, Artificial Sequence
  mRNA product Design b-4 (hSL-A100) comprising derived and/or modified sequence from LASV(LM765-SLE-2012;Clade IV)__AIT17815__NP (opt4)
aggagagucccgcagucggcguccagcggcucugcuuguucgugugugugucguugcaggccuuauucaagcuuaccaugagcgccagcaaggagaucaagagcuuccuguggacccagagccugagaagagagcugagcggcuacugcagcaacaucaagcugcagguggugaaggacgcccaggcccugcugcacggccuggacuucagcgaggugagcaacgugcagagacugaugagaaaggagagaagagacgacaacgaccugaagagacugagagaccugaaccaggccgugaacaaccugguggagcugaagagcacccagcagaagagcauccugagagugggcacccugaccagcgacgaccugcugauccuggccgccgaccuggagaagcugaagagcaaggugaccagaaccgagagaccccugagcgccggcguguacaugggcaaccugagcagccagcagcuggaccagagaagagcccugcuggacaugaucggcaugagcggcagcaaccagggcgccagagccggcagagacggcguggugagagugugggacgugaagaacgccgagcugcugaacaaccaguucggcaccaugcccagccugacccuggccugccugaccaagcagggccagguggaccugaacgacgccgugcaggcccugaccgaccugggccugaucuacaccgccaaguaccccaacaccagcgaccuggacagacugacccagagccaccccauccugaacaugaucgacaccaagaagagcagccugaacaucagcggcuacaacuucagccugggcgccgccgugaaggccggcgccugcaugcuggacggcggcaacaugcuggagaccaucaaggugagcccccagaccauggacggcauccugaagagcauccugaaggugaagaaggcccugggcauguucaucagcgacgcccccggcgagagaaaccccuacgagaacauccuguacaagaucugccugagcggcgacggcuggcccuacaucgccagcagaaccagcaucaccggcagagccugggagaacaccgugguggaccuggagagcgacggcaagccccagaaggccggcagcaacggcagcaacaagagccugcagagcgccggcuucaccgccggccugaccuacagccagcugaugacccugaaggacgccaugcugcagcuggaccccaacgccaagaccuggauggacaucgagggcagacccgaggaccccguggagaucgcccuguaccagcccagcagcggcugcuacauccacuucuucagagagcccaccgaccugaagcaguucaagcaggacgccaaguacagccacggcaucgacgugaccgaccuguucgccgcccagcccggccugaccagcgccgugaucgacgcccugcccagaaacauggugaucaccugccagggcagcgacgacaucagaaagcuguucgagagccagggcagaaaggacaucaagcugaucgacaucgcccugagcaagaccgacagcagaaaguacgagaacgccgugugggaccaguacaaggaccugugccacaugcacaccggcaucgugguggagaagaagaagagaggcggcaaggaggagaucaccccccacugcgcccugauggacugcaucauguucgacgccgccgugagcggcggccugaacaccagcgugcugagagccgugcugcccagagacaugguguucagaaccagcacccccagaguggugcugugaggacuaguaauaaggaaacuguaugaaugucugugggcaggaagugaagagauccuucuguaaagguuuuuggaauuaugucugcugaauaauaaacuuuuuugaaauaauaaaucugguagaaaaaugagaucucaaaggcucuuuucagagccaccaaaaaaaaaaaaaaaaaaaaaaaaaaaaaaaaaaaaaaaaaaaaaaaaaaaaaaaaaaaaaaaaaaaaaaaaaaaaaaaaaaaaaaaaaaaaaaaaaaaaa

SEQ ID NO: 17523 - RNA, 2046 nt, Artificial Sequence
  mRNA product Design b-4 (hSL-A100) comprising derived and/or modified sequence from LASV(LM776-SLE-2012;Clade IV)__AIT17825__NP (opt4)
aggagagucccgcagucggcguccagcggcucugcuuguucgugugugugucguugcaggccuuauucaagcuuaccaugagcgccagcaaggagaucaagagcuuccuguggacccagagccugagaagagagcugagcagcuacugcagcaacaucaagcugcagguggugaaggacgcccaggcccugcugcacggccuggacuucagcgaggugagcaacgugcagagacugaugagaaaggagagaagagacgacaacgaccugaagagacugagagaccugaaccaggccgugaacaaccugguggagcugaagagcacccagcagaagagcauccugagagugggcacccugaccagcgacgaccugcugauccuggccgccgaccuggagaagcugaagagcaaggugaccagaaccgagagaccccugagcgccggcguguacaugggcaaccugagcagccagcagcuggaccagagaagagcccugcugagcaugaucggcaugagcggcagcaaccagggcgccagagccggcagagacggcguggugagagugugggacgugaagaacgccgagcugcugaacaaccaguucggcaccaugcccagccugacccuggccugccugaccaagcagggccagguggaccugaacgacgccgugcaggcccugaccgaccugggccugaucuacaccgccaaguaccccaacaccagcgaccuggacagacugacccagagccaccccauccugaacaugaucgacaccaagaagagcagccugaacaucagcggcuacaacuucagccugggcgccgccgugaaggccggcgccugcaugcuggacggcggcaacaugcuggagaccaucaaggugagcccccagaccauggacggcauccugaagagcauccugaaggugaagaaggcccugggcauguucaucagcgacacccccggcgagagaaaccccuacgagaacauccuguacaagaucugccugagcggcgacggcuggcccuacaucgccagcagaaccagcaucaccggcagagccugggagaacaccgugguggaccuggagagcgacggcaagccccagaaggccggcagcaacaacagcaacaagagccugcagagcgccggcuucaccgccggccugaccuacagccagcugaugacccugaaggacgccaugcugcagcuggaccccaacgccaagaccuggauggacaucgagggcagacccgaggaccccguggagguggcccuguaccagcccagcagcggcugcuacauccacuucuucagagagcccaccgaccugaagcaguucaagcaggacgccaaguacagccacggcaucgacgugaccgaccuguucgccgcccagcccggccugaccagcgccgugaucgacgcccugcccagaaacauggugaucaccugccagggcagcgacgacaucagaaagcugcuggagagccagggcagaaaggacaucaagcugaucgacaucgcccugagcaagaccgacagcagaaaguacgagaacgccgugugggaccaguacaaggaccugugccacaugcacaccggcguggugguggagaagaagaagagaggcggcaaggaggagaucaccccccacugcgcccugauggacugcaucauguucgacgccgccgugagcggcggccugaacaccagcgugcugagagccgugcugcccagagacaugguguucagaaccagcacccccagaguggugcugugaggacuaguaauaaggaaacuguaugaaugucugugggcaggaagugaagagauccuucuguaaagguuuuuggaauuaugucugcugaauaauaaacuuuuuugaaauaauaaaucugguagaaaaaugagaucucaaaggcucuuuucagagccaccaaaaaaaaaaaaaaaaaaaaaaaaaaaaaaaaaaaaaaaaaaaaaaaaaaaaaaaaaaaaaaaaaaaaaaaaaaaaaaaaaaaaaaaaaaaaaaaaaaaaa

SEQ ID NO: 17524 - RNA, 2046 nt, Artificial Sequence
  mRNA product Design b-4 (hSL-A100) comprising derived and/or modified sequence from LASV(Mad39;Clade IV)__ANH09723__NP (opt4)
aggagagucccgcagucggcguccagcggcucugcuuguucgugugugugucguugcaggccuuauucaagcuuaccaugagcgccagcaaggagaucaagagcuuccuguggacccagagccugagaagagagcugagcggcuacugcagcaacaucaagcugcagguggugaaggacgcccaggcccugcugcacggccuggacuucagcgaggugagcaacgugcagagacugaugagaaagcagagaagagacgacaacgaccugaagagacugagagaccugaaccaggccgugaacaaccugguggagcugaagagcacccagcagaagagcgugcugagagugggcacccugaccagcgacgaccugcugacccuggccgccgaccuggagaagcugaagagcaaggugaccagaaccgagagaccccugaccgccggcguguacaugggcaaccugagcagccagcagcuggaccagagaagagcccugcugaacaugaucggcaugagcggcggcaaccagggcgccagaaccggcagagacggcguggugagagugugggacgugaagaacgccgagcugcugaacaaccaguucggcaccaugcccagccugacccuggccugccugaccaagcagggccagguggaccugaacgacguggugcaggcccugaccgaccugggccugaucuacaccgccaaguaccccaacaccagcgaccuggacagacugacccagagccaccccauccugaacaugaucgacaccaacaagagcagccugaacaucagcggcuacaacuucagccugggcgccgccgugaaggccggcgccugcaugcuggacggcggcaacaugcuggagaccaucaaggugagcccccagaccauggacggcauccugaagagcauccugaaggugaagaagagccugggcauguucaucagcgacacccccggcgagagaaaccccuacgagaacauccuguacaagaucugccugagcggcgacggcuggcccuacaucgccagcagaaccagcaucaccggcagagccugggagaacaccgugguggaccuggagagcggcggcaagccccagaaggccggcagcaacaacagcaacaagagccugcagagcgccggcuucgccgccggccugaccuacagccagcugaugacccugaaggacgccaugcugcagcuggaccccaacgccaagaccuggauggacaucgagggcagacccgaggaccccguggagaucgcccuguaccagcccaucagcggcugcuacauccacuucuucagagagcccaccgaccugaagcaguucaagcaggacgccaaguacagccacggcaucgacgugaccgaccuguucgccgcccagcccggccugaccagcgccgugaucgaggcccugcccagaaacauggugaucaccugccagggcagcgacgacaucagaaagcuguucgagagccagggcagaaaggacaucaagcugaucgacaucgcccugagcaagaccgacagcagaaaguacgagaacgccgugugggaccaguacaaggaccugugccacaugcacaccggcguggugguggagaagaagaagaagggcggcaaggaggagaucaccccccacugcgcccugauggacugcaucauguucgacgccgccgugagcggcggccugaacacccuggugcugagagccgugcugcccagagacaugguguucagaaccagcacccccaagguggugcugugaggacuaguaauaaggaaacuguaugaaugucugugggcaggaagugaagagauccuucuguaaagguuuuuggaauuaugucugcugaauaauaaacuuuuuugaaauaauaaaucugguagaaaaaugagaucucaaaggcucuuuucagagccaccaaaaaaaaaaaaaaaaaaaaaaaaaaaaaaaaaaaaaaaaaaaaaaaaaaaaaaaaaaaaaaaaaaaaaaaaaaaaaaaaaaaaaaaaaaaaaaaaaaaaa

SEQ ID NO: 17525 - RNA, 2046 nt, Artificial Sequence
  mRNA product Design b-4 (hSL-A100) comprising derived and/or modified sequence from LASV(Z0947-SLE-2011;Clade IV)__AIT17841__NP (opt4)
aggagagucccgcagucggcguccagcggcucugcuuguucgugugugugucguugcaggccuuauucaagcuuaccaugagcgccagcaaggagaucaagagcuuccuguggacccagagccugagaagagagcugagcggcuacugcagcaacaucaagcugcagguggugaaggacgcccaggcccugcugcacggccuggacuucagcgaggugagcaacgugcagagacugaugagaaaggagagaagagacgacaacgaccugaagagacugagagaccugaaccaggccgugaacaaccugguggagcugaagagcacccagcagaagagcauccugagagugggcacccugaccagcgacgaccugcugauccuggccgccgaccuggagaagcugaagagcaaggugaccagaaccgagagaccccugagcgccggcguguacaugggcaaccugagcagccagcagcuggaccagagaagagcccugcugaacaugaucggcaugagcggcagcaaccagggcgccagaaccggcagagacggcguggugagagugugggacgugaagaacgccgagcugcugaacaaccaguucggcaccaugcccagccugacccuggccugccugaccaagcagggccagguggaccugaacgacgccgugcaggcccugaccgaccugggccugaucuacaccgccaaguaccccaacaccagcgaccuggacagacugacccagagccaccccauccugaacaugaucgacaccaagaagagcagccugaacaucagcggcuacaacuucagccugggcgccgccgugaaggccggcgccugcaugcuggacggcggcaacaugcuggagaccaucaaggugagcccccagaccauggacggcauccugaagagcauccugaaggugaagaaggcccugggcauguucaucagcgacgcccccggcgagagaaaccccuacgagaacauccuguacaagaucugccugagcggcgacggcuggcccuacaucgccagcagaaccagcaucaccggcagagccugggagaacaccgugguggaccuggagagcgacggcaagccccagaaggccggcagcaacggcagcaacaagagccugcagagcgccggcuucaccgccggccugaccuacagccagcugaugacccugaaggacgccaugcugcagcuggaccccaacgccaagaccuggauggacaucgagggcagacccgaggaccccguggagaucgcccuguaccagcccagcagcggcugcuacauccacuucuucagagagcccaccgaccugaagcaguucaagcaggacgccaaguacagccacggcaucgacgugaccgaccuguucgccgcccagcccggccugaccagcgccgugaucgacgcccugcccagaaacauggugaucaccugccagggcagcgacgacaucagaaagcuguucgagagccagggcagaaaggacaucaagcugaucgacaucgcccugagcaagaccgacagcagaaaguacgagaacgccgugugggaccaguacaaggaccugugccacaugcacaccggcaucgugguggagaagaagaagagaggcggcaaggaggagaucaccccccacugcgcccugauggacugcaucauguucgacgccgccgugagcggcggccugaacaccagcgugcugagagccgugcugcccagagacaugguguucagaaccagcacccccagaguggugcugugaggacuaguaauaaggaaacuguaugaaugucugugggcaggaagugaagagauccuucuguaaagguuuuuggaauuaugucugcugaauaauaaacuuuuuugaaauaauaaaucugguagaaaaaugagaucucaaaggcucuuuucagagccaccaaaaaaaaaaaaaaaaaaaaaaaaaaaaaaaaaaaaaaaaaaaaaaaaaaaaaaaaaaaaaaaaaaaaaaaaaaaaaaaaaaaaaaaaaaaaaaaaaaaaa

SEQ ID NO: 17526 - RNA, 2046 nt, Artificial Sequence
  mRNA product Design b-4 (hSL-A100) comprising derived and/or modified sequence from LASV(Josiah;Clade IV)__NP_694869__NP (opt5)
aggagagucccgcagucggcguccagcggcucugcuuguucgugugugugucguugcaggccuuauucaagcuuaccaugagcgccuccaaggagaucaaaucuuuccuguggacccagagccucagacgggaacuguccggcuacugcucuaacauuaagcugcaaguggucaaagacgcucaggcccugcuccacgggcuggauuuuagcgagguuuccaaugugcagcgccuuaugagaaaggaacggcgcgacgauaacgaccugaaaagacuccgggaucugaaucaggcggugaacaaucuggucgagcucaagucuacacaacaaaagagcauccugcgcgugggaacgcuuaccuccgacgaucugcucauucuggcugccgaccuugaaaaacuuaagagcaaaguuaucagaacagagcggccccucucugccggcguguauauggggaaccuguccagccagcagcuggaucagcgcagagcucuccugaauaugauuggaaugucuggcgggaaccagggagcccgggcuggccgcgacggcgucgugagaguuugggaugugaagaaugccgagcuucugaacaaucaguucgggaccaugccuucccucacacuggcgugucuuaccaaacagggacaagucgaccugaacgaugccgugcaggcucucacagaccugggccugaucuacaccgccaaguauccgaauacgagcgaccucgaucggcugacccagucucaucccauccuuaacaugauugacacaaagaaauccagccugaauaucuccggguacaacuuuucucucggagcugccgugaaggcgggcgccugcaugcuggaugggggaaacaugcuugaaaccauuaaagucagcccucaaacaauggacggcauccugaaguccauucucaaaguuaagaaagcucugggcauguucaucagcgauacccccggggagcgcaauccuuaugaaaacauucuguacaagaucugucucucuggagacggcuggcccuauaucgccuccagaacgagcauuacagggcgggcuugggagaauaccgugguggaucuggagucugacggaaagccucagaaagccgauagcaacaauuccucuaagagccuucaguccgccggcuuuacagcugggcugaccuacagccagcucaugacccugaaagacgcgaugcugcaacuugauccgaacgccaagacauggauggacaucgaaggaagacccgaggacccugucgaaauugcucucuaccagcccucuuccggcugcuauauccacuucuuucgcgagccuacggaucugaaacaguucaagcaggacgccaaguacagccauggcauugaugugaccgaccuguuugccacacaacccgggcucaccucugcuguuaucgaugcccugccgcggaauauggugaucacaugucagggauccgacgauauuagaaaacuucuggaaagccagggccgcaaggacaucaaacucauugauaucgcgcuguccaagaccgacucucggaaauaugagaacgcugucugggaucaguacaaggaccugugccacaugcauacgggggugguuguggagaagaaaaagagaggaggcaaagaagagauuacaccucacugugcccuuauggauugcaucauguucgacgccgcugucagcgggggccucaauaccuccgugcugcgcgccguccugccccgggacaugguguuuagaaccucuacaccucgcguugugcucugaggacuaguaauaaggaaacuguaugaaugucugugggcaggaagugaagagauccuucuguaaagguuuuuggaauuaugucugcugaauaauaaacuuuuuugaaauaauaaaucugguagaaaaaugagaucucaaaggcucuuuucagagccaccaaaaaaaaaaaaaaaaaaaaaaaaaaaaaaaaaaaaaaaaaaaaaaaaaaaaaaaaaaaaaaaaaaaaaaaaaaaaaaaaaaaaaaaaaaaaaaaaaaaaa

SEQ ID NO: 17527 - RNA, 2046 nt, Artificial Sequence
  mRNA product Design b-4 (hSL-A100) comprising derived and/or modified sequence from LASV(LP;Clade I)__AAF86702__NP (opt5)
aggagagucccgcagucggcguccagcggcucugcuuguucgugugugugucguugcaggccuuauucaagcuuaccaugagcaacuccaaggagaucaaaucuuuccuguggacccagagccucagacgggaacuguccggcuacugcucuaauauuaagcuccaaguggucaaagacgcccaggcucugcuccacgggcuggauuuuagcgagguuuccaacgugcagcgccuuaugagaaagcagaaacgggacgaugccgaccugaagcgccucagagaucugaaucaagcggugaacaaucuggucgaacucaagucuacacagcagaaaaacgugcugcggguuggaacgcuuagcuccgacgaucugaucacccucgcugccgaccuggagaaacuuaaaagcaaggugauucgcacagaaagaccccugucuuccggcgucuauauggggaaucucagcucucagcaacuggaucagcggcgcgcccugcucuccaugaucggaaugagcggcgggccucagggaaacagaaccggcggcgacggggugguucgggugugggaugucaaaaaugcugagcugcuuaacaaucaguucggaacaaugccgucucugacccucgccugucugacaaagcaaggccagguggaccuuaacgaugcugugcaggcccugaccgaccucgggcugauuuacacggcgaaguaucccaauuccagcgaccuggauaugcucacccaaucccauccuauccugggaauggucgacacaaagaagucuagccuuaacaucuccggcuacaauuuuagccugggggccgcuguuaaagccggagcuugcaugcucgauggcggcaacaugcuggagaccauuaaggugucuccccagacaauggacgggauccuuaaauccauucugaaggugaaacgcagccucggaauguucaucucugauaccccuggcgaaagaaaccccuaugagaauauucuguacaagaucugucugagcggggaaggauggccuuauauugccucccggacgucuaucacaggccgcgcgugggagaacacccucgucgaccuggagagcgauaauaagccgcccaaacuuaacuccgccgggagcaauaagucucugcaggcugccggacucaacgcuggccugacauacucccagcugaugacccuuaaagacugcaugcuccaacuggauccuagcucuaagaccuggaucgacauugaaggcagacccgaggauccuguggaaaucgcccuguuucagcccuccagcggguguuacauucacuucuuucgggagccgacagaccucaaacaguucaagcaggacgccaaguauucccauggaaucgauguuacggaccuguuuucuacccaaccuggccuuacaagcgcugugauugaagcgcugcccagaaauaugguccuuaccugccagggguccgaugacaucaaaaagcugcuggagucucagggacgccgggauaucaaacuuauugacaucagccucuccaaggccgauagcagaaaauucgagaacgcugugugggaccaguacaaggaucugugucacaugcauacaggcguuguggucgaaaagaaaaagcgcgggggcaaagaggaaauuaccccucacugcgcccugcucgacuguaucauguuugaugccgcuacgacaggaucucugaauauuaccacccuucgggccgugcugcccagagacauggucuuccgcacauccacccccaaggugguucucugaggacuaguaauaaggaaacuguaugaaugucugugggcaggaagugaagagauccuucuguaaagguuuuuggaauuaugucugcugaauaauaaacuuuuuugaaauaauaaaucugguagaaaaaugagaucucaaaggcucuuuucagagccaccaaaaaaaaaaaaaaaaaaaaaaaaaaaaaaaaaaaaaaaaaaaaaaaaaaaaaaaaaaaaaaaaaaaaaaaaaaaaaaaaaaaaaaaaaaaaaaaaaaaaa

SEQ ID NO: 17528 - RNA, 2046 nt, Artificial Sequence
  mRNA product Design b-4 (hSL-A100) comprising derived and/or modified sequence from LASV(803213;Clade II)__AAF86704__NP (opt5)
aggagagucccgcagucggcguccagcggcucugcuuguucgugugugugucguugcaggccuuauucaagcuuaccaugagcgccuccaaggaggugaaaucuuuccuguggacccagagccucagacgggaacuguccggcuacugcucuaacaucaaacuucaagucguuaaggacgcucaggcccugcuccacgggcuggauuuuagcgaggugaauaacgugcagcgccuuaugagaaagcagaaacgggacgauggagaccugaagcgccucagagaucugaaucaagcggucaacaaucugguggaacucaaguccacacagcagaaaucuauucugcggguuggcacgcuuaccagcgacgaucugcucacacuggcugccgaccuugagaagcugaaauccaaggugauccgcaccgaaagaccccucagcucuggggucuauaugggaaaccuguccacacagcaacuggagcagcggcgcgcccuccugaauaugauuggcauggugggaggagcucagggcacccagccuggcagagaugggguugugcgggucugggacgugaaaaacccggaucuucugaauaaccaauucggaacaaugcccagccucacccuggccugucuuacgaagcagggccagguggaccugaaugaugcuguccucgcccugaccgaccuggggcucaucuacacagcgaaguauccuaacucuuccgaccuggaucgccuuagccaaucucaucccauucugaauaugguugacaccaaaaaguccagccucaacaucuccggauacaauuuuucucugggcgccgcugugaaagccggggcuugcaugcuugauggaggcaacaugcuggagacaaucaaggugaccccucagacgauggacggcauucucaaaagcauccugaaggucaaaagaucccuggggauguucgugagcgauacacccggagaacggaacccuuaugagaauauucucuacaagaucugucugucuggcgacggguggccguauauugccucccgcaccagcaucguugggagagcgugggaaaacacaaccguggaucuugagucugacggcaagccccagaaagucgggaccgccggaagcaauaagucccugcagucugcuggcuuuccuacaggccucacguacagccaacugaugacccugaaagauuccaugaugcagcuugaccccagcgccaagacauggauugauaucgaggggcggccugaagaccccguggagaucgcucucuaccagccgaugucuggaugcuauauucacuucuuuagagaaccuaccgaccugaaacaguucaagcaagaugccaaguacucccauggcaucgacguugccgaucuguuucccgcucagccugggcucacaagcgcggugauugaggcccugccccgcaacaugguccuuaccugucagggaucugacgauaucaaaaagcugcucgacucccagggccggagagauauuaaacugaucgacaucagccuguccaagguggauucucgcaaauucgaaaaugcugucugggaccaaugcaaggaucuuugucacaugcauacgggggugguuguggagaagaaaaagcggggcggaaaagaggaaauuacaccccacugcgcccucauggacuguaucauguuugaugccgcugucagcggcgggcugaacauuccugugcugagagccguucucccgcgcgacaugguguuccggaccuccucucccaaggucgugcugugaggacuaguaauaaggaaacuguaugaaugucugugggcaggaagugaagagauccuucuguaaagguuuuuggaauuaugucugcugaauaauaaacuuuuuugaaauaauaaaucugguagaaaaaugagaucucaaaggcucuuuucagagccaccaaaaaaaaaaaaaaaaaaaaaaaaaaaaaaaaaaaaaaaaaaaaaaaaaaaaaaaaaaaaaaaaaaaaaaaaaaaaaaaaaaaaaaaaaaaaaaaaaaaaa

SEQ ID NO: 17529 - RNA, 2049 nt, Artificial Sequence
  mRNA product Design b-4 (hSL-A100) comprising derived and/or modified sequence from LASV(GA391;Clade III)__CAA36646__NP (opt5)
aggagagucccgcagucggcguccagcggcucugcuuguucgugugugugucguugcaggccuuauucaagcuuaccaugagcgccuccaaggaggugagaucuuuccuguggacccagagccuccggcgcgaacuguccggcuacugcucuaacaucaaacuucaagucguuaaggacgcucaggcccugcuccacgggcuggauuuuagcgagguguccaaugugcagagacuuaugcggaaacagaagcgcgacgauggagaccugaaaagacuccgggaucugaaccaagcggucaauaaccugguggaacucaagucuacacagcagaaaagcguucugcgcgugggcacgcuuuccagcgacgaucugcucauucuggcugccgaccuugagaaacugaagucuaaagucaccagaacagaacggccccucuccagcgggguguauaugggaaaucugucuucccagcaacuggaucagcgcagagcccuccugaacaugaucggcaugaccgggguuagcggaggcggcaagggggcuucugacggaauugugcgggucugggaugugaaaaaugccgagcuucugaacaaucaguucggcacaaugccuucccucacccuggcuugucuuacaaagcaggggcaaguggaccugaacgaugccguccaggcgcucaccgaccugggacugaucuacacggccaaguauccgaauagcuccgaccucgaucgccugucucagagccaucccauucuuaacaugaucgacaccaaaaaguccagccugaauaucucuggcuacaacuuuucccucggggcugccguuaaagcuggagccugcaugcuggauggcggcaauaugcuugagacaauuaaggugagcccucaaaccauggacgggauccugaaaucuauucucaaggugaaaaagagccugggaauguucgucuccgauacacccggcgaaagaaacccuuaugagaacauccuguacaagauuugucucucuggggacggauggcccuauaucgcgagccggaccuccauugugggccgcgccugggaaaauacgguuguggaucuggagcaggacaacaaaccucagaagaucgggaauggaggcagcaacaaaucucuucaguccgcuggcuuugccgcugggcugacauacagccaacucaugacccugaaggauuucaaaugcuuuaaucugaucccgaacgccaagacauggauggacauugagggaagacccgaagauccugucgagaucgcccuuuaccagcccucuuccggcuguuaugugcacuucuuucgggaaccuaccgaccucaagcaguucaaacaggacgcuaaguacagccaugggauugauguuaccgaccuguuugcggcccaacccggacugacauccgcugugaucgaggcccucccgagaaauauggucauuacgugccagggcucugaagauauccgcaaacugcuugagagccaggggcggagagacaucaagcugauugauaucacccucuccaaagccgacucucgcaaguucgagaacgcugugugggaucaguuuaaggaccugugucacaugcauacaggcgucgugguugaaaagaagaaacggggaggcaaggaggaaauuaccccucacugcgcccugauggauuguaucauguucgacgcggcugugagcgggggacuugaugccaaaguccucagagugguucugccccgcgacaugguguuccggacauccaccccuaaggucgugcugugaggacuaguaauaaggaaacuguaugaaugucugugggcaggaagugaagagauccuucuguaaagguuuuuggaauuaugucugcugaauaauaaacuuuuuugaaauaauaaaucugguagaaaaaugagaucucaaaggcucuuuucagagccaccaaaaaaaaaaaaaaaaaaaaaaaaaaaaaaaaaaaaaaaaaaaaaaaaaaaaaaaaaaaaaaaaaaaaaaaaaaaaaaaaaaaaaaaaaaaaaaaaaaaaa

SEQ ID NO: 17530 - RNA, 2046 nt, Artificial Sequence
  mRNA product Design b-4 (hSL-A100) comprising derived and/or modified sequence from LASV(AV;Clade V)__CCA30315__NP (opt5)
aggagagucccgcagucggcguccagcggcucugcuuguucgugugugugucguugcaggccuuauucaagcuuaccaugagcgccuccaaggaggugaaaucuuuccuguggacccagagccucagacgggaacuguccggcuacugcucuaacaucaaacuucaagucguuaaggacgcucaggcccugcuccacgggcuggauuuuagcgagguguccaaugugcagcgccuuaugagaaagcagcggcgcgacgauucugaccugaaaagacuccgggaucugaaccaagcggucaauaaccugguggaacucaagagcacacagcagaaguccguucugcgcgugggaacgcuuagcucugacgaucugcucacccuggcugccgaccuugagaaacugaaguccaaagucacaagaaccgaacggccccucagcucuggcguguauauggggaaucuguccagccagcaacuggaucagcgcagagcccuccugaaccuuauuggaaugacaaauggcucucaggggucccaggcuggacgggacggcguugugcgcgucugggaugugaagaacgccgagcugcucaauaaccaauucggcaccaugccuagccugacacuugcuugucugaccaaacagggacagguggaccucaaugaugucguucaagcccugacggaccuggggcucaucuacaccgcgaaguauccgaacacauccgaccuggauagacuuacccagucucaucccauucugaauaugaucgacacaaagaaaagcucccucaacauuagcggcuacaauuuuucucugggggccgcugugaaggccggagcuugcaugcuugauggcgggaacaugcuggagaccaucaaaguguccccucagagcauggacggaauccucaagucuauucugaaagucaagcgggcccugggcauguucgugagcgauacgcccggcgaacgcaacccuuaugagaauauccucuacaaaauuugucuguccggggacggauggcccuauaucgcgucuagaacaagcauuguuggccgggccugggaaaacaccguggucgaucuugagacagacgggaagccucagaagaucggauccggcaauagcaacaaaucucugcaauccgcuggguuuagcgccggacucaccuacucucagcugaugacccugaaggaugcuaugcuucagcucgacccgaaugccaaaacauggauggauauugagggcagacccgaagacccuguggagguugcccuguaccagcccaucuccggcugcuauauccacuucuuucgcgaaccuacggaccugaagcaauucaaacaggaugcuaaguacagccaugggauugacaucgcggaucucuuugccgcucagcccggacugaccuccgccgugauugaggcccuuccgcggaacauggucaucacaugucagggcucugaagacauuaagaaacugcucgagagccaagggagaaaggauaucaaacugaucgacauugcucuguccaagaucgauucucgcaaauucgagaaugccgugugggaccaguauaaggaucuuugccacaugcauaccggagucgugguugaaaagaaaaagcggggcgggaaagaggaaauuacaccucacugugcgcucauggacugcaucauguuugaugcugccgugagcggcggacugaacacccugguccucagagccgugcugccccgcgacaugguuuuccggacguccacaccuagagugguccuuugaggacuaguaauaaggaaacuguaugaaugucugugggcaggaagugaagagauccuucuguaaagguuuuuggaauuaugucugcugaauaauaaacuuuuuugaaauaauaaaucugguagaaaaaugagaucucaaaggcucuuuucagagccaccaaaaaaaaaaaaaaaaaaaaaaaaaaaaaaaaaaaaaaaaaaaaaaaaaaaaaaaaaaaaaaaaaaaaaaaaaaaaaaaaaaaaaaaaaaaaaaaaaaaaa

SEQ ID NO: 17531 - RNA, 2046 nt, Artificial Sequence
  mRNA product Design b-4 (hSL-A100) comprising derived and/or modified sequence from LASV(Togo/2016/7082;Clade VI)__AMR44578__NP (opt5)
aggagagucccgcagucggcguccagcggcucugcuuguucgugugugugucguugcaggccuuauucaagcuuaccaugagcaacuccaaggaggugaaaucuuuccuguggacccagagccucagacgggaacuguccggcuacugcucuaauaucaaacuucaagucguuaaagacgcccaggcucugcuccacgggcuggauuuuagcgagguguccaacgugcagcgccuuaugagaaagcagaaacgggacgauggagaccugaagcgccucagagaucugaaucaagccgucaacaaucugguggaacucaagucuguucagcagaaaagcauucugcgggugggcacacuuacguccgacgaucugcucacccuggcggcugaccuugagaagcugaaaagcaaggucacacgcaccgaaagaccccucucuuccgggguguauaugggaaaccugagcucucagcaacuggaucagcggcgcgcccuccuguccaugaucggcaugagcgggggaaaucagaacucucagccuaaaggcgacggcguugugagagucugggaugugaagaaugccgaccuucugaacaaucaauucgggacaaugccgucccucacccuggcuugucuuacaaagcagggacagguggaucugaacgacgccguccaagcucucaccgaccugggccugauuuacacggccaaauaucccaauagcuccgaucucgaccggcugucucagagccauccuauccuuaacaugauugauaccaagaaauccagccugaauaucucuggguacaacuuuucccucggagcggccaucaagacaggcgcuugcaugcuggacgggggaaacaugcuugagaccauuaaaguuacaccccagaccauggauggcauccucaagagcauucugaaagugaagcgcucucugggcauguucaucagcgacacgccuggggagagaaaucccuaugaaaacauucuguacaagaucugucucuccggagauggcuggccuuauauugccucucggacagcuaucaucgggcgcgccugggagaauaccguggucgaccuggaaagcgauuccaaaccgcagaagauuggaagcaacggcucuaauaaaucccuucaaagcgcgggguuugcccccggacugacauacucucagcucaugacccugaaggacuccaugcugcagcuugauccuaacgcuaaaaccuggaucgacauugagggcagacccgaggacccuguggaaguugcccucuuccagcccaucagcggcugcuacauucacuuuuuccgggagccgacagaucugaagcaauuuaagcaggacgcuaaauauucccaugggaucgaugugacggaccuguucgccgcccagccuggacucaccucugcugucaucgaagcgcugcccagaaauauggugcuuacaugucagggcagcgaugacauuaagaaacugcucgauucccaagggcgccgggacaucaagcugauugauguuucucugaacaaaaucgacagcagaaaguuugagaaugccgugugggaucaguacaaggaccuuugccacaugcauaccggagucguggucgaaaagaagaaaaagggcgggaaagaggagauuacaccucacugugcucuccuggauugcaucauguucgacgccgccguguccggcggacugaacgcuaccguucuccgcgccgugcugccccgggacauggucuuuagaacgagcucucccaaggugguucuuugaggacuaguaauaaggaaacuguaugaaugucugugggcaggaagugaagagauccuucuguaaagguuuuuggaauuaugucugcugaauaauaaacuuuuuugaaauaauaaaucugguagaaaaaugagaucucaaaggcucuuuucagagccaccaaaaaaaaaaaaaaaaaaaaaaaaaaaaaaaaaaaaaaaaaaaaaaaaaaaaaaaaaaaaaaaaaaaaaaaaaaaaaaaaaaaaaaaaaaaaaaaaaaaaa

SEQ ID NO: 17532 - RNA, 2046 nt, Artificial Sequence
  mRNA product Design b-4 (hSL-A100) comprising derived and/or modified sequence from LASV(KAK-428;Clade n.d. (VII))__ANH09741__NP (opt5)
aggagagucccgcagucggcguccagcggcucugcuuguucgugugugugucguugcaggccuuauucaagcuuaccaugagcaacuccaaggaggugaaaucuuuccuguggacccagagccucagacgggaacuguccggcuacugcacaaauaucaaacuucaagucguuaaggacgcccaggcucugcuccacgggcuggauuuuucugaggugagcaacgugcagcgccuuaugagaaagcagaaacgggacgauaaugaccugaagcgccucagagaucugaaccaagccgucaauaaccugguggaacucaaguccguucagcagaaaucugugcugaaggucggaacgcuuaauagcgacgaucugcucacccuggcggcugaccuugagaaacugaaguccaaagugguucggacagaacgcccccucagcucuggcguguauauggggaaccuguccagccagcaacuggaucagagacgggcccuccugaauaugauuggaauggccggcgggucucagggaaaccagccuucccgcgacggcgucgugagagugugggaugucaagaaugcugaccuucugaacaaucaauucggcaccaugccgagccucacacuggccugucuuaccaagcaggggcagguugaucugaacgacguggugcucgcucugacagaccugggacucaucuacaccgccaaauaucccaauucuuccgaucuggaccggcuuagccaaaaccauccuguccugaacaugauugaugugaauaaguccucucucaacaucagcggcuacaauuuuucccugggggcggccguuaaagcuggagccugcaugcuugacggcgggaacaugcuggagacgauuaagaucagcccccagaccguggauggaauccucaaaucuauucugaaggucaaacgcgcucugggcauguucguguccgacacaccuggcgagagaaaucccuaugaaaacauccucuacaagguuugucugagcgggaauggauggccuuauauugccucucggaccagcaucgugggccgcgcgugggagaacacagucguggaucuugaauccaauaagaaccagccgaaagucgggaauaacggaucuaauaagaugcugcagagcuccggcuuugccaccgggcucacguacagccaacugaugacacugagagacucuaugcuucagcucgaucccaccgcuaaaacauggauugacaucgagggacggccugaggaucccguggaacuggcccuguuccagccuuccagcggcugcuacauucacuuuuucagagagcccaccgaccucaagcaguuuaaacaagacgcuaaguauucucauggcaucgauguuaacgaccuguucuccgcccagccggggcuuaccagcgccgugcuggaagcucucccucgcaauaugguccugacaugucagggauccgaugacauccggaagcugcuugauucucaggacagaaaagauauuaagcucaucgacauuagccuguccaaagcggaugcccgcaaguuugagaacgacgugugggaucaauucaaagaccugugccacaugcauacgggcaucguuguggaaaagaagaaaaagggagggaaacaggagaugacaccccacugugcucuccuggauugcauuauguuugacgccgccgucucuggcgggcuuaacgugccuacccugcgggcugugcuccccaccgacaugguuuucagaacaaucaccacgaaggucgugcugugaggacuaguaauaaggaaacuguaugaaugucugugggcaggaagugaagagauccuucuguaaagguuuuuggaauuaugucugcugaauaauaaacuuuuuugaaauaauaaaucugguagaaaaaugagaucucaaaggcucuuuucagagccaccaaaaaaaaaaaaaaaaaaaaaaaaaaaaaaaaaaaaaaaaaaaaaaaaaaaaaaaaaaaaaaaaaaaaaaaaaaaaaaaaaaaaaaaaaaaaaaaaaaaaa

SEQ ID NO: 17533 - RNA, 2046 nt, Artificial Sequence; identical to SEQ ID NO: 17527
  mRNA product Design b-4 (hSL-A100) comprising derived and/or modified sequence from LASV(Pinneo-NIG-1969;Clade I)__AIT17837__NP (opt5)

SEQ ID NO: 17534 - RNA, 2046 nt, Artificial Sequence
  mRNA product Design b-4 (hSL-A100) comprising derived and/or modified sequence from LASV(ISTH0009-NIG-2011;Clade II)__AIT17405__NP (opt5)
aggagagucccgcagucggcguccagcggcucugcuuguucgugugugugucguugcaggccuuauucaagcuuaccaugagcguguccaaggaggucaaaucuuuccuguggacccagagccucagacgggaacuguccggcuacugcucuaacaucaaacuucaaguugugaaggacgcccaggcucugcuccacgggcuggauuuuagcgagguguccaauguccagcgccuuaugagaaagcagaaacgggacgauucugaccugaagcgccucagagaucugaaccaagccgugaauaaccugguugaacucaagagcacacagcagaaauccauucugcgggugggaacgcuuaccagcgacgaucugcucacacuggcggcugaccuugagaagcugaaaucuaaggucauccgcaccgaaagaccccucuccagcggcguguauauggggaaucugucuacacagcaacuggagcagcggcgcgcccuccugaacaugauuggaaugguuggcggggcccagggaacccagccuggcagagauggcgugguccgggugugggacgugaaaaauccggaucuucugaacaaucaauucgggacaaugcccucccucacccuggcuugucuuacgaagcagggacaggucgaccugaacgaugccguucucgcucugaccgaccugggccucaucuacacagccaaguauccuaauagcucugaccuggaucgccuuucccaaagccaucccauucugaacaugguggacaucaaaaaguccucucucaauaucagcggguacaacuuuucccugggagcggccgugaaagcuggcgccugcaugcuugaugggggaaauaugcuggagaccauuaaggucacaccucagaccauggacggcauccucaaaagcauucugaaggugaaaagaucucugggcauguucguuuccgauacgcccggggaacggaacccuuaugagaacauccucuacaagauuugucugagcggagacggcuggccguauaucgcuucucgcacaagcauuguggggagagccugggaaaauaccacagucgaucuugaguccgacggaaagccccagaaagugggcucugcggggagcaacaagucccugcagagcgccggauuuccuaccggccucaccuacucucaacugaugacacugaaagauuccaugaugcagcuugaccccagcgcuaagacguggaucgauaucgagggccggccugaagaccccguugagauugcccucuaccagccgaugucugggugcuauauccacuucuuuagagaaccuaccgaccugaaacaguucaagcaagaugcuaaguacucccauggaauugacguggccgaucuguuucccgcccagccuggccucacaagcgcugucaucgaggcgcugccccgcaauauggugcuuaccugucagggguccgacgauauuaaacggcugcucgacucucagggaagacgcgauaucaagcugaucgacauugcccugagcaaagcugauucccggagauucgaaaacgccgucugggaccaaugcaaggaucuuugucacaugcauacaggcgugguuguggagaaaaagaagcgcgggggcaaagaggaaaucacgccccacugcgcccucauggacuguauuauguaugaugcugccgucucuggaggccugaauaucccugugcugcgggcgguucucccgagagacaugguguuucgcaccagcucccccaaggucgugcugugaggacuaguaauaaggaaacuguaugaaugucugugggcaggaagugaagagauccuucuguaaagguuuuuggaauuaugucugcugaauaauaaacuuuuuugaaauaauaaaucugguagaaaaaugagaucucaaaggcucuuuucagagccaccaaaaaaaaaaaaaaaaaaaaaaaaaaaaaaaaaaaaaaaaaaaaaaaaaaaaaaaaaaaaaaaaaaaaaaaaaaaaaaaaaaaaaaaaaaaaaaaaaaaaa

SEQ ID NO: 17535 - RNA, 2046 nt, Artificial Sequence
  mRNA product Design b-4 (hSL-A100) comprising derived and/or modified sequence from LASV(ISTH2010-NIG-2012;Clade II)__AIT17483__NP (opt5)
aggagagucccgcagucggcguccagcggcucugcuuguucgugugugugucguugcaggccuuauucaagcuuaccaugagcgccuccaaggaggugaaaucuuuccuguggacccagagccucagacgggaacuguccggcuacugcucuaacaucaaacuucaagucguuaaggacgcucaggcccugcuccacgggcuggauuuuagcgagguguccaaugugcagcgccuuaugagaaagcagaaacgggacgauucugaccugaagcgccucagagaucugaaccaagcggucaauaaccugguggaacucaagagcacacagcagaaauccauucugcggguuggaacgcuuaccagcgacgaucugcucacacuggcugccgaccuugagaagcugaaaucuaaggugauccgcaccgaaagaccccucuccagcggcgucuauauggggaaucugucuacacagcaacuggagcagcggcgcgcccuccugaaccuuauuggaauggugggcggggcucagggaacccagccuggcagagauggcguugugcgggucugggacgugaaaaauccggaucugcucaacaaucaauucgggacaaugcccucccugacccuugccugucugacgaagcagggacagguggaccucaacgaugcuguccuggcccugaccgaccucggccugaucuacacagcgaaguauccuaauagcucugaccuugaucgccugucccaaagccaucccauucucaacaugguugacaccaaaaaguccucucugaauaucagcggguuuaacuucucccuuggagccgcugugaaagccggcgcuugcaugcuggaugggggaaauaugcucgagacaaucaaggugaccccucagacgauggacggcauucugaaaagcauccugaaggucaaaaagucucucggcauguuuguguccgauacacccggggaaagaaacccuuacgagaacauucuguauaagaucugucuuagcggagacggcuggccguacauugccucucggaccagcaucguugggcgcgcgugggaaaauacaaccguggaucuggaguccgacggaaaaccccacaaggucggcaccgccgggucuaacaaaagccuccaguccgcuggauucccuacaggccugacguauagccagcugaugacccuuaaggauucuaugaugcaacucgaccccuccgccaaaacauggauugauaucgagggcagaccugaagaccccguggagaucgcucuguaccagccgaugagcgggugcuacauucacuuuuuccgggaaccuaccgaccugaagcaguuuaagcaggaugccaaauauucucauggaaucgacguugccgaucucuuccccgcucaaccuggccugacauccgcggugauugaggcccuucccagaaauaugguccugaccugucaggggagcgacgauaucaagcgccuccuggacucccagggacggagagauauuaaacugaucgacaucgcucuuucuaaggccgauagccgccgguuugaaaacgccgugugggaccagugcaaagaucucugucauaugcacacgggcgucgugguugagaagaagaaaagagggggcaaggaggaaauuacaccccacugcgcucugauggacuguaucauguacgaugccgcgguguccggaggccugaauauuccuguccuccgcgcugugcugccgcgggacaugguuuucagaaccucuagccccaaagugguccuuugaggacuaguaauaaggaaacuguaugaaugucugugggcaggaagugaagagauccuucuguaaagguuuuuggaauuaugucugcugaauaauaaacuuuuuugaaauaauaaaucugguagaaaaaugagaucucaaaggcucuuuucagagccaccaaaaaaaaaaaaaaaaaaaaaaaaaaaaaaaaaaaaaaaaaaaaaaaaaaaaaaaaaaaaaaaaaaaaaaaaaaaaaaaaaaaaaaaaaaaaaaaaaaaaa

SEQ ID NO: 17536 - RNA, 2046 nt, Artificial Sequence
  mRNA product Design b-4 (hSL-A100) comprising derived and/or modified sequence from LASV(Lassa virus/H.sapiens-wt/NGA/2015/ISTH_0543;Clade II)__AVO03640__NP (opt5)
aggagagucccgcagucggcguccagcggcucugcuuguucgugugugugucguugcaggccuuauucaagcuuaccaugagcgccuccaaggaggugaaaucuuuccuguggacccagagccucagacgggaacuguccggcuacugcucuaacaucaaacuucaagucguuaaggacgcucaggcccugcuccacgggcuggauuuuagcgagguguccaaugugcagcgccuuaugagaaagcagaaacgggacgauucugaccugaagcgccucagagaucugaaccaagcggucaauaaccugguggaacucaagagcacacagcagaaauccauucugcggguuggaacgcuuaccagcgacgaucugcucacacuggcugccgaccuugagaagcugaaaucuaaggugauccgcaccgaaagaccccucuccagcggcgucuauauggggaaucugucuacacagcaacuggagcagcggcgcgcccuccugaacaugauuggaauggugggcggggcucagggaacccagccuggcagagauggcguugugcgggucugggacgugaaaaauccggaucuucugaacaaucaauucgggacaaugcccucccucacccuggccugucuuacgaagcagggacagguggaccugaacgaugcuguccucgcccugaccgaccugggccucaucuacacagcgaaguauccuaauagcucugaccuggaucgccuuucccaaagccaucccauucugaacaugguugacaccaaaaaguccucucucaauaucagcggguacaacuuuucccugggagccgcugugaaagccggcgcuugcaugcuugaugggggaaauaugcuggagacaaucaaggugaccccucagacgauggacggcauucucaaaagcauccugaaggucaaaaagucucugggcauguucguguccgauacacccggggaaagaaacccuuaugagaacauucucuacaagaucugucugagcggagacggcuggccguauauugccucucggaccagcaucguugggcgcgcgugggaaaauacaaccguggaucuugaguccgacggaaaaccccagaaggucggcucugccgggagcaacaaaucccugcagagcgcuggauuuccuaccggccucacauacucucaacugaugacgcugaaggauuccaugaugcagcuugaccccagcgccaaaaccuggauugauaucgagggcagaccugaagaccccguggagaucgcucucuaccagccgaugucugggugcuauauucacuucuuucgggaaccuacagaccugaagcaguucaagcaagaugccaaauacucccauggaaucgacguugccgaucuguuucccgcucagccuggccucaccagcgcggugauugaggcccugcccagaaauaugguccuuacaugucagggguccgacgauaucaagcgccugcucgacucucagggacggaaagauauuaagcugaucgacaucgcucugagcaaagccgauuccagacgcuucgaaaacgccgugugggaccaaugcaaggaucuuugucacaugcauaccggcgucgugguugagaagaaaaagagagggggcaaagaggaaauuacgccccacugcgcucucauggacuguaucauguaugaugccgcggugucuggaggccugaauauuccuguccugcgggcugugcucccgcgcgacaugguuuuucggacaagcucccccaaggugguccugugaggacuaguaauaaggaaacuguaugaaugucugugggcaggaagugaagagauccuucuguaaagguuuuuggaauuaugucugcugaauaauaaacuuuuuugaaauaauaaaucugguagaaaaaugagaucucaaaggcucuuuucagagccaccaaaaaaaaaaaaaaaaaaaaaaaaaaaaaaaaaaaaaaaaaaaaaaaaaaaaaaaaaaaaaaaaaaaaaaaaaaaaaaaaaaaaaaaaaaaaaaaaaaaaa

SEQ ID NO: 17537 - RNA, 2046 nt, Artificial Sequence
  mRNA product Design b-4 (hSL-A100) comprising derived and/or modified sequence from LASV(Lassa virus/H.sapiens-wt/NGA/2016/ISTH_0009;Clade II)__AVO03572__NP (opt5)
aggagagucccgcagucggcguccagcggcucugcuuguucgugugugugucguugcaggccuuauucaagcuuaccaugagcgccuccaaggaggugaaaucuuuccuguggacccagagccucagacgggaacuguccggcuacugcucuaacaucaaacuucaagucguuaaggacgcucaggcccugcuccacgggcuggauuuuagcgagguguccaaugugcagcgccuuaugagaaagcagaaacgggacgauucugaccugaagcgccucagagaucugaaccaagcggucaauaaccugguggaacucaagagcacacagcagaaauccauucugcggguuggaacgcuuaccagcgacgaucugcucacacuggcugccgaccuugagaagcugaaaucuaaggugauccgcaccgaaagaccccucuccagcggcgucuauauggggaaucugucuacacagcaacuggagcagcggcgcgcccuccugaacaugauuggaauggugggcggggcucagggaacccagccuggcagagauggcguugugcgggucugggacgugaaaaauccggaucuucugaacaaucaauucgggacaaugcccucccucacccuggccugucuuacgaagcagggacagguggaccugaacgaugcuguccucgcccugaccgaccugggccucaucuacacagcgaaguauccuaauagcucugaccuggaucgccuuucccaaagccaucccauucugaacaugguugacaccaaaaaguccucucucaauaucagcggguacaacuuuucccugggagccgcugugaaagccggcgcuugcaugcuugaugggggaaauaugcuggagacaaucaaggugaccccucagacgauggacggcauucucaaaagcauccugaaggucaaaaagucucugggcauguucguguccgauacacccggggaaagaaacccuuaugagaacauucucuacaagaucugucugagcggagacggcuggccguauauugccucucggaccagcaucguugggcgcgcgugggaaaauacaaccguggaucuugaguccgacggaaaaccccagaaggucggcucugccgggagcaacaaaucccugcagagcgcuggauuuccuaccggccucacauacucucaacugaugacgcugaaggauuccaugaugcagcuugaccccagcgccaaaaccuggauugauaucgagggcagaccugaagaccccguggagaucgcucucuaccagccgaugucugggugcuauauucacuucuuucgggaaccuacagaccugaagcaguucaagcaagaugccaaauacucccauggaaucgacguugccgaucuguuucccgcucagccuggccucaccagcgcggugauugaggcccugcccagaaauaugguccuuacaugucagggguccgacgauaucaagcgccugcucgacucucagggacggagagauauuaaacugaucgacaucgcucugagcaaggccgauucccgccgguucgaaaacgccgugugggaccaaugcaaagaucuuugucacaugcauaccggcgucgugguugagaagaagaaaagagggggcaaggaggaaauuacgccccacugcgcucucauggacuguaucauguaugaugccgcggugucuggaggccugaauauuccuguccugcgcgcugugcucccgcgggacaugguuuuuagaacaagcucccccaaagugguccugugaggacuaguaauaaggaaacuguaugaaugucugugggcaggaagugaagagauccuucuguaaagguuuuuggaauuaugucugcugaauaauaaacuuuuuugaaauaauaaaucugguagaaaaaugagaucucaaaggcucuuuucagagccaccaaaaaaaaaaaaaaaaaaaaaaaaaaaaaaaaaaaaaaaaaaaaaaaaaaaaaaaaaaaaaaaaaaaaaaaaaaaaaaaaaaaaaaaaaaaaaaaaaaaaa

SEQ ID NO: 17538 - RNA, 2046 nt, Artificial Sequence
  mRNA product Design b-4 (hSL-A100) comprising derived and/or modified sequence from LASV(Lassa virus/H.sapiens-wt/NGA/2016/ISTH_0017;Clade II)__AVO03568__NP (opt5)
aggagagucccgcagucggcguccagcggcucugcuuguucgugugugugucguugcaggccuuauucaagcuuaccaugagcgccuccaaggaggugaaaucuuuccuguggacccagagccucagacgggaacuguccggcuacugcucuagcaucaaacuucaagucguuaaggacgcucaggcccugcuccacgggcuggauuuuuccgaggugucuaacgugcagcgccuuaugagaaagcagaaacgggacgauagcgaccugaagcgccucagagaucugaaucaagcggucaacaaucugguggaacucaaguccacacagcagaaaagcauucugcggguuggaacgcuuaccucugacgaucugcucacacuggcugccgaccuugagaagcugaaauccaaggugauccgcaccgaaagaccccucagcucuggcgucuauauggggaaccuguccacacagcaacuggagcagcggcgcgcccuccugaauaugauuggaauggcuggcggggcccagggaacccagccuggcagagauggcgugguucgggugugggacgucaaaaacccggaucuucugaauaaccaauucgggacaaugcccagccucacccuggcuugucuuacgaagcagggacagguggaccugaaugaugccgugcucgcgcugaccgaccugggccucaucuacacagccaaguauccuaacucuuccgaccuggaucgccuuagccaaucccaucccauucugaauauggucgacaccaaaaagucuagccucaacaucuccggguacaauuuuagccugggagcugccguuaaagcuggcgccugcaugcuugaugggggaaacaugcuggagacaaucaaggugaccccucagacgauggacggcauucucaaaucuauccugaaggugaaaagaucccugggcauguucgucagcgaugcgcccggggaacggaauccuuaugagaacauucucuacaagaucugucugucuggagacggcuggccguauauugccagccgcacauccaucguggggagagcuugggaaaacaccacaguugaucuugagucugacggaaagccccagaaagugggcgccaccgggagcaauaagucccugcagagcgcuggauuuccuaccggccucacauacucucaacugaugacgcugaaagauuccaugaugcagcuugaccccagcgccaagaccuggauugauaucgagggccggccugaagaccccgucgagguggcccucuaccagccgguuucugggugcuauauccacuucuuuagagaaccuacagaccugaaacaguucaagcaagaugcuaaguacucccauggaauugacguggcggaucuguuucccgcccagccuggccucaccagcgcugucaucgaggcccugccccgcaacauggugcuuacaugucagggguccgacgauauuaaaaagcugcucgacucucagggacggaaagauaucaagcugauugacaucgcccugagcaaagcugauuccagacgcuucgaaaaugccgucugggaccaaugcaaggaucuuugucacaugcauaccggcgugguuguggagaagaaaaagagagggggcaaagaggaaaucacgccccacugcgcgcucauggacuguauuauguaugaugcugccgucucuggaggccugaacaucccugugcugcgggccguucucccgcgcgacaugguguuucggacaagcucccccaaggucgugcugugaggacuaguaauaaggaaacuguaugaaugucugugggcaggaagugaagagauccuucuguaaagguuuuuggaauuaugucugcugaauaauaaacuuuuuugaaauaauaaaucugguagaaaaaugagaucucaaaggcucuuuucagagccaccaaaaaaaaaaaaaaaaaaaaaaaaaaaaaaaaaaaaaaaaaaaaaaaaaaaaaaaaaaaaaaaaaaaaaaaaaaaaaaaaaaaaaaaaaaaaaaaaaaaaa

SEQ ID NO: 17539 - RNA, 2046 nt, Artificial Sequence
  mRNA product Design b-4 (hSL-A100) comprising derived and/or modified sequence from LASV(Lassa virus/H.sapiens-wt/NGA/2018/ISTH_0959;Clade II)__AVV65100__NP (opt5)
aggagagucccgcagucggcguccagcggcucugcuuguucgugugugugucguugcaggccuuauucaagcuuaccaugagcgccuccaaggaggugaaaucuuuccuguggacccagagccucagacgggaacuguccggcuacugcucuaacaucaaacuucaagucguuaaggacgcucaggcccugcuccacgggcuggauuuuagcgagguguccaaugugcagcgccuuaugagaaagcagaaacgggacgauucugaccugaagcgccucagagaucugaaccaagcggucaauaaccugguggaacucaagagcacccagcagaaauccauucugcggguuggaacgcuuaccagcgacgaucugcucacacuggcugccgaccuugagaagcugaaaucuaaggugauccgcaccgaaagaccccucuccagcggcgucuauauggggaaucugucuacacagcaacuggagcagcggcgcgcccuccugaaccuuauuggaauggugggcggggcucagggaacccagccuggcagagauggcguugugcgggucugggacgugaaaaauccggaucugcucaacaaucaauucgggacaaugcccucccugacccuugccugucugacgaagcagggacagguggaccucaacgaugucguucuggcucugaccgaccucggccugaucuacacagccaaguauccuaauagcucugaccuugaucgccugucccaaagccaucccauucucaacaugguggacaccaaaaaguccucucugaauaucagcggguuuaacuucucccuuggagcggccgugaaagcuggcgccugcaugcuggaugggggaaauaugcucgagacaaucaaggucaccccucagacgauggacggcauucugaaaagcauccugaaggugaaaaagucucucggcauguuuguuuccgauacacccggggaaagaaacccuuacgagaacauucuguauaagaucugucuuagcggagacggcuggccguacauugcuucucggaccagcaucguggggcgcgccugggaaaauacaaccgucgaucuggaguccgacggaaaaccccacaaggugggcaccgcggggucuaacaaaagccuccaguccgccggauucccuacaggccugacguauagccagcugaugacccuuaaggauucuaugaugcaacucgaccccuccgcuaaaacauggauugauaucgagggcagaccugaagaccccguugagaucgcccuguaccagccgaugagcgggugcuacauucacuuuuuccgggaaccuaccgaccugaagcaguuuaagcaggaugcuaaauauucucauggaaucgacguggccgaucucuuccccgcccaaccuggccugacauccgcugucauugaggcgcuucccagaaauauggugcugaccugucaggggagcgacgauaucaagcgccuccuggacucccagggacggaaagauauuaagcugaucgacaucgcccuuucuaaaacggauagcagacgcuuugaaaacgcugucugggaccagugcaaggaucucugucauaugcacacaggcgugguuguggagaagaaaaagagagggggcaaagaggaaauuacaccccacugcgcccugauggacuguaucauguacgaugccgcugucuccggaggccugaauauuccugugcuccgggccguucugccgcgcgacaugguguuccggaccucuagccccaaggucgugcuuugaggacuaguaauaaggaaacuguaugaaugucugugggcaggaagugaagagauccuucuguaaagguuuuuggaauuaugucugcugaauaauaaacuuuuuugaaauaauaaaucugguagaaaaaugagaucucaaaggcucuuuucagagccaccaaaaaaaaaaaaaaaaaaaaaaaaaaaaaaaaaaaaaaaaaaaaaaaaaaaaaaaaaaaaaaaaaaaaaaaaaaaaaaaaaaaaaaaaaaaaaaaaaaaaa

SEQ ID NO: 17540 - RNA, 2046 nt, Artificial Sequence
  mRNA product Design b-4 (hSL-A100) comprising derived and/or modified sequence from LASV(LASV003-NIG-2008;Clade II)__AIT17581__NP (opt5)
aggagagucccgcagucggcguccagcggcucugcuuguucgugugugugucguugcaggccuuauucaagcuuaccaugagcgccuccaaggaggugaaaucuuuccuguggacccagagccucagacgggaacuguccggcuacugcucuagcaucaaacuucaagucguuaaggacgcucaggcccugcuccacgggcuggauuuuuccgaggugucuaacgugcagcgccuuaugagaaagcagaaacgggacgauagcgaccugaagcgccucagagaucugaaucaagcggucaacaaucugguggaacucaaguccacccagcagaaaagcguucugcgggugggaacgcuuaccucugacgaucugcucacacuggcugccgaccuugagaagcugaaauccaaggucauucgcaccgaaagaccccucagcucuggcguguauauggggaaccuguccgcccagcaacuggagcagcggcgcacacuccugaauaugaucggaaugguuggcggggcucagggaacccagccuggcagagauggcgugguccgggugugggacgugaaaaacccggaucuucugaauaaccaauucgggacaaugcccagccucacccuggccugucuuacgaagcagggacaggucgaccugaaugauguugugcucgcucugaccgaccugggccucauuuacacagccaaguauccuaacucuuccgaccuggaucgccuuagccaaucccaucccauccugucuaugguggacaccaaaaagagcucccucaauauuagcggguacaacuuuucucugggagcggccgucaaagcuggcgccugcaugcuugaugggggaaauaugcuggagacaaucaaggugaccccucagacgauggacggcauccucaaauccauucugaagguuaaaaagagccugggcauguucgugucugauacacccggggaaagaaacccuuaugagaauauccucuacaagauuugucugagcggagacggcuggccguauaucgcuucccggaccucuauugucgggcgcgccugggaaaacacaaccguggaucuugagagcgacggaaaaccccagaagguuggcaccgcgggguccaacaaaagccugcagucugccggauuuccuacaggccucacguacucccaacugaugacccugaaggauagcaugaugcagcuugaccccucugcuaaaacauggaucgauauugagggcagaccugaagaccccguggagaucgcccucuaccagccgauguccgggugcuauauccacuucuuucgggaaccuaccgaccugaagcaguucaagcaagaugcuaaauacagccauggaauugacgucacagaucuguuucccgcccagccuggccucaccuccgccgugaucgaggcucugcccagaaauaugguccuuacgugucaggggucugacgauauuaagcgccugcucgacagccagggacggagagauaucaaacugauugacaucgcgcuguccaaggccgauucucgccgguucgaaaacgcugugugggaccaaugcaaagaucuuugucacaugcauacaggcguuguggucgagaagaagaaaagagggggcaaggaggaaaucacaccccacugcgcccucauggacuguauuauguaugaugccgcugugagcggaggccugaauaucccuguucugcgcgccgugcucccgcgggacauggucuuuagaaccuccagccccaaaguggugcugugaggacuaguaauaaggaaacuguaugaaugucugugggcaggaagugaagagauccuucuguaaagguuuuuggaauuaugucugcugaauaauaaacuuuuuugaaauaauaaaucugguagaaaaaugagaucucaaaggcucuuuucagagccaccaaaaaaaaaaaaaaaaaaaaaaaaaaaaaaaaaaaaaaaaaaaaaaaaaaaaaaaaaaaaaaaaaaaaaaaaaaaaaaaaaaaaaaaaaaaaaaaaaaaaa

SEQ ID NO: 17541 - RNA, 2046 nt, Artificial Sequence
  mRNA product Design b-4 (hSL-A100) comprising derived and/or modified sequence from LASV(LASV035-NIG-2009;Clade II)__AIT17589__NP (opt5)
aggagagucccgcagucggcguccagcggcucugcuuguucgugugugugucguugcaggccuuauucaagcuuaccaugagcgccuccaaggaggugaaaucuuuccuguggacccagagccucagacgggaacuguccggcuacugcucuagcaucaaacuucaagucguuaaagacgcucaggcccugcuccacgggcuggauuuuuccgaggugucuaacgugcagcgccuuaugagaaagcagaaacgggacgauagcgaccugaagcgccucagagaucugaaucaagcggucaacaaucugguggaacucaaguccacacagcagaaaagcauucugcggguuggaacgcuuaccucugacgaucugcucacacuggcugccgaccuugagaagcugaaauccaaggugauccgcaccgaaagaccccucagcucuggcgucuauauggggaaccuguccgcccagcaacuggagcagcggcgcgcucuccugaauaugauuggaauggugggcggggcccagggaacacagccuggcagagauggcguugugcgggucugggacgugaaaaacccggaucuucugaauaaccaauucgggaccaugcccagccucacacuggcuugucuuaccaagcagggacagguggaccugaaugaugccguccucgcgcugacggaccugggccucaucuacaccgccaaguauccuaacucuuccgaccuggaucgccuuagccaaucccaucccauucugaauaugguugacacaaagaagucuagccucaacaucuccggguacaauuuuagccugggagcugccgugaaagcuggcgccugcaugcuugaugggggaaacaugcuggagaccaucaaggugacaccucagaccauggacggcauucucaaaucuauccugaaggucaaaagaucccugggcauguucgugagcgauacgcccggggaacggaauccuuaugagaacauucucuacaagaucugucugucuggagacggcuggccguauauugcgagccgcacauccaucguugggagagccugggaaaacaccacaguggaucuugagucugacggaaagccccagaaagucggcaccaccgggagcaauaagucccugcagagcgcuggauuuccuacaggccucacguacucucaacugaugacccugaaagauuccaugaugcagcuugaccccagcgccaagacauggauugauaucgagggccggccugaagaccccguggagaucgcucucuaccagccgaugucugggugcuauauucacuucuuuagagaaccuaccgaccugaaacaguucaagcaagaugccaaguacucccauggaaucgacguugccgaucuguuucccgcucagccuggccucacaagcgcggugauugaggcccugccccgcaacaugguccuuaccugucagggguccgacgauaucaaaaagcugcucgacucucagggacggagagauauuaaacugaucgacaucgcucugagcaaggccgauucccgcaaauucgaaaaugccgugugggaccaaugcaaggaucuuugucacaugcauacgggcgucgugguugagaagaaaaagagagggggcaaagaggaaauuacaccccacugcgcucucauggacuguaucauguaugaugccgcggugucuggaggccugaacauuccuguccugcgggcugugcucccgcgcgacaugguuuuucggaccagcucccccaaggugguccugugaggacuaguaauaaggaaacuguaugaaugucugugggcaggaagugaagagauccuucuguaaagguuuuuggaauuaugucugcugaauaauaaacuuuuuugaaauaauaaaucugguagaaaaaugagaucucaaaggcucuuuucagagccaccaaaaaaaaaaaaaaaaaaaaaaaaaaaaaaaaaaaaaaaaaaaaaaaaaaaaaaaaaaaaaaaaaaaaaaaaaaaaaaaaaaaaaaaaaaaaaaaaaaaaa

SEQ ID NO: 17542 - RNA, 2046 nt, Artificial Sequence
  mRNA product Design b-4 (hSL-A100) comprising derived and/or modified sequence from LASV(LASV1000-NIG-2009;Clade II)__AIT17783__NP (opt5)
aggagagucccgcagucggcguccagcggcucugcuuguucgugugugugucguugcaggccuuauucaagcuuaccaugagcgccuccaaggaggugaaaucuuuccuguggacccagagccucagacgggaacuguccggcuacugcucuaacaucaaacuucaagucguuaaggacgcucaggcccugcuccacgggcuggauuuuagcgagguguccaaugugcagcgccuuaugagaaagcagaaacgggacgauucugaccugaagcgccucagagaucugaaccaagcggucaauaaccugguggaacucaagagcacacagcagaaauccauucugcggguuggaacgcuuaccagcgacgaucugcucacacuggcugccgaccuugagaagcugaaaucuaaggugauccgcaccgaaagaccccucuccagcggcgucuauauggggaaucugucuacacagcaacuggagcagcggcgcgcccuccugaacaugauuggaauggugggcggggcucagggaacccagccuggcagagauggcguugugcgggucugggacgugaaaaauccggaucuucugaacaaucaauucgggacaaugcccucccucacccuggccugucuuacgaagcagggacagguggaccugaacgaugucguucucgcucugaccgaccugggccucaucuacacagccaaguauccuaauagcucugaccuggaucgccuuucccaaagccaucccauucugaacaugguggacaccaaaaaguccucucucaauaucagcggguacaacuuuucccugggagcggccgugaaagcuggcgccugcaugcuugaugggggaaauaugcuggagacaaucaaggucaccccucagacgauggacggcauucucaaaagcauccugaaggugaaaaagucucugggcauguucguuuccgauacacccggggaaagaaacccuuaugagaacauucucuacaagaucugucugagcggagacggcuggccguauauugcuucucggaccagcaucguggggcgcgccugggaaaauacaaccgucgaucuugaguccgacggaaaaccccagaaggugggcaccgcggggucuaacaaaagccugcaguccgccggauuuccuacaggccucacguacagccaacugaugacccugaaggauucuaugaugcagcuugaccccuccgcuaaaacauggauugauaucgagggcagaccugaagaccccguugagaucgcccucuaccagccggugagcgggugcuauauucacuucuuucgggaaccuaccgaccugaagcaguucaagcaagaugcuaaauacucucauggaaucgacgucgccgaucuguuucccgcccagccuggccucacauccgcugugauugaggcgcugcccagaaauaugguccuuaccugucaggggagcgacgauaucaagcgccugcucgacucccagggacggagagauauuaaacugaucgacaucgcccugucuaaggcugauagccgccgguucgaaaacgccgugugggaccaaugcaaagaucuuugucacaugcauacgggcguuguggucgagaagaagaaaagagggggcaaggaggaaauuacaccccacugcgcccucauggacuguaucauguaugaugcugccguguccggaggccugaauauuccuguucugcgcgcggugcucccgcgggacauggucuuuagaaccucuagccccaaaguggugcugugaggacuaguaauaaggaaacuguaugaaugucugugggcaggaagugaagagauccuucuguaaagguuuuuggaauuaugucugcugaauaauaaacuuuuuugaaauaauaaaucugguagaaaaaugagaucucaaaggcucuuuucagagccaccaaaaaaaaaaaaaaaaaaaaaaaaaaaaaaaaaaaaaaaaaaaaaaaaaaaaaaaaaaaaaaaaaaaaaaaaaaaaaaaaaaaaaaaaaaaaaaaaaaaaa

SEQ ID NO: 17543 - RNA, 2046 nt, Artificial Sequence
  mRNA product Design b-4 (hSL-A100) comprising derived and/or modified sequence from LASV(LASV221-NIG-2010;Clade II)__AIT17625__NP (opt5)
aggagagucccgcagucggcguccagcggcucugcuuguucgugugugugucguugcaggccuuauucaagcuuaccaugagcgccuccaaggaggugaaaucuuuccuguggacccagagccucagacgggaacuguccggcuacugcucuagcaucaaacuucaagucguuaaggacgcucaggcccugcuccacgggcuggauuuuuccgaggugucuaacgugcagcgccuuaugagaaagcagcggcgcgacgauagcgaccugaaaagacuccgggaucugaaucaagcggucaacaaucugguggaacucaaguccacacagcaaaagagcauucugcgcguuggaacgcuuaccucugacgaucugcucacacuggcugccgaccuugagaaacugaaguccaaagugaucagaaccgaacggccccucagcucuggcgucuauauggggaaccuguccacacagcagcuggagcagcgcagagcccuccugaauaugauuggaauggugggcggggcucagggaacccagccuggccgggauggcguugugcgcgucugggacgugaagaacccggaucuucugaauaaccaauucgggacaaugcccagccucacccuggccugucuuacgaaacagggacagguggaccugaaugaugcuguccucgcccugaccgaccugggccucaucuacacagcgaaguauccuaacucuuccgaccuggauagacuuagccaaucccaucccauucugaauaugguugacaccaagaaaucuagccucaacaucuccggguacaauuuuagccugggagccgcugugaaggccggcgcuugcaugcuugaugggggaaacaugcuggagacaaucaaagugaccccucagacggucgacggcauucucaagucuauccugaaagugaagcggucccugggcauguucguuagcgauacacccggggaacgcaauccuuaugagaacauucucuacaaaaucugucugucuggagacggcuggccguauauugccagcagaaccuccaucguggggcgggcgugggaaaacacaaccgucgaucuugagucugacggaaagccccagaaggugggcaccgccgggagcaauaaaucccugcagagcgcuggauuuccuacaggccucacguacucucaacugaugacccugaaggauuccaugaugcagcuugaccccagcgccaaaacauggauugauaucgagggcagaccugaagaccccguugagaucgcucucuaccagccgaugucugggugcuauauucacuucuuucgcgaaccuaccgaccugaagcaguucaaacaagaugccaaguacucccauggaaucgacguggccgaucuguuucccgcucagccuggccucacaagcgcggucauugaggcccugccccggaacauggugcuuaccugucagggguccgacgauaucaagagacugcucgacucucagggacgccgggauauuaaacugaucgacaucgcucugagcaaggccgauuccagaaaauucgaaaaugccgucugggaccaaugcaaggaucuuugucacaugcauacgggcgugguuguggagaaaaagaagcgcgggggcaaagaggaaauuacaccccacugcgcucucauggacuguaucauguaugaugccgcggucucuggaggccugaacauuccugugcugcgggcuguucucccgagagacaugguguuucgcaccagcucccccaaggucgugcugugaggacuaguaauaaggaaacuguaugaaugucugugggcaggaagugaagagauccuucuguaaagguuuuuggaauuaugucugcugaauaauaaacuuuuuugaaauaauaaaucugguagaaaaaugagaucucaaaggcucuuuucagagccaccaaaaaaaaaaaaaaaaaaaaaaaaaaaaaaaaaaaaaaaaaaaaaaaaaaaaaaaaaaaaaaaaaaaaaaaaaaaaaaaaaaaaaaaaaaaaaaaaaaaaa

SEQ ID NO: 17544 - RNA, 2046 nt, Artificial Sequence
  mRNA product Design b-4 (hSL-A100) comprising derived and/or modified sequence from LASV(LASV237-NIG-2010;Clade II)__AIT17639__NP (opt5)
aggagagucccgcagucggcguccagcggcucugcuuguucgugugugugucguugcaggccuuauucaagcuuaccaugagcgccuccaaggaggugaaaucuuuccuguggacccagagccucagacgggaacuguccggcuacugcucuaacaucaaacuucaagucguuaaggacgcucaggcccugcuccacgggcuggauuuuagcgagguguccaaugugcagcgccuuaugagaaagcagaaacgggacgauucugaccugaagcgccucagagaucugaaccaagcggucaauaaccugguggaacucaagagcacacagcagaaauccauucugcggguuggaacgcuuaccagcgacgaucugcucacacuggcugccgaccuugagaagcugaaaucuaaggugauccgcaccgaaagaccccucuccagcggcgucuauauggggaaucugucuacacagcaacuggagcagcggcgcgcccuccugaacaugauuggaauggugggcggggcucagggaacccagccuggcagagauggcguugugcgggucugggacgugaaaaauccggaucuucugaacaaucaauucgggacaaugcccucccucacccuggccugucuuacgaagcagggacagguggaccugaacgaugcuguccucgcccugaccgaccugggccucaucuacacagcgaaguauccuaauagcucugaccuggaucgccuuucccaaagccaucccauucugaacaugguugacaucaaaaaguccucucucaauaucagcggguacaacuuuucccugggagccgcugugaaagccggcgcuugcaugcuugaugggggaaauaugcuggagaccauuaaggugacaccucagaccauggacggcauccucaaaagcauucugaaggucaaaagaucucugggcauguucguguccgauacgcccggggaacggaacccuuaugagaacauccucuacaagauuugucugagcggagacggcuggccguauaucgccucucgcacaagcauuguugggagagcgugggaaaauaccacaguggaucuugaguccgacggaaagccccagaaagucggcucugccgggagcaacaagucccugcagagcgcuggauuuccuaccggccucaccuacucucaacugaugacacugaaagauuccaugaugcagcuugaccccagcgccaagacguggaucgauaucgagggccggccugaagaccccguggagauugcucucuaccagccgaugucugggugcuauauccacuucuuuagagaaccuaccgaccugaaacaguucaagcaagaugccaaguacucccauggaauugacguugccgaucuguuucccgcucagccuggccucacaagcgcggugaucgaggcccugccccgcaauaugguccuuaccugucagggguccgacgauauuaaacggcugcucgacucucagggaagacgcgauaucaagcugaucgacauugcucugagcaaagccgauucccggagauucgaaaacgccgugugggaccaaugcaaggaucuuugucacaugcauacaggcgucgugguugagaaaaagaagcgcgggggcaaagaggaaaucacgccccacugcgcucucauggacuguauuauguaugaugccgcggugucuggaggccugaauaucccuguccugcgggcugugcucccgagagacaugguuuuucgcaccagcucccccaaggugguccugugaggacuaguaauaaggaaacuguaugaaugucugugggcaggaagugaagagauccuucuguaaagguuuuuggaauuaugucugcugaauaauaaacuuuuuugaaauaauaaaucugguagaaaaaugagaucucaaaggcucuuuucagagccaccaaaaaaaaaaaaaaaaaaaaaaaaaaaaaaaaaaaaaaaaaaaaaaaaaaaaaaaaaaaaaaaaaaaaaaaaaaaaaaaaaaaaaaaaaaaaaaaaaaaaa

SEQ ID NO: 17545 - RNA, 2046 nt, Artificial Sequence
  mRNA product Design b-4 (hSL-A100) comprising derived and/or modified sequence from LASV(LASV253-NIG-2011;Clade II)__AIT17671__NP (opt5)
aggagagucccgcagucggcguccagcggcucugcuuguucgugugugugucguugcaggccuuauucaagcuuaccaugagcgccuccaaggaggugaaaucuuuccuguggacccagagccucagacgggaacuguccggcuacugcucuagcaucaaacuucaagucguuaaggacgcucaggcccugcuccacgggcuggauuuuuccgaggugucuaacgugcagcgccuuaugagaaagcagaaacgggacgauagcgaccugaagcgccucagagaucugaaucaagcggucaacaaucugguggaacucaaguccacccagcagaaaagcguucugcgggugggaacgcuuaccucugacgaucugcucacacuggcugccgaccuugagaagcugaaauccaaggucauucgcaccgaaagaccccucagcucuggcguguauauggggaaccuguccacacagcaacuggagcagcggcgcgcccuccugaauaugaucggaaugguuggcggggcucagggaacccagccuggcagagauggcgugguccgggugugggacgugaaaaacccggaucuucugaauaaccaauucgggacaaugcccagccucacccuggccugucuuacgaagcagggacaggucgaccugaaugauguugugcucgcucugaccgaccugggccucauuuacacagccaaguauccuaacucuuccgaccuggaucgccuuagccaaucccaucccauccugaauaugguggacaccaaaaagucuagccucaacauuuccggguacaauuuuagccugggagcggccgucaaagcuggcgccugcaugcuugaugggggaaacaugcuggagacaaucaaggugaccccucagacgauggacggcauccucaaaucuauucugaagguuaaaaagucccugggcauguucgugagcgauacacccggggaaagaaauccuuaugagaacauccucuacaagauuugucugucuggagacggcuggccguauaucgcuagccggaccuccauugucgggcgcgccugggaaaacacaaccguggaucuugagucugacggaaaaccccagaagguuggcaccgcggggagcaauaaaucccugcagagcgccggauuuccuacaggccucacguacucucaacugaugacccugaaggauuccaugaugcagcuugaccccagcgcuaaaacauggaucgauauugagggcagaccugaagaccccguggagaucgcccucuaccagccgaugucugggugcuauauccacuucuuucgggaaccuaccgaccugaagcaguucaagcaagaugcuaaauacucccauggaauugacgucacagaucuguuucccgcccagccuggccucaccagcgccgugaucgaggcucugcccagaaacaugguccuuacgugucagggguccgacgauauuaagcgccugcucgacucucagggacggagagauaucaaacugauugacaucgcgcugagcaaggccgauucccgccgguucgaaaaugcugugugggaccaaugcaaagaucuuugucacaugcauacaggcguuguggucgagaagaagaaaagagggggcaaggaggaaaucacaccccacugcgcccucauggacuguauuauguaugaugccgcugugucuggaggccugaacaucccuguucugcgcgccgugcucccgcgggacauggucuuuagaaccagcucccccaaaguggugcugugaggacuaguaauaaggaaacuguaugaaugucugugggcaggaagugaagagauccuucuguaaagguuuuuggaauuaugucugcugaauaauaaacuuuuuugaaauaauaaaucugguagaaaaaugagaucucaaaggcucuuuucagagccaccaaaaaaaaaaaaaaaaaaaaaaaaaaaaaaaaaaaaaaaaaaaaaaaaaaaaaaaaaaaaaaaaaaaaaaaaaaaaaaaaaaaaaaaaaaaaaaaaaaaaa

SEQ ID NO: 17546 - RNA, 2046 nt, Artificial Sequence
  mRNA product Design b-4 (hSL-A100) comprising derived and/or modified sequence from LASV(LASV254-NIG-2011;Clade II)__AIT17675__NP (opt5)
aggagagucccgcagucggcguccagcggcucugcuuguucgugugugugucguugcaggccuuauucaagcuuaccaugagcgccuccaaggaggugaaaucuuuccuguggacccagagccucagacgggaacuguccggcuacugcucuagcaucaaacuucaagucguuaaggacgcucaggcccugcuccacgggcuggauuuuuccgaggugucuaacgugcagcgccuuaugagaaagcagaaacgggacgauagcgaccugaagcgccucagagaucugaaucaagcggucaacaaucugguggaacucaaguccacacagcagaaaagcguucugcgggugggaacgcuuaccucugacgaucugcucacacuggcugccgaccuugagaagcugaaauccaaggucauucgcaccgaaagaccccucagcucuggcguguauauggggaaccuguccacacagcaacuggagcagcggcgcgcccuccugaauaugaucggaaugguuggcggggcucagggaacccagccuggcagagauggcgugguccgggugugggacgugaaaaacccggaucuucugaauaaccaauucgggacaaugcccagccucacccuggccugucuuacgaagcagggacaggucgaccugaaugaugcuguucucgcccugaccgaccugggccucauuuacacagcgaaguauccuaacucuuccgaccuggaucgccuuagccaaucccaucccauccugaauaugguggacaccaaaaagucuagccucaacauuuccggguacaauuuuagccugggagccgcugugaaagccggcgcuugcaugcuugaugggggaaacaugcuggagacaaucaaggucaccccucagacgauggacggcauccucaaaucuauucugaaggugaaaaagucccugggcauguucguuagcgauacacccggggaaagaaauccuuaugagaacauccucuacaagauuugucugucuggagacggcuggccguauaucgccagccggaccuccauuguggggcgcgcgugggaaaacacaaucgucgaucuugagucugacggaaaaccccagaaggugggcaccgccgggagcaauaaaucccugcagagcgcuggauuuccuaccggccucacauacucucaacugaugacgcugaaggauuccaugaugcagcuugaccccagcgccaaaaccuggauugauaucgagggcagaccugaagaccccguugagaucgcucucuaccagccgaugucugggugcuauauucacuucuuucgggaaccuacagaccugaagcaguucaagcaagaugccaaauacucccauggaaucgacguggccgaucuguuucccgcucagccuggccucaccagcgcggucauugaggcccugcccagaaacauggugcuuacaugucagggguccgacgauaucaagcgccugcucgacucucagggacggagagauauuaaacugaucgacaucgcucugagcaaggccgauucccgccgguucgaaaaugccgucugggaccaaugcaaagaucuuugucacaugcauaccggcgugguuguggagaagaagaaaagagggggcaaggaggaaauuacgccccacugcgcucucauggacuguaucauguaugaugccgcggucucuggaggccugaacauuccugugcugcgcgcuguucucccgcgggacaugguguuuagaacaagcucccccaaagucgugcugugaggacuaguaauaaggaaacuguaugaaugucugugggcaggaagugaagagauccuucuguaaagguuuuuggaauuaugucugcugaauaauaaacuuuuuugaaauaauaaaucugguagaaaaaugagaucucaaaggcucuuuucagagccaccaaaaaaaaaaaaaaaaaaaaaaaaaaaaaaaaaaaaaaaaaaaaaaaaaaaaaaaaaaaaaaaaaaaaaaaaaaaaaaaaaaaaaaaaaaaaaaaaaaaaa

SEQ ID NO: 17547 - RNA, 2046 nt, Artificial Sequence
  mRNA product Design b-4 (hSL-A100) comprising derived and/or modified sequence from LASV(Nig08-04;Clade II)__ADU56611__NP (opt5)
aggagagucccgcagucggcguccagcggcucugcuuguucgugugugugucguugcaggccuuauucaagcuuaccaugagcgccuccaaggaggugaaaucuuuccuguggacccagagccucagacgggaacuguccggcuacugcucuaacaucaaacuucaagucguuaaggacgcucaggcccugcuccacgggcuggauuuuagcgagguguccaaugugcagcgccuuaugagaaagcagaaacgggacgauggagaccugaagcgccucagagaucugaaccaagcggucaauaaccugguggaacucaagucuacccagcagaaaagcguucugcgggugggcacgcuuaccuccgacgaucugcucacacuggcugccgaccuugagaagcugaaaagcaaggucauucgcaccgaaagaccccucucuuccgggguguauaugggaaaucugagcacacagcaacuggagcagcggaaagcccuccugucuaugaucggcaugguugggggagcucagggcacccagccuggccgcgaugggguggucagagugugggacgugaagaacccggaucuucugaauaaccaauucggaacaaugcccucccucacccuggccugucuuacgaagcagggccaggucgaccugaaugaugcuguucucgcccugaccgaccuggggcucauuuacacagcgaaauauccuaacagcucugaccuggaucggcuuucccaaagccaucccauccugaauaugguggacaccaagaaauccucucucaacauuagcggauacaauuuuucccugggcgccgcugugaaggccggggcuugcaugcuugauggaggcaacaugcuggagacaaucaaagucaccccucagacgauggacggcauccucaagagcauucugaaagugaagcgcucucuggggauguucguuuccgauacacccggagaaagaaauccuuaugagaacauccucuacaagauuugucugagcggcgacggguggccguauaucgccucucggaccagcauugugggacgcgcgugggaaaacacaaccgucgaucuugaguccgacggcaaaccccagaagguggggaccgccggaucuaauaaaagccugcaguccgcuggcuuuccuacaggccucacguacagccaacugaugacccugaaggauucuaugaugcagcuugaccccuccgccaaaacauggaucgauauugaggggagaccugaagaccccguugagaucgcucucuaccagccgaugagcggaugcuauauccacuucuuucgggaaccuaccgaccugaagcaguucaagcaagaugccaaauacucucauggcauugacgugacagaucuguuuuccgcccagcccgggcucaccagcgcugucaucgaggcgcugccuagaaacauggugcuuacgugucagggauccgacgauauuaagaaacugcucgacucucagggccgccgggauaucaagcugauugacaucagccugaauaaagccgauuccagacgcuucgaaaacgcugucugggaccaaugcaaggaucuuugucacaugcauacaggggugguuguggagaagaaaaagcggggcggaaaagaggaaaucacaccccacugcgcccucauggacuguauuauguuugaugccgcugucucuggcgggcugaauauccccauucugagagccgugcucccucgcgacaugguuuuccggaccagcuccccgaaggugguccugugaggacuaguaauaaggaaacuguaugaaugucugugggcaggaagugaagagauccuucuguaaagguuuuuggaauuaugucugcugaauaauaaacuuuuuugaaauaauaaaucugguagaaaaaugagaucucaaaggcucuuuucagagccaccaaaaaaaaaaaaaaaaaaaaaaaaaaaaaaaaaaaaaaaaaaaaaaaaaaaaaaaaaaaaaaaaaaaaaaaaaaaaaaaaaaaaaaaaaaaaaaaaaaaaa

SEQ ID NO: 17548 - RNA, 2049 nt, Artificial Sequence
  mRNA product Design b-4 (hSL-A100) comprising derived and/or modified sequence from LASV(GA391;Clade III)__AAA46284__NP (opt5)
aggagagucccgcagucggcguccagcggcucugcuuguucgugugugugucguugcaggccuuauucaagcuuaccaugagcgccuccaaggaggugagaucuugccuguggacccagagccuccggcgcgaacuguccggcuacuguucuaacaucaaacuucaagucguuaaggacgcucaggcccugcuccacgggcuggauuucagcgagguguccaaugugcagagacuuaugcggaaacagaagcgcgacgauggagaccugaaaagacuccgggaucugaaccaagcggucaauaaccugguggaacucaagucuacacagcagaaaagcguucugcgcgugggcacgcuuuccagcgacgaucugcucauucuggcugccgaccuugagaaacugaagucuaaagucaccagaacagaacggccccucuccagcgggguguauaugggaaaucugucuucccagcaacuggaucagcgcagagcccuccugaacaugaucggcaugaccgggguuagcggaggcggcaagggggcuucuaauggaauugugcgggucugggacgugaaaaacgccgagcuucugaauaaccaguuuggcacaaugccuucccucacccuggcuugccuuacaaagcaggggcaaguggaucugaaugacgccguccaggcgcucaccgaucugggacugaucuacacggccaaguauccgaacagcuccgaccucgaccgccugucucagagccaucccauucuuaauaugaucgauaccaaaaaguccagccugaacaucucuggcuacaauuucucccucggggcugccguuaaagcuggagccuguaugcuggacggcggcaacaugcuugagacaauuaaggugagcccucaaaccauggaugggauccugaaaucuauucucaaggugaaaaagagccugggaauguuugucuccgacacacccggcgaaagaaacccuuaugagaauauccuguacaagauuugccucucuggggauggauggagcuauaucgcgucccggaccagcauugugggccgcgccugggaaaacacgguuguggaccuggagcaggauaauaaaccccagaagaucgggaacggaggcucuaauaaaucccuucagagcgcuggcuucgccgcugggcugaucuacucucaacucaugacacugaaggacuuuaaauguuucaaccugauuccuaaugccaagaccuggauggauaucgagggaagaccggaagaccccgucgagauugcccuuuaccagccuuccagcggcugcuaugugcacuuuuuccgggaacccacagaucucaagcaguuuaaacaggacgcuaaguacucccaugggagagacguuaccgaucuguucgcggcccaaccuggacugaccucugcugugaucgaggcccucccccgcaacauggucauuacaugucagggcagcgaagacauccggaaacugcuugagucccaggggagacgcgauaucaagcugauugacaucacgcucucuaaagccgauagccggaaguuugagaaugcugugugggaccaguucaaggaucugugccacaugcauaccggcgucgugguugaaaagaagaaaagaggaggcaaggaggaaauuacaccgcacugugcccugauggacugcaucauguuugaugcggcuguguccgggggacuugacgccaaaguccuccgcgugguucugccucgggauaugguguucagaaccagcacacccaaggucgugcugugaggacuaguaauaaggaaacuguaugaaugucugugggcaggaagugaagagauccuucuguaaagguuuuuggaauuaugucugcugaauaauaaacuuuuuugaaauaauaaaucugguagaaaaaugagaucucaaaggcucuuuucagagccaccaaaaaaaaaaaaaaaaaaaaaaaaaaaaaaaaaaaaaaaaaaaaaaaaaaaaaaaaaaaaaaaaaaaaaaaaaaaaaaaaaaaaaaaaaaaaaaaaaaaaa

SEQ ID NO: 17549 - RNA, 2046 nt, Artificial Sequence
  mRNA product Design b-4 (hSL-A100) comprising derived and/or modified sequence from LASV(Nig08-A19;Clade III)__ADU56619__NP (opt5)
aggagagucccgcagucggcguccagcggcucugcuuguucgugugugugucguugcaggccuuauucaagcuuaccaugagcgccuccaaggaggugaaaucuuuccuguggacccagagccucagacgggaacuguccggcuacugcucuaacaucaaacuucaagucguuaaggacgcucaggcccugcuccacgggcuggauuuuagcgagguguccaaugugcagcgccuuaugagaaagcagaaacgggacgauggagaccugaagcgccucagagaucugaaccaagcggucaauaaccugguggaacucaagucuacacagcagaaaagcguucugcgggugggcacgcuuuccagcgacgaucugcucguccuggcugccgaccuugagaagcugaaaucuaaggugguucgcaccgaaagaccccucuccagcgggauuuauaugggaaaucugucuucccagcaacuggaucagcggaaagcccuccugaacaugaucggcaugacagggggaaauggcggccgcaacaccacaagcgacgggauugugagagucugggaugugaagaaugcugagcuucugaacaaucaguucggaaccaugccuucucucacacuggccugucuuaccaagcagggccaaguggaccugaacgaugcuguccaggcccucacggaccuggggcugaucuacaccgcgaaauaucccaauuccagcgaccucgaucggcuggcccagucccauccgauucuuaacaugaucgacacaaagaaaucuagccugaauaucuccggauacaacuuuagccucggcgcugccguuaaggcuggggccugcaugcuggauggaggcaacaugcuugagaccauuaaagugucuccucaaacaauggacggcauccugaaguccauucucaaagugaagcgcagccuggggauguucaucucugauacccccggagaaagaaauccuuaugagaacauucuguacaagaucugucucagcggcgacggguggcccuauauugcgucccggacgucuaucgucggacgcgccugggaaaauacagugguugaucuggagagcgacaacaaaccucagaagaccggcaaugggggauccaacaaaagccuucagucugcuggcuuugccgcuggccugacauacucccagcucaugacccugaaggauagcaugcugcaacuugacccgaaugccaaaaccuggauggauaucgaggggagacccgaagacccuguggagauugcccucuaccagcccucuuccggaugcuauauccacuucuuucgggaaccuacagaccugaagcaguucaagcaggaugcuaaauacagccauggcauugacgucacggaucuguuugcggcccaacccgggcucaccuccgcugugaucgaggcccugccgagaaacaugguuauuacaugucagggaucugaagacauccgcaaacuucuggagagccagggccggagagauaucaagcucauugacaucucccugucuaagguggauagccgcaaauucgagaaugccgucugggaccaguuuaaggaucugugccacaugcauaccgggauuguggucgaaaagaaaaagcggggcggaaaagaggaaaucacaccucacugugcucuuauggacugcauuauguucgaugccgcgguguccggcgggguugacgcuaaggugcucagagccguccugccccgcgauaugguguuucggaccagcacgccuaaaguugugcugugaggacuaguaauaaggaaacuguaugaaugucugugggcaggaagugaagagauccuucuguaaagguuuuuggaauuaugucugcugaauaauaaacuuuuuugaaauaauaaaucugguagaaaaaugagaucucaaaggcucuuuucagagccaccaaaaaaaaaaaaaaaaaaaaaaaaaaaaaaaaaaaaaaaaaaaaaaaaaaaaaaaaaaaaaaaaaaaaaaaaaaaaaaaaaaaaaaaaaaaaaaaaaaaaa

SEQ ID NO: 17550 - RNA, 2046 nt, Artificial Sequence
  mRNA product Design b-4 (hSL-A100) comprising derived and/or modified sequence from LASV(G1180-SLE-2010;Clade IV)__AIT17169__NP (opt5)
aggagagucccgcagucggcguccagcggcucugcuuguucgugugugugucguugcaggccuuauucaagcuuaccaugagcgccuccaaggagaucaaaucuuuccuguggacccagagccucagacgggaacuguccggcuacugcucuaacauuaagcugcaaguggucaaagacgcucaggcccugcuccacgggcuggauuuuagcgagguuuccaaugugcagcgccuuaugagaaaggaacggcgcgacgauaacgaccugaaaagacuccgggaucugaaucaggcggugaacaaucuggucgagcucaagucuacacaacaaaagagcauccugcgcgugggaacgcuuaccuccgacgaucugcucauucuggcugccgaccuugaaaaacuuaagagcaaaguuaucagaacagagcggccccucucugccggcguguauauggggaaccuguccagccagcagcuggaucagcgcagagcucuccugucuaugauuggaauguccagcggcaaucagcgggcccaggcugggcgcgacggagucgugagaguuugggaugugaagaacgucgagcuucugaauaaccaguucggcaccaugccuucucucacacuggccugucuuaccaaacaaggccagguggaccugaaugaugcggugcaggcccucacagaccuggggcugaucuacaccgcuaaguauccgaacacguccgaccucgaucggcugacccaaagccaucccauccuuaauaugauugacacaaagaaauccucucugaacaucagcggauacaauuuuucccucggcgccgcugucaaggccggggcgugcaugcuggauggaggcaacaugcuugaaaccauuaaaguuagcccucagacaauggacgggauccugaagucuauucucaaagugaagaaagcccugggaauguucaucuccgauacccccggcgagcgcaacccuuaugaaaauauucuguacaagaucugucucagcggcgacggguggcccuauaucgcuucuagaacgagcauuacaggacgggccugggagaacaccguggucgaucuggaguccgacggcaagccucagaaagcugggucuaauaacagcaauaagucccuucagagcgugggauuuacagccggccugaccuacucucaacucaugacccugaaagaugccaugcugcagcuugacccgaacgcuaagacauggauggauaucgaagggagacccgaggacccuguugaaauugcgcucuaccagcccuccagcggaugcuauauccacuucuuucgcgagccuacggaccugaaacaguucaagcaagaugccaaguacucucauggcauugacgugaccgaucuguuugcugcccagcccggccucacauccgccgucaucgacgcucugccgcggaauauggugaucaccugucaggggagcgaugacauuagaaaacuucuggaaucccagggacgcaaggauaucaaacucauugacaucgcccugucuaagacagauagccggaaauaugagaacgcgguuugggaccaauacaaggaucugugccacaugcauaccggcguggucguggagaagaaaaagagagggggaaaagaagagauuacgccucacugugcucuuauggacugcaucauguucgaugccgccgucuccggcgggcucaauacaucugugcugcgcgcuguucugccccgggacaugguguuuagaaccagcaccccucgcgucgugcucugaggacuaguaauaaggaaacuguaugaaugucugugggcaggaagugaagagauccuucuguaaagguuuuuggaauuaugucugcugaauaauaaacuuuuuugaaauaauaaaucugguagaaaaaugagaucucaaaggcucuuuucagagccaccaaaaaaaaaaaaaaaaaaaaaaaaaaaaaaaaaaaaaaaaaaaaaaaaaaaaaaaaaaaaaaaaaaaaaaaaaaaaaaaaaaaaaaaaaaaaaaaaaaaaa

SEQ ID NO: 17551 - RNA, 2046 nt, Artificial Sequence
  mRNA product Design b-4 (hSL-A100) comprising derived and/or modified sequence from LASV(G1442-SLE-2011;Clade IV)__AIT17181__NP (opt5)
aggagagucccgcagucggcguccagcggcucugcuuguucgugugugugucguugcaggccuuauucaagcuuaccaugagcgccuccaaggaggugaaaucuuuccuguggacccagagccucagacgggaacuguccggcuacugcucuaacaucaaacuucaagucguuaaggacgcucaggcccugcuccacgggcuggauuuuagcgagguguccaaugugcagcgccuuaugagaaagcagcggcgcgacgauaacgaccugaaaagacuccgggaucugaaucaagcggucaacaaucugguggaacucaagucuacacagcaaaagagcguucugcgcgugggaacgcuuaccuccgacgaucugcucguccuggcugccgaccuugagaaacuuaagagcaaagugauuagaacagaacggccccucucugccggcguuuauauggggaaccuguccagccagcagcuggaucagcgcagagcucuccugaauaugaucggaaugucuggcgggauucagggaacccggacaggccgcgacggcguggucagagugugggaugugaagaacgccgaccuucugaauaaccaguucgggaccaugccuucccucacacuggcuugucuuaccaaacaaggacaggucgaucugaaugacguugugcaggcccucacggaccugggccugaucuacaccgcgaaguauccgaacgccagcgaucucgaccggcugacacaaucucaucccauucuuaauaugaucgauaccaagaaauccagccugaacaucuccggguacaauuuuucucucggagcugccgugaaggcuggcgccugcaugcuggacgggggaaacaugcuugagacaauuaaagucagcccucagaccauggauggcauccugaaguccauucucaaagugaagaaaacgcugggcauguucaucagcgacacacccggggagcgcaacccuuaugaaaauauucuguacaagaucugucucucuggagauggcuggcccuauauugcguccagaaccagcaucacagggcgggccugggagaacaccguuguggaccuggaaucugauggaaagccucagaaagcuggcagcaauaacuccaauaagucucuucagagcgccggguuugcugccggacugaccuacucccaacucaugacacugaaagacgccaugcugcagcuugauccgaacgcuaagacguggauggacaucgagggcagacccgaggacccugucgaaauugcgcucuaccagcccagcucuggcugcuauauccacuucuuucgcgagccuaccgaucugaaacaguucaagcaagacgccaaguacucccaugggauugaugugacagaccuguuugcugcccagcccggacucaccagcgccguuaucgaagcucugccgcggaauauggugauuacaugucagggcucugaugacaucaaaaagcugcuggagucccaggggagaaaagauaucaagcucauugacaucgcccugagcaaaaccgauucccgcaaguaugaaaacgcggucugggaccaauacaaggaucugugccacaugcauacgggaguggucguggagaaaaagaaacggggcgggaaggaggaaauuacaccucacugugcucuuauggacugcaucauguucgaugccgccguuucuggcggacucaauacccuggugcugagagcuguccucccccgcgacaugguguuucggaccagcacaccuagaguugugcugugaggacuaguaauaaggaaacuguaugaaugucugugggcaggaagugaagagauccuucuguaaagguuuuuggaauuaugucugcugaauaauaaacuuuuuugaaauaauaaaucugguagaaaaaugagaucucaaaggcucuuuucagagccaccaaaaaaaaaaaaaaaaaaaaaaaaaaaaaaaaaaaaaaaaaaaaaaaaaaaaaaaaaaaaaaaaaaaaaaaaaaaaaaaaaaaaaaaaaaaaaaaaaaaaa

SEQ ID NO: 17552 - RNA, 2046 nt, Artificial Sequence
  mRNA product Design b-4 (hSL-A100) comprising derived and/or modified sequence from LASV(G3010-SLE-2013;Clade IV)__AIT17345__NP (opt5)
aggagagucccgcagucggcguccagcggcucugcuuguucgugugugugucguugcaggccuuauucaagcuuaccaugagcgccuccaaggagaucaaaucuuuccuguggacccagagccucagacgggaacuguccggcuacugcucuaacauuaaacuucaaguggucaaagacgcucaggcccugcuccacgggcuggauuuuagcgagguuuccaaugugcagcgccuuaugagaaaggaacggcgcgacgauaacgaccugaaaagacuccgggaucugaaucaggcggugaacaaucuggucgagcucaagucuacacaacaaaagagcauccugcgcgugggaacgcuuaccuccgacgaucugcucauucuggcugccgaccuugaaaaacuuaagagcaaaguuacaagaaccgagcggccccucucugccggcguguauauggggaaccuguccagccagcagcuggaucagcgcagagcucuccugucuaugaucggaauguccagcggcguccagggggcccgggcuggacgcgacggcgugguuagagugugggaugucaagaaugccgagcuucugaacaaucaguucggcacaaugccuucucucacccuggcgugucuuacaaaacaggggcaaguggaccugaacgaugugguccaggcccucaccgaccugggacugauuuacacggcuaaguauccgaauaccuccgaccucgaucggcugacacagagccaucccauccuuaacaugaucgacaccaagaaauccucucugaauauuagcggcuacaacuuuucccucggggccgcuguuaaggccggagcgugcaugcuggauggcgggaauaugcuugaaacaaucaaagugagcccucaaaccauggacggcauucugaagucuauccucaaagugaagaaagcccugggaauguucauuuccgagacgcccggcgaacgcaacccuuaugagaacauccuguacaagauuugucucagcggggauggauggcccuauaucgcuucuagaacaagcaucaccggccgggccugggagaauacagucguggaccuggaauccgaugggaagccucagaaagcuggaucuaacaauagcaacaagucccuucagagcgccggcuuuaccgccgggcugaccuacucucagcucaugacacugaaagacgcuaugcugcaacuugauccgaaugcgaagacguggauggacauugagggaagacccgaagauccuguugagguggcccucuaccagcccuccagcggcugcuauauccacuucuuucgcgaaccuaccgaccugaaacaguucaagcaggacgcuaaguacucucauggcauugaugucacagaccuguuugccgcccaacccgggcucaccuccgcugugaucgaugcccugccgcggaacaugguuauuacaugucagggaagcgacgauaucaaaaagcugcuggagucccagggcagaaaagacaucaagcucauugauaucgcgcugucuaaaaccgacagccgcaaguaugagaaugcugugugggaucaguacaaggaccugugccacaugcauacgggggucguggucgaaaagaagaaacggggaggcaaggaggaaauuacaccucacugugcccuuauggauugcaucauguucgacgccgcuguguccgggggccucaacaccucuguucugagagccgugcugccccgcgauauggucuuucggaccagcacaccuagagugguucucugaggacuaguaauaaggaaacuguaugaaugucugugggcaggaagugaagagauccuucuguaaagguuuuuggaauuaugucugcugaauaauaaacuuuuuugaaauaauaaaucugguagaaaaaugagaucucaaaggcucuuuucagagccaccaaaaaaaaaaaaaaaaaaaaaaaaaaaaaaaaaaaaaaaaaaaaaaaaaaaaaaaaaaaaaaaaaaaaaaaaaaaaaaaaaaaaaaaaaaaaaaaaaaaaa

SEQ ID NO: 17553 - RNA, 2046 nt, Artificial Sequence
  mRNA product Design b-4 (hSL-A100) comprising derived and/or modified sequence from LASV(G502-SLE-2009;Clade IV)__AIT17127__NP (opt5)
aggagagucccgcagucggcguccagcggcucugcuuguucgugugugugucguugcaggccuuauucaagcuuaccaugagcgccuccaaggagaucaaaucuuuccuguggacccagagccucagacgggaacuguccggcuacugcucuaacauuaagcugcaaguggucaaagacgcucaggcccugcuccacgggcuggauuuuagcgagguuuccaaugugcagcgccuuaugagaaaggaacggcgcgacgauaacgaccugaaaagacuccgggaucugaaucaggcggugaacaaucuggucgagcucaagucuacacaacaaaagagcauccugcgcgugggaacgcuuaccuccgacgaucugcucauucuggcugccgaccuugaaaaacuuaagagcaaaguuaucagaacagagcggccccucucugccggcguguauauggggaaccuguccagccagcagcuggaucagcgcagagcucuccugucuaugauuggaauguccggcgggaaucagggaguccgggccggcaaggacggcgugguucgcgugugggaugucaaaaacgcugagcuucugaauaaccaguucgggaccaugccuagccucacacuggccugucuuaccaagcagggacaaguggaccugaaugaugcggugcaggcccucacagaccugggccugaucuacaccgcuaaguauccgaacacgucugaccucgauagacugacccagucccaucccauccuuaauaugauugacaccaaaaagagcucccugaacaucucuggguacaauuuuagccucggagccgcugucaaagccggcgcgugcaugcuggaugggggaaacaugcuugaaacaauuaagguuuccccucaaacaauggacggcauccugaaaagcauucucaaggugaaaaaggcccugggcauguucaucucugauacccccggggagcggaacccuuaugaaaauauucuguacaagaucugucucuccggagacggcuggcccuauaucgcuagccgcacgucuauuacagggagagccugggagaacaccguggucgaucuggagagcgacggaaaaccucagaaggcuggcuccaauaacucuaauaaaagccuucaguccgccggguuuacagccggacugaccuacagccagcucaugacccugaaggaugcuaugcugcaacuugacccgaacacaaaaacguggauggauaucgaaggccggcccgaggacccuguggaaauugcgcucuaccagcccucuuccggcugcuauauccacuucuuuagagagccuaccgaccugaagcaguucaagcaggaugccaaauacagccaugggauugacguuacagaucuguuugcugcccaacccggacucaccucugccgugaucgacgcucugccgcgcaauauggucaucacaugucagggcuccgaugacauucggaaacuucuggaaagccaggggagaaaggauaucaagcucauugacaucgcccugaacaaaaccgauucccgcaaguaugagaaugcggugugggaccaguacaaggaucugugccacaugcauacgggaguuguggucgagaaaaagaaacggggcgggaaggaagagauuacaccucacugugcucuuauggacugcaucauguucgaugccgccgugucuggcggacucaacaccagcguccugagagcugugcugccccgcgacaugguuuuucggaccuccacaccuagagugguccucugaggacuaguaauaaggaaacuguaugaaugucugugggcaggaagugaagagauccuucuguaaagguuuuuggaauuaugucugcugaauaauaaacuuuuuugaaauaauaaaucugguagaaaaaugagaucucaaaggcucuuuucagagccaccaaaaaaaaaaaaaaaaaaaaaaaaaaaaaaaaaaaaaaaaaaaaaaaaaaaaaaaaaaaaaaaaaaaaaaaaaaaaaaaaaaaaaaaaaaaaaaaaaaaaa

SEQ ID NO: 17554 - RNA, 2046 nt, Artificial Sequence
  mRNA product Design b-4 (hSL-A100) comprising derived and/or modified sequence from LASV(G733-SLE-2010;Clade IV)__AIT17155__NP (opt5)
aggagagucccgcagucggcguccagcggcucugcuuguucgugugugugucguugcaggccuuauucaagcuuaccaugagcgccuccaaggagaucaaaucuuuccuguggacccagagccucagacgggaacuguccggcuacugcucuaacauuaagcugcaaguggucaaagacgcucaggcccugcuccacgggcuggauuuuagcgagguuuccaaugugcagcgccuuaugagaaaggaacggcgcgacgauaacgaccugaaaagacuccgggaucugaaucaggcggugaacaaucuggucgagcucaagucuacacaacaaaagagcgugcugcgcguuggaacgcuuaccuccgacgaacugcucgugcuggcugccgaucuugagaaacuuaagagcaaagucaucagaacagagcggccccucucugccggcguguauauggggaaccuguccagccagcagcuggaccagcgcagagcucuccugucuaugauuggaauguccggcgggaaucagggagcccggaccggccgcgauggcguugugagagucugggacgugaagaacgcugaacuucugaauaaccaguucgggacaaugccuagccucacccuggccugucuuacaaaacagggacaaguggaucugaaugacgcgguccaggcccucaccgaucugggccugaucuacacggcuaaguauccgaacaccucugaccucgaccggcugacacagucccaucccauucuuaauaugaucgauaccaagaaaagcucccugaacaucucuggguacaauuuuagccucggagccgcuguuaaggccggcgcgugcaugcuggacgggggaaacaugcuugagacaauuaaaguguccccucaaaccauggauggcauccucaagagcauucugaaagugaagaaagcccugggcauguucaucucugacacgcccggggaacgcaacccuuaugagaauauucuguacaagaucugucucuccggagauggcuggcccuauauugcuagcagaacaucuaucaccgggcgggccugggagaacacagucguggaccuggaaagcgauggaaagccucagaaagcuggcuccaauaacucuaauaagagccuucaguccgccggguuuaccgccggacugaccuacagccagcucaugacacugaaagacgcuaugcugcaacuugauccgaacgcgaagacguggauggacaucgagggcagacccgaagauccuguugagauugcccucuaccagcccucuuccggcugcuauauccacuucuuucgcgaaccuaccgaccugaaacaguucaagcaggacgcuaaguacagccaugggauugaugugacagaccuguuugccgcccaacccggacucaccucugcugucaucgaugcccugccgcggaauauggugauuacaugucagggcuccgacgauaucagaaaacuucuggagagccaggggcgcaaggacaucaaacucauugauaucgcgcuguccaagauugacucucggaaauaugagaacgcuguuugggaucaguacaaggaccugugccacaugcauaccggaguggucguggaaaagaaaaagagaggcgggaaagaggaaaucacgccucacugugcccuuauggauugcauuauguucgacgccgcugucagcggcggacucaauucccuggugcugcgcgccguucucccccgggauaugguguuuagaacaucuaccccucgcgucgugcugugaggacuaguaauaaggaaacuguaugaaugucugugggcaggaagugaagagauccuucuguaaagguuuuuggaauuaugucugcugaauaauaaacuuuuuugaaauaauaaaucugguagaaaaaugagaucucaaaggcucuuuucagagccaccaaaaaaaaaaaaaaaaaaaaaaaaaaaaaaaaaaaaaaaaaaaaaaaaaaaaaaaaaaaaaaaaaaaaaaaaaaaaaaaaaaaaaaaaaaaaaaaaaaaaa

SEQ ID NO: 17555 - RNA, 2046 nt, Artificial Sequence
  mRNA product Design b-4 (hSL-A100) comprising derived and/or modified sequence from MOPV/LASV reassortant(IGS-1;Clade IV)__AFY05578__NP (opt5)
aggagagucccgcagucggcguccagcggcucugcuuguucgugugugugucguugcaggccuuauucaagcuuaccaugagcgccuccaaggagaucaaaucuuuccuguggacccagagccucagacgggaacuguccggcuacugcucuaacauuaaacuucaaguggucaaggacgcucaggcccugcuccacgggcuggauuuuagcgagguuuccaaugugcagcgccuuaugagaaaggaacggcgcgacgauaacgaccugaaaagacuccgggaucugaaucaggcggugaacaaucuggucgagcucaagucuacacaacaaaagagcauccugcgcgugggaacgcuuaccuccgacgaucugcucauucuggcugccgaccuugaaaaacugagaagcaagguuauccggacagagcgcccccucucugccggcguguauauggggaaccuguccagccagcagcuggaucagagacgggcucuccugaauaugauuggaaugucuggcgggaaccagggagcccgcgcuggcagagacggcgucgugcggguuugggaugugaaaaaugccgagcuucuguccaaccaguucgggaccaugccuagccucacacuggcgugucuuaccaagcagggacaagucgaccugaaugaugccgugcaggcucucacagaccugggccugaucuacaccgccaaauauccgaacacgucugaccucgaucgccugacccagucccaucccauccuuaauaugauugacacaaagaaaagcucccugaacaucucuggguacaauuuuagccucggagcugccgugaaggcgggcgccugcaugcuggaugggggaaacaugcuugaaaccauuaaggucuccccucaaacaauggacggcauccugaaaagcauucucaagguuaaaaaggcucugggcauguucaucucugauacccccggggagagaaacccuuaugaaaauauucuguacaaaaucugucucuccggagacggcuggcccuauaucgccagccggacgucuauuacagggagagcuugggagaacaccgugguggaucuggagagcgacggaaagccucagaaggccgauuccaauaacucuagcaaaucccuucagagcgccggcuuuacagcugggcugaccuacucucagcucaugacccugaaggacgcgaugcugcaacuugauccgaaugccaaaacauggauggacaucgaaggacgccccgaggacccugucgaaauugcucucuaccagcccuccagcggcugcuauauccacuucuuucgggagccuacggaucugaagcaguucaaacaggacgccaaguacucucauggcauugaugugaccgaccuguuugccacacaacccgggcucaccuccgcuguuaucgaugcccugccgagaaacauggugaucacaugucagggaagcgacgauauucgcaaacuucuggaaucccagggccggaaggacaucaagcucauugauaucgaccugucuaaaaccgauagcagaaaguaugagaaugcggucugggaccaguacaaagaucugugccacaugcauacgggggugguuguggagaagaagaaacgcggaggcaaggaagagauuacaccucacugugcucuuauggacugcaucauguucgacgccgccgucuccgggggccucaacaccucugugcugcgggcuguccugcccagagauaugguguuucgcaccagcacaccucggguugugcucugaggacuaguaauaaggaaacuguaugaaugucugugggcaggaagugaagagauccuucuguaaagguuuuuggaauuaugucugcugaauaauaaacuuuuuugaaauaauaaaucugguagaaaaaugagaucucaaaggcucuuuucagagccaccaaaaaaaaaaaaaaaaaaaaaaaaaaaaaaaaaaaaaaaaaaaaaaaaaaaaaaaaaaaaaaaaaaaaaaaaaaaaaaaaaaaaaaaaaaaaaaaaaaaaa

SEQ ID NO: 17556 - RNA, 2046 nt, Artificial Sequence
  mRNA product Design b-4 (hSL-A100) comprising derived and/or modified sequence from LASV(LM765-SLE-2012;Clade IV)__AIT17815__NP (opt5)
aggagagucccgcagucggcguccagcggcucugcuuguucgugugugugucguugcaggccuuauucaagcuuaccaugagcgccuccaaggagaucaaaucuuuccuguggacccagagccucagacgggaacuguccggcuacugcucuaacauuaagcugcaaguggucaaagacgcucaggcccugcuccacgggcuggauuuuagcgagguuuccaaugugcagcgccuuaugagaaaggaacggcgcgacgauaacgaccugaaaagacuccgggaucugaaucaggcggugaacaaucuggucgagcucaagucuacacaacaaaagagcauccugcgcgugggaacgcuuaccuccgacgaucugcucauucuggcugccgaccuugaaaaacuuaagagcaaaguuacaagaaccgagcggccccucucugccggcguguauauggggaaccuguccagccagcagcuggaucagcgcagagcucuccuggacaugaucggaaugucuggcuccaaucagggggcccgggcuggacgcgauggcgucgugagaguuugggacgugaagaacgccgagcuucugaauaaccaguucggcacaaugccuagccucacccuggcgugucuuacaaaacaggggcaagucgaucugaaugacgccgugcaggcucucaccgaccugggacugauuuacacggccaaguauccgaacaccucugaucucgaccggcugacacagucccaucccauccuuaauaugaucgauaccaagaaaagcucccugaacauuucuggcuacaauuuuagccucggggcugccgugaaggcgggagccugcaugcuggacggcgggaacaugcuugaaacaaucaaagucuccccucaaaccauggauggcauucucaagagcauccugaaaguuaagaaagcucugggaauguucauuucugacgcccccggcgagcgcaacccuuaugaaaauauccuguacaagauuugucucuccggggauggauggcccuauaucgcuagcagaacgucuaucacaggccgggccugggagaacaccgugguggaccuggagagcgaugggaagccucagaaagccggauccaauggcucuaacaagagccuucaguccgcuggguuuacagcgggacugaccuacagccagcucaugacccugaaagacgccaugcugcaacuugauccgaaugcuaagacauggauggacauugaaggcagacccgaggacccugucgaaaucgcccucuaccagcccucuuccggcugcuauauucacuucuuucgcgagccuacggaucugaaacaguucaagcaggacgccaaguacagccaugggaucgaugugaccgaccuguuugcugcccaacccggacucacaucugcgguuauugaugcucugccgcggaacauggugaucaccugucagggcuccgacgauaucagaaaacuuuucgaaagccaggggcgcaaggacauuaaacugaucgauauugcccucuccaagacagacucucggaaauaugagaaugccgucugggaucaguacaaggaccugugccacaugcauaccggaaucgugguugagaagaaaaagagaggcgggaaagaagagauuacgccucacugugcucugauggauugcaucauguuugacgccgcugugagcggcggacuuaacacauccguccuccgcgccgugcugccccgggacauggucuucagaaccucuaccccucgcgugguucugugaggacuaguaauaaggaaacuguaugaaugucugugggcaggaagugaagagauccuucuguaaagguuuuuggaauuaugucugcugaauaauaaacuuuuuugaaauaauaaaucugguagaaaaaugagaucucaaaggcucuuuucagagccaccaaaaaaaaaaaaaaaaaaaaaaaaaaaaaaaaaaaaaaaaaaaaaaaaaaaaaaaaaaaaaaaaaaaaaaaaaaaaaaaaaaaaaaaaaaaaaaaaaaaaa

SEQ ID NO: 17557 - RNA, 2046 nt, Artificial Sequence
  mRNA product Design b-4 (hSL-A100) comprising derived and/or modified sequence from LASV(LM776-SLE-2012;Clade IV)__AIT17825__NP (opt5)
aggagagucccgcagucggcguccagcggcucugcuuguucgugugugugucguugcaggccuuauucaagcuuaccaugagcgccuccaaggagaucaaaucuuuccuguggacccagagccucagacgggaacuguccucuuacugcagcaacauuaaacuucaaguggucaaggacgcucaggcccugcuccacggccuggauuuuuccgagguuucuaaugugcagcgccuuaugagaaaggaacggcgcgacgauaacgaccugaaaagacuccgggaucugaaucaggcggugaacaaucuggucgagcucaagagcacacaacagaaguccauccugcgcguggggacgcuuaccagcgacgaucugcucauucuggcugccgaccuugaaaaacugaagucuaaaguuacaagaaccgagcggccccucuccgccggaguguauaugggcaaccugagcucucagcagcuggaucaacgcagagcucuccuguccaugaucgggaugagcggaucuaaucagggcgcccgggcugggcgcgacggagucgugagaguuugggaugugaagaacgccgagcuucugaauaaccaguucggcacaaugccuucccucacccuggcgugucuuacaaaacagggccaagucgaccugaaugaugccgugcaggcucucaccgaccuggggcugauuuacacggccaaguauccgaacaccagcgaccucgaucggcugacacagucccaucccauccuuaauaugaucgacaccaagaaaucuagccugaacauuuccggauacaauuuuagccucggcgcugccgugaaggcgggggccugcaugcuggauggaggcaacaugcuugaaacaaucaaagucucuccucaaaccauggacgggauucugaaguccauccucaaaguuaagaaagcucugggaauguucauuagcgauacgcccggcgagcgcaacccuuaugaaaauauccuguacaagauuugucucucuggcgacggguggcccuauaucgccagcagaacauccaucaccggacgggcuugggagaacacagugguggaucuggagucugacggcaagccucagaaagccgggagcaauaacuccaauaagagccuucagucugccggauuuaccgcuggccugaccuacucccagcucaugacacugaaagaugcgaugcugcaacuugacccgaacgccaagacguggauggauauugaagggagacccgaggacccugucgaaguggcucucuaccagcccagcucuggaugcuauauccacuucuuucgcgagccuaccgaccugaaacaguucaagcaggaugccaaguacucccauggcauugacguuacagaucuguuugccgcucaacccggccucaccagcgccgugaucgacgcgcugccgcggaauauggucauuacaugucagggguccgaugacaucagaaaacuucuggaaucucagggacgcaaggauaucaaacucauugacaucgcucugagcaagaccgauucccggaaauaugagaacgccgugugggaccaguacaaggaucugugccacaugcauacgggcguuguggucgagaagaaaaagagagggggaaaagaagagauuacaccucacugugcccuuauggacugcaucauguucgaugcugccgugucuggcgggcucaauaccagcguccugcgcgcugugcugccccgggacaugguuuuuagaaccuccacaccucgcgugguccucugaggacuaguaauaaggaaacuguaugaaugucugugggcaggaagugaagagauccuucuguaaagguuuuuggaauuaugucugcugaauaauaaacuuuuuugaaauaauaaaucugguagaaaaaugagaucucaaaggcucuuuucagagccaccaaaaaaaaaaaaaaaaaaaaaaaaaaaaaaaaaaaaaaaaaaaaaaaaaaaaaaaaaaaaaaaaaaaaaaaaaaaaaaaaaaaaaaaaaaaaaaaaaaaaa

SEQ ID NO: 17558 - RNA, 2046 nt, Artificial Sequence
  mRNA product Design b-4 (hSL-A100) comprising derived and/or modified sequence from LASV(Mad39;Clade IV)__ANH09723__NP (opt5)
aggagagucccgcagucggcguccagcggcucugcuuguucgugugugugucguugcaggccuuauucaagcuuaccaugagcgccuccaaggagaucaaaucuuuccuguggacccagagccucagacgggaacuguccggcuacugcucuaacauuaagcugcaaguggucaaagacgcucaggcccugcuccacgggcuggauuuuagcgagguuuccaaugugcagcgccuuaugagaaagcagcggcgcgacgauaacgaccugaaaagacuccgggaucugaaucaagcggugaacaaucuggucgaacucaagucuacacagcaaaagagcgugcugcgcguuggaacgcuuaccuccgacgaucugcucacacuggcugccgaccuugagaaacuuaagagcaaagugaccagaacagaacggccccucaccgccggcgucuauauggggaaccugucuucccagcagcuggaucagcgcagagcucuccugaauaugaucggaaugagcggcgggaaccagggagcccggacaggccgcgacggcgugguuagagugugggaugucaagaaugcugagcuucugaacaaucaguucgggaccaugccuucucucacgcuggccugucuuaccaaacaaggacagguggaccugaacgaugugguccaggcgcucacagaccugggccugauuuacaccgccaaguauccgaauacauccgaccucgaucggcugacccaaagccaucccauccuuaacaugauugacacgaauaagucuucccugaacaucagcggguacaacuuuucccucggagcugccguuaaagcuggcgccugcaugcuggaugggggaaauaugcuugagacaaucaaggugucuccucagaccauggacggcauucugaaaagcauccucaaggugaaaaagucccugggcauguucauuagcgauacacccggggaacgcaacccuuaugagaauauccuguacaaaauuugucucucuggagacggcuggcccuauaucgcguccagaaccagcauuaccgggcgggccugggaaaacacagucguggaucuggagucuggaggcaagccucagaaggcugggagcaauaacuccaauaaaucucuucagagcgccggauuugcugccggccugacguacucccaacucaugacccugaaggacgccaugcugcagcuugauccgaacgcuaaaacauggauggacaucgagggcagacccgaagauccuguugagaucgcgcucuaccagcccauuagcgggugcuauauccacuucuuucgcgaaccuaccgaccugaagcaguucaaacaagacgccaaguacucucauggaauugaugugacagaccuguuugcugcccagcccggccucaccuccgccgucaucgaggcucugccgcggaauauggugauuacgugucaggggagcgaugacaucagaaaacuuuucgaaucucagggacgcaaggauaucaagcugauugacaucgcccucuccaaaacagauagccggaaguaugagaacgcgguuugggaccaauacaaagaucugugccacaugcauaccggcguggucguggagaagaagaaaaagggcgggaaagaagagauuaccccucacugugcucugauggacugcaucauguuugaugccgccgucuccggaggccuuaauacacucgugcugagagcuguucugccccgcgacaugguguuccggaccucuacaccuaaggucgugcucugaggacuaguaauaaggaaacuguaugaaugucugugggcaggaagugaagagauccuucuguaaagguuuuuggaauuaugucugcugaauaauaaacuuuuuugaaauaauaaaucugguagaaaaaugagaucucaaaggcucuuuucagagccaccaaaaaaaaaaaaaaaaaaaaaaaaaaaaaaaaaaaaaaaaaaaaaaaaaaaaaaaaaaaaaaaaaaaaaaaaaaaaaaaaaaaaaaaaaaaaaaaaaaaaa

SEQ ID NO: 17559 - RNA, 2046 nt, Artificial Sequence
  mRNA product Design b-4 (hSL-A100) comprising derived and/or modified sequence from LASV(Z0947-SLE-2011;Clade IV)__AIT17841__NP (opt5)
aggagagucccgcagucggcguccagcggcucugcuuguucgugugugugucguugcaggccuuauucaagcuuaccaugagcgccuccaaggagaucaaaucuuuccuguggacccagagccucagacgggaacuguccggcuacugcucuaacauuaagcugcaaguggucaaagacgcucaggcccugcuccacgggcuggauuuuagcgagguuuccaaugugcagcgccuuaugagaaaggaacggcgcgacgauaacgaccugaaaagacuccgggaucugaaucaggcggugaacaaucuggucgagcucaagucuacacaacaaaagagcauccugcgcgugggaacgcuuaccuccgacgaucugcucauucuggcugccgaccuugaaaaacuuaagagcaaaguuacaagaaccgagcggccccucucugccggcguguauauggggaaccuguccagccagcagcuggaucagcgcagagcucuccugaauaugaucggaaugucuggcuccaaccagggggcccggacaggacgcgacggcgucgugagaguuugggaugugaagaaugcugagcuucugaacaaucaguucggcaccaugccuagccucacacuggccugucuuaccaaacaggggcaagucgaccugaacgaugcggugcaggcccucacggaccugggacugauuuacaccgcuaaguauccgaauacaucugaccucgaucggcugacccagucccaucccauccuuaacaugaucgacacaaagaaaagcucccugaauauuucuggcuacaacuuuagccucggggccgcugugaaggccggagcgugcaugcuggauggcgggaacaugcuugaaaccaucaaagucuccccucaaacgauggacggcauucucaagagcauccugaaaguuaagaaagcccugggaauguucauuucugaugcucccggcgagcgcaauccuuaugaaaacauccuguacaagauuugucucuccggggacggauggcccuauaucgccagcagaacaucuaucaccggccgggcuugggagaauacagugguggaucuggagagcgacgggaagccucagaaagccggauccaacggcucuaauaagagccuucaguccgccggguuuaccgcuggacugaccuacagccagcucaugacacugaaagaugcgaugcugcaacuugacccgaacgccaagacguggauggauauugaaggcagacccgaggacccugucgaaaucgcucucuaccagcccucuuccggcugcuauauucacuucuuucgcgagccuaccgaccugaaacaguucaagcaggaugccaaguacagccaugggaucgacgugacagaucuguuugccgcucaacccggacucaccucugccguuauugacgcgcugccgcggaauauggugaucacaugucagggcuccgaugacaucagaaaacuuuucgaaagccaggggcgcaaggauauuaaacugaucgacauugcucucuccaagaccgauucucggaaauaugagaacgccgucugggaccaguacaaggaucugugccacaugcauacgggaaucgugguugagaagaaaaagagaggcgggaaagaagagauuacaccucacugugcccugauggacugcaucauguuugaugcugccgugagcggcggacuuaauaccuccguccuccgcgcugugcugccccgggacauggucuucagaaccucuacaccucgcgugguucugugaggacuaguaauaaggaaacuguaugaaugucugugggcaggaagugaagagauccuucuguaaagguuuuuggaauuaugucugcugaauaauaaacuuuuuugaaauaauaaaucugguagaaaaaugagaucucaaaggcucuuuucagagccaccaaaaaaaaaaaaaaaaaaaaaaaaaaaaaaaaaaaaaaaaaaaaaaaaaaaaaaaaaaaaaaaaaaaaaaaaaaaaaaaaaaaaaaaaaaaaaaaaaaaaa

SEQ ID NO: 17560 - RNA, 2022 nt, Artificial Sequence
  mRNA product Design b-4 (A100) comprising derived and/or modified sequence from LASV(Josiah;Clade IV)__NP_694869__NP (opt1)
aggagagucccgcagucggcguccagcggcucugcuuguucgugugugugucguugcaggccuuauucaagcuuaccaugagcgccuccaaggagaucaagagcuuccuguggacccagucccuccgccgggagcugagcggcuacugcuccaacaucaagcuccagguggucaaggacgcccaggcgcugcugcacgggcuggacuucagcgagguguccaacgugcagcgccucaugcggaaggagcgccgggacgacaacgaccugaagcgccugcgggaccucaaccaggccgucaacaaccugguggagcucaagagcacccagcagaaguccauccugcgcgugggcacccugaccagcgacgaccugcucauccuggccgccgaccuggagaagcucaaguccaaggucauccggaccgagcgcccccugagcgccgggguguacaugggcaaccuguccagccagcagcucgaccagcggcgcgcgcugcugaacaugaucgggauguccggcggcaaccagggggcccgggccggccgcgacggggugguccgggugugggacgugaagaacgccgagcuccugaacaaccaguucggcaccaugccgagccugacgcucgcgugccugaccaagcaggggcaggucgaccugaacgacgccgugcaggcccucaccgaccugggccugaucuacaccgccaaguaccccaacacguccgaccucgaccgccugacccagagccaccccauccugaacaugaucgacaccaagaaguccagccucaacaucagcggcuacaacuucucccugggggccgcggugaaggccggcgccugcaugcuggacgggggcaacaugcucgagaccaucaaggucagcccccagacgauggacggcauccugaaguccauccugaaggugaagaaggcccucgggauguucaucagcgacaccccgggcgagcggaaccccuacgagaacauccuguacaagaucugccuguccggggacggcuggcccuacaucgccagccgcaccuccaucaccgggcgggcgugggagaacacgguggucgaccucgagagcgacggcaagccccagaaggccgacuccaacaacagcuccaagagccugcaguccgccggcuucaccgccgggcugaccuacagccagcucaugacccugaaggacgccaugcugcagcuggacccgaacgcgaagacguggauggacaucgagggccgccccgaggaccccguggagaucgcccucuaccagcccuccagcgggugcuacauccacuucuuccgggagccgaccgaccugaagcaguucaagcaggacgccaaguacucccacggcaucgacgugaccgaccuguucgccacccagcccgggcucacgagcgccgucaucgacgcgcugccccgcaacauggugaucacgugccagggcuccgacgacauccgcaagcugcucgagagccagggccggaaggacaucaagcugaucgacaucgcccugagcaagaccgacucccgcaaguacgagaacgccgugugggaccaguacaaggaccucugccacaugcacaccggggucguggucgagaagaagaagcggggcgggaaggaggagaucaccccgcacugcgcccugauggacugcaucauguucgacgcggccgugagcggcgggcugaacaccuccgugcuccgcgccguccugccccgggacaugguguuccgcaccagcacgccccgggugguccugugaggacuaguaauaaggaaacuguaugaaugucugugggcaggaagugaagagauccuucuguaaagguuuuuggaauuaugucugcugaauaauaaacuuuuuugaaauaauaaaucugguagaaaaaugagaucuaaaaaaaaaaaaaaaaaaaaaaaaaaaaaaaaaaaaaaaaaaaaaaaaaaaaaaaaaaaaaaaaaaaaaaaaaaaaaaaaaaaaaaaaaaaaaaaaaaaa

SEQ ID NO: 17561 - RNA, 2022 nt, Artificial Sequence
  mRNA product Design b-4 (A100) comprising derived and/or modified sequence from LASV(LP;Clade I)__AAF86702__NP (opt1)
aggagagucccgcagucggcguccagcggcucugcuuguucgugugugugucguugcaggccuuauucaagcuuaccaugagcaacuccaaggagaucaagagcuuccuguggacccagucccuccgccgggagcugagcggcuacugcuccaacaucaagcuccagguggucaaggacgcccaggcccugcugcacgggcuggacuucagcgagguguccaacgugcagcgccucaugcggaagcagaagcgcgacgacgcggaccugaagcggcugcgcgaccucaaccaggccgucaacaaccugguggagcucaagagcacccagcagaagaacgugcugcgggucggcacgcuguccagcgacgaccugaucacccucgccgccgaccuggagaagcugaaguccaaggugauccgcaccgagcggccccucagcuccgggguguacaugggcaaccugagcucccagcagcuggaccagcgccgggcccuccugagcaugaucgggauguccggcggcccgcaggggaaccgcaccggcggggacggcgucgugcgggugugggacgucaagaacgcggagcugcucaacaaccaguucgggacgaugcccagccugacccuggccugccucaccaagcagggccagguggaccugaacgacgccgugcaggcccugaccgaccucggccugaucuacacggcgaaguaccccaacuccagcgaccuggacaugcucacccagagccaccccauccuggggauggucgacaccaagaaguccagccugaacaucuccggcuacaacuucagccucggggccgccgugaaggccggcgccugcaugcuggacggcgggaacaugcuggagaccaucaagguguccccgcagacgauggacggcauccucaagagcauccugaaggucaagcgcucccuggggauguucaucagcgacacccccggcgagcggaaccccuacgagaacauccucuacaagaucugccuguccggggagggcuggcccuacaucgcgagccgcaccuccaucaccggccgggccugggagaacacgcugguggaccucgagagcgacaacaagccgcccaagcugaacuccgccgggagcaacaagucccugcaggccgccggccucaacgcggggcugaccuacagccagcugaugacccugaaggacugcaugcuccagcuggaccccuccagcaagaccuggaucgacaucgagggccgccccgaggacccgguggagaucgcccuguuccagcccuccagcgggugcuacauccacuucuuccgggagcccacggaccucaagcaguucaagcaggacgccaaguacagccacggcaucgacgucaccgaccuguucuccacccagcccggccugaccagcgccgugaucgaggcccucccgcgcaacauggugcugacgugccagggguccgacgacaucaagaagcugcucgagagccagggccggcgcgacaucaagcugaucgacaucucccugagcaaggcggacucccgcaaguucgagaacgccgucugggaccaguacaaggaccucugccacaugcacaccgggguggucguggagaagaagaagcggggcgggaaggaggagaucacgccccacugcgcccugcuggacugcaucauguucgacgccgccaccaccggcagccucaacaucaccacccugcgcgcggugcugccccgggacauggucuuccgcaccuccacgcccaagguggugcucugaggacuaguaauaaggaaacuguaugaaugucugugggcaggaagugaagagauccuucuguaaagguuuuuggaauuaugucugcugaauaauaaacuuuuuugaaauaauaaaucugguagaaaaaugagaucuaaaaaaaaaaaaaaaaaaaaaaaaaaaaaaaaaaaaaaaaaaaaaaaaaaaaaaaaaaaaaaaaaaaaaaaaaaaaaaaaaaaaaaaaaaaaaaaaaaaa

SEQ ID NO: 17562 - RNA, 2022 nt, Artificial Sequence
  mRNA product Design b-4 (A100) comprising derived and/or modified sequence from LASV(803213;Clade II)__AAF86704__NP (opt1)
aggagagucccgcagucggcguccagcggcucugcuuguucgugugugugucguugcaggccuuauucaagcuuaccaugagcgccuccaaggaggugaaguccuuccuguggacccagagccuccgccgggagcugagcggcuacugcuccaacaucaagcugcaggucgugaaggacgcccaggcgcuccugcacgggcuggacuucagcgaggugaacaacguccagcgccucaugcggaagcagaagcgcgacgacggcgaccugaagcggcugcgcgaccucaaccaggccgugaacaaccugguggagcugaaguccacccagcagaaguccauccuccgggucgggacgcugaccagcgacgaccugcucacccuggccgccgaccuggagaagcucaagagcaaggugauccgcaccgagcggccccuguccagcggcguguacauggggaaccuguccacgcagcagcucgagcagcgccgggcccugcugaacaugaucggcauggucggcggggcgcagggcacccagccggggcgcgacggcguggugcgggucugggacgugaagaaccccgaccuccugaacaaccaguucgggaccaugcccagccugacccucgccugccugacgaagcagggccagguggaccugaacgacgccguccucgcccugaccgaccugggccucaucuacaccgcgaaguaccccaacuccagcgaccuggaccgccugucccagagccacccgauccucaacaugguggacaccaagaaguccagccugaacaucagcggguacaacuucucccugggcgccgccgugaaggccggggccugcaugcucgacggcggcaacaugcuggagacgaucaaggucacgccccagaccauggacgggauccucaagagcauccugaaggugaagcggucccugggcauguucgugagcgacacccccggggagcgcaaccccuacgagaacauccuguacaagaucugccucuccggcgacggguggccguacaucgcgagccggaccuccaucgucggccgcgccugggagaacaccaccguggaccuggagagcgacggcaagccccagaagguggggaccgccggcuccaacaagagccugcaguccgccggguuccccacgggccucaccuacagccagcugaugacccugaaggacuccaugaugcagcuggaccccagcgccaagaccuggaucgacaucgaggggcggccggaggaccccgucgagaucgcgcucuaccagcccauguccggcugcuacauccacuucuuccgcgagcccacggaccugaagcaguucaagcaggacgccaaguacagccacggcaucgacguggccgaccuguucccggcccagcccgggcucaccuccgccgucaucgaggcgcugccccggaacauggugcugaccugccagggcagcgacgacaucaagaagcuccuggacucccaggggcgccgcgacaucaagcugaucgacaucagccucagcaagguggacucccggaaguucgagaacgccgucugggaccagugcaaggaccugugccacaugcacaccggcgugguggucgagaagaagaagcgcgggggcaaggaggagaucacgccccacugcgcccugauggacugcaucauguucgacgccgccgugagcggcgggcucaacaucccggugcugcgggcgguccugccccgcgacaugguguuccggaccuccagccccaaggugguccucugaggacuaguaauaaggaaacuguaugaaugucugugggcaggaagugaagagauccuucuguaaagguuuuuggaauuaugucugcugaauaauaaacuuuuuugaaauaauaaaucugguagaaaaaugagaucuaaaaaaaaaaaaaaaaaaaaaaaaaaaaaaaaaaaaaaaaaaaaaaaaaaaaaaaaaaaaaaaaaaaaaaaaaaaaaaaaaaaaaaaaaaaaaaaaaaaa

SEQ ID NO: 17563 - RNA, 2025 nt, Artificial Sequence
  mRNA product Design b-4 (A100) comprising derived and/or modified sequence from LASV(GA391;Clade III)__CAA36646__NP (opt1)
aggagagucccgcagucggcguccagcggcucugcuuguucgugugugugucguugcaggccuuauucaagcuuaccaugagcgccuccaaggaggugcgcagcuuccuguggacccagucccuccggcgcgagcugagcggcuacugcuccaacaucaagcugcaggucgugaaggacgcccaggcgcuccugcacgggcuggacuucagcgagguguccaacguccagcggcucaugcgcaagcagaagcgggacgacggcgaccugaagcgccugcgggaccucaaccaggccgugaacaaccugguggagcucaagagcacccagcagaaguccguccugcgcguggggacccugagcuccgacgaccugcucauccuggccgccgaccuggagaagcucaagagcaaggugacccggaccgagcgcccccuguccagcggcgucuacauggggaaccuguccagccagcagcucgaccagcggcgcgcccugcugaacaugaucggcaugaccggcguguccgggggcgggaagggcgcgagcgacgggaucgugcgggucugggacgugaagaacgccgagcuccugaacaaccaguucggcacgaugccgucccugacccucgccugccugaccaagcagggccagguggaccugaacgacgccguccaggcgcucaccgaccuggggcugaucuacacggccaaguaccccaacagcagcgaccucgaccgccugucccagagccaccccauccugaacaugaucgacaccaagaaguccagccucaacaucuccggcuacaacuucagccugggggccgccgugaaggccggcgcgugcaugcuggacggcgggaacaugcucgagaccaucaaggugagcccccagaccauggacggcauccucaaguccauccugaaggucaagaagucccuggggauguucgugagcgacacgccgggcgagcggaaccccuacgagaacauccuguacaagaucugccuguccggggacggcuggcccuacaucgccagccgcaccuccaucgugggccgggccugggagaacaccgucguggaccucgagcaggacaacaagccccagaagaucgggaacggcgggagcaacaagucccugcagagcgccggcuucgccgcggggcugaccuacucccagcucaugacgcugaaggacuucaagugcuucaaccugaucccgaacgccaagaccuggauggacaucgagggccgccccgaggaccccguggagaucgcccuguaccagcccagcuccggcugcuacguccacuucuuccgggagccgaccgaccucaagcaguucaagcaggacgccaaguacagccacgggaucgacgugaccgaccuguucgccgcgcagcccggccugacgagcgccgucaucgaggcccucccccgcaacauggugaucacgugccagggguccgaggacauccggaagcugcuggagagccagggccgccgcgacaucaagcucaucgacaucacccuguccaaggccgacagccggaaguucgagaacgccgugugggaccaguucaaggaccugugccacaugcacaccggggucgugguggagaagaagaagcgcggcggcaaggaggagaucacgccccacugcgcgcucauggacugcaucauguucgacgccgccgucuccgggggccuggacgccaaggugcugcgggugguccucccgcgcgacaugguguuccggaccagcacccccaaggugguccugugaggacuaguaauaaggaaacuguaugaaugucugugggcaggaagugaagagauccuucuguaaagguuuuuggaauuaugucugcugaauaauaaacuuuuuugaaauaauaaaucugguagaaaaaugagaucuaaaaaaaaaaaaaaaaaaaaaaaaaaaaaaaaaaaaaaaaaaaaaaaaaaaaaaaaaaaaaaaaaaaaaaaaaaaaaaaaaaaaaaaaaaaaaaaaaaaa

SEQ ID NO: 17564 - RNA, 2022 nt, Artificial Sequence
  mRNA product Design b-4 (A100) comprising derived and/or modified sequence from LASV(AV;Clade V)__CCA30315__NP (opt1)
aggagagucccgcagucggcguccagcggcucugcuuguucgugugugugucguugcaggccuuauucaagcuuaccaugagcgccuccaaggaggugaaguccuuccuguggacccagagccuccgccgggagcugagcggcuacugcuccaacaucaagcugcaggucgugaaggacgcccaggcgcuccugcacgggcuggacuucagcgagguguccaacguccagcgccucaugcggaagcagcgccgggacgacagcgaccugaagcgccugcgggaccucaaccaggccgugaacaaccugguggagcugaaguccacccagcagaaguccguccuccgcgugggcacgcugagcagcgacgaccugcucacccuggccgccgaccuggagaagcucaaguccaaggugacccggaccgagcgcccccugagcuccggggucuacaugggcaaccugagcucccagcagcucgaccagcggcgcgcccugcugaaccucaucgggaugacgaacggcagccagggcucccaggcggggcgggacggcguggugcgcgucugggacgugaagaacgccgagcugcugaacaaccaguucgggaccaugccgagccucacccuggccugccugaccaagcagggccagguggaccucaacgacgucgugcaggcccugacggaccuggggcucaucuacaccgcgaaguaccccaacaccagcgaccuggaccggcugacccagucccaccccauccucaacaugaucgacacgaagaaguccagccugaacaucagcggcuacaacuucucccugggcgccgccgugaaggccggggccugcaugcucgacggcgggaacaugcuggagaccaucaaggucagcccccaguccauggacggcauccucaagagcauccugaaggugaagcgcgcgcugggcauguucguguccgacaccccgggggagcggaaccccuacgagaacauccuguacaagaucugccucagcggcgacggguggcccuacaucgccucccgcaccagcaucgucggccgggccugggagaacacggugguggaccuggagaccgacgggaagccccagaagaucggcuccggcaacagcaacaagucccugcagagcgccggguucuccgccggccucaccuacagccagcugaugacccugaaggacgcgaugcugcagcucgacccgaacgccaagacguggauggacaucgaggggcgccccgaggaccccgucgagguggcccuguaccagcccaucuccggcugcuacauccacuucuuccgggagccgaccgaccugaagcaguucaagcaggacgccaaguacagccacgggaucgacaucgccgaccucuucgcggcccagcccggccugaccagcgccgucaucgaggcccugccccgcaacauggugaucacgugccagggcuccgaggacaucaagaagcuccuggagagccaggggcgcaaggacaucaagcugaucgacaucgcccucuccaagaucgacagccggaaguucgagaacgcggugugggaccaguacaaggaccugugccacaugcacaccggcgucgugguggagaagaagaagcgcgggggcaaggaggagaucaccccgcacugcgcccugauggacugcaucauguucgacgccgccgucuccgggggccucaacacccuggugcugcgggcggugcucccccgcgacauggucuuccggaccagcacgccccgcguggugcugugaggacuaguaauaaggaaacuguaugaaugucugugggcaggaagugaagagauccuucuguaaagguuuuuggaauuaugucugcugaauaauaaacuuuuuugaaauaauaaaucugguagaaaaaugagaucuaaaaaaaaaaaaaaaaaaaaaaaaaaaaaaaaaaaaaaaaaaaaaaaaaaaaaaaaaaaaaaaaaaaaaaaaaaaaaaaaaaaaaaaaaaaaaaaaaaaa

SEQ ID NO: 17565 - RNA, 2022 nt, Artificial Sequence
  mRNA product Design b-4 (A100) comprising derived and/or modified sequence from LASV(Togo/2016/7082;Clade VI)__AMR44578__NP (opt1)
aggagagucccgcagucggcguccagcggcucugcuuguucgugugugugucguugcaggccuuauucaagcuuaccaugagcaacuccaaggaggugaaguccuuccuguggacccagagccuccgccgggagcugagcggcuacugcuccaacaucaagcugcaggucgugaaggacgcccaggcccuccugcacgggcuggacuucagcgagguguccaacguccagcgccucaugcggaagcagaagcgcgacgacggcgaccugaagcggcugcgcgaccucaaccaggcggugaacaaccugguggagcucaagagcguccagcagaaguccauccugcggguggggacccugaccagcgacgaccugcucacccuggccgccgaccuggagaagcucaaguccaaggugacccgcaccgagcggccccugagcuccggcgucuacauggggaaccugagcucccagcagcucgaccagcgccgggcccugcugagcaugaucggcauguccggcgggaaccagaacagccagccgaagggcgacgggguggugcgcgucugggacgugaagaacgccgaccuccugaacaaccaguucggcacgaugcccucccugacccucgcgugccugaccaagcagggccagguggaccugaacgacgccguccaggcccucaccgaccuggggcugaucuacacggccaaguaccccaacagcagcgaccucgaccggcugucccagagccaccccauccugaacaugaucgacaccaagaaguccagccucaacaucuccggcuacaacuucagccugggggcggccaucaagaccggcgccugcaugcuggacgggggcaacaugcucgagaccaucaaggugacgccgcagaccauggacggcauccugaaguccauccugaaggugaagcgcagccucgggauguucaucuccgacacccccggcgagcggaaccccuacgagaacauccuguacaagaucugccugagcggggacggcuggcccuacaucgccucccgcaccgccaucaucgggcgggcgugggagaacacggucguggaccucgagagcgacuccaagccgcagaagaucggcagcaacggcuccaacaagagccugcaguccgccggguucgcccccggccugaccuacagccagcucaugacccugaaggacuccaugcugcagcuggaccccaacgccaagaccuggaucgacaucgaggggcgccccgaggacccgguggaggucgcccucuuccagcccaucagcggcugcuacauccacuucuuccgggagcccacggaccugaagcaguucaagcaggacgcgaaguacagccacgggaucgacgugaccgaccuguucgccgcccagcccggccucaccuccgccgugaucgaggcccugccgcgcaacaugguccugaccugccagggcagcgacgacaucaagaagcuccuggacucccaggggcggcgcgacaucaagcugaucgacgugagccucaacaagaucgacucccgcaaguucgagaacgcggucugggaccaguacaaggaccugugccacaugcacacgggcgugguggucgagaagaagaagaagggcgggaaggaggagaucacgccccacugcgcccugcucgacugcaucauguucgacgccgccgugagcgggggccugaacgccaccgugcugcgggcgguccucccccgcgacaugguguuccggaccuccagccccaaggugguccugugaggacuaguaauaaggaaacuguaugaaugucugugggcaggaagugaagagauccuucuguaaagguuuuuggaauuaugucugcugaauaauaaacuuuuuugaaauaauaaaucugguagaaaaaugagaucuaaaaaaaaaaaaaaaaaaaaaaaaaaaaaaaaaaaaaaaaaaaaaaaaaaaaaaaaaaaaaaaaaaaaaaaaaaaaaaaaaaaaaaaaaaaaaaaaaaaa

SEQ ID NO: 17566 - RNA, 2022 nt, Artificial Sequence
  mRNA product Design b-4 (A100) comprising derived and/or modified sequence from LASV(KAK-428;Clade n.d. (VII))__ANH09741__NP (opt1)
aggagagucccgcagucggcguccagcggcucugcuuguucgugugugugucguugcaggccuuauucaagcuuaccaugagcaacuccaaggaggugaaguccuuccuguggacccagagccuccgccgggagcugagcggcuacugcaccaacaucaagcugcaggucgugaaggacgcccaggcccuccugcacgggcuggacuucuccgaggugagcaacguccagcgccucaugcggaagcagaagcgcgacgacaacgaccugaagcggcugcgcgaccucaaccaggcggugaacaaccugguggagcugaaguccguccagcagaaguccgugcucaaggugggcacgcugaacagcgacgaccugcucacccuggccgccgaccuggagaagcucaagagcaaggucgugcggaccgagcgcccccuguccagcgggguguacaugggcaaccuguccagccagcagcucgaccagcggcgcgcccugcugaacaugaucgggauggccggcggcucccaggggaaccagccgagccgggacggcgucgugcgcgugugggacgucaagaacgcggaccuccugaacaaccaguucgggaccaugcccucccugacgcucgccugccugaccaagcagggccagguggaccugaacgacgugguccucgcccugaccgaccuggggcucaucuacaccgccaaguaccccaacagcuccgaccuggaccggcugagccagaaccaccccgugcucaacaugaucgacgugaacaagagcucccugaacaucagcggcuacaacuucucccugggcgcggccgucaaggccggggccugcaugcucgacggcgggaacaugcuggagacgaucaagaucagcccgcagaccguggacggcauccugaaguccauccucaaggugaagcgcgcccugggcauguucgucagcgacacccccggggagcggaaccccuacgagaacauccuguacaaggugugccucuccggcaacggguggcccuacaucgcgagccgcaccuccaucgucggccgggccugggagaacacggugguggaccuggagagcaacaagaaccagccgaaggucgggaacaacggcuccaacaagaugcugcagagcuccggcuucgccaccgggcucaccuacagccagcugaugacccugcgcgacuccaugcugcagcucgaccccacggccaagaccuggaucgacaucgagggccggcccgaggaccccguggagcuggcccuguuccagccgagcuccgggugcuacauccacuucuuccgcgagcccaccgaccucaagcaguucaagcaggacgcgaaguacagccacggcaucgacgugaacgaccuguucuccgcccagcccgggcugaccagcgccguccucgaggcccugccccggaacauggugcugacgugccagggcagcgacgacauccgcaagcuccuggacucccaggaccgcaaggacaucaagcugaucgacaucagccucuccaaggccgacgcgcggaaguucgagaacgacgugugggaccaguucaaggaccugugccacaugcacaccggcaucgucguggagaagaagaagaagggcgggaagcaggagaugaccccgcacugcgcccugcucgacugcaucauguucgacgccgccgugagcgggggccugaacguccccacccugcgcgccgugcuccccacggacaugguguuccggaccaucaccaccaaggucgugcugugaggacuaguaauaaggaaacuguaugaaugucugugggcaggaagugaagagauccuucuguaaagguuuuuggaauuaugucugcugaauaauaaacuuuuuugaaauaauaaaucugguagaaaaaugagaucuaaaaaaaaaaaaaaaaaaaaaaaaaaaaaaaaaaaaaaaaaaaaaaaaaaaaaaaaaaaaaaaaaaaaaaaaaaaaaaaaaaaaaaaaaaaaaaaaaaaa

SEQ ID NO: 17567 - RNA, 2022 nt, Artificial Sequence; identical to SEQ ID NO: 17561
  mRNA product Design b-4 (A100) comprising derived and/or modified sequence from LASV(Pinneo-NIG-1969;Clade I)__AIT17837__NP (opt1)

SEQ ID NO: 17568 - RNA, 2022 nt, Artificial Sequence
  mRNA product Design b-4 (A100) comprising derived and/or modified sequence from LASV(ISTH0009-NIG-2011;Clade II)__AIT17405__NP (opt1)
aggagagucccgcagucggcguccagcggcucugcuuguucgugugugugucguugcaggccuuauucaagcuuaccaugagcguguccaaggaggucaagagcuuccuguggacccagucccuccgccgggagcugagcggcuacugcuccaacaucaagcuccagguggugaaggacgcccaggcccugcugcacgggcuggacuucagcgaggucuccaacgugcagcgccucaugcggaagcagaagcgcgacgacagcgaccugaagcggcugcgcgaccucaaccaggcggugaacaaccuggucgagcugaaguccacccagcagaaguccauccuccgggugggcacccugaccagcgacgaccugcucacccuggccgccgaccuggagaagcucaagagcaaggugauccgcaccgagcggccccuguccagcggggucuacaugggcaaccuguccacgcagcagcucgagcagcgccgggcccugcugaacaugaucgggauggugggcggcgcccaggggacccagccgggccgcgacggggugguccgggugugggacgugaagaaccccgaccuccugaacaaccaguucggcaccaugcccagccugacccucgcgugccugacgaagcaggggcaggucgaccugaacgacgccgugcucgcccugaccgaccugggccucaucuacaccgccaaguaccccaacuccagcgaccuggaccgccugucccagagccacccgauccucaacaugguggacaucaagaaguccagccugaacaucagcggcuacaacuucucccugggggcggccgucaaggccggcgccugcaugcucgacgggggcaacaugcuggagaccaucaaggugacgccccagaccauggacggcauccucaagagcauccugaaggugaagcggucccuggggauguucgucagcgacacccccggcgagcgcaaccccuacgagaacauccuguacaagaucugccucuccggggacggcuggccguacaucgccagccggaccuccaucguggggcgcgcgugggagaacacgaccguggaccuggagagcgacggcaagccccagaaggucggcuccgccgggagcaacaagucccugcagagcgccggcuuccccaccgggcucaccuacucccagcugaugacgcugaaggacagcaugaugcagcuggaccccuccgccaagaccuggaucgacaucgagggccggccggaggaccccguggagaucgcccucuaccagcccaugagcgggugcuacauccacuucuuccgcgagcccaccgaccugaagcaguucaagcaggacgcgaaguacucccacggcaucgacgucgccgaccuguucccggcccagcccggccucaccagcgccgugaucgaggcccugccccggaacauggugcugacgugccaggggagcgacgacaucaagcgccuccuggacucccagggccgccgggacaucaagcugaucgacaucgcgcucagcaaggccgacucccgccgguucgagaacgccgucugggaccagugcaaggaccugugccacaugcacaccggggugguggucgagaagaagaagcgcggcgggaaggaggagaucacgccccacugcgcccugauggacugcaucauguacgacgccgcggugagcggcggccucaacaucccggugcugcgggccguccugccccgcgacaugguguuccggaccuccagccccaaggugguccucugaggacuaguaauaaggaaacuguaugaaugucugugggcaggaagugaagagauccuucuguaaagguuuuuggaauuaugucugcugaauaauaaacuuuuuugaaauaauaaaucugguagaaaaaugagaucuaaaaaaaaaaaaaaaaaaaaaaaaaaaaaaaaaaaaaaaaaaaaaaaaaaaaaaaaaaaaaaaaaaaaaaaaaaaaaaaaaaaaaaaaaaaaaaaaaaaa

SEQ ID NO: 17569 - RNA, 2022 nt, Artificial Sequence
  mRNA product Design b-4 (A100) comprising derived and/or modified sequence from LASV(ISTH2010-NIG-2012;Clade II)__AIT17483__NP (opt1)
aggagagucccgcagucggcguccagcggcucugcuuguucgugugugugucguugcaggccuuauucaagcuuaccaugagcgccuccaaggaggugaaguccuuccuguggacccagagccuccgccgggagcugagcggcuacugcuccaacaucaagcugcaggucgugaaggacgcccaggcgcuccugcacgggcuggacuucagcgagguguccaacguccagcgccucaugcggaagcagaagcgcgacgacagcgaccugaagcggcugcgcgaccucaaccaggccgugaacaaccugguggagcugaaguccacccagcagaaguccauccuccgggucggcacgcugaccagcgacgaccugcucacccuggccgccgaccuggagaagcucaagagcaaggugauccgcaccgagcggccccuguccagcgggguguacaugggcaaccuguccacgcagcagcucgagcagcgccgggcccugcugaaccucaucgggauggucggcggcgcgcaggggacccagccgggccgcgacgggguggugcgggucugggacgugaagaaccccgaccugcugaacaaccaguucggcaccaugcccagccucacccuggccugccugacgaagcagggccagguggaccucaacgacgccguccuggcccugaccgaccucgggcugaucuacaccgcgaaguaccccaacuccagcgaccuggaccgccucucccagagccacccgauccugaacaugguggacaccaagaaguccagccugaacaucagcggcuucaacuucucccucggggccgccgugaaggccggcgccugcaugcuggacgggggcaacaugcuggagacgaucaaggucacgccccagaccauggacggcauccucaagagcauccugaaggugaagaagucccuggggauguucgugagcgacacccccggcgagcggaaccccuacgagaacauccucuacaagaucugccuguccggggacggcuggccguacaucgcgagccgcaccuccaucgucgggcgggccugggagaacaccaccguggaccuggagagcgacggcaagccccacaaggugggcaccgccggguccaacaagagccuccaguccgccggcuuccccacggggcugaccuacagccagcugaugacccugaaggacuccaugaugcagcucgaccccagcgccaagaccuggaucgacaucgagggccgcccggaggaccccgucgagaucgcgcuguaccagcccauguccgggugcuacauccacuucuuccgggagcccacggaccugaagcaguucaagcaggacgccaaguacagccacggcaucgacguggccgaccucuucccggcccagcccggccugaccuccgccgucaucgaggcgcugccccgcaacauggugcugaccugccaggggagcgacgacaucaagcggcuccuggacagccagggccgccgcgacaucaagcucaucgacaucgcccuguccaaggccgacagccggcgcuucgagaacgccgugugggaccagugcaaggaccugugccacaugcacaccggggucgugguggagaagaagaagcggggcgggaaggaggagaucacgccccacugcgcccucauggacugcaucauguacgacgcggccgucuccggcggccugaacaucccggugcugcgcgccgugcucccccgggacauggucuuccgcaccagcucccccaagguggugcugugaggacuaguaauaaggaaacuguaugaaugucugugggcaggaagugaagagauccuucuguaaagguuuuuggaauuaugucugcugaauaauaaacuuuuuugaaauaauaaaucugguagaaaaaugagaucuaaaaaaaaaaaaaaaaaaaaaaaaaaaaaaaaaaaaaaaaaaaaaaaaaaaaaaaaaaaaaaaaaaaaaaaaaaaaaaaaaaaaaaaaaaaaaaaaaaaa

SEQ ID NO: 17570 - RNA, 2022 nt, Artificial Sequence
  mRNA product Design b-4 (A100) comprising derived and/or modified sequence from LASV(Lassa virus/H.sapiens-wt/NGA/2015/ISTH_0543;Clade II)__AVO03640__NP (opt1)
aggagagucccgcagucggcguccagcggcucugcuuguucgugugugugucguugcaggccuuauucaagcuuaccaugagcgccuccaaggaggugaaguccuuccuguggacccagagccuccgccgggagcugagcggcuacugcuccaacaucaagcugcaggucgugaaggacgcccaggcgcuccugcacgggcuggacuucagcgagguguccaacguccagcgccucaugcggaagcagaagcgcgacgacagcgaccugaagcggcugcgcgaccucaaccaggccgugaacaaccugguggagcugaaguccacccagcagaaguccauccuccgggucggcacgcugaccagcgacgaccugcucacccuggccgccgaccuggagaagcucaagagcaaggugauccgcaccgagcggccccuguccagcgggguguacaugggcaaccuguccacgcagcagcucgagcagcgccgggcccugcugaacaugaucgggauggucggcggcgcgcaggggacccagccgggccgcgacgggguggugcgggucugggacgugaagaaccccgaccuccugaacaaccaguucggcaccaugcccagccugacccucgccugccugacgaagcagggccagguggaccugaacgacgccguccucgcccugaccgaccuggggcucaucuacaccgcgaaguaccccaacuccagcgaccuggaccgccugucccagagccacccgauccucaacaugguggacaccaagaaguccagccugaacaucagcggcuacaacuucucccugggggccgccgugaaggccggcgccugcaugcucgacgggggcaacaugcuggagacgaucaaggucacgccccagaccauggacggcauccucaagagcauccugaaggugaagaagucccuggggauguucgugagcgacacccccggcgagcggaaccccuacgagaacauccuguacaagaucugccucuccggggacggcuggccguacaucgcgagccgcaccuccaucgucgggcgggccugggagaacaccaccguggaccuggagagcgacggcaagccccagaaggugggcuccgccgggagcaacaagucccugcagagcgccggcuuccccaccgggcucacguacucccagcugaugacccugaaggacagcaugaugcagcuggaccccuccgccaagaccuggaucgacaucgagggccgcccggaggaccccgucgagaucgcgcucuaccagcccaugagcgggugcuacauccacuucuuccgggagcccaccgaccugaagcaguucaagcaggacgccaaguacucccacggcaucgacguggccgaccuguucccggcccagcccggccucacgagcgccgucaucgaggcgcugccccgcaacauggugcugaccugccaggggagcgacgacaucaagcggcuccuggacucccagggccgcaaggacaucaagcugaucgacaucgcccucagcaaggccgacucccgccgguucgagaacgccgugugggaccagugcaaggaccugugccacaugcacaccggggucgugguggagaagaagaagcgcggcgggaaggaggagaucacgccccacugcgcccugauggacugcaucauguacgacgcggccgucagcggcggccucaacaucccggugcugcgggccgugcugccccgcgacauggucuuccggaccuccagccccaagguggugcucugaggacuaguaauaaggaaacuguaugaaugucugugggcaggaagugaagagauccuucuguaaagguuuuuggaauuaugucugcugaauaauaaacuuuuuugaaauaauaaaucugguagaaaaaugagaucuaaaaaaaaaaaaaaaaaaaaaaaaaaaaaaaaaaaaaaaaaaaaaaaaaaaaaaaaaaaaaaaaaaaaaaaaaaaaaaaaaaaaaaaaaaaaaaaaaaaa

SEQ ID NO: 17571 - RNA, 2022 nt, Artificial Sequence
  mRNA product Design b-4 (A100) comprising derived and/or modified sequence from LASV(Lassa virus/H.sapiens-wt/NGA/2016/ISTH_0009;Clade II)__AVO03572__NP (opt1)
aggagagucccgcagucggcguccagcggcucugcuuguucgugugugugucguugcaggccuuauucaagcuuaccaugagcgccuccaaggaggugaaguccuuccuguggacccagagccuccgccgggagcugagcggcuacugcuccaacaucaagcugcaggucgugaaggacgcccaggcgcuccugcacgggcuggacuucagcgagguguccaacguccagcgccucaugcggaagcagaagcgcgacgacagcgaccugaagcggcugcgcgaccucaaccaggccgugaacaaccugguggagcugaaguccacccagcagaaguccauccuccgggucggcacgcugaccagcgacgaccugcucacccuggccgccgaccuggagaagcucaagagcaaggugauccgcaccgagcggccccuguccagcgggguguacaugggcaaccuguccacgcagcagcucgagcagcgccgggcccugcugaacaugaucgggauggucggcggcgcgcaggggacccagccgggccgcgacgggguggugcgggucugggacgugaagaaccccgaccuccugaacaaccaguucggcaccaugcccagccugacccucgccugccugacgaagcagggccagguggaccugaacgacgccguccucgcccugaccgaccuggggcucaucuacaccgcgaaguaccccaacuccagcgaccuggaccgccugucccagagccacccgauccucaacaugguggacaccaagaaguccagccugaacaucagcggcuacaacuucucccugggggccgccgugaaggccggcgccugcaugcucgacgggggcaacaugcuggagacgaucaaggucacgccccagaccauggacggcauccucaagagcauccugaaggugaagaagucccuggggauguucgugagcgacacccccggcgagcggaaccccuacgagaacauccuguacaagaucugccucuccggggacggcuggccguacaucgcgagccgcaccuccaucgucgggcgggccugggagaacaccaccguggaccuggagagcgacggcaagccccagaaggugggcuccgccgggagcaacaagucccugcagagcgccggcuuccccaccgggcucacguacucccagcugaugacccugaaggacagcaugaugcagcuggaccccuccgccaagaccuggaucgacaucgagggccgcccggaggaccccgucgagaucgcgcucuaccagcccaugagcgggugcuacauccacuucuuccgggagcccaccgaccugaagcaguucaagcaggacgccaaguacucccacggcaucgacguggccgaccuguucccggcccagcccggccucacgagcgccgucaucgaggcgcugccccgcaacauggugcugaccugccaggggagcgacgacaucaagcggcuccuggacucccagggccgccgcgacaucaagcugaucgacaucgcccucagcaaggccgacucccggcgcuucgagaacgccgugugggaccagugcaaggaccugugccacaugcacaccggggucgugguggagaagaagaagcggggcgggaaggaggagaucacgccccacugcgcccugauggacugcaucauguacgacgcggccgucagcggcggccucaacaucccggugcugcgcgccgugcugccccgggacauggucuuccgcaccuccagccccaagguggugcucugaggacuaguaauaaggaaacuguaugaaugucugugggcaggaagugaagagauccuucuguaaagguuuuuggaauuaugucugcugaauaauaaacuuuuuugaaauaauaaaucugguagaaaaaugagaucuaaaaaaaaaaaaaaaaaaaaaaaaaaaaaaaaaaaaaaaaaaaaaaaaaaaaaaaaaaaaaaaaaaaaaaaaaaaaaaaaaaaaaaaaaaaaaaaaaaaa

SEQ ID NO: 17572 - RNA, 2022 nt, Artificial Sequence
  mRNA product Design b-4 (A100) comprising derived and/or modified sequence from LASV(Lassa virus/H.sapiens-wt/NGA/2016/ISTH_0017;Clade II)__AVO03568__NP (opt1)
aggagagucccgcagucggcguccagcggcucugcuuguucgugugugugucguugcaggccuuauucaagcuuaccaugagcgccuccaaggaggugaaguccuuccuguggacccagagccuccgccgggagcugagcggcuacugcuccagcaucaagcugcaggucgugaaggacgcccaggcgcuccugcacgggcuggacuucuccgaggugagcaacguccagcgccucaugcggaagcagaagcgcgacgacuccgaccugaagcggcugcgcgaccucaaccaggccgugaacaaccugguggagcucaagagcacccagcagaaguccauccugcgggucggcacgcugaccagcgacgaccugcucacccuggccgccgaccuggagaagcucaaguccaaggugauccgcaccgagcggccccugagcuccgggguguacaugggcaaccugagcacgcagcagcucgagcagcgccgggcccugcugaacaugaucgggauggcgggcggcgcccaggggacccagccgggccgcgacggggucgugcgggugugggacgucaagaaccccgaccuccugaacaaccaguucggcaccaugcccucccugacccucgccugccugacgaagcagggccagguggaccugaacgacgccgugcucgcgcugaccgaccuggggcucaucuacaccgccaaguaccccaacagcuccgaccuggaccgccugagccagagccacccgauccucaacauggucgacaccaagaaguccagccugaacaucuccggcuacaacuucagccugggggccgccgugaaggccggcgcgugcaugcucgacgggggcaacaugcuggagacgaucaaggugacgccccagaccauggacggcauccugaaguccauccucaaggucaagcggagccuggggauguucguguccgacgcccccggcgagcgcaaccccuacgagaacauccuguacaagaucugccucagcggggacggcuggccguacaucgccucccggaccagcaucguggggcgcgccugggagaacaccaccgucgaccuggaguccgacggcaagccccagaaggugggcgccaccgggagcaacaagucccugcagagcgcgggcuuccccaccgggcucacguacucccagcugaugacccugaaggacagcaugaugcagcuggaccccuccgccaagaccuggaucgacaucgagggccggccggaggaccccguggaggucgcccucuaccagcccgugagcgggugcuacauccacuucuuccgcgagcccaccgaccugaagcaguucaagcaggacgccaaguacucccacggcaucgacgucgccgaccuguucccggcgcagcccggccucacgagcgccgugaucgaggcccugccccggaacauggugcugaccugccaggggagcgacgacaucaagaagcuccuggacucccagggccgcaaggacaucaagcugaucgacaucgcccucagcaaggccgacucccgccgguucgagaacgcggucugggaccagugcaaggaccugugccacaugcacaccggggugguggucgagaagaagaagcgcggcgggaaggaggagaucacgccccacugcgcccugauggacugcaucauguacgacgccgccgugagcggcggccucaacaucccggugcugcgggcgguccugccccgcgacaugguguuccggaccuccagccccaaggugguccucugaggacuaguaauaaggaaacuguaugaaugucugugggcaggaagugaagagauccuucuguaaagguuuuuggaauuaugucugcugaauaauaaacuuuuuugaaauaauaaaucugguagaaaaaugagaucuaaaaaaaaaaaaaaaaaaaaaaaaaaaaaaaaaaaaaaaaaaaaaaaaaaaaaaaaaaaaaaaaaaaaaaaaaaaaaaaaaaaaaaaaaaaaaaaaaaaa

SEQ ID NO: 17573 - RNA, 2022 nt, Artificial Sequence
  mRNA product Design b-4 (A100) comprising derived and/or modified sequence from LASV(Lassa virus/H.sapiens-wt/NGA/2018/ISTH_0959;Clade II)__AVV65100__NP (opt1)
aggagagucccgcagucggcguccagcggcucugcuuguucgugugugugucguugcaggccuuauucaagcuuaccaugagcgccuccaaggaggugaaguccuuccuguggacccagagccuccgccgggagcugagcggcuacugcuccaacaucaagcugcaggucgugaaggacgcccaggcgcuccugcacgggcuggacuucagcgagguguccaacguccagcgccucaugcggaagcagaagcgcgacgacagcgaccugaagcggcugcgcgaccucaaccaggccgugaacaaccugguggagcugaaguccacccagcagaaguccauccuccgggucggcacccugaccagcgacgaccugcucacccuggccgccgaccuggagaagcucaagagcaaggugauccgcaccgagcggccccuguccagcgggguguacaugggcaaccuguccacgcagcagcucgagcagcgccgggcccugcugaaccucaucgggauggucggcggcgcgcaggggacccagccgggccgcgacgggguggugcgggucugggacgugaagaaccccgaccugcugaacaaccaguucggcaccaugcccagccucacccuggccugccugacgaagcagggccagguggaccucaacgacgucgugcuggcccugaccgaccucgggcugaucuacaccgccaaguaccccaacuccagcgaccuggaccgccucucccagagccacccgauccugaacaugguggacaccaagaaguccagccugaacaucagcggcuucaacuucucccucggggcggccgucaaggccggcgccugcaugcuggacgggggcaacaugcuggagacgaucaaggugacgccccagaccauggacggcauccucaagagcauccugaaggugaagaagucccuggggauguucgucagcgacacccccggcgagcggaaccccuacgagaacauccucuacaagaucugccuguccggggacggcuggccguacaucgccagccgcaccuccaucguggggcgggcgugggagaacaccaccguggaccuggagagcgacggcaagccccacaaggucggcaccgccggguccaacaagagccuccaguccgccggcuuccccacggggcugaccuacagccagcugaugacccugaaggacuccaugaugcagcucgaccccagcgccaagaccuggaucgacaucgagggccgcccggaggaccccguggagaucgcccuguaccagcccauguccgggugcuacauccacuucuuccgggagcccacggaccugaagcaguucaagcaggacgcgaaguacagccacggcaucgacgucgccgaccucuucccggcccagcccggccugaccuccgccgugaucgaggcccugccccgcaacauggugcugaccugccaggggagcgacgacaucaagcggcuccuggacagccagggccgcaaggacaucaagcucaucgacaucgcgcuguccaagaccgacagccgccgguucgagaacgccgucugggaccagugcaaggaccugugccacaugcacacgggggugguggucgagaagaagaagcgcggcgggaaggaggagaucacgccccacugcgcccucauggacugcaucauguacgacgccgccguguccggcggccugaacaucccggugcugcgggcgguccucccccgcgacaugguguuccggaccagcucccccaaggugguccugugaggacuaguaauaaggaaacuguaugaaugucugugggcaggaagugaagagauccuucuguaaagguuuuuggaauuaugucugcugaauaauaaacuuuuuugaaauaauaaaucugguagaaaaaugagaucuaaaaaaaaaaaaaaaaaaaaaaaaaaaaaaaaaaaaaaaaaaaaaaaaaaaaaaaaaaaaaaaaaaaaaaaaaaaaaaaaaaaaaaaaaaaaaaaaaaaa

SEQ ID NO: 17574 - RNA, 2022 nt, Artificial Sequence
  mRNA product Design b-4 (A100) comprising derived and/or modified sequence from LASV(LASV003-NIG-2008;Clade II)__AIT17581__NP (opt1)
aggagagucccgcagucggcguccagcggcucugcuuguucgugugugugucguugcaggccuuauucaagcuuaccaugagcgccuccaaggaggugaaguccuuccuguggacccagagccuccgccgggagcugagcggcuacugcuccagcaucaagcugcaggucgugaaggacgcccaggcgcuccugcacgggcuggacuucuccgaggugagcaacguccagcgccucaugcggaagcagaagcgcgacgacuccgaccugaagcggcugcgcgaccucaaccaggccgugaacaaccugguggagcucaagagcacccagcagaaguccguccugcgggugggcacccugaccagcgacgaccugcucacccuggccgccgaccuggagaagcucaaguccaaggugauccgcaccgagcggccccugagcuccggggucuacaugggcaaccugagcgcccagcagcucgagcagcgccggacgcugcugaacaugaucgggauggugggcggcgcgcaggggacccagccgggccgcgacggggugguccgggugugggacgugaagaaccccgaccuccugaacaaccaguucggcaccaugcccucccugacccucgccugccugacgaagcaggggcaggucgaccugaacgacguggugcucgcccugaccgaccugggccucaucuacaccgccaaguaccccaacagcuccgaccuggaccgccugagccagagccacccgauccucuccauggucgacaccaagaaguccagccugaacaucagcggcuacaacuucucccugggggcggccgugaaggccggcgccugcaugcucgacgggggcaacaugcuggagacgaucaaggugacgccccagaccauggacggcauccucaagagcauccugaaggucaagaagucccuggggauguucgugagcgacacccccggcgagcggaaccccuacgagaacauccuguacaagaucugccucuccggggacggcuggccguacaucgccagccgcaccuccaucguggggcgggcgugggagaacaccaccgucgaccuggagagcgacggcaagccccagaaggugggcaccgccggguccaacaagagccugcaguccgccggcuuccccacggggcucaccuacagccagcugaugacccugaaggacuccaugaugcagcuggaccccagcgccaagaccuggaucgacaucgagggccgcccggaggaccccgucgagaucgcccucuaccagcccauguccgggugcuacauccacuucuuccgggagcccacggaccugaagcaguucaagcaggacgcgaaguacagccacggcaucgacgugaccgaccuguucccggcccagcccggccucaccagcgccgugaucgaggcccugccccgcaacaugguccugaccugccagggguccgacgacaucaagcggcuccuggacagccagggccgccgcgacaucaagcugaucgacaucgcccucuccaaggcggacagccggcgcuucgagaacgccgugugggaccagugcaaggaccugugccacaugcacacggggguggucguggagaagaagaagcggggcgggaaggaggagaucacgccccacugcgcccugauggacugcaucauguacgacgccgccguguccggcggccucaacaucccgguccugcgcgcggugcugccccgggacaugguguuccgcaccagcucccccaaggucgugcucugaggacuaguaauaaggaaacuguaugaaugucugugggcaggaagugaagagauccuucuguaaagguuuuuggaauuaugucugcugaauaauaaacuuuuuugaaauaauaaaucugguagaaaaaugagaucuaaaaaaaaaaaaaaaaaaaaaaaaaaaaaaaaaaaaaaaaaaaaaaaaaaaaaaaaaaaaaaaaaaaaaaaaaaaaaaaaaaaaaaaaaaaaaaaaaaaa

SEQ ID NO: 17575 - RNA, 2022 nt, Artificial Sequence
  mRNA product Design b-4 (A100) comprising derived and/or modified sequence from LASV(LASV035-NIG-2009;Clade II)__AIT17589__NP (opt1)
aggagagucccgcagucggcguccagcggcucugcuuguucgugugugugucguugcaggccuuauucaagcuuaccaugagcgccuccaaggaggugaaguccuuccuguggacccagagccuccgccgggagcugagcggcuacugcuccagcaucaagcugcaggucgugaaggacgcccaggcgcuccugcacgggcuggacuucuccgaggugagcaacguccagcgccucaugcggaagcagaagcgcgacgacuccgaccugaagcggcugcgcgaccucaaccaggccgugaacaaccugguggagcucaagagcacccagcagaaguccauccugcgggucggcacgcugaccagcgacgaccugcucacccuggccgccgaccuggagaagcucaaguccaaggugauccgcaccgagcggccccugagcuccgggguguacaugggcaaccugagcgcccagcagcucgagcagcgccgggcgcugcugaacaugaucgggauggucggcggcgcccaggggacgcagccgggccgcgacgggguggugcgggucugggacgugaagaaccccgaccuccugaacaaccaguucggcaccaugcccucccugacccucgccugccugaccaagcagggccagguggaccugaacgacgccguccucgcgcugacggaccuggggcucaucuacaccgccaaguaccccaacagcuccgaccuggaccgccugagccagagccacccgauccucaacaugguggacaccaagaaguccagccugaacaucuccggcuacaacuucagccugggggccgccgugaaggccggcgcgugcaugcucgacgggggcaacaugcuggagaccaucaaggucacgccccagaccauggacggcauccugaaguccauccucaaggugaagcggagccuggggauguucguguccgacacccccggcgagcgcaaccccuacgagaacauccuguacaagaucugccucagcggggacggcuggccguacaucgccucccggaccagcaucgucgggcgcgccugggagaacacgaccguggaccuggaguccgacggcaagccccagaaggugggcaccaccgggagcaacaagucccugcagagcgccggcuuccccacggggcucaccuacucccagcugaugacccugaaggacagcaugaugcagcuggaccccuccgccaagaccuggaucgacaucgagggccggccggaggaccccgucgagaucgcgcucuaccagcccaugagcgggugcuacauccacuucuuccgcgagcccacggaccugaagcaguucaagcaggacgccaaguacucccacggcaucgacguggccgaccuguucccggcccagcccggccucaccagcgccgucaucgaggcgcugccccggaacauggugcugaccugccaggggagcgacgacaucaagaagcuccuggacucccagggccgccgcgacaucaagcugaucgacaucgcccucagcaaggccgacucccggaaguucgagaacgccgugugggaccagugcaaggaccugugccacaugcacaccggggucgugguggagaagaagaagcgcggcgggaaggaggagaucacgccccacugcgcccugauggacugcaucauguacgacgcggccgucagcggcggccucaacaucccggugcugcgggccgugcugccccgcgacauggucuuccggaccuccagccccaagguggugcucugaggacuaguaauaaggaaacuguaugaaugucugugggcaggaagugaagagauccuucuguaaagguuuuuggaauuaugucugcugaauaauaaacuuuuuugaaauaauaaaucugguagaaaaaugagaucuaaaaaaaaaaaaaaaaaaaaaaaaaaaaaaaaaaaaaaaaaaaaaaaaaaaaaaaaaaaaaaaaaaaaaaaaaaaaaaaaaaaaaaaaaaaaaaaaaaaa

SEQ ID NO: 17576 - RNA, 2022 nt, Artificial Sequence
  mRNA product Design b-4 (A100) comprising derived and/or modified sequence from LASV(LASV1000-NIG-2009;Clade II)__AIT17783__NP (opt1)
aggagagucccgcagucggcguccagcggcucugcuuguucgugugugugucguugcaggccuuauucaagcuuaccaugagcgccuccaaggaggugaaguccuuccuguggacccagagccuccgccgggagcugagcggcuacugcuccaacaucaagcugcaggucgugaaggacgcccaggcgcuccugcacgggcuggacuucagcgagguguccaacguccagcgccucaugcggaagcagaagcgcgacgacagcgaccugaagcggcugcgcgaccucaaccaggccgugaacaaccugguggagcugaaguccacccagcagaaguccauccuccgggucggcacgcugaccagcgacgaccugcucacccuggccgccgaccuggagaagcucaagagcaaggugauccgcaccgagcggccccuguccagcgggguguacaugggcaaccuguccacgcagcagcucgagcagcgccgggcccugcugaacaugaucgggauggucggcggcgcgcaggggacccagccgggccgcgacgggguggugcgggucugggacgugaagaaccccgaccuccugaacaaccaguucggcaccaugcccagccugacccucgccugccugacgaagcagggccagguggaccugaacgacgucgugcucgcccugaccgaccuggggcucaucuacaccgccaaguaccccaacuccagcgaccuggaccgccugucccagagccacccgauccucaacaugguggacaccaagaaguccagccugaacaucagcggcuacaacuucucccugggggcggccgucaaggccggcgccugcaugcucgacgggggcaacaugcuggagacgaucaaggugacgccccagaccauggacggcauccucaagagcauccugaaggugaagaagucccuggggauguucgucagcgacacccccggcgagcggaaccccuacgagaacauccuguacaagaucugccucuccggggacggcuggccguacaucgccagccgcaccuccaucguggggcgggcgugggagaacaccaccguggaccuggagagcgacggcaagccccagaaggucggcaccgccggguccaacaagagccugcaguccgccggcuuccccacggggcucaccuacagccagcugaugacccugaaggacuccaugaugcagcuggaccccagcgccaagaccuggaucgacaucgagggccgcccggaggaccccguggagaucgcccucuaccagcccgucuccgggugcuacauccacuucuuccgggagcccacggaccugaagcaguucaagcaggacgcgaaguacagccacggcaucgacguggccgaccuguucccggcccagcccggccucaccuccgccgugaucgaggcccugccccgcaacaugguccugaccugccaggggagcgacgacaucaagcggcuccuggacagccagggccgccgcgacaucaagcugaucgacaucgcgcucuccaaggccgacagccggcgcuucgagaacgccgugugggaccagugcaaggaccugugccacaugcacaccgggguggucguggagaagaagaagcggggcgggaaggaggagaucacgccccacugcgcccugauggacugcaucauguacgacgccgcgguguccggcggccucaacaucccgguccugcgcgccgugcugccccgggacaugguguuccgcaccagcucccccaaggucgugcucugaggacuaguaauaaggaaacuguaugaaugucugugggcaggaagugaagagauccuucuguaaagguuuuuggaauuaugucugcugaauaauaaacuuuuuugaaauaauaaaucugguagaaaaaugagaucuaaaaaaaaaaaaaaaaaaaaaaaaaaaaaaaaaaaaaaaaaaaaaaaaaaaaaaaaaaaaaaaaaaaaaaaaaaaaaaaaaaaaaaaaaaaaaaaaaaaa

SEQ ID NO: 17577 - RNA, 2022 nt, Artificial Sequence
  mRNA product Design b-4 (A100) comprising derived and/or modified sequence from LASV(LASV221-NIG-2010;Clade II)__AIT17625__NP (opt1)
aggagagucccgcagucggcguccagcggcucugcuuguucgugugugugucguugcaggccuuauucaagcuuaccaugagcgccuccaaggaggugaaguccuuccuguggacccagagccuccgccgggagcugagcggcuacugcuccagcaucaagcugcaggucgugaaggacgcccaggcgcuccugcacgggcuggacuucuccgaggugagcaacguccagcgccucaugcggaagcagcgccgggacgacuccgaccugaagcgccugcgggaccucaaccaggccgugaacaaccugguggagcucaagagcacccagcagaaguccauccugcgcgucggcacgcugaccagcgacgaccugcucacccuggccgccgaccuggagaagcucaaguccaaggugauccggaccgagcgcccccugagcuccgggguguacaugggcaaccugagcacgcagcagcucgagcagcggcgcgcccugcugaacaugaucgggauggucggcggcgcgcaggggacccagccgggccgggacgggguggugcgcgucugggacgugaagaaccccgaccuccugaacaaccaguucggcaccaugcccucccugacccucgccugccugacgaagcagggccagguggaccugaacgacgccguccucgcccugaccgaccuggggcucaucuacaccgcgaaguaccccaacagcuccgaccuggaccggcugagccagagccacccgauccucaacaugguggacaccaagaaguccagccugaacaucuccggcuacaacuucagccugggggccgccgugaaggccggcgccugcaugcucgacgggggcaacaugcuggagacgaucaaggucacgccccagaccguggacggcauccugaaguccauccucaaggugaagcgcagccuggggauguucgucuccgacacccccggcgagcggaaccccuacgagaacauccuguacaagaucugccucagcggggacggcuggccguacaucgcgucccgcaccagcaucguggggcgggccugggagaacaccaccguggaccuggaguccgacggcaagccccagaaggucggcaccgccgggagcaacaagucccugcagagcgccggcuuccccacggggcucaccuacucccagcugaugacccugaaggacagcaugaugcagcuggaccccuccgccaagaccuggaucgacaucgagggccgcccggaggaccccguggagaucgcgcucuaccagcccaugagcgggugcuacauccacuucuuccgggagcccacggaccugaagcaguucaagcaggacgccaaguacucccacggcaucgacgucgccgaccuguucccggcccagcccggccucaccagcgccgugaucgaggcgcugccccgcaacauggugcugaccugccaggggagcgacgacaucaagcgccuccuggacucccagggccggcgcgacaucaagcugaucgacaucgcccucagcaaggccgacucccggaaguucgagaacgccgucugggaccagugcaaggaccugugccacaugcacaccggggugguggucgagaagaagaagcgcggcgggaaggaggagaucacgccccacugcgcccugauggacugcaucauguacgacgcggccgugagcggcggccucaacaucccggugcugcgggccguccugccccgcgacaugguguuccggaccuccagccccaaggugguccucugaggacuaguaauaaggaaacuguaugaaugucugugggcaggaagugaagagauccuucuguaaagguuuuuggaauuaugucugcugaauaauaaacuuuuuugaaauaauaaaucugguagaaaaaugagaucuaaaaaaaaaaaaaaaaaaaaaaaaaaaaaaaaaaaaaaaaaaaaaaaaaaaaaaaaaaaaaaaaaaaaaaaaaaaaaaaaaaaaaaaaaaaaaaaaaaaa

SEQ ID NO: 17578 - RNA, 2022 nt, Artificial Sequence
  mRNA product Design b-4 (A100) comprising derived and/or modified sequence from LASV(LASV237-NIG-2010;Clade II)__AIT17639__NP (opt1)
aggagagucccgcagucggcguccagcggcucugcuuguucgugugugugucguugcaggccuuauucaagcuuaccaugagcgccuccaaggaggugaaguccuuccuguggacccagagccuccgccgggagcugagcggcuacugcuccaacaucaagcugcaggucgugaaggacgcccaggcgcuccugcacgggcuggacuucagcgagguguccaacguccagcgccucaugcggaagcagaagcgcgacgacagcgaccugaagcggcugcgcgaccucaaccaggccgugaacaaccugguggagcugaaguccacccagcagaaguccauccuccgggucggcacccugaccagcgacgaccugcucacccuggccgccgaccuggagaagcucaagagcaaggugauccgcaccgagcggccccuguccagcgggguguacaugggcaaccuguccacgcagcagcucgagcagcgccgggcccugcugaacaugaucgggauggucggcggcgcgcaggggacccagccgggccgcgacgggguggugcgggucugggacgugaagaaccccgaccuccugaacaaccaguucggcaccaugcccagccugacccucgccugccugacgaagcagggccagguggaccugaacgacgccguccucgcccugaccgaccuggggcucaucuacaccgcgaaguaccccaacuccagcgaccuggaccgccugucccagagccacccgauccucaacaugguggacaucaagaaguccagccugaacaucagcggcuacaacuucucccugggggccgccgugaaggccggcgccugcaugcucgacgggggcaacaugcuggagaccaucaaggucacgccccagaccauggacggcauccucaagagcauccugaaggugaagcggucccuggggauguucgugagcgacacccccggcgagcgcaaccccuacgagaacauccuguacaagaucugccucuccggggacggcuggccguacaucgcgagccggaccuccaucgucgggcgcgccugggagaacacgaccguggaccuggagagcgacggcaagccccagaaggugggcuccgccgggagcaacaagucccugcagagcgccggcuuccccaccgggcucaccuacucccagcugaugacgcugaaggacagcaugaugcagcuggaccccuccgccaagaccuggaucgacaucgagggccggccggaggaccccgucgagaucgcgcucuaccagcccaugagcgggugcuacauccacuucuuccgcgagcccaccgaccugaagcaguucaagcaggacgccaaguacucccacggcaucgacguggccgaccuguucccggcccagcccggccucaccagcgccgucaucgaggcgcugccccggaacauggugcugacgugccaggggagcgacgacaucaagcgccuccuggacucccagggccgccgggacaucaagcugaucgacaucgcccucagcaaggccgacucccgccgguucgagaacgccgugugggaccagugcaaggaccugugccacaugcacaccggggucgugguggagaagaagaagcgcggcgggaaggaggagaucacgccccacugcgcccugauggacugcaucauguacgacgcggccgucagcggcggccucaacaucccggugcugcgggccgugcugccccgcgacauggucuuccggaccuccagccccaagguggugcucugaggacuaguaauaaggaaacuguaugaaugucugugggcaggaagugaagagauccuucuguaaagguuuuuggaauuaugucugcugaauaauaaacuuuuuugaaauaauaaaucugguagaaaaaugagaucuaaaaaaaaaaaaaaaaaaaaaaaaaaaaaaaaaaaaaaaaaaaaaaaaaaaaaaaaaaaaaaaaaaaaaaaaaaaaaaaaaaaaaaaaaaaaaaaaaaaa

SEQ ID NO: 17579 - RNA, 2022 nt, Artificial Sequence
  mRNA product Design b-4 (A100) comprising derived and/or modified sequence from LASV(LASV253-NIG-2011;Clade II)__AIT17671__NP (opt1)
aggagagucccgcagucggcguccagcggcucugcuuguucgugugugugucguugcaggccuuauucaagcuuaccaugagcgccuccaaggaggugaaguccuuccuguggacccagagccuccgccgggagcugagcggcuacugcuccagcaucaagcugcaggucgugaaggacgcccaggcgcuccugcacgggcuggacuucuccgaggugagcaacguccagcgccucaugcggaagcagaagcgcgacgacuccgaccugaagcggcugcgcgaccucaaccaggccgugaacaaccugguggagcucaagagcacccagcagaaguccguccugcgggugggcacccugaccagcgacgaccugcucacccuggccgccgaccuggagaagcucaaguccaaggugauccgcaccgagcggccccugagcuccggggucuacaugggcaaccugagcacgcagcagcucgagcagcgccgggcccugcugaacaugaucgggauggugggcggcgcgcaggggacccagccgggccgcgacggggugguccgggugugggacgugaagaaccccgaccuccugaacaaccaguucggcaccaugcccucccugacccucgccugccugacgaagcaggggcaggucgaccugaacgacguggugcucgcccugaccgaccugggccucaucuacaccgccaaguaccccaacagcuccgaccuggaccgccugagccagagccacccgauccucaacauggucgacaccaagaaguccagccugaacaucuccggcuacaacuucagccugggggcggccgugaaggccggcgccugcaugcucgacgggggcaacaugcuggagacgaucaaggugacgccccagaccauggacggcauccugaaguccauccucaaggucaagaagucccuggggauguucgugagcgacacccccggcgagcggaaccccuacgagaacauccuguacaagaucugccucagcggggacggcuggccguacaucgccucccgcaccagcaucguggggcgggcgugggagaacaccaccgucgaccuggaguccgacggcaagccccagaaggugggcaccgccgggagcaacaagucccugcagagcgccggcuuccccacggggcucaccuacucccagcugaugacccugaaggacagcaugaugcagcuggaccccuccgccaagaccuggaucgacaucgagggccgcccggaggaccccgucgagaucgcccucuaccagcccaugagcgggugcuacauccacuucuuccgggagcccacggaccugaagcaguucaagcaggacgcgaaguacucccacggcaucgacgugaccgaccuguucccggcccagcccggccucaccagcgccgugaucgaggcccugccccgcaacaugguccugaccugccaggggagcgacgacaucaagcggcuccuggacucccagggccgccgcgacaucaagcugaucgacaucgcccucagcaaggcggacucccggcgcuucgagaacgccgugugggaccagugcaaggaccugugccacaugcacacggggguggucguggagaagaagaagcggggcgggaaggaggagaucacgccccacugcgcccugauggacugcaucauguacgacgccgccgugagcggcggccucaacaucccgguccugcgcgcggugcugccccgggacaugguguuccgcaccuccagccccaaggucgugcucugaggacuaguaauaaggaaacuguaugaaugucugugggcaggaagugaagagauccuucuguaaagguuuuuggaauuaugucugcugaauaauaaacuuuuuugaaauaauaaaucugguagaaaaaugagaucuaaaaaaaaaaaaaaaaaaaaaaaaaaaaaaaaaaaaaaaaaaaaaaaaaaaaaaaaaaaaaaaaaaaaaaaaaaaaaaaaaaaaaaaaaaaaaaaaaaaa

SEQ ID NO: 17580 - RNA, 2022 nt, Artificial Sequence
  mRNA product Design b-4 (A100) comprising derived and/or modified sequence from LASV(LASV254-NIG-2011;Clade II)__AIT17675__NP (opt1)
aggagagucccgcagucggcguccagcggcucugcuuguucgugugugugucguugcaggccuuauucaagcuuaccaugagcgccuccaaggaggugaaguccuuccuguggacccagagccuccgccgggagcugagcggcuacugcuccagcaucaagcugcaggucgugaaggacgcccaggcgcuccugcacgggcuggacuucuccgaggugagcaacguccagcgccucaugcggaagcagaagcgcgacgacuccgaccugaagcggcugcgcgaccucaaccaggccgugaacaaccugguggagcucaagagcacccagcagaaguccguccugcgggugggcacgcugaccagcgacgaccugcucacccuggccgccgaccuggagaagcucaaguccaaggugauccgcaccgagcggccccugagcuccggggucuacaugggcaaccugagcacgcagcagcucgagcagcgccgggcccugcugaacaugaucgggauggugggcggcgcgcaggggacccagccgggccgcgacggggugguccgggugugggacgugaagaaccccgaccuccugaacaaccaguucggcaccaugcccucccugacccucgccugccugacgaagcaggggcaggucgaccugaacgacgccgugcucgcccugaccgaccugggccucaucuacaccgcgaaguaccccaacagcuccgaccuggaccgccugagccagagccacccgauccucaacaugguggacaccaagaaguccagccugaacaucuccggcuacaacuucagccugggggccgccgucaaggccggcgccugcaugcucgacgggggcaacaugcuggagacgaucaaggugacgccccagaccauggacggcauccugaaguccauccucaaggugaagaagucccuggggauguucgucagcgacacccccggcgagcggaaccccuacgagaacauccuguacaagaucugccucagcggggacggcuggccguacaucgcgucccgcaccagcaucguggggcgggccugggagaacaccaucguggaccuggaguccgacggcaagccccagaaggucggcaccgccgggagcaacaagucccugcagagcgccggcuuccccaccgggcucacguacucccagcugaugacccugaaggacagcaugaugcagcuggaccccuccgccaagaccuggaucgacaucgagggccgcccggaggaccccguggagaucgcgcucuaccagcccaugagcgggugcuacauccacuucuuccgggagcccaccgaccugaagcaguucaagcaggacgccaaguacucccacggcaucgacgucgccgaccuguucccggcccagcccggccucacgagcgccgugaucgaggcgcugccccgcaacauggugcugaccugccaggggagcgacgacaucaagcggcuccuggacucccagggccgccgcgacaucaagcugaucgacaucgcccucagcaaggccgacucccggcgcuucgagaacgccgucugggaccagugcaaggaccugugccacaugcacaccggggugguggucgagaagaagaagcggggcgggaaggaggagaucacgccccacugcgcccugauggacugcaucauguacgacgcggccgugagcggcggccucaacaucccggugcugcgcgccguccugccccgggacaugguguuccgcaccuccagccccaaggugguccucugaggacuaguaauaaggaaacuguaugaaugucugugggcaggaagugaagagauccuucuguaaagguuuuuggaauuaugucugcugaauaauaaacuuuuuugaaauaauaaaucugguagaaaaaugagaucuaaaaaaaaaaaaaaaaaaaaaaaaaaaaaaaaaaaaaaaaaaaaaaaaaaaaaaaaaaaaaaaaaaaaaaaaaaaaaaaaaaaaaaaaaaaaaaaaaaaa

SEQ ID NO: 17581 - RNA, 2022 nt, Artificial Sequence
  mRNA product Design b-4 (A100) comprising derived and/or modified sequence from LASV(Nig08-04;Clade II)__ADU56611__NP (opt1)
aggagagucccgcagucggcguccagcggcucugcuuguucgugugugugucguugcaggccuuauucaagcuuaccaugagcgccuccaaggaggugaaguccuuccuguggacccagagccuccgccgggagcugagcggcuacugcuccaacaucaagcugcaggucgugaaggacgcccaggcgcuccugcacgggcuggacuucagcgagguguccaacguccagcgccucaugcggaagcagaagcgcgacgacggcgaccugaagcggcugcgcgaccucaaccaggccgugaacaaccugguggagcucaagagcacccagcagaaguccguccugcggguggggacccugaccagcgacgaccugcucacccuggccgccgaccuggagaagcucaaguccaaggugauccgcaccgagcggccccugagcuccggcgucuacauggggaaccugagcacgcagcagcucgagcagcgcaaggcccugcuguccaugaucggcauggugggcggggcgcagggcacccagccggggcgggacggcgugguccgcgugugggacgugaagaaccccgaccuccugaacaaccaguucgggaccaugcccagccugacccucgccugccugacgaagcagggccaggucgaccugaacgacgccgugcucgcccugaccgaccugggccucaucuacaccgcgaaguaccccaacuccagcgaccuggaccggcugucccagagccacccgauccucaacaugguggacaccaagaaguccagccugaacaucagcggguacaacuucucccugggcgccgccgucaaggccggggccugcaugcucgacggcggcaacaugcuggagacgaucaaggugacgccccagaccauggacgggauccucaagagcauccugaaggugaagcgcucccugggcauguucgucagcgacacccccggggagcggaaccccuacgagaacauccuguacaagaucugccucuccggcgacggguggccguacaucgcgagccgcaccuccaucgugggccgggccugggagaacaccaccguggaccuggagagcgacggcaagccccagaaggucgggaccgccggcuccaacaagagccugcaguccgccggguuccccacgggccucaccuacagccagcugaugacccugaaggacuccaugaugcagcuggaccccagcgccaagaccuggaucgacaucgaggggcgcccggaggaccccguggagaucgcgcucuaccagcccauguccggcugcuacauccacuucuuccgggagcccacggaccugaagcaguucaagcaggacgccaaguacagccacggcaucgacgucaccgaccuguucuccgcccagccggggcucaccagcgccgugaucgaggcccugccccgcaacauggugcugaccugccagggcagcgacgacaucaagaagcuccuggacucccaggggcggcgcgacaucaagcugaucgacaucagccucaacaaggcggacucccgccgguucgagaacgccgucugggaccagugcaaggaccugugccacaugcacacgggcgugguggucgagaagaagaagcgcgggggcaaggaggagaucacgccccacugcgcccugauggacugcaucauguucgacgccgccgugagcggcgggcucaacauccccauccugcgggcggugcugccgcgcgacauggucuuccggaccuccagccccaagguggugcucugaggacuaguaauaaggaaacuguaugaaugucugugggcaggaagugaagagauccuucuguaaagguuuuuggaauuaugucugcugaauaauaaacuuuuuugaaauaauaaaucugguagaaaaaugagaucuaaaaaaaaaaaaaaaaaaaaaaaaaaaaaaaaaaaaaaaaaaaaaaaaaaaaaaaaaaaaaaaaaaaaaaaaaaaaaaaaaaaaaaaaaaaaaaaaaaaa

SEQ ID NO: 17582 - RNA, 2025 nt, Artificial Sequence
  mRNA product Design b-4 (A100) comprising derived and/or modified sequence from LASV(GA391;Clade III)__AAA46284__NP (opt1)
aggagagucccgcagucggcguccagcggcucugcuuguucgugugugugucguugcaggccuuauucaagcuuaccaugagcgccuccaaggaggugcgcagcugccuguggacccagucccuccggcgcgagcugagcggcuacugcuccaacaucaagcugcaggucgugaaggacgcccaggcgcuccugcacgggcuggacuucagcgagguguccaacguccagcggcucaugcgcaagcagaagcgggacgacggcgaccugaagcgccugcgggaccucaaccaggccgugaacaaccugguggagcugaaguccacccagcagaaguccguccuccgcguggggacgcugagcuccgacgaccugcucauccuggccgccgaccuggagaagcucaagagcaaggugacccggaccgagcgcccccuguccagcggcgucuacauggggaaccuguccagccagcagcucgaccagcggcgcgcccugcugaacaugaucggcaugaccggcguguccgggggcgggaagggcgcgagcaacgggaucgugcgggucugggacgugaagaacgccgagcuccugaacaaccaguucggcacgaugccgucccugacccucgccugccugaccaagcagggccagguggaccugaacgacgccguccaggcgcucaccgaccuggggcugaucuacacggccaaguaccccaacagcagcgaccucgaccgccugucccagagccaccccauccugaacaugaucgacaccaagaaguccagccucaacaucuccggcuacaacuucagccugggggccgccgugaaggccggcgcgugcaugcuggacggcgggaacaugcucgagaccaucaaggugagcccccagaccauggacggcauccucaagagcauccugaaggucaagaagucccuggggauguucgugagcgacacgccgggcgagcggaaccccuacgagaacauccuguacaagaucugccuguccggggacggcuggagcuacaucgccucccgcaccagcaucgugggccgggccugggagaacaccgucguggaccucgagcaggacaacaagccccagaagaucgggaacggcggguccaacaagagccugcaguccgccggcuucgccgcggggcugaucuacagccagcucaugacccugaaggacuucaagugcuucaaccugauccccaacgccaagacguggauggacaucgagggccgcccggaggaccccguggagaucgcccuguaccagcccuccagcggcugcuacguccacuucuuccgggagcccaccgaccucaagcaguucaagcaggacgccaaguacagccacgggcgcgacgugaccgaccuguucgccgcgcagccgggccugaccuccgccgucaucgaggcccucccccggaacauggugaucacgugccaggggagcgaggacauccgcaagcugcuggagucccagggccgccgggacaucaagcucaucgacaucacccugagcaaggccgacucccgcaaguucgagaacgccgugugggaccaguucaaggaccugugccacaugcacaccggggucgugguggagaagaagaagcggggcggcaaggaggagaucacgccccacugcgcgcucauggacugcaucauguucgacgccgccgucagcgggggccuggacgccaaggugcugcgcgugguccucccccgggacaugguguuccgcaccuccaccccgaaggugguccugugaggacuaguaauaaggaaacuguaugaaugucugugggcaggaagugaagagauccuucuguaaagguuuuuggaauuaugucugcugaauaauaaacuuuuuugaaauaauaaaucugguagaaaaaugagaucuaaaaaaaaaaaaaaaaaaaaaaaaaaaaaaaaaaaaaaaaaaaaaaaaaaaaaaaaaaaaaaaaaaaaaaaaaaaaaaaaaaaaaaaaaaaaaaaaaaaa

SEQ ID NO: 17583 - RNA, 2022 nt, Artificial Sequence
  mRNA product Design b-4 (A100) comprising derived and/or modified sequence from LASV(Nig08-A19;Clade III)__ADU56619__NP (opt1)
aggagagucccgcagucggcguccagcggcucugcuuguucgugugugugucguugcaggccuuauucaagcuuaccaugagcgccuccaaggaggugaaguccuuccuguggacccagucccuccgccgggagcugagcggcuacugcuccaacaucaagcugcaggucgugaaggacgcccaggcgcuccugcacgggcuggacuucagcgagguguccaacguccagcgccucaugcggaagcagaagcgcgacgacggcgaccugaagcggcugcgcgaccucaaccaggccgugaacaaccugguggagcucaagagcacccagcagaaguccguccugcggguggggacccugagcuccgacgaccugcucgugcuggccgccgaccuggagaagcucaagagcaaggucgugcgcaccgagcggccccuguccagcggcaucuacauggggaaccuguccagccagcagcucgaccagcgcaaggcccugcugaacaugaucggcaugaccggcgggaacggcgggcggaacaccacguccgacggcaucgugcgcgucugggacgugaagaacgcggagcuccugaacaaccaguucgggaccaugccgagccugacccucgccugccugaccaagcagggccagguggaccugaacgacgccguccaggcccucacggaccugggccugaucuacaccgcgaaguaccccaacuccagcgaccucgaccggcuggcccagagccaccccauccugaacaugaucgacaccaagaaguccagccucaacaucuccggguacaacuucagccugggcgccgccgugaaggccggggcgugcaugcuggacggcggcaacaugcucgagaccaucaaggugagcccccagacgauggacgggauccucaagagcauccugaaggucaagcgcucccugggcauguucaucagcgacaccccgggggagcggaaccccuacgagaacauccuguacaagaucugccuguccggcgacggguggcccuacaucgccagccgcaccuccaucgugggccgggccugggagaacaccguggucgaccucgagagcgacaacaagccccagaagacgggcaacgggggcuccaacaagagccugcaguccgccggguucgccgcgggccugaccuacagccagcucaugacccugaaggacuccaugcugcagcuggacccgaacgccaagaccuggauggacaucgaggggcgccccgaggaccccguggagaucgcccucuaccagcccagcuccggcugcuacauccacuucuuccgggagccgacggaccugaagcaguucaagcaggacgccaaguacagccacggcaucgacgugaccgaccuguucgccgcgcagcccgggcucaccagcgccgucaucgaggcccugccccgcaacauggugaucacgugccagggcuccgaggacauccggaagcugcucgagagccaggggcgccgcgacaucaagcugaucgacaucucccugagcaaggucgacucccggaaguucgagaacgccgugugggaccaguucaaggaccucugccacaugcacaccggcaucguggucgagaagaagaagcgcgggggcaaggaggagaucacgccccacugcgcccugauggacugcaucauguucgacgcggccgugagcggcgggguggacgccaagguccugcgggccgugcucccgcgcgacaugguguuccggaccuccacccccaaggucgugcugugaggacuaguaauaaggaaacuguaugaaugucugugggcaggaagugaagagauccuucuguaaagguuuuuggaauuaugucugcugaauaauaaacuuuuuugaaauaauaaaucugguagaaaaaugagaucuaaaaaaaaaaaaaaaaaaaaaaaaaaaaaaaaaaaaaaaaaaaaaaaaaaaaaaaaaaaaaaaaaaaaaaaaaaaaaaaaaaaaaaaaaaaaaaaaaaaa

SEQ ID NO: 17584 - RNA, 2022 nt, Artificial Sequence
  mRNA product Design b-4 (A100) comprising derived and/or modified sequence from LASV(G1180-SLE-2010;Clade IV)__AIT17169__NP (opt1)
aggagagucccgcagucggcguccagcggcucugcuuguucgugugugugucguugcaggccuuauucaagcuuaccaugagcgccuccaaggagaucaagagcuuccuguggacccagucccuccgccgggagcugagcggcuacugcuccaacaucaagcuccagguggucaaggacgcccaggcgcugcugcacgggcuggacuucagcgagguguccaacgugcagcgccucaugcggaaggagcgccgggacgacaacgaccugaagcgccugcgggaccucaaccaggccgucaacaaccugguggagcucaagagcacccagcagaaguccauccugcgcgugggcacccugaccagcgacgaccugcucauccuggccgccgaccuggagaagcucaaguccaaggucauccggaccgagcgcccccugagcgccgggguguacaugggcaaccuguccagccagcagcucgaccagcggcgcgcgcugcuguccaugaucgggaugagcuccggcaaccagcgggcccaggccggccgcgacggggugguccgggugugggacgugaagaacgucgagcuccugaacaaccaguucggcaccaugccgagccugacgcucgccugccugaccaagcagggccagguggaccugaacgacgcggugcaggcccucaccgaccuggggcugaucuacaccgccaaguaccccaacacguccgaccucgaccgccugacccagagccaccccauccugaacaugaucgacaccaagaaguccagccucaacaucagcggguacaacuucucccugggcgccgccgucaaggcgggcgccugcaugcuggacgggggcaacaugcucgagaccaucaaggugagcccccagacgauggacgggauccugaaguccauccugaaggugaagaaggcccucggcauguucaucagcgacaccccgggcgagcggaaccccuacgagaacauccuguacaagaucugccuguccggggacggcuggcccuacaucgccagccgcaccuccaucaccgggcgggccugggagaacacggucguggaccucgagagcgacggcaagccccagaaggcgggguccaacaacagcaacaagucccugcagagcgugggcuucaccgccggccugaccuacucccagcucaugacccugaaggacgccaugcugcagcuggacccgaacgccaagacguggauggacaucgaggggcgccccgaggaccccgucgagaucgcccucuaccagcccagcuccggcugcuacauccacuucuuccgggagccgaccgaccugaagcaguucaagcaggacgcgaaguacagccacgggaucgacgugaccgaccuguucgccgcccagcccggccucaccuccgccgugaucgacgcccugccccgcaacauggucaucacgugccaggggagcgacgacauccgcaagcugcucgagagccagggccggaaggacaucaagcugaucgacaucgcgcuguccaagaccgacagccgcaaguacgagaacgccgugugggaccaguacaaggaccucugccacaugcacaccggcgucgugguggagaagaagaagcgcgggggcaaggaggagaucacgccccacugcgcccugauggacugcaucauguucgacgccgcggucuccgggggccugaacaccagcgugcuccgggccgugcugccgcgggacauggucuuccgcaccuccacgccccggguggugcugugaggacuaguaauaaggaaacuguaugaaugucugugggcaggaagugaagagauccuucuguaaagguuuuuggaauuaugucugcugaauaauaaacuuuuuugaaauaauaaaucugguagaaaaaugagaucuaaaaaaaaaaaaaaaaaaaaaaaaaaaaaaaaaaaaaaaaaaaaaaaaaaaaaaaaaaaaaaaaaaaaaaaaaaaaaaaaaaaaaaaaaaaaaaaaaaaa

SEQ ID NO: 17585 - RNA, 2022 nt, Artificial Sequence
  mRNA product Design b-4 (A100) comprising derived and/or modified sequence from LASV(G1442-SLE-2011;Clade IV)__AIT17181__NP (opt1)
aggagagucccgcagucggcguccagcggcucugcuuguucgugugugugucguugcaggccuuauucaagcuuaccaugagcgccuccaaggaggugaaguccuuccuguggacccagagccuccgccgggagcugagcggcuacugcuccaacaucaagcugcaggucgugaaggacgcccaggcgcuccugcacgggcuggacuucagcgagguguccaacguccagcgccucaugcggaagcagcgccgggacgacaacgaccugaagcgccugcgggaccucaaccaggccgugaacaaccugguggagcucaagagcacccagcagaaguccguccugcgcgugggcacccugaccagcgacgaccugcucgugcuggccgccgaccuggagaagcucaaguccaaggucauccggaccgagcgcccccugagcgccgggguguacaugggcaaccuguccagccagcagcucgaccagcggcgcgcgcugcugaacaugaucgggauguccggcggcauccaggggacccggacgggccgcgacggggugguccgggugugggacgugaagaacgccgaccuccugaacaaccaguucggcaccaugccgagccugacccucgccugccugaccaagcaggggcaggucgaccugaacgacguggugcaggcccucacggaccugggccugaucuacaccgcgaaguaccccaacgccuccgaccucgaccgccugacccagagccaccccauccugaacaugaucgacaccaagaaguccagccucaacaucagcggcuacaacuucucccugggggccgccgucaaggccggcgcgugcaugcuggacgggggcaacaugcucgagacgaucaaggugagcccccagaccauggacggcauccugaaguccauccugaaggugaagaagacccucgggauguucaucagcgacaccccgggcgagcggaaccccuacgagaacauccuguacaagaucugccuguccggggacggcuggcccuacaucgccagccgcacguccaucaccgggcgggccugggagaacaccgucguggaccucgagagcgacggcaagccccagaaggccggcuccaacaacagcaacaagucccugcagagcgccggguucgcggccggccugaccuacucccagcucaugacgcugaaggacgccaugcugcagcuggacccgaacgccaagaccuggauggacaucgaggggcgccccgaggaccccguggagaucgcccucuaccagcccagcuccggcugcuacauccacuucuuccgggagccgaccgaccugaagcaguucaagcaggacgcgaaguacagccacgggaucgacgucaccgaccuguucgccgcccagcccggccucacguccgccgugaucgaggcccugccccgcaacauggucaucacgugccagggcagcgacgacaucaagaagcugcucgagucccaggggcgcaaggacaucaagcugaucgacaucgcgcugagcaagaccgacagccggaaguacgagaacgccgugugggaccaguacaaggaccucugccacaugcacaccggcguggucguggagaagaagaagcgcgggggcaaggaggagaucaccccgcacugcgcccugauggacugcaucauguucgacgccgcgguguccgggggccugaacacccucguccugcgggccgugcugccccgcgacaugguguuccggaccagcacgccccgcgucgugcucugaggacuaguaauaaggaaacuguaugaaugucugugggcaggaagugaagagauccuucuguaaagguuuuuggaauuaugucugcugaauaauaaacuuuuuugaaauaauaaaucugguagaaaaaugagaucuaaaaaaaaaaaaaaaaaaaaaaaaaaaaaaaaaaaaaaaaaaaaaaaaaaaaaaaaaaaaaaaaaaaaaaaaaaaaaaaaaaaaaaaaaaaaaaaaaaaa

SEQ ID NO: 17586 - RNA, 2022 nt, Artificial Sequence
  mRNA product Design b-4 (A100) comprising derived and/or modified sequence from LASV(G3010-SLE-2013;Clade IV)__AIT17345__NP (opt1)
aggagagucccgcagucggcguccagcggcucugcuuguucgugugugugucguugcaggccuuauucaagcuuaccaugagcgccuccaaggagaucaagagcuuccuguggacccagucccuccgccgggagcugagcggcuacugcuccaacaucaagcuccagguggucaaggacgcccaggcgcugcugcacgggcuggacuucagcgagguguccaacgugcagcgccucaugcggaaggagcgccgggacgacaacgaccugaagcgccugcgggaccucaaccaggccgucaacaaccugguggagcucaagagcacccagcagaaguccauccugcgcgugggcacccugaccagcgacgaccugcucauccuggccgccgaccuggagaagcucaaguccaaggucacccggaccgagcgcccccugagcgccgggguguacaugggcaaccuguccagccagcagcucgaccagcggcgcgcgcugcuguccaugaucgggaugagcuccggcgugcagggcgcccgggccgggcgcgacggcgucgugcgggugugggacgucaagaacgccgagcuccugaacaaccaguucgggacgaugccgagccugacccucgcgugccugaccaagcagggccagguggaccugaacgacgugguccaggcccucaccgaccuggggcugaucuacacggccaaguaccccaacaccuccgaccucgaccgccugacccagagccaccccauccugaacaugaucgacaccaagaaguccagccucaacaucagcggcuacaacuucucccugggcgccgccgugaaggcgggggccugcaugcuggacggcgggaacaugcucgagacgaucaaggugagcccccagaccauggacggcauccugaaguccauccugaaggucaagaaggcccucggcauguucaucagcgagaccccgggggagcggaaccccuacgagaacauccuguacaagaucugccuguccggcgacggguggcccuacaucgccagccgcaccuccaucacgggccgggccugggagaacaccgugguggaccucgagagcgacgggaagccccagaaggcgggcuccaacaacagcaacaagucccugcagagcgccggcuucaccgccgggcugaccuacucccagcucaugacgcugaaggacgccaugcugcagcuggacccgaacgccaagaccuggauggacaucgagggccgccccgaggaccccgucgagguggcgcucuaccagcccagcuccgggugcuacauccacuucuuccgggagccgaccgaccugaagcaguucaagcaggacgccaaguacagccacggcaucgacgugaccgaccuguucgccgcccagcccgggcucacguccgccgucaucgacgcgcugccccgcaacauggugaucacgugccagggcagcgacgacaucaagaagcugcucgagagccagggccgcaaggacaucaagcugaucgacaucgcccuguccaagaccgacagccggaaguacgagaacgccgucugggaccaguacaaggaccucugccacaugcacaccggggugguggucgagaagaagaagcgcggcgggaaggaggagaucaccccgcacugcgcccugauggacugcaucauguucgacgcggccguguccggcgggcugaacaccagcgugcuccgggccguccugccccgcgacaugguguuccggaccuccacgccccgcgugguccugugaggacuaguaauaaggaaacuguaugaaugucugugggcaggaagugaagagauccuucuguaaagguuuuuggaauuaugucugcugaauaauaaacuuuuuugaaauaauaaaucugguagaaaaaugagaucuaaaaaaaaaaaaaaaaaaaaaaaaaaaaaaaaaaaaaaaaaaaaaaaaaaaaaaaaaaaaaaaaaaaaaaaaaaaaaaaaaaaaaaaaaaaaaaaaaaaa

SEQ ID NO: 17587 - RNA, 2022 nt, Artificial Sequence
  mRNA product Design b-4 (A100) comprising derived and/or modified sequence from LASV(G502-SLE-2009;Clade IV)__AIT17127__NP (opt1)
aggagagucccgcagucggcguccagcggcucugcuuguucgugugugugucguugcaggccuuauucaagcuuaccaugagcgccuccaaggagaucaagagcuuccuguggacccagucccuccgccgggagcugagcggcuacugcuccaacaucaagcuccagguggucaaggacgcccaggcgcugcugcacgggcuggacuucagcgagguguccaacgugcagcgccucaugcggaaggagcgccgggacgacaacgaccugaagcgccugcgggaccucaaccaggccgucaacaaccugguggagcucaagagcacccagcagaaguccauccugcgcgugggcacccugaccagcgacgaccugcucauccuggccgccgaccuggagaagcucaaguccaaggucauccggaccgagcgcccccugagcgccgggguguacaugggcaaccuguccagccagcagcucgaccagcggcgcgcgcugcuguccaugaucgggaugagcggcggcaaccagggggugcgggccggcaaggacggggucgugcgcgugugggacgucaagaacgccgagcuccugaacaaccaguucggcaccaugccgucccugacgcucgccugccugaccaagcagggccagguggaccugaacgacgcggugcaggcccucaccgaccuggggcugaucuacaccgccaaguaccccaacacgagcgaccucgaccggcugacccagucccaccccauccugaacaugaucgacaccaagaaguccagccucaacaucuccggcuacaacuucagccugggggccgccgucaaggcgggcgccugcaugcuggacgggggcaacaugcucgagaccaucaaggugagcccccagacgauggacggcauccucaagagcauccugaaggugaagaaggcccuggggauguucaucuccgacaccccgggcgagcgcaaccccuacgagaacauccuguacaagaucugccugagcggggacggcuggcccuacaucgccucccggaccagcaucaccgggcgcgccugggagaacacggucguggaccucgaguccgacggcaagccccagaaggcgggcagcaacaacuccaacaagagccugcaguccgccggguucaccgccggccugaccuacagccagcucaugacccugaaggacgccaugcugcagcuggacccgaacacgaagaccuggauggacaucgaggggcggcccgaggaccccguggagaucgcccucuaccagcccuccagcggcugcuacauccacuucuuccgcgagccgaccgaccugaagcaguucaagcaggacgcgaaguacucccacgggaucgacgucaccgaccuguucgccgcccagcccggccucacgagcgccgugaucgacgcccugccccggaacauggugaucacgugccagggcuccgacgacauccgcaagcugcucgagagccaggggcgcaaggacaucaagcugaucgacaucgcgcugaacaagaccgacagccggaaguacgagaacgccgucugggaccaguacaaggaccucugccacaugcacaccggcguggucguggagaagaagaagcgcgggggcaaggaggagaucaccccgcacugcgcccugauggacugcaucauguucgacgccgcgguguccgggggccugaacaccagcguccuccgggccgugcugccccgcgacaugguguuccggaccuccacgccccgcgucgugcugugaggacuaguaauaaggaaacuguaugaaugucugugggcaggaagugaagagauccuucuguaaagguuuuuggaauuaugucugcugaauaauaaacuuuuuugaaauaauaaaucugguagaaaaaugagaucuaaaaaaaaaaaaaaaaaaaaaaaaaaaaaaaaaaaaaaaaaaaaaaaaaaaaaaaaaaaaaaaaaaaaaaaaaaaaaaaaaaaaaaaaaaaaaaaaaaaa

SEQ ID NO: 17588 - RNA, 2022 nt, Artificial Sequence
  mRNA product Design b-4 (A100) comprising derived and/or modified sequence from LASV(G733-SLE-2010;Clade IV)__AIT17155__NP (opt1)
aggagagucccgcagucggcguccagcggcucugcuuguucgugugugugucguugcaggccuuauucaagcuuaccaugagcgccuccaaggagaucaagagcuuccuguggacccagucccuccgccgggagcugagcggcuacugcuccaacaucaagcuccagguggucaaggacgcccaggcgcugcugcacgggcuggacuucagcgagguguccaacgugcagcgccucaugcggaaggagcgccgggacgacaacgaccugaagcgccugcgggaccucaaccaggccgucaacaaccugguggagcucaagagcacccagcagaaguccgugcugcgcgucggcacccugaccagcgacgagcugcucgugcuggccgccgaccuggagaagcucaaguccaaggugauccggaccgagcgcccccugagcgccggggucuacaugggcaaccuguccagccagcagcucgaccagcggcgcgcgcugcuguccaugaucgggaugagcggcggcaaccagggggcccggaccggccgcgacgggguggugcgggucugggacgugaagaacgccgagcuccugaacaaccaguucggcaccaugccgucccugacccucgccugccugaccaagcagggccagguggaccugaacgacgcgguccaggcccucaccgaccuggggcugaucuacacggccaaguaccccaacaccagcgaccucgaccgccugacccagucccaccccauccugaacaugaucgacaccaagaaguccagccucaacaucuccggcuacaacuucagccugggggccgccgugaaggcgggcgccugcaugcuggacgggggcaacaugcucgagacgaucaaggugagcccccagaccauggacggcauccucaagagcauccugaaggucaagaaggcccuggggauguucaucuccgacaccccgggcgagcggaaccccuacgagaacauccuguacaagaucugccugagcggggacggcuggcccuacaucgccucccgcaccagcaucacggggcgggccugggagaacaccgugguggaccucgaguccgacggcaagccccagaaggcgggcagcaacaacuccaacaagagccugcaguccgccggguucaccgccggccugaccuacagccagcucaugacgcugaaggacgccaugcugcagcuggacccgaacgccaagaccuggauggacaucgaggggcgccccgaggaccccgucgagaucgcgcucuaccagcccuccagcggcugcuacauccacuucuuccgggagccgaccgaccugaagcaguucaagcaggacgccaaguacucccacgggaucgacgugaccgaccuguucgccgcccagcccggccucacgagcgccgugaucgacgcgcugccccgcaacauggucaucacgugccagggcuccgacgacauccgcaagcugcucgagagccaggggcggaaggacaucaagcugaucgacaucgcccugagcaagaucgacucccgcaaguacgagaacgccgugugggaccaguacaaggaccucugccacaugcacaccggcgucgugguggagaagaagaagcgcgggggcaaggaggagaucacgccccacugcgcccugauggacugcaucauguucgacgcggccgucagcgggggccugaacucccucgugcugcgggccgugcugccgcgggacauggucuuccgcaccagcacgccccggguggugcucugaggacuaguaauaaggaaacuguaugaaugucugugggcaggaagugaagagauccuucuguaaagguuuuuggaauuaugucugcugaauaauaaacuuuuuugaaauaauaaaucugguagaaaaaugagaucuaaaaaaaaaaaaaaaaaaaaaaaaaaaaaaaaaaaaaaaaaaaaaaaaaaaaaaaaaaaaaaaaaaaaaaaaaaaaaaaaaaaaaaaaaaaaaaaaaaaa

SEQ ID NO: 17589 - RNA, 2022 nt, Artificial Sequence
  mRNA product Design b-4 (A100) comprising derived and/or modified sequence from MOPV/LASV reassortant(IGS-1;Clade IV)__AFY05578__NP (opt1)
aggagagucccgcagucggcguccagcggcucugcuuguucgugugugugucguugcaggccuuauucaagcuuaccaugagcgccuccaaggagaucaagagcuuccuguggacccagucccuccgccgggagcugagcggcuacugcuccaacaucaagcuccagguggucaaggacgcccaggcgcugcugcacgggcuggacuucagcgagguguccaacgugcagcgccucaugcggaaggagcgccgggacgacaacgaccugaagcgccugcgggaccucaaccaggccgucaacaaccugguggagcucaagagcacccagcagaaguccauccugcgcgugggcacccugaccagcgacgaccugcucauccuggccgccgaccuggagaagcuccgguccaaggucauccgcaccgagcggccccugagcgccgggguguacaugggcaaccuguccagccagcagcucgaccagcgccgggcgcugcugaacaugaucgggauguccggcggcaaccagggggcccgcgccggccgggacggggugguccgcgugugggacgugaagaacgccgagcuccugagcaaccaguucggcaccaugccgucccugacgcucgcgugccugaccaagcaggggcaggucgaccugaacgacgccgugcaggcccucaccgaccugggccugaucuacaccgccaaguaccccaacacgagcgaccucgaccggcugacccagucccaccccauccugaacaugaucgacaccaagaaguccagccucaacaucuccggcuacaacuucagccugggggccgcggugaaggccggcgccugcaugcuggacgggggcaacaugcucgagaccaucaaggucagcccccagacgauggacggcauccucaagagcauccugaaggugaagaaggcccuggggauguucaucuccgacaccccgggcgagcgcaaccccuacgagaacauccuguacaagaucugccugagcggggacggcuggcccuacaucgccucccggaccagcaucaccgggcgcgcgugggagaacacgguggucgaccucgaguccgacggcaagccccagaaggccgacagcaacaacuccagcaagucccugcagagcgccggcuucaccgccgggcugaccuacucccagcucaugacccugaaggacgccaugcugcagcuggacccgaacgcgaagacguggauggacaucgagggccggcccgaggaccccguggagaucgcccucuaccagcccagcuccgggugcuacauccacuucuuccgcgagccgaccgaccugaagcaguucaagcaggacgccaaguacagccacggcaucgacgugaccgaccuguucgccacccagcccgggcucacguccgccgucaucgacgcgcugccccgcaacauggugaucacgugccagggcagcgacgacauccggaagcugcucgagagccagggccgcaaggacaucaagcugaucgacaucgaccuguccaagaccgacagccggaaguacgagaacgccgugugggaccaguacaaggaccucugccacaugcacaccggggucguggucgagaagaagaagcgcggcgggaaggaggagaucaccccgcacugcgcccugauggacugcaucauguucgacgccgcgguguccggcgggcugaacaccagcgugcuccgggccguccugccccgcgacaugguguuccggaccuccacgccccgcgugguccugugaggacuaguaauaaggaaacuguaugaaugucugugggcaggaagugaagagauccuucuguaaagguuuuuggaauuaugucugcugaauaauaaacuuuuuugaaauaauaaaucugguagaaaaaugagaucuaaaaaaaaaaaaaaaaaaaaaaaaaaaaaaaaaaaaaaaaaaaaaaaaaaaaaaaaaaaaaaaaaaaaaaaaaaaaaaaaaaaaaaaaaaaaaaaaaaaa

SEQ ID NO: 17590 - RNA, 2022 nt, Artificial Sequence
  mRNA product Design b-4 (A100) comprising derived and/or modified sequence from LASV(LM765-SLE-2012;Clade IV)__AIT17815__NP (opt1)
aggagagucccgcagucggcguccagcggcucugcuuguucgugugugugucguugcaggccuuauucaagcuuaccaugagcgccuccaaggagaucaagagcuuccuguggacccagucccuccgccgggagcugagcggcuacugcuccaacaucaagcuccagguggucaaggacgcccaggcgcugcugcacgggcuggacuucagcgagguguccaacgugcagcgccucaugcggaaggagcgccgggacgacaacgaccugaagcgccugcgggaccucaaccaggccgucaacaaccugguggagcucaagagcacccagcagaaguccauccugcgcgugggcacccugaccagcgacgaccugcucauccuggccgccgaccuggagaagcucaaguccaaggucacccggaccgagcgcccccugagcgccgggguguacaugggcaaccuguccagccagcagcucgaccagcggcgcgcgcugcuggacaugaucgggauguccggcagcaaccagggcgcccgggccgggcgcgacggcgugguccgggugugggacgugaagaacgccgagcuccugaacaaccaguucgggacgaugccgucccugacccucgcgugccugaccaagcagggccaggucgaccugaacgacgccgugcaggcccucaccgaccuggggcugaucuacacggccaaguaccccaacaccagcgaccucgaccgccugacccagucccaccccauccugaacaugaucgacaccaagaaguccagccucaacaucuccggcuacaacuucagccugggcgccgcggugaaggccggggccugcaugcuggacggcgggaacaugcucgagacgaucaaggucagcccccagaccauggacggcauccucaagagcauccugaaggugaagaaggcccugggcauguucaucuccgacgccccgggggagcggaaccccuacgagaacauccuguacaagaucugccugagcggcgacggguggcccuacaucgcgucccgcaccagcaucaccggccgggccugggagaacacgguggucgaccucgaguccgacgggaagccccagaaggccggcagcaacggcuccaacaagagccugcaguccgccggguucaccgccggccugaccuacagccagcucaugacccugaaggacgcgaugcugcagcuggacccgaacgccaagacguggauggacaucgaggggcgccccgaggaccccguggagaucgcccucuaccagcccuccagcggcugcuacauccacuucuuccgggagccgaccgaccugaagcaguucaagcaggacgccaaguacucccacgggaucgacgugaccgaccuguucgccgcgcagcccggccucaccagcgccgucaucgacgcccugccccgcaacauggugaucacgugccagggcuccgacgacauccgcaagcuguucgagagccaggggcggaaggacaucaagcucaucgacaucgcccugagcaagaccgacucccgcaaguacgagaacgcggugugggaccaguacaaggaccugugccacaugcacaccggcaucgucguggagaagaagaagcgcgggggcaaggaggagaucacgccccacugcgcccucauggacugcaucauguucgacgccgccgucagcgggggccugaacaccuccgugcugcgggccgugcucccgcgggacauggucuuccgcaccagcacgccccggguggugcugugaggacuaguaauaaggaaacuguaugaaugucugugggcaggaagugaagagauccuucuguaaagguuuuuggaauuaugucugcugaauaauaaacuuuuuugaaauaauaaaucugguagaaaaaugagaucuaaaaaaaaaaaaaaaaaaaaaaaaaaaaaaaaaaaaaaaaaaaaaaaaaaaaaaaaaaaaaaaaaaaaaaaaaaaaaaaaaaaaaaaaaaaaaaaaaaaa

SEQ ID NO: 17591 - RNA, 2022 nt, Artificial Sequence
  mRNA product Design b-4 (A100) comprising derived and/or modified sequence from LASV(LM776-SLE-2012;Clade IV)__AIT17825__NP (opt1)
aggagagucccgcagucggcguccagcggcucugcuuguucgugugugugucguugcaggccuuauucaagcuuaccaugagcgccuccaaggagaucaagagcuuccuguggacccagucccuccgccgggagcugagcuccuacugcagcaacaucaagcuccagguggucaaggacgcccaggcgcugcugcacggccuggacuucuccgaggugagcaacgugcagcgccucaugcggaaggagcgccgggacgacaacgaccugaagcgccugcgggaccucaaccaggccgucaacaaccugguggagcugaaguccacccagcagaaguccauccuccgcguggggacccugaccuccgacgaccugcucauccuggccgccgaccuggagaagcucaagagcaaggucacccggaccgagcgcccccuguccgccggcguguacauggggaaccugagcucccagcagcucgaccagcggcgcgcgcugcugagcaugaucggcauguccgggagcaaccagggcgcccgggccggccgcgacggggugguccgggugugggacgugaagaacgccgagcuccugaacaaccaguucggcacgaugccgucccugacccucgcgugccugaccaagcaggggcaggucgaccugaacgacgccgugcaggcccucaccgaccugggccugaucuacacggccaaguaccccaacaccagcgaccucgaccgccugacccagagccaccccauccugaacaugaucgacaccaagaaguccagccucaacaucuccggguacaacuucagccugggcgccgcggugaaggccggcgccugcaugcuggacgggggcaacaugcucgagacgaucaaggucagcccccagaccauggacgggauccucaagagcauccugaaggugaagaaggcccugggcauguucaucuccgacaccccgggcgagcggaaccccuacgagaacauccuguacaagaucugccugagcggggacggcuggcccuacaucgccucccgcaccagcaucacggggcgggcgugggagaacaccguggucgaccucgaguccgacggcaagccccagaaggccgggagcaacaacuccaacaagagccugcaguccgccggcuucaccgccggccugaccuacagccagcucaugacgcugaaggacgccaugcugcagcuggacccgaacgcgaagaccuggauggacaucgaggggcgccccgaggaccccguggagguggcccucuaccagcccuccagcggcugcuacauccacuucuuccgggagccgaccgaccugaagcaguucaagcaggacgccaaguacucccacgggaucgacgucaccgaccuguucgccgcccagcccggccucacgagcgcggugaucgacgcccugccccgcaacauggugaucacgugccaggggagcgacgacauccgcaagcugcucgagucccagggccggaaggacaucaagcugaucgacaucgcccugagcaagaccgacucccgcaaguacgagaacgccgucugggaccaguacaaggaccucugccacaugcacaccggcguggucguggagaagaagaagcgcgggggcaaggaggagaucaccccgcacugcgcgcugauggacugcaucauguucgacgccgccgugagcgggggccugaacaccuccguccuccgggccgugcugccccgggacaugguguuccgcaccagcacgccccgggucgugcugugaggacuaguaauaaggaaacuguaugaaugucugugggcaggaagugaagagauccuucuguaaagguuuuuggaauuaugucugcugaauaauaaacuuuuuugaaauaauaaaucugguagaaaaaugagaucuaaaaaaaaaaaaaaaaaaaaaaaaaaaaaaaaaaaaaaaaaaaaaaaaaaaaaaaaaaaaaaaaaaaaaaaaaaaaaaaaaaaaaaaaaaaaaaaaaaaa

SEQ ID NO: 17592 - RNA, 2022 nt, Artificial Sequence
  mRNA product Design b-4 (A100) comprising derived and/or modified sequence from LASV(Mad39;Clade IV)__ANH09723__NP (opt1)
aggagagucccgcagucggcguccagcggcucugcuuguucgugugugugucguugcaggccuuauucaagcuuaccaugagcgccuccaaggagaucaagagcuuccuguggacccagucccuccgccgggagcugagcggcuacugcuccaacaucaagcuccagguggucaaggacgcccaggcgcugcugcacgggcuggacuucagcgagguguccaacgugcagcgccucaugcggaagcagcgccgggacgacaacgaccugaagcgccugcgggaccucaaccaggccgucaacaaccugguggagcugaaguccacccagcagaaguccgugcuccgcgucggcacgcugaccagcgacgaccugcucacccuggccgccgaccuggagaagcucaaguccaaggugacccggacggagcgcccccugaccgccgggguguacaugggcaaccugagcucccagcagcucgaccagcggcgcgcgcugcugaacaugaucgggaugagcggcggcaaccagggggcccggaccggccgcgacggggucgugcgggugugggacgucaagaacgccgagcuccugaacaaccaguucggcaccaugccgucccugacgcucgccugccugaccaagcagggccagguggaccugaacgacgugguccaggcgcucaccgaccuggggcugaucuacaccgccaaguaccccaacacgagcgaccucgaccgccugacccagucccaccccauccugaacaugaucgacaccaacaagagcucccucaacaucagcggcuacaacuucagccugggggccgccgugaaggccggcgcgugcaugcuggacgggggcaacaugcucgagaccaucaaggugagcccccagacgauggacggcauccucaagagcauccugaaggucaagaagucccuggggauguucaucagcgacaccccgggcgagcggaaccccuacgagaacauccuguacaagaucugccuguccggggacggcuggcccuacaucgccagccgcaccuccaucaccgggcgggccugggagaacacggugguggaccucgagagcggcggcaagccccagaaggccggguccaacaacagcaacaagucccugcagagcgccggcuucgcggccgggcugaccuacucccagcucaugacccugaaggacgccaugcugcagcuggacccgaacgccaagaccuggauggacaucgagggccgccccgaggaccccgucgagaucgcccucuaccagcccaucagcgggugcuacauccacuucuuccgggagccgacggaccugaagcaguucaagcaggacgcgaaguacucccacggcaucgacgugaccgaccuguucgccgcccagcccggccucaccagcgccgugaucgaggcccugccccgcaacauggucaucacgugccagggguccgacgacauccgcaagcuguucgagagccagggccggaaggacaucaagcucaucgacaucgcgcuguccaagaccgacagccgcaaguacgagaacgccgugugggaccaguacaaggaccugugccacaugcacaccggggucgugguggagaagaagaagaagggcgggaaggaggagaucacgccccacugcgcccucauggacugcaucauguucgacgccgcggucagcggcggccugaacacccuggugcuccgggccgugcugccgcgcgacauggucuuccggaccuccacccccaagguggugcugugaggacuaguaauaaggaaacuguaugaaugucugugggcaggaagugaagagauccuucuguaaagguuuuuggaauuaugucugcugaauaauaaacuuuuuugaaauaauaaaucugguagaaaaaugagaucuaaaaaaaaaaaaaaaaaaaaaaaaaaaaaaaaaaaaaaaaaaaaaaaaaaaaaaaaaaaaaaaaaaaaaaaaaaaaaaaaaaaaaaaaaaaaaaaaaaaa

SEQ ID NO: 17593 - RNA, 2022 nt, Artificial Sequence
  mRNA product Design b-4 (A100) comprising derived and/or modified sequence from LASV(Z0947-SLE-2011;Clade IV)__AIT17841__NP (opt1)
aggagagucccgcagucggcguccagcggcucugcuuguucgugugugugucguugcaggccuuauucaagcuuaccaugagcgccuccaaggagaucaagagcuuccuguggacccagucccuccgccgggagcugagcggcuacugcuccaacaucaagcuccagguggucaaggacgcccaggcgcugcugcacgggcuggacuucagcgagguguccaacgugcagcgccucaugcggaaggagcgccgggacgacaacgaccugaagcgccugcgggaccucaaccaggccgucaacaaccugguggagcucaagagcacccagcagaaguccauccugcgcgugggcacccugaccagcgacgaccugcucauccuggccgccgaccuggagaagcucaaguccaaggucacccggaccgagcgcccccugagcgccgggguguacaugggcaaccuguccagccagcagcucgaccagcggcgcgcgcugcugaacaugaucgggauguccggcagcaaccagggcgcccggacggggcgcgacggcgugguccgggugugggacgugaagaacgccgagcuccugaacaaccaguucgggaccaugccgucccugacccucgccugccugaccaagcagggccaggucgaccugaacgacgcggugcaggcccucacggaccuggggcugaucuacaccgccaaguaccccaacaccagcgaccucgaccgccugacccagucccaccccauccugaacaugaucgacacgaagaaguccagccucaacaucuccggcuacaacuucagccugggcgccgccgugaaggcgggggccugcaugcuggacggcgggaacaugcucgagaccaucaaggucagcccccagaccauggacggcauccucaagagcauccugaaggugaagaaggcccugggcauguucaucuccgacgccccgggggagcggaaccccuacgagaacauccuguacaagaucugccugagcggcgacggguggcccuacaucgccucccgcaccagcaucacgggccgggcgugggagaacaccguggucgaccucgaguccgacgggaagccccagaaggccggcagcaacggcuccaacaagagccugcaguccgccggguucaccgccggccugaccuacagccagcucaugacgcugaaggacgccaugcugcagcuggacccgaacgcgaagaccuggauggacaucgaggggcgccccgaggaccccguggagaucgcccucuaccagcccuccagcggcugcuacauccacuucuuccgggagccgaccgaccugaagcaguucaagcaggacgccaaguacucccacgggaucgacgugaccgaccuguucgccgcccagcccggccucacgagcgcggucaucgacgcccugccccgcaacauggugaucacgugccagggcuccgacgacauccgcaagcuguucgagagccaggggcggaaggacaucaagcucaucgacaucgcccugagcaagaccgacucccgcaaguacgagaacgccgugugggaccaguacaaggaccugugccacaugcacaccggcaucgucguggagaagaagaagcgcgggggcaaggaggagaucaccccgcacugcgcgcucauggacugcaucauguucgacgccgccgucagcgggggccugaacaccuccgugcugcgggccgugcucccccgggacauggucuuccgcaccagcacgccccggguggugcugugaggacuaguaauaaggaaacuguaugaaugucugugggcaggaagugaagagauccuucuguaaagguuuuuggaauuaugucugcugaauaauaaacuuuuuugaaauaauaaaucugguagaaaaaugagaucuaaaaaaaaaaaaaaaaaaaaaaaaaaaaaaaaaaaaaaaaaaaaaaaaaaaaaaaaaaaaaaaaaaaaaaaaaaaaaaaaaaaaaaaaaaaaaaaaaaaa

SEQ ID NO: 17594 - RNA, 2022 nt, Artificial Sequence
  mRNA product Design b-4 (A100) comprising derived and/or modified sequence from LASV(Josiah;Clade IV)__NP_694869__NP (opt4)
aggagagucccgcagucggcguccagcggcucugcuuguucgugugugugucguugcaggccuuauucaagcuuaccaugagcgccagcaaggagaucaagagcuuccuguggacccagagccugagaagagagcugagcggcuacugcagcaacaucaagcugcagguggugaaggacgcccaggcccugcugcacggccuggacuucagcgaggugagcaacgugcagagacugaugagaaaggagagaagagacgacaacgaccugaagagacugagagaccugaaccaggccgugaacaaccugguggagcugaagagcacccagcagaagagcauccugagagugggcacccugaccagcgacgaccugcugauccuggccgccgaccuggagaagcugaagagcaaggugaucagaaccgagagaccccugagcgccggcguguacaugggcaaccugagcagccagcagcuggaccagagaagagcccugcugaacaugaucggcaugagcggcggcaaccagggcgccagagccggcagagacggcguggugagagugugggacgugaagaacgccgagcugcugaacaaccaguucggcaccaugcccagccugacccuggccugccugaccaagcagggccagguggaccugaacgacgccgugcaggcccugaccgaccugggccugaucuacaccgccaaguaccccaacaccagcgaccuggacagacugacccagagccaccccauccugaacaugaucgacaccaagaagagcagccugaacaucagcggcuacaacuucagccugggcgccgccgugaaggccggcgccugcaugcuggacggcggcaacaugcuggagaccaucaaggugagcccccagaccauggacggcauccugaagagcauccugaaggugaagaaggcccugggcauguucaucagcgacacccccggcgagagaaaccccuacgagaacauccuguacaagaucugccugagcggcgacggcuggcccuacaucgccagcagaaccagcaucaccggcagagccugggagaacaccgugguggaccuggagagcgacggcaagccccagaaggccgacagcaacaacagcagcaagagccugcagagcgccggcuucaccgccggccugaccuacagccagcugaugacccugaaggacgccaugcugcagcuggaccccaacgccaagaccuggauggacaucgagggcagacccgaggaccccguggagaucgcccuguaccagcccagcagcggcugcuacauccacuucuucagagagcccaccgaccugaagcaguucaagcaggacgccaaguacagccacggcaucgacgugaccgaccuguucgccacccagcccggccugaccagcgccgugaucgacgcccugcccagaaacauggugaucaccugccagggcagcgacgacaucagaaagcugcuggagagccagggcagaaaggacaucaagcugaucgacaucgcccugagcaagaccgacagcagaaaguacgagaacgccgugugggaccaguacaaggaccugugccacaugcacaccggcguggugguggagaagaagaagagaggcggcaaggaggagaucaccccccacugcgcccugauggacugcaucauguucgacgccgccgugagcggcggccugaacaccagcgugcugagagccgugcugcccagagacaugguguucagaaccagcacccccagaguggugcugugaggacuaguaauaaggaaacuguaugaaugucugugggcaggaagugaagagauccuucuguaaagguuuuuggaauuaugucugcugaauaauaaacuuuuuugaaauaauaaaucugguagaaaaaugagaucuaaaaaaaaaaaaaaaaaaaaaaaaaaaaaaaaaaaaaaaaaaaaaaaaaaaaaaaaaaaaaaaaaaaaaaaaaaaaaaaaaaaaaaaaaaaaaaaaaaaa

SEQ ID NO: 17595 - RNA, 2022 nt, Artificial Sequence
  mRNA product Design b-4 (A100) comprising derived and/or modified sequence from LASV(LP;Clade I)__AAF86702__NP (opt4)
aggagagucccgcagucggcguccagcggcucugcuuguucgugugugugucguugcaggccuuauucaagcuuaccaugagcaacagcaaggagaucaagagcuuccuguggacccagagccugagaagagagcugagcggcuacugcagcaacaucaagcugcagguggugaaggacgcccaggcccugcugcacggccuggacuucagcgaggugagcaacgugcagagacugaugagaaagcagaagagagacgacgccgaccugaagagacugagagaccugaaccaggccgugaacaaccugguggagcugaagagcacccagcagaagaacgugcugagagugggcacccugagcagcgacgaccugaucacccuggccgccgaccuggagaagcugaagagcaaggugaucagaaccgagagaccccugagcagcggcguguacaugggcaaccugagcagccagcagcuggaccagagaagagcccugcugagcaugaucggcaugagcggcggcccccagggcaacagaaccggcggcgacggcguggugagagugugggacgugaagaacgccgagcugcugaacaaccaguucggcaccaugcccagccugacccuggccugccugaccaagcagggccagguggaccugaacgacgccgugcaggcccugaccgaccugggccugaucuacaccgccaaguaccccaacagcagcgaccuggacaugcugacccagagccaccccauccugggcaugguggacaccaagaagagcagccugaacaucagcggcuacaacuucagccugggcgccgccgugaaggccggcgccugcaugcuggacggcggcaacaugcuggagaccaucaaggugagcccccagaccauggacggcauccugaagagcauccugaaggugaagagaagccugggcauguucaucagcgacacccccggcgagagaaaccccuacgagaacauccuguacaagaucugccugagcggcgagggcuggcccuacaucgccagcagaaccagcaucaccggcagagccugggagaacacccugguggaccuggagagcgacaacaagccccccaagcugaacagcgccggcagcaacaagagccugcaggccgccggccugaacgccggccugaccuacagccagcugaugacccugaaggacugcaugcugcagcuggaccccagcagcaagaccuggaucgacaucgagggcagacccgaggaccccguggagaucgcccuguuccagcccagcagcggcugcuacauccacuucuucagagagcccaccgaccugaagcaguucaagcaggacgccaaguacagccacggcaucgacgugaccgaccuguucagcacccagcccggccugaccagcgccgugaucgaggcccugcccagaaacauggugcugaccugccagggcagcgacgacaucaagaagcugcuggagagccagggcagaagagacaucaagcugaucgacaucagccugagcaaggccgacagcagaaaguucgagaacgccgugugggaccaguacaaggaccugugccacaugcacaccggcguggugguggagaagaagaagagaggcggcaaggaggagaucaccccccacugcgcccugcuggacugcaucauguucgacgccgccaccaccggcagccugaacaucaccacccugagagccgugcugcccagagacaugguguucagaaccagcacccccaagguggugcugugaggacuaguaauaaggaaacuguaugaaugucugugggcaggaagugaagagauccuucuguaaagguuuuuggaauuaugucugcugaauaauaaacuuuuuugaaauaauaaaucugguagaaaaaugagaucuaaaaaaaaaaaaaaaaaaaaaaaaaaaaaaaaaaaaaaaaaaaaaaaaaaaaaaaaaaaaaaaaaaaaaaaaaaaaaaaaaaaaaaaaaaaaaaaaaaaa

SEQ ID NO: 17596 - RNA, 2022 nt, Artificial Sequence
  mRNA product Design b-4 (A100) comprising derived and/or modified sequence from LASV(803213;Clade II)__AAF86704__NP (opt4)
aggagagucccgcagucggcguccagcggcucugcuuguucgugugugugucguugcaggccuuauucaagcuuaccaugagcgccagcaaggaggugaagagcuuccuguggacccagagccugagaagagagcugagcggcuacugcagcaacaucaagcugcagguggugaaggacgcccaggcccugcugcacggccuggacuucagcgaggugaacaacgugcagagacugaugagaaagcagaagagagacgacggcgaccugaagagacugagagaccugaaccaggccgugaacaaccugguggagcugaagagcacccagcagaagagcauccugagagugggcacccugaccagcgacgaccugcugacccuggccgccgaccuggagaagcugaagagcaaggugaucagaaccgagagaccccugagcagcggcguguacaugggcaaccugagcacccagcagcuggagcagagaagagcccugcugaacaugaucggcauggugggcggcgcccagggcacccagcccggcagagacggcguggugagagugugggacgugaagaaccccgaccugcugaacaaccaguucggcaccaugcccagccugacccuggccugccugaccaagcagggccagguggaccugaacgacgccgugcuggcccugaccgaccugggccugaucuacaccgccaaguaccccaacagcagcgaccuggacagacugagccagagccaccccauccugaacaugguggacaccaagaagagcagccugaacaucagcggcuacaacuucagccugggcgccgccgugaaggccggcgccugcaugcuggacggcggcaacaugcuggagaccaucaaggugaccccccagaccauggacggcauccugaagagcauccugaaggugaagagaagccugggcauguucgugagcgacacccccggcgagagaaaccccuacgagaacauccuguacaagaucugccugagcggcgacggcuggcccuacaucgccagcagaaccagcaucgugggcagagccugggagaacaccaccguggaccuggagagcgacggcaagccccagaaggugggcaccgccggcagcaacaagagccugcagagcgccggcuuccccaccggccugaccuacagccagcugaugacccugaaggacagcaugaugcagcuggaccccagcgccaagaccuggaucgacaucgagggcagacccgaggaccccguggagaucgcccuguaccagcccaugagcggcugcuacauccacuucuucagagagcccaccgaccugaagcaguucaagcaggacgccaaguacagccacggcaucgacguggccgaccuguuccccgcccagcccggccugaccagcgccgugaucgaggcccugcccagaaacauggugcugaccugccagggcagcgacgacaucaagaagcugcuggacagccagggcagaagagacaucaagcugaucgacaucagccugagcaagguggacagcagaaaguucgagaacgccgugugggaccagugcaaggaccugugccacaugcacaccggcguggugguggagaagaagaagagaggcggcaaggaggagaucaccccccacugcgcccugauggacugcaucauguucgacgccgccgugagcggcggccugaacauccccgugcugagagccgugcugcccagagacaugguguucagaaccagcagccccaagguggugcugugaggacuaguaauaaggaaacuguaugaaugucugugggcaggaagugaagagauccuucuguaaagguuuuuggaauuaugucugcugaauaauaaacuuuuuugaaauaauaaaucugguagaaaaaugagaucuaaaaaaaaaaaaaaaaaaaaaaaaaaaaaaaaaaaaaaaaaaaaaaaaaaaaaaaaaaaaaaaaaaaaaaaaaaaaaaaaaaaaaaaaaaaaaaaaaaaa

SEQ ID NO: 17597 - RNA, 2025 nt, Artificial Sequence
  mRNA product Design b-4 (A100) comprising derived and/or modified sequence from LASV(GA391;Clade III)__CAA36646__NP (opt4)
aggagagucccgcagucggcguccagcggcucugcuuguucgugugugugucguugcaggccuuauucaagcuuaccaugagcgccagcaaggaggugagaagcuuccuguggacccagagccugagaagagagcugagcggcuacugcagcaacaucaagcugcagguggugaaggacgcccaggcccugcugcacggccuggacuucagcgaggugagcaacgugcagagacugaugagaaagcagaagagagacgacggcgaccugaagagacugagagaccugaaccaggccgugaacaaccugguggagcugaagagcacccagcagaagagcgugcugagagugggcacccugagcagcgacgaccugcugauccuggccgccgaccuggagaagcugaagagcaaggugaccagaaccgagagaccccugagcagcggcguguacaugggcaaccugagcagccagcagcuggaccagagaagagcccugcugaacaugaucggcaugaccggcgugagcggcggcggcaagggcgccagcgacggcaucgugagagugugggacgugaagaacgccgagcugcugaacaaccaguucggcaccaugcccagccugacccuggccugccugaccaagcagggccagguggaccugaacgacgccgugcaggcccugaccgaccugggccugaucuacaccgccaaguaccccaacagcagcgaccuggacagacugagccagagccaccccauccugaacaugaucgacaccaagaagagcagccugaacaucagcggcuacaacuucagccugggcgccgccgugaaggccggcgccugcaugcuggacggcggcaacaugcuggagaccaucaaggugagcccccagaccauggacggcauccugaagagcauccugaaggugaagaagagccugggcauguucgugagcgacacccccggcgagagaaaccccuacgagaacauccuguacaagaucugccugagcggcgacggcuggcccuacaucgccagcagaaccagcaucgugggcagagccugggagaacaccgugguggaccuggagcaggacaacaagccccagaagaucggcaacggcggcagcaacaagagccugcagagcgccggcuucgccgccggccugaccuacagccagcugaugacccugaaggacuucaagugcuucaaccugauccccaacgccaagaccuggauggacaucgagggcagacccgaggaccccguggagaucgcccuguaccagcccagcagcggcugcuacgugcacuucuucagagagcccaccgaccugaagcaguucaagcaggacgccaaguacagccacggcaucgacgugaccgaccuguucgccgcccagcccggccugaccagcgccgugaucgaggcccugcccagaaacauggugaucaccugccagggcagcgaggacaucagaaagcugcuggagagccagggcagaagagacaucaagcugaucgacaucacccugagcaaggccgacagcagaaaguucgagaacgccgugugggaccaguucaaggaccugugccacaugcacaccggcguggugguggagaagaagaagagaggcggcaaggaggagaucaccccccacugcgcccugauggacugcaucauguucgacgccgccgugagcggcggccuggacgccaaggugcugagaguggugcugcccagagacaugguguucagaaccagcacccccaagguggugcugugaggacuaguaauaaggaaacuguaugaaugucugugggcaggaagugaagagauccuucuguaaagguuuuuggaauuaugucugcugaauaauaaacuuuuuugaaauaauaaaucugguagaaaaaugagaucuaaaaaaaaaaaaaaaaaaaaaaaaaaaaaaaaaaaaaaaaaaaaaaaaaaaaaaaaaaaaaaaaaaaaaaaaaaaaaaaaaaaaaaaaaaaaaaaaaaaa

SEQ ID NO: 17598 - RNA, 2022 nt, Artificial Sequence
  mRNA product Design b-4 (A100) comprising derived and/or modified sequence from LASV(AV;Clade V)__CCA30315__NP (opt4)
aggagagucccgcagucggcguccagcggcucugcuuguucgugugugugucguugcaggccuuauucaagcuuaccaugagcgccagcaaggaggugaagagcuuccuguggacccagagccugagaagagagcugagcggcuacugcagcaacaucaagcugcagguggugaaggacgcccaggcccugcugcacggccuggacuucagcgaggugagcaacgugcagagacugaugagaaagcagagaagagacgacagcgaccugaagagacugagagaccugaaccaggccgugaacaaccugguggagcugaagagcacccagcagaagagcgugcugagagugggcacccugagcagcgacgaccugcugacccuggccgccgaccuggagaagcugaagagcaaggugaccagaaccgagagaccccugagcagcggcguguacaugggcaaccugagcagccagcagcuggaccagagaagagcccugcugaaccugaucggcaugaccaacggcagccagggcagccaggccggcagagacggcguggugagagugugggacgugaagaacgccgagcugcugaacaaccaguucggcaccaugcccagccugacccuggccugccugaccaagcagggccagguggaccugaacgacguggugcaggcccugaccgaccugggccugaucuacaccgccaaguaccccaacaccagcgaccuggacagacugacccagagccaccccauccugaacaugaucgacaccaagaagagcagccugaacaucagcggcuacaacuucagccugggcgccgccgugaaggccggcgccugcaugcuggacggcggcaacaugcuggagaccaucaaggugagcccccagagcauggacggcauccugaagagcauccugaaggugaagagagcccugggcauguucgugagcgacacccccggcgagagaaaccccuacgagaacauccuguacaagaucugccugagcggcgacggcuggcccuacaucgccagcagaaccagcaucgugggcagagccugggagaacaccgugguggaccuggagaccgacggcaagccccagaagaucggcagcggcaacagcaacaagagccugcagagcgccggcuucagcgccggccugaccuacagccagcugaugacccugaaggacgccaugcugcagcuggaccccaacgccaagaccuggauggacaucgagggcagacccgaggaccccguggagguggcccuguaccagcccaucagcggcugcuacauccacuucuucagagagcccaccgaccugaagcaguucaagcaggacgccaaguacagccacggcaucgacaucgccgaccuguucgccgcccagcccggccugaccagcgccgugaucgaggcccugcccagaaacauggugaucaccugccagggcagcgaggacaucaagaagcugcuggagagccagggcagaaaggacaucaagcugaucgacaucgcccugagcaagaucgacagcagaaaguucgagaacgccgugugggaccaguacaaggaccugugccacaugcacaccggcguggugguggagaagaagaagagaggcggcaaggaggagaucaccccccacugcgcccugauggacugcaucauguucgacgccgccgugagcggcggccugaacacccuggugcugagagccgugcugcccagagacaugguguucagaaccagcacccccagaguggugcugugaggacuaguaauaaggaaacuguaugaaugucugugggcaggaagugaagagauccuucuguaaagguuuuuggaauuaugucugcugaauaauaaacuuuuuugaaauaauaaaucugguagaaaaaugagaucuaaaaaaaaaaaaaaaaaaaaaaaaaaaaaaaaaaaaaaaaaaaaaaaaaaaaaaaaaaaaaaaaaaaaaaaaaaaaaaaaaaaaaaaaaaaaaaaaaaaa

SEQ ID NO: 17599 - RNA, 2022 nt, Artificial Sequence
  mRNA product Design b-4 (A100) comprising derived and/or modified sequence from LASV(Togo/2016/7082;Clade VI)__AMR44578__NP (opt4)
aggagagucccgcagucggcguccagcggcucugcuuguucgugugugugucguugcaggccuuauucaagcuuaccaugagcaacagcaaggaggugaagagcuuccuguggacccagagccugagaagagagcugagcggcuacugcagcaacaucaagcugcagguggugaaggacgcccaggcccugcugcacggccuggacuucagcgaggugagcaacgugcagagacugaugagaaagcagaagagagacgacggcgaccugaagagacugagagaccugaaccaggccgugaacaaccugguggagcugaagagcgugcagcagaagagcauccugagagugggcacccugaccagcgacgaccugcugacccuggccgccgaccuggagaagcugaagagcaaggugaccagaaccgagagaccccugagcagcggcguguacaugggcaaccugagcagccagcagcuggaccagagaagagcccugcugagcaugaucggcaugagcggcggcaaccagaacagccagcccaagggcgacggcguggugagagugugggacgugaagaacgccgaccugcugaacaaccaguucggcaccaugcccagccugacccuggccugccugaccaagcagggccagguggaccugaacgacgccgugcaggcccugaccgaccugggccugaucuacaccgccaaguaccccaacagcagcgaccuggacagacugagccagagccaccccauccugaacaugaucgacaccaagaagagcagccugaacaucagcggcuacaacuucagccugggcgccgccaucaagaccggcgccugcaugcuggacggcggcaacaugcuggagaccaucaaggugaccccccagaccauggacggcauccugaagagcauccugaaggugaagagaagccugggcauguucaucagcgacacccccggcgagagaaaccccuacgagaacauccuguacaagaucugccugagcggcgacggcuggcccuacaucgccagcagaaccgccaucaucggcagagccugggagaacaccgugguggaccuggagagcgacagcaagccccagaagaucggcagcaacggcagcaacaagagccugcagagcgccggcuucgcccccggccugaccuacagccagcugaugacccugaaggacagcaugcugcagcuggaccccaacgccaagaccuggaucgacaucgagggcagacccgaggaccccguggagguggcccuguuccagcccaucagcggcugcuacauccacuucuucagagagcccaccgaccugaagcaguucaagcaggacgccaaguacagccacggcaucgacgugaccgaccuguucgccgcccagcccggccugaccagcgccgugaucgaggcccugcccagaaacauggugcugaccugccagggcagcgacgacaucaagaagcugcuggacagccagggcagaagagacaucaagcugaucgacgugagccugaacaagaucgacagcagaaaguucgagaacgccgugugggaccaguacaaggaccugugccacaugcacaccggcguggugguggagaagaagaagaagggcggcaaggaggagaucaccccccacugcgcccugcuggacugcaucauguucgacgccgccgugagcggcggccugaacgccaccgugcugagagccgugcugcccagagacaugguguucagaaccagcagccccaagguggugcugugaggacuaguaauaaggaaacuguaugaaugucugugggcaggaagugaagagauccuucuguaaagguuuuuggaauuaugucugcugaauaauaaacuuuuuugaaauaauaaaucugguagaaaaaugagaucuaaaaaaaaaaaaaaaaaaaaaaaaaaaaaaaaaaaaaaaaaaaaaaaaaaaaaaaaaaaaaaaaaaaaaaaaaaaaaaaaaaaaaaaaaaaaaaaaaaaa

SEQ ID NO: 17600 - RNA, 2022 nt, Artificial Sequence
  mRNA product Design b-4 (A100) comprising derived and/or modified sequence from LASV(KAK-428;Clade n.d. (VII))__ANH09741__NP (opt4)
aggagagucccgcagucggcguccagcggcucugcuuguucgugugugugucguugcaggccuuauucaagcuuaccaugagcaacagcaaggaggugaagagcuuccuguggacccagagccugagaagagagcugagcggcuacugcaccaacaucaagcugcagguggugaaggacgcccaggcccugcugcacggccuggacuucagcgaggugagcaacgugcagagacugaugagaaagcagaagagagacgacaacgaccugaagagacugagagaccugaaccaggccgugaacaaccugguggagcugaagagcgugcagcagaagagcgugcugaaggugggcacccugaacagcgacgaccugcugacccuggccgccgaccuggagaagcugaagagcaagguggugagaaccgagagaccccugagcagcggcguguacaugggcaaccugagcagccagcagcuggaccagagaagagcccugcugaacaugaucggcauggccggcggcagccagggcaaccagcccagcagagacggcguggugagagugugggacgugaagaacgccgaccugcugaacaaccaguucggcaccaugcccagccugacccuggccugccugaccaagcagggccagguggaccugaacgacguggugcuggcccugaccgaccugggccugaucuacaccgccaaguaccccaacagcagcgaccuggacagacugagccagaaccaccccgugcugaacaugaucgacgugaacaagagcagccugaacaucagcggcuacaacuucagccugggcgccgccgugaaggccggcgccugcaugcuggacggcggcaacaugcuggagaccaucaagaucagcccccagaccguggacggcauccugaagagcauccugaaggugaagagagcccugggcauguucgugagcgacacccccggcgagagaaaccccuacgagaacauccuguacaaggugugccugagcggcaacggcuggcccuacaucgccagcagaaccagcaucgugggcagagccugggagaacaccgugguggaccuggagagcaacaagaaccagcccaaggugggcaacaacggcagcaacaagaugcugcagagcagcggcuucgccaccggccugaccuacagccagcugaugacccugagagacagcaugcugcagcuggaccccaccgccaagaccuggaucgacaucgagggcagacccgaggaccccguggagcuggcccuguuccagcccagcagcggcugcuacauccacuucuucagagagcccaccgaccugaagcaguucaagcaggacgccaaguacagccacggcaucgacgugaacgaccuguucagcgcccagcccggccugaccagcgccgugcuggaggcccugcccagaaacauggugcugaccugccagggcagcgacgacaucagaaagcugcuggacagccaggacagaaaggacaucaagcugaucgacaucagccugagcaaggccgacgccagaaaguucgagaacgacgugugggaccaguucaaggaccugugccacaugcacaccggcaucgugguggagaagaagaagaagggcggcaagcaggagaugaccccccacugcgcccugcuggacugcaucauguucgacgccgccgugagcggcggccugaacgugcccacccugagagccgugcugcccaccgacaugguguucagaaccaucaccaccaagguggugcugugaggacuaguaauaaggaaacuguaugaaugucugugggcaggaagugaagagauccuucuguaaagguuuuuggaauuaugucugcugaauaauaaacuuuuuugaaauaauaaaucugguagaaaaaugagaucuaaaaaaaaaaaaaaaaaaaaaaaaaaaaaaaaaaaaaaaaaaaaaaaaaaaaaaaaaaaaaaaaaaaaaaaaaaaaaaaaaaaaaaaaaaaaaaaaaaaa

SEQ ID NO: 17601 - RNA, 2022 nt, Artificial Sequence; identical to SEQ ID NO: 17595
  mRNA product Design b-4 (A100) comprising derived and/or modified sequence from LASV(Pinneo-NIG-1969;Clade I)__AIT17837__NP (opt4)

SEQ ID NO: 17602 - RNA, 2022 nt, Artificial Sequence
  mRNA product Design b-4 (A100) comprising derived and/or modified sequence from LASV(ISTH0009-NIG-2011;Clade II)__AIT17405__NP (opt4)
aggagagucccgcagucggcguccagcggcucugcuuguucgugugugugucguugcaggccuuauucaagcuuaccaugagcgugagcaaggaggugaagagcuuccuguggacccagagccugagaagagagcugagcggcuacugcagcaacaucaagcugcagguggugaaggacgcccaggcccugcugcacggccuggacuucagcgaggugagcaacgugcagagacugaugagaaagcagaagagagacgacagcgaccugaagagacugagagaccugaaccaggccgugaacaaccugguggagcugaagagcacccagcagaagagcauccugagagugggcacccugaccagcgacgaccugcugacccuggccgccgaccuggagaagcugaagagcaaggugaucagaaccgagagaccccugagcagcggcguguacaugggcaaccugagcacccagcagcuggagcagagaagagcccugcugaacaugaucggcauggugggcggcgcccagggcacccagcccggcagagacggcguggugagagugugggacgugaagaaccccgaccugcugaacaaccaguucggcaccaugcccagccugacccuggccugccugaccaagcagggccagguggaccugaacgacgccgugcuggcccugaccgaccugggccugaucuacaccgccaaguaccccaacagcagcgaccuggacagacugagccagagccaccccauccugaacaugguggacaucaagaagagcagccugaacaucagcggcuacaacuucagccugggcgccgccgugaaggccggcgccugcaugcuggacggcggcaacaugcuggagaccaucaaggugaccccccagaccauggacggcauccugaagagcauccugaaggugaagagaagccugggcauguucgugagcgacacccccggcgagagaaaccccuacgagaacauccuguacaagaucugccugagcggcgacggcuggcccuacaucgccagcagaaccagcaucgugggcagagccugggagaacaccaccguggaccuggagagcgacggcaagccccagaaggugggcagcgccggcagcaacaagagccugcagagcgccggcuuccccaccggccugaccuacagccagcugaugacccugaaggacagcaugaugcagcuggaccccagcgccaagaccuggaucgacaucgagggcagacccgaggaccccguggagaucgcccuguaccagcccaugagcggcugcuacauccacuucuucagagagcccaccgaccugaagcaguucaagcaggacgccaaguacagccacggcaucgacguggccgaccuguuccccgcccagcccggccugaccagcgccgugaucgaggcccugcccagaaacauggugcugaccugccagggcagcgacgacaucaagagacugcuggacagccagggcagaagagacaucaagcugaucgacaucgcccugagcaaggccgacagcagaagauucgagaacgccgugugggaccagugcaaggaccugugccacaugcacaccggcguggugguggagaagaagaagagaggcggcaaggaggagaucaccccccacugcgcccugauggacugcaucauguacgacgccgccgugagcggcggccugaacauccccgugcugagagccgugcugcccagagacaugguguucagaaccagcagccccaagguggugcugugaggacuaguaauaaggaaacuguaugaaugucugugggcaggaagugaagagauccuucuguaaagguuuuuggaauuaugucugcugaauaauaaacuuuuuugaaauaauaaaucugguagaaaaaugagaucuaaaaaaaaaaaaaaaaaaaaaaaaaaaaaaaaaaaaaaaaaaaaaaaaaaaaaaaaaaaaaaaaaaaaaaaaaaaaaaaaaaaaaaaaaaaaaaaaaaaa

SEQ ID NO: 17603 - RNA, 2022 nt, Artificial Sequence
  mRNA product Design b-4 (A100) comprising derived and/or modified sequence from LASV(ISTH2010-NIG-2012;Clade II)__AIT17483__NP (opt4)
aggagagucccgcagucggcguccagcggcucugcuuguucgugugugugucguugcaggccuuauucaagcuuaccaugagcgccagcaaggaggugaagagcuuccuguggacccagagccugagaagagagcugagcggcuacugcagcaacaucaagcugcagguggugaaggacgcccaggcccugcugcacggccuggacuucagcgaggugagcaacgugcagagacugaugagaaagcagaagagagacgacagcgaccugaagagacugagagaccugaaccaggccgugaacaaccugguggagcugaagagcacccagcagaagagcauccugagagugggcacccugaccagcgacgaccugcugacccuggccgccgaccuggagaagcugaagagcaaggugaucagaaccgagagaccccugagcagcggcguguacaugggcaaccugagcacccagcagcuggagcagagaagagcccugcugaaccugaucggcauggugggcggcgcccagggcacccagcccggcagagacggcguggugagagugugggacgugaagaaccccgaccugcugaacaaccaguucggcaccaugcccagccugacccuggccugccugaccaagcagggccagguggaccugaacgacgccgugcuggcccugaccgaccugggccugaucuacaccgccaaguaccccaacagcagcgaccuggacagacugagccagagccaccccauccugaacaugguggacaccaagaagagcagccugaacaucagcggcuucaacuucagccugggcgccgccgugaaggccggcgccugcaugcuggacggcggcaacaugcuggagaccaucaaggugaccccccagaccauggacggcauccugaagagcauccugaaggugaagaagagccugggcauguucgugagcgacacccccggcgagagaaaccccuacgagaacauccuguacaagaucugccugagcggcgacggcuggcccuacaucgccagcagaaccagcaucgugggcagagccugggagaacaccaccguggaccuggagagcgacggcaagccccacaaggugggcaccgccggcagcaacaagagccugcagagcgccggcuuccccaccggccugaccuacagccagcugaugacccugaaggacagcaugaugcagcuggaccccagcgccaagaccuggaucgacaucgagggcagacccgaggaccccguggagaucgcccuguaccagcccaugagcggcugcuacauccacuucuucagagagcccaccgaccugaagcaguucaagcaggacgccaaguacagccacggcaucgacguggccgaccuguuccccgcccagcccggccugaccagcgccgugaucgaggcccugcccagaaacauggugcugaccugccagggcagcgacgacaucaagagacugcuggacagccagggcagaagagacaucaagcugaucgacaucgcccugagcaaggccgacagcagaagauucgagaacgccgugugggaccagugcaaggaccugugccacaugcacaccggcguggugguggagaagaagaagagaggcggcaaggaggagaucaccccccacugcgcccugauggacugcaucauguacgacgccgccgugagcggcggccugaacauccccgugcugagagccgugcugcccagagacaugguguucagaaccagcagccccaagguggugcugugaggacuaguaauaaggaaacuguaugaaugucugugggcaggaagugaagagauccuucuguaaagguuuuuggaauuaugucugcugaauaauaaacuuuuuugaaauaauaaaucugguagaaaaaugagaucuaaaaaaaaaaaaaaaaaaaaaaaaaaaaaaaaaaaaaaaaaaaaaaaaaaaaaaaaaaaaaaaaaaaaaaaaaaaaaaaaaaaaaaaaaaaaaaaaaaaa

SEQ ID NO: 17604 - RNA, 2022 nt, Artificial Sequence
  mRNA product Design b-4 (A100) comprising derived and/or modified sequence from LASV(Lassa virus/H.sapiens-wt/NGA/2015/ISTH_0543;Clade II)__AVO03640__NP (opt4)
aggagagucccgcagucggcguccagcggcucugcuuguucgugugugugucguugcaggccuuauucaagcuuaccaugagcgccagcaaggaggugaagagcuuccuguggacccagagccugagaagagagcugagcggcuacugcagcaacaucaagcugcagguggugaaggacgcccaggcccugcugcacggccuggacuucagcgaggugagcaacgugcagagacugaugagaaagcagaagagagacgacagcgaccugaagagacugagagaccugaaccaggccgugaacaaccugguggagcugaagagcacccagcagaagagcauccugagagugggcacccugaccagcgacgaccugcugacccuggccgccgaccuggagaagcugaagagcaaggugaucagaaccgagagaccccugagcagcggcguguacaugggcaaccugagcacccagcagcuggagcagagaagagcccugcugaacaugaucggcauggugggcggcgcccagggcacccagcccggcagagacggcguggugagagugugggacgugaagaaccccgaccugcugaacaaccaguucggcaccaugcccagccugacccuggccugccugaccaagcagggccagguggaccugaacgacgccgugcuggcccugaccgaccugggccugaucuacaccgccaaguaccccaacagcagcgaccuggacagacugagccagagccaccccauccugaacaugguggacaccaagaagagcagccugaacaucagcggcuacaacuucagccugggcgccgccgugaaggccggcgccugcaugcuggacggcggcaacaugcuggagaccaucaaggugaccccccagaccauggacggcauccugaagagcauccugaaggugaagaagagccugggcauguucgugagcgacacccccggcgagagaaaccccuacgagaacauccuguacaagaucugccugagcggcgacggcuggcccuacaucgccagcagaaccagcaucgugggcagagccugggagaacaccaccguggaccuggagagcgacggcaagccccagaaggugggcagcgccggcagcaacaagagccugcagagcgccggcuuccccaccggccugaccuacagccagcugaugacccugaaggacagcaugaugcagcuggaccccagcgccaagaccuggaucgacaucgagggcagacccgaggaccccguggagaucgcccuguaccagcccaugagcggcugcuacauccacuucuucagagagcccaccgaccugaagcaguucaagcaggacgccaaguacagccacggcaucgacguggccgaccuguuccccgcccagcccggccugaccagcgccgugaucgaggcccugcccagaaacauggugcugaccugccagggcagcgacgacaucaagagacugcuggacagccagggcagaaaggacaucaagcugaucgacaucgcccugagcaaggccgacagcagaagauucgagaacgccgugugggaccagugcaaggaccugugccacaugcacaccggcguggugguggagaagaagaagagaggcggcaaggaggagaucaccccccacugcgcccugauggacugcaucauguacgacgccgccgugagcggcggccugaacauccccgugcugagagccgugcugcccagagacaugguguucagaaccagcagccccaagguggugcugugaggacuaguaauaaggaaacuguaugaaugucugugggcaggaagugaagagauccuucuguaaagguuuuuggaauuaugucugcugaauaauaaacuuuuuugaaauaauaaaucugguagaaaaaugagaucuaaaaaaaaaaaaaaaaaaaaaaaaaaaaaaaaaaaaaaaaaaaaaaaaaaaaaaaaaaaaaaaaaaaaaaaaaaaaaaaaaaaaaaaaaaaaaaaaaaaa

SEQ ID NO: 17605 - RNA, 2022 nt, Artificial Sequence
  mRNA product Design b-4 (A100) comprising derived and/or modified sequence from LASV(Lassa virus/H.sapiens-wt/NGA/2016/ISTH_0009;Clade II)__AVO03572__NP (opt4)
aggagagucccgcagucggcguccagcggcucugcuuguucgugugugugucguugcaggccuuauucaagcuuaccaugagcgccagcaaggaggugaagagcuuccuguggacccagagccugagaagagagcugagcggcuacugcagcaacaucaagcugcagguggugaaggacgcccaggcccugcugcacggccuggacuucagcgaggugagcaacgugcagagacugaugagaaagcagaagagagacgacagcgaccugaagagacugagagaccugaaccaggccgugaacaaccugguggagcugaagagcacccagcagaagagcauccugagagugggcacccugaccagcgacgaccugcugacccuggccgccgaccuggagaagcugaagagcaaggugaucagaaccgagagaccccugagcagcggcguguacaugggcaaccugagcacccagcagcuggagcagagaagagcccugcugaacaugaucggcauggugggcggcgcccagggcacccagcccggcagagacggcguggugagagugugggacgugaagaaccccgaccugcugaacaaccaguucggcaccaugcccagccugacccuggccugccugaccaagcagggccagguggaccugaacgacgccgugcuggcccugaccgaccugggccugaucuacaccgccaaguaccccaacagcagcgaccuggacagacugagccagagccaccccauccugaacaugguggacaccaagaagagcagccugaacaucagcggcuacaacuucagccugggcgccgccgugaaggccggcgccugcaugcuggacggcggcaacaugcuggagaccaucaaggugaccccccagaccauggacggcauccugaagagcauccugaaggugaagaagagccugggcauguucgugagcgacacccccggcgagagaaaccccuacgagaacauccuguacaagaucugccugagcggcgacggcuggcccuacaucgccagcagaaccagcaucgugggcagagccugggagaacaccaccguggaccuggagagcgacggcaagccccagaaggugggcagcgccggcagcaacaagagccugcagagcgccggcuuccccaccggccugaccuacagccagcugaugacccugaaggacagcaugaugcagcuggaccccagcgccaagaccuggaucgacaucgagggcagacccgaggaccccguggagaucgcccuguaccagcccaugagcggcugcuacauccacuucuucagagagcccaccgaccugaagcaguucaagcaggacgccaaguacagccacggcaucgacguggccgaccuguuccccgcccagcccggccugaccagcgccgugaucgaggcccugcccagaaacauggugcugaccugccagggcagcgacgacaucaagagacugcuggacagccagggcagaagagacaucaagcugaucgacaucgcccugagcaaggccgacagcagaagauucgagaacgccgugugggaccagugcaaggaccugugccacaugcacaccggcguggugguggagaagaagaagagaggcggcaaggaggagaucaccccccacugcgcccugauggacugcaucauguacgacgccgccgugagcggcggccugaacauccccgugcugagagccgugcugcccagagacaugguguucagaaccagcagccccaagguggugcugugaggacuaguaauaaggaaacuguaugaaugucugugggcaggaagugaagagauccuucuguaaagguuuuuggaauuaugucugcugaauaauaaacuuuuuugaaauaauaaaucugguagaaaaaugagaucuaaaaaaaaaaaaaaaaaaaaaaaaaaaaaaaaaaaaaaaaaaaaaaaaaaaaaaaaaaaaaaaaaaaaaaaaaaaaaaaaaaaaaaaaaaaaaaaaaaaa

SEQ ID NO: 17606 - RNA, 2022 nt, Artificial Sequence
  mRNA product Design b-4 (A100) comprising derived and/or modified sequence from LASV(Lassa virus/H.sapiens-wt/NGA/2016/ISTH_0017;Clade II)__AVO03568__NP (opt4)
aggagagucccgcagucggcguccagcggcucugcuuguucgugugugugucguugcaggccuuauucaagcuuaccaugagcgccagcaaggaggugaagagcuuccuguggacccagagccugagaagagagcugagcggcuacugcagcagcaucaagcugcagguggugaaggacgcccaggcccugcugcacggccuggacuucagcgaggugagcaacgugcagagacugaugagaaagcagaagagagacgacagcgaccugaagagacugagagaccugaaccaggccgugaacaaccugguggagcugaagagcacccagcagaagagcauccugagagugggcacccugaccagcgacgaccugcugacccuggccgccgaccuggagaagcugaagagcaaggugaucagaaccgagagaccccugagcagcggcguguacaugggcaaccugagcacccagcagcuggagcagagaagagcccugcugaacaugaucggcauggccggcggcgcccagggcacccagcccggcagagacggcguggugagagugugggacgugaagaaccccgaccugcugaacaaccaguucggcaccaugcccagccugacccuggccugccugaccaagcagggccagguggaccugaacgacgccgugcuggcccugaccgaccugggccugaucuacaccgccaaguaccccaacagcagcgaccuggacagacugagccagagccaccccauccugaacaugguggacaccaagaagagcagccugaacaucagcggcuacaacuucagccugggcgccgccgugaaggccggcgccugcaugcuggacggcggcaacaugcuggagaccaucaaggugaccccccagaccauggacggcauccugaagagcauccugaaggugaagagaagccugggcauguucgugagcgacgcccccggcgagagaaaccccuacgagaacauccuguacaagaucugccugagcggcgacggcuggcccuacaucgccagcagaaccagcaucgugggcagagccugggagaacaccaccguggaccuggagagcgacggcaagccccagaaggugggcgccaccggcagcaacaagagccugcagagcgccggcuuccccaccggccugaccuacagccagcugaugacccugaaggacagcaugaugcagcuggaccccagcgccaagaccuggaucgacaucgagggcagacccgaggaccccguggagguggcccuguaccagcccgugagcggcugcuacauccacuucuucagagagcccaccgaccugaagcaguucaagcaggacgccaaguacagccacggcaucgacguggccgaccuguuccccgcccagcccggccugaccagcgccgugaucgaggcccugcccagaaacauggugcugaccugccagggcagcgacgacaucaagaagcugcuggacagccagggcagaaaggacaucaagcugaucgacaucgcccugagcaaggccgacagcagaagauucgagaacgccgugugggaccagugcaaggaccugugccacaugcacaccggcguggugguggagaagaagaagagaggcggcaaggaggagaucaccccccacugcgcccugauggacugcaucauguacgacgccgccgugagcggcggccugaacauccccgugcugagagccgugcugcccagagacaugguguucagaaccagcagccccaagguggugcugugaggacuaguaauaaggaaacuguaugaaugucugugggcaggaagugaagagauccuucuguaaagguuuuuggaauuaugucugcugaauaauaaacuuuuuugaaauaauaaaucugguagaaaaaugagaucuaaaaaaaaaaaaaaaaaaaaaaaaaaaaaaaaaaaaaaaaaaaaaaaaaaaaaaaaaaaaaaaaaaaaaaaaaaaaaaaaaaaaaaaaaaaaaaaaaaaa

SEQ ID NO: 17607 - RNA, 2022 nt, Artificial Sequence
  mRNA product Design b-4 (A100) comprising derived and/or modified sequence from LASV(Lassa virus/H.sapiens-wt/NGA/2018/ISTH_0959;Clade II)__AVV65100__NP (opt4)
aggagagucccgcagucggcguccagcggcucugcuuguucgugugugugucguugcaggccuuauucaagcuuaccaugagcgccagcaaggaggugaagagcuuccuguggacccagagccugagaagagagcugagcggcuacugcagcaacaucaagcugcagguggugaaggacgcccaggcccugcugcacggccuggacuucagcgaggugagcaacgugcagagacugaugagaaagcagaagagagacgacagcgaccugaagagacugagagaccugaaccaggccgugaacaaccugguggagcugaagagcacccagcagaagagcauccugagagugggcacccugaccagcgacgaccugcugacccuggccgccgaccuggagaagcugaagagcaaggugaucagaaccgagagaccccugagcagcggcguguacaugggcaaccugagcacccagcagcuggagcagagaagagcccugcugaaccugaucggcauggugggcggcgcccagggcacccagcccggcagagacggcguggugagagugugggacgugaagaaccccgaccugcugaacaaccaguucggcaccaugcccagccugacccuggccugccugaccaagcagggccagguggaccugaacgacguggugcuggcccugaccgaccugggccugaucuacaccgccaaguaccccaacagcagcgaccuggacagacugagccagagccaccccauccugaacaugguggacaccaagaagagcagccugaacaucagcggcuucaacuucagccugggcgccgccgugaaggccggcgccugcaugcuggacggcggcaacaugcuggagaccaucaaggugaccccccagaccauggacggcauccugaagagcauccugaaggugaagaagagccugggcauguucgugagcgacacccccggcgagagaaaccccuacgagaacauccuguacaagaucugccugagcggcgacggcuggcccuacaucgccagcagaaccagcaucgugggcagagccugggagaacaccaccguggaccuggagagcgacggcaagccccacaaggugggcaccgccggcagcaacaagagccugcagagcgccggcuuccccaccggccugaccuacagccagcugaugacccugaaggacagcaugaugcagcuggaccccagcgccaagaccuggaucgacaucgagggcagacccgaggaccccguggagaucgcccuguaccagcccaugagcggcugcuacauccacuucuucagagagcccaccgaccugaagcaguucaagcaggacgccaaguacagccacggcaucgacguggccgaccuguuccccgcccagcccggccugaccagcgccgugaucgaggcccugcccagaaacauggugcugaccugccagggcagcgacgacaucaagagacugcuggacagccagggcagaaaggacaucaagcugaucgacaucgcccugagcaagaccgacagcagaagauucgagaacgccgugugggaccagugcaaggaccugugccacaugcacaccggcguggugguggagaagaagaagagaggcggcaaggaggagaucaccccccacugcgcccugauggacugcaucauguacgacgccgccgugagcggcggccugaacauccccgugcugagagccgugcugcccagagacaugguguucagaaccagcagccccaagguggugcugugaggacuaguaauaaggaaacuguaugaaugucugugggcaggaagugaagagauccuucuguaaagguuuuuggaauuaugucugcugaauaauaaacuuuuuugaaauaauaaaucugguagaaaaaugagaucuaaaaaaaaaaaaaaaaaaaaaaaaaaaaaaaaaaaaaaaaaaaaaaaaaaaaaaaaaaaaaaaaaaaaaaaaaaaaaaaaaaaaaaaaaaaaaaaaaaaa

SEQ ID NO: 17608 - RNA, 2022 nt, Artificial Sequence
  mRNA product Design b-4 (A100) comprising derived and/or modified sequence from LASV(LASV003-NIG-2008;Clade II)__AIT17581__NP (opt4)
aggagagucccgcagucggcguccagcggcucugcuuguucgugugugugucguugcaggccuuauucaagcuuaccaugagcgccagcaaggaggugaagagcuuccuguggacccagagccugagaagagagcugagcggcuacugcagcagcaucaagcugcagguggugaaggacgcccaggcccugcugcacggccuggacuucagcgaggugagcaacgugcagagacugaugagaaagcagaagagagacgacagcgaccugaagagacugagagaccugaaccaggccgugaacaaccugguggagcugaagagcacccagcagaagagcgugcugagagugggcacccugaccagcgacgaccugcugacccuggccgccgaccuggagaagcugaagagcaaggugaucagaaccgagagaccccugagcagcggcguguacaugggcaaccugagcgcccagcagcuggagcagagaagaacccugcugaacaugaucggcauggugggcggcgcccagggcacccagcccggcagagacggcguggugagagugugggacgugaagaaccccgaccugcugaacaaccaguucggcaccaugcccagccugacccuggccugccugaccaagcagggccagguggaccugaacgacguggugcuggcccugaccgaccugggccugaucuacaccgccaaguaccccaacagcagcgaccuggacagacugagccagagccaccccauccugagcaugguggacaccaagaagagcagccugaacaucagcggcuacaacuucagccugggcgccgccgugaaggccggcgccugcaugcuggacggcggcaacaugcuggagaccaucaaggugaccccccagaccauggacggcauccugaagagcauccugaaggugaagaagagccugggcauguucgugagcgacacccccggcgagagaaaccccuacgagaacauccuguacaagaucugccugagcggcgacggcuggcccuacaucgccagcagaaccagcaucgugggcagagccugggagaacaccaccguggaccuggagagcgacggcaagccccagaaggugggcaccgccggcagcaacaagagccugcagagcgccggcuuccccaccggccugaccuacagccagcugaugacccugaaggacagcaugaugcagcuggaccccagcgccaagaccuggaucgacaucgagggcagacccgaggaccccguggagaucgcccuguaccagcccaugagcggcugcuacauccacuucuucagagagcccaccgaccugaagcaguucaagcaggacgccaaguacagccacggcaucgacgugaccgaccuguuccccgcccagcccggccugaccagcgccgugaucgaggcccugcccagaaacauggugcugaccugccagggcagcgacgacaucaagagacugcuggacagccagggcagaagagacaucaagcugaucgacaucgcccugagcaaggccgacagcagaagauucgagaacgccgugugggaccagugcaaggaccugugccacaugcacaccggcguggugguggagaagaagaagagaggcggcaaggaggagaucaccccccacugcgcccugauggacugcaucauguacgacgccgccgugagcggcggccugaacauccccgugcugagagccgugcugcccagagacaugguguucagaaccagcagccccaagguggugcugugaggacuaguaauaaggaaacuguaugaaugucugugggcaggaagugaagagauccuucuguaaagguuuuuggaauuaugucugcugaauaauaaacuuuuuugaaauaauaaaucugguagaaaaaugagaucuaaaaaaaaaaaaaaaaaaaaaaaaaaaaaaaaaaaaaaaaaaaaaaaaaaaaaaaaaaaaaaaaaaaaaaaaaaaaaaaaaaaaaaaaaaaaaaaaaaaa

SEQ ID NO: 17609 - RNA, 2022 nt, Artificial Sequence
  mRNA product Design b-4 (A100) comprising derived and/or modified sequence from LASV(LASV035-NIG-2009;Clade II)__AIT17589__NP (opt4)
aggagagucccgcagucggcguccagcggcucugcuuguucgugugugugucguugcaggccuuauucaagcuuaccaugagcgccagcaaggaggugaagagcuuccuguggacccagagccugagaagagagcugagcggcuacugcagcagcaucaagcugcagguggugaaggacgcccaggcccugcugcacggccuggacuucagcgaggugagcaacgugcagagacugaugagaaagcagaagagagacgacagcgaccugaagagacugagagaccugaaccaggccgugaacaaccugguggagcugaagagcacccagcagaagagcauccugagagugggcacccugaccagcgacgaccugcugacccuggccgccgaccuggagaagcugaagagcaaggugaucagaaccgagagaccccugagcagcggcguguacaugggcaaccugagcgcccagcagcuggagcagagaagagcccugcugaacaugaucggcauggugggcggcgcccagggcacccagcccggcagagacggcguggugagagugugggacgugaagaaccccgaccugcugaacaaccaguucggcaccaugcccagccugacccuggccugccugaccaagcagggccagguggaccugaacgacgccgugcuggcccugaccgaccugggccugaucuacaccgccaaguaccccaacagcagcgaccuggacagacugagccagagccaccccauccugaacaugguggacaccaagaagagcagccugaacaucagcggcuacaacuucagccugggcgccgccgugaaggccggcgccugcaugcuggacggcggcaacaugcuggagaccaucaaggugaccccccagaccauggacggcauccugaagagcauccugaaggugaagagaagccugggcauguucgugagcgacacccccggcgagagaaaccccuacgagaacauccuguacaagaucugccugagcggcgacggcuggcccuacaucgccagcagaaccagcaucgugggcagagccugggagaacaccaccguggaccuggagagcgacggcaagccccagaaggugggcaccaccggcagcaacaagagccugcagagcgccggcuuccccaccggccugaccuacagccagcugaugacccugaaggacagcaugaugcagcuggaccccagcgccaagaccuggaucgacaucgagggcagacccgaggaccccguggagaucgcccuguaccagcccaugagcggcugcuacauccacuucuucagagagcccaccgaccugaagcaguucaagcaggacgccaaguacagccacggcaucgacguggccgaccuguuccccgcccagcccggccugaccagcgccgugaucgaggcccugcccagaaacauggugcugaccugccagggcagcgacgacaucaagaagcugcuggacagccagggcagaagagacaucaagcugaucgacaucgcccugagcaaggccgacagcagaaaguucgagaacgccgugugggaccagugcaaggaccugugccacaugcacaccggcguggugguggagaagaagaagagaggcggcaaggaggagaucaccccccacugcgcccugauggacugcaucauguacgacgccgccgugagcggcggccugaacauccccgugcugagagccgugcugcccagagacaugguguucagaaccagcagccccaagguggugcugugaggacuaguaauaaggaaacuguaugaaugucugugggcaggaagugaagagauccuucuguaaagguuuuuggaauuaugucugcugaauaauaaacuuuuuugaaauaauaaaucugguagaaaaaugagaucuaaaaaaaaaaaaaaaaaaaaaaaaaaaaaaaaaaaaaaaaaaaaaaaaaaaaaaaaaaaaaaaaaaaaaaaaaaaaaaaaaaaaaaaaaaaaaaaaaaaa

SEQ ID NO: 17610 - RNA, 2022 nt, Artificial Sequence
  mRNA product Design b-4 (A100) comprising derived and/or modified sequence from LASV(LASV1000-NIG-2009;Clade II)__AIT17783__NP (opt4)
aggagagucccgcagucggcguccagcggcucugcuuguucgugugugugucguugcaggccuuauucaagcuuaccaugagcgccagcaaggaggugaagagcuuccuguggacccagagccugagaagagagcugagcggcuacugcagcaacaucaagcugcagguggugaaggacgcccaggcccugcugcacggccuggacuucagcgaggugagcaacgugcagagacugaugagaaagcagaagagagacgacagcgaccugaagagacugagagaccugaaccaggccgugaacaaccugguggagcugaagagcacccagcagaagagcauccugagagugggcacccugaccagcgacgaccugcugacccuggccgccgaccuggagaagcugaagagcaaggugaucagaaccgagagaccccugagcagcggcguguacaugggcaaccugagcacccagcagcuggagcagagaagagcccugcugaacaugaucggcauggugggcggcgcccagggcacccagcccggcagagacggcguggugagagugugggacgugaagaaccccgaccugcugaacaaccaguucggcaccaugcccagccugacccuggccugccugaccaagcagggccagguggaccugaacgacguggugcuggcccugaccgaccugggccugaucuacaccgccaaguaccccaacagcagcgaccuggacagacugagccagagccaccccauccugaacaugguggacaccaagaagagcagccugaacaucagcggcuacaacuucagccugggcgccgccgugaaggccggcgccugcaugcuggacggcggcaacaugcuggagaccaucaaggugaccccccagaccauggacggcauccugaagagcauccugaaggugaagaagagccugggcauguucgugagcgacacccccggcgagagaaaccccuacgagaacauccuguacaagaucugccugagcggcgacggcuggcccuacaucgccagcagaaccagcaucgugggcagagccugggagaacaccaccguggaccuggagagcgacggcaagccccagaaggugggcaccgccggcagcaacaagagccugcagagcgccggcuuccccaccggccugaccuacagccagcugaugacccugaaggacagcaugaugcagcuggaccccagcgccaagaccuggaucgacaucgagggcagacccgaggaccccguggagaucgcccuguaccagcccgugagcggcugcuacauccacuucuucagagagcccaccgaccugaagcaguucaagcaggacgccaaguacagccacggcaucgacguggccgaccuguuccccgcccagcccggccugaccagcgccgugaucgaggcccugcccagaaacauggugcugaccugccagggcagcgacgacaucaagagacugcuggacagccagggcagaagagacaucaagcugaucgacaucgcccugagcaaggccgacagcagaagauucgagaacgccgugugggaccagugcaaggaccugugccacaugcacaccggcguggugguggagaagaagaagagaggcggcaaggaggagaucaccccccacugcgcccugauggacugcaucauguacgacgccgccgugagcggcggccugaacauccccgugcugagagccgugcugcccagagacaugguguucagaaccagcagccccaagguggugcugugaggacuaguaauaaggaaacuguaugaaugucugugggcaggaagugaagagauccuucuguaaagguuuuuggaauuaugucugcugaauaauaaacuuuuuugaaauaauaaaucugguagaaaaaugagaucuaaaaaaaaaaaaaaaaaaaaaaaaaaaaaaaaaaaaaaaaaaaaaaaaaaaaaaaaaaaaaaaaaaaaaaaaaaaaaaaaaaaaaaaaaaaaaaaaaaaa

SEQ ID NO: 17611 - RNA, 2022 nt, Artificial Sequence
  mRNA product Design b-4 (A100) comprising derived and/or modified sequence from LASV(LASV221-NIG-2010;Clade II)__AIT17625__NP (opt4)
aggagagucccgcagucggcguccagcggcucugcuuguucgugugugugucguugcaggccuuauucaagcuuaccaugagcgccagcaaggaggugaagagcuuccuguggacccagagccugagaagagagcugagcggcuacugcagcagcaucaagcugcagguggugaaggacgcccaggcccugcugcacggccuggacuucagcgaggugagcaacgugcagagacugaugagaaagcagagaagagacgacagcgaccugaagagacugagagaccugaaccaggccgugaacaaccugguggagcugaagagcacccagcagaagagcauccugagagugggcacccugaccagcgacgaccugcugacccuggccgccgaccuggagaagcugaagagcaaggugaucagaaccgagagaccccugagcagcggcguguacaugggcaaccugagcacccagcagcuggagcagagaagagcccugcugaacaugaucggcauggugggcggcgcccagggcacccagcccggcagagacggcguggugagagugugggacgugaagaaccccgaccugcugaacaaccaguucggcaccaugcccagccugacccuggccugccugaccaagcagggccagguggaccugaacgacgccgugcuggcccugaccgaccugggccugaucuacaccgccaaguaccccaacagcagcgaccuggacagacugagccagagccaccccauccugaacaugguggacaccaagaagagcagccugaacaucagcggcuacaacuucagccugggcgccgccgugaaggccggcgccugcaugcuggacggcggcaacaugcuggagaccaucaaggugaccccccagaccguggacggcauccugaagagcauccugaaggugaagagaagccugggcauguucgugagcgacacccccggcgagagaaaccccuacgagaacauccuguacaagaucugccugagcggcgacggcuggcccuacaucgccagcagaaccagcaucgugggcagagccugggagaacaccaccguggaccuggagagcgacggcaagccccagaaggugggcaccgccggcagcaacaagagccugcagagcgccggcuuccccaccggccugaccuacagccagcugaugacccugaaggacagcaugaugcagcuggaccccagcgccaagaccuggaucgacaucgagggcagacccgaggaccccguggagaucgcccuguaccagcccaugagcggcugcuacauccacuucuucagagagcccaccgaccugaagcaguucaagcaggacgccaaguacagccacggcaucgacguggccgaccuguuccccgcccagcccggccugaccagcgccgugaucgaggcccugcccagaaacauggugcugaccugccagggcagcgacgacaucaagagacugcuggacagccagggcagaagagacaucaagcugaucgacaucgcccugagcaaggccgacagcagaaaguucgagaacgccgugugggaccagugcaaggaccugugccacaugcacaccggcguggugguggagaagaagaagagaggcggcaaggaggagaucaccccccacugcgcccugauggacugcaucauguacgacgccgccgugagcggcggccugaacauccccgugcugagagccgugcugcccagagacaugguguucagaaccagcagccccaagguggugcugugaggacuaguaauaaggaaacuguaugaaugucugugggcaggaagugaagagauccuucuguaaagguuuuuggaauuaugucugcugaauaauaaacuuuuuugaaauaauaaaucugguagaaaaaugagaucuaaaaaaaaaaaaaaaaaaaaaaaaaaaaaaaaaaaaaaaaaaaaaaaaaaaaaaaaaaaaaaaaaaaaaaaaaaaaaaaaaaaaaaaaaaaaaaaaaaaa

SEQ ID NO: 17612 - RNA, 2022 nt, Artificial Sequence
  mRNA product Design b-4 (A100) comprising derived and/or modified sequence from LASV(LASV237-NIG-2010;Clade II)__AIT17639__NP (opt4)
aggagagucccgcagucggcguccagcggcucugcuuguucgugugugugucguugcaggccuuauucaagcuuaccaugagcgccagcaaggaggugaagagcuuccuguggacccagagccugagaagagagcugagcggcuacugcagcaacaucaagcugcagguggugaaggacgcccaggcccugcugcacggccuggacuucagcgaggugagcaacgugcagagacugaugagaaagcagaagagagacgacagcgaccugaagagacugagagaccugaaccaggccgugaacaaccugguggagcugaagagcacccagcagaagagcauccugagagugggcacccugaccagcgacgaccugcugacccuggccgccgaccuggagaagcugaagagcaaggugaucagaaccgagagaccccugagcagcggcguguacaugggcaaccugagcacccagcagcuggagcagagaagagcccugcugaacaugaucggcauggugggcggcgcccagggcacccagcccggcagagacggcguggugagagugugggacgugaagaaccccgaccugcugaacaaccaguucggcaccaugcccagccugacccuggccugccugaccaagcagggccagguggaccugaacgacgccgugcuggcccugaccgaccugggccugaucuacaccgccaaguaccccaacagcagcgaccuggacagacugagccagagccaccccauccugaacaugguggacaucaagaagagcagccugaacaucagcggcuacaacuucagccugggcgccgccgugaaggccggcgccugcaugcuggacggcggcaacaugcuggagaccaucaaggugaccccccagaccauggacggcauccugaagagcauccugaaggugaagagaagccugggcauguucgugagcgacacccccggcgagagaaaccccuacgagaacauccuguacaagaucugccugagcggcgacggcuggcccuacaucgccagcagaaccagcaucgugggcagagccugggagaacaccaccguggaccuggagagcgacggcaagccccagaaggugggcagcgccggcagcaacaagagccugcagagcgccggcuuccccaccggccugaccuacagccagcugaugacccugaaggacagcaugaugcagcuggaccccagcgccaagaccuggaucgacaucgagggcagacccgaggaccccguggagaucgcccuguaccagcccaugagcggcugcuacauccacuucuucagagagcccaccgaccugaagcaguucaagcaggacgccaaguacagccacggcaucgacguggccgaccuguuccccgcccagcccggccugaccagcgccgugaucgaggcccugcccagaaacauggugcugaccugccagggcagcgacgacaucaagagacugcuggacagccagggcagaagagacaucaagcugaucgacaucgcccugagcaaggccgacagcagaagauucgagaacgccgugugggaccagugcaaggaccugugccacaugcacaccggcguggugguggagaagaagaagagaggcggcaaggaggagaucaccccccacugcgcccugauggacugcaucauguacgacgccgccgugagcggcggccugaacauccccgugcugagagccgugcugcccagagacaugguguucagaaccagcagccccaagguggugcugugaggacuaguaauaaggaaacuguaugaaugucugugggcaggaagugaagagauccuucuguaaagguuuuuggaauuaugucugcugaauaauaaacuuuuuugaaauaauaaaucugguagaaaaaugagaucuaaaaaaaaaaaaaaaaaaaaaaaaaaaaaaaaaaaaaaaaaaaaaaaaaaaaaaaaaaaaaaaaaaaaaaaaaaaaaaaaaaaaaaaaaaaaaaaaaaaa

SEQ ID NO: 17613 - RNA, 2022 nt, Artificial Sequence
  mRNA product Design b-4 (A100) comprising derived and/or modified sequence from LASV(LASV253-NIG-2011;Clade II)__AIT17671__NP (opt4)
aggagagucccgcagucggcguccagcggcucugcuuguucgugugugugucguugcaggccuuauucaagcuuaccaugagcgccagcaaggaggugaagagcuuccuguggacccagagccugagaagagagcugagcggcuacugcagcagcaucaagcugcagguggugaaggacgcccaggcccugcugcacggccuggacuucagcgaggugagcaacgugcagagacugaugagaaagcagaagagagacgacagcgaccugaagagacugagagaccugaaccaggccgugaacaaccugguggagcugaagagcacccagcagaagagcgugcugagagugggcacccugaccagcgacgaccugcugacccuggccgccgaccuggagaagcugaagagcaaggugaucagaaccgagagaccccugagcagcggcguguacaugggcaaccugagcacccagcagcuggagcagagaagagcccugcugaacaugaucggcauggugggcggcgcccagggcacccagcccggcagagacggcguggugagagugugggacgugaagaaccccgaccugcugaacaaccaguucggcaccaugcccagccugacccuggccugccugaccaagcagggccagguggaccugaacgacguggugcuggcccugaccgaccugggccugaucuacaccgccaaguaccccaacagcagcgaccuggacagacugagccagagccaccccauccugaacaugguggacaccaagaagagcagccugaacaucagcggcuacaacuucagccugggcgccgccgugaaggccggcgccugcaugcuggacggcggcaacaugcuggagaccaucaaggugaccccccagaccauggacggcauccugaagagcauccugaaggugaagaagagccugggcauguucgugagcgacacccccggcgagagaaaccccuacgagaacauccuguacaagaucugccugagcggcgacggcuggcccuacaucgccagcagaaccagcaucgugggcagagccugggagaacaccaccguggaccuggagagcgacggcaagccccagaaggugggcaccgccggcagcaacaagagccugcagagcgccggcuuccccaccggccugaccuacagccagcugaugacccugaaggacagcaugaugcagcuggaccccagcgccaagaccuggaucgacaucgagggcagacccgaggaccccguggagaucgcccuguaccagcccaugagcggcugcuacauccacuucuucagagagcccaccgaccugaagcaguucaagcaggacgccaaguacagccacggcaucgacgugaccgaccuguuccccgcccagcccggccugaccagcgccgugaucgaggcccugcccagaaacauggugcugaccugccagggcagcgacgacaucaagagacugcuggacagccagggcagaagagacaucaagcugaucgacaucgcccugagcaaggccgacagcagaagauucgagaacgccgugugggaccagugcaaggaccugugccacaugcacaccggcguggugguggagaagaagaagagaggcggcaaggaggagaucaccccccacugcgcccugauggacugcaucauguacgacgccgccgugagcggcggccugaacauccccgugcugagagccgugcugcccagagacaugguguucagaaccagcagccccaagguggugcugugaggacuaguaauaaggaaacuguaugaaugucugugggcaggaagugaagagauccuucuguaaagguuuuuggaauuaugucugcugaauaauaaacuuuuuugaaauaauaaaucugguagaaaaaugagaucuaaaaaaaaaaaaaaaaaaaaaaaaaaaaaaaaaaaaaaaaaaaaaaaaaaaaaaaaaaaaaaaaaaaaaaaaaaaaaaaaaaaaaaaaaaaaaaaaaaaa

SEQ ID NO: 17614 - RNA, 2022 nt, Artificial Sequence
  mRNA product Design b-4 (A100) comprising derived and/or modified sequence from LASV(LASV254-NIG-2011;Clade II)__AIT17675__NP (opt4)
aggagagucccgcagucggcguccagcggcucugcuuguucgugugugugucguugcaggccuuauucaagcuuaccaugagcgccagcaaggaggugaagagcuuccuguggacccagagccugagaagagagcugagcggcuacugcagcagcaucaagcugcagguggugaaggacgcccaggcccugcugcacggccuggacuucagcgaggugagcaacgugcagagacugaugagaaagcagaagagagacgacagcgaccugaagagacugagagaccugaaccaggccgugaacaaccugguggagcugaagagcacccagcagaagagcgugcugagagugggcacccugaccagcgacgaccugcugacccuggccgccgaccuggagaagcugaagagcaaggugaucagaaccgagagaccccugagcagcggcguguacaugggcaaccugagcacccagcagcuggagcagagaagagcccugcugaacaugaucggcauggugggcggcgcccagggcacccagcccggcagagacggcguggugagagugugggacgugaagaaccccgaccugcugaacaaccaguucggcaccaugcccagccugacccuggccugccugaccaagcagggccagguggaccugaacgacgccgugcuggcccugaccgaccugggccugaucuacaccgccaaguaccccaacagcagcgaccuggacagacugagccagagccaccccauccugaacaugguggacaccaagaagagcagccugaacaucagcggcuacaacuucagccugggcgccgccgugaaggccggcgccugcaugcuggacggcggcaacaugcuggagaccaucaaggugaccccccagaccauggacggcauccugaagagcauccugaaggugaagaagagccugggcauguucgugagcgacacccccggcgagagaaaccccuacgagaacauccuguacaagaucugccugagcggcgacggcuggcccuacaucgccagcagaaccagcaucgugggcagagccugggagaacaccaucguggaccuggagagcgacggcaagccccagaaggugggcaccgccggcagcaacaagagccugcagagcgccggcuuccccaccggccugaccuacagccagcugaugacccugaaggacagcaugaugcagcuggaccccagcgccaagaccuggaucgacaucgagggcagacccgaggaccccguggagaucgcccuguaccagcccaugagcggcugcuacauccacuucuucagagagcccaccgaccugaagcaguucaagcaggacgccaaguacagccacggcaucgacguggccgaccuguuccccgcccagcccggccugaccagcgccgugaucgaggcccugcccagaaacauggugcugaccugccagggcagcgacgacaucaagagacugcuggacagccagggcagaagagacaucaagcugaucgacaucgcccugagcaaggccgacagcagaagauucgagaacgccgugugggaccagugcaaggaccugugccacaugcacaccggcguggugguggagaagaagaagagaggcggcaaggaggagaucaccccccacugcgcccugauggacugcaucauguacgacgccgccgugagcggcggccugaacauccccgugcugagagccgugcugcccagagacaugguguucagaaccagcagccccaagguggugcugugaggacuaguaauaaggaaacuguaugaaugucugugggcaggaagugaagagauccuucuguaaagguuuuuggaauuaugucugcugaauaauaaacuuuuuugaaauaauaaaucugguagaaaaaugagaucuaaaaaaaaaaaaaaaaaaaaaaaaaaaaaaaaaaaaaaaaaaaaaaaaaaaaaaaaaaaaaaaaaaaaaaaaaaaaaaaaaaaaaaaaaaaaaaaaaaaa

SEQ ID NO: 17615 - RNA, 2022 nt, Artificial Sequence
  mRNA product Design b-4 (A100) comprising derived and/or modified sequence from LASV(Nig08-04;Clade II)__ADU56611__NP (opt4)
aggagagucccgcagucggcguccagcggcucugcuuguucgugugugugucguugcaggccuuauucaagcuuaccaugagcgccagcaaggaggugaagagcuuccuguggacccagagccugagaagagagcugagcggcuacugcagcaacaucaagcugcagguggugaaggacgcccaggcccugcugcacggccuggacuucagcgaggugagcaacgugcagagacugaugagaaagcagaagagagacgacggcgaccugaagagacugagagaccugaaccaggccgugaacaaccugguggagcugaagagcacccagcagaagagcgugcugagagugggcacccugaccagcgacgaccugcugacccuggccgccgaccuggagaagcugaagagcaaggugaucagaaccgagagaccccugagcagcggcguguacaugggcaaccugagcacccagcagcuggagcagagaaaggcccugcugagcaugaucggcauggugggcggcgcccagggcacccagcccggcagagacggcguggugagagugugggacgugaagaaccccgaccugcugaacaaccaguucggcaccaugcccagccugacccuggccugccugaccaagcagggccagguggaccugaacgacgccgugcuggcccugaccgaccugggccugaucuacaccgccaaguaccccaacagcagcgaccuggacagacugagccagagccaccccauccugaacaugguggacaccaagaagagcagccugaacaucagcggcuacaacuucagccugggcgccgccgugaaggccggcgccugcaugcuggacggcggcaacaugcuggagaccaucaaggugaccccccagaccauggacggcauccugaagagcauccugaaggugaagagaagccugggcauguucgugagcgacacccccggcgagagaaaccccuacgagaacauccuguacaagaucugccugagcggcgacggcuggcccuacaucgccagcagaaccagcaucgugggcagagccugggagaacaccaccguggaccuggagagcgacggcaagccccagaaggugggcaccgccggcagcaacaagagccugcagagcgccggcuuccccaccggccugaccuacagccagcugaugacccugaaggacagcaugaugcagcuggaccccagcgccaagaccuggaucgacaucgagggcagacccgaggaccccguggagaucgcccuguaccagcccaugagcggcugcuacauccacuucuucagagagcccaccgaccugaagcaguucaagcaggacgccaaguacagccacggcaucgacgugaccgaccuguucagcgcccagcccggccugaccagcgccgugaucgaggcccugcccagaaacauggugcugaccugccagggcagcgacgacaucaagaagcugcuggacagccagggcagaagagacaucaagcugaucgacaucagccugaacaaggccgacagcagaagauucgagaacgccgugugggaccagugcaaggaccugugccacaugcacaccggcguggugguggagaagaagaagagaggcggcaaggaggagaucaccccccacugcgcccugauggacugcaucauguucgacgccgccgugagcggcggccugaacauccccauccugagagccgugcugcccagagacaugguguucagaaccagcagccccaagguggugcugugaggacuaguaauaaggaaacuguaugaaugucugugggcaggaagugaagagauccuucuguaaagguuuuuggaauuaugucugcugaauaauaaacuuuuuugaaauaauaaaucugguagaaaaaugagaucuaaaaaaaaaaaaaaaaaaaaaaaaaaaaaaaaaaaaaaaaaaaaaaaaaaaaaaaaaaaaaaaaaaaaaaaaaaaaaaaaaaaaaaaaaaaaaaaaaaaa

SEQ ID NO: 17616 - RNA, 2025 nt, Artificial Sequence
  mRNA product Design b-4 (A100) comprising derived and/or modified sequence from LASV(GA391;Clade III)__AAA46284__NP (opt4)
aggagagucccgcagucggcguccagcggcucugcuuguucgugugugugucguugcaggccuuauucaagcuuaccaugagcgccagcaaggaggugagaagcugccuguggacccagagccugagaagagagcugagcggcuacugcagcaacaucaagcugcagguggugaaggacgcccaggcccugcugcacggccuggacuucagcgaggugagcaacgugcagagacugaugagaaagcagaagagagacgacggcgaccugaagagacugagagaccugaaccaggccgugaacaaccugguggagcugaagagcacccagcagaagagcgugcugagagugggcacccugagcagcgacgaccugcugauccuggccgccgaccuggagaagcugaagagcaaggugaccagaaccgagagaccccugagcagcggcguguacaugggcaaccugagcagccagcagcuggaccagagaagagcccugcugaacaugaucggcaugaccggcgugagcggcggcggcaagggcgccagcaacggcaucgugagagugugggacgugaagaacgccgagcugcugaacaaccaguucggcaccaugcccagccugacccuggccugccugaccaagcagggccagguggaccugaacgacgccgugcaggcccugaccgaccugggccugaucuacaccgccaaguaccccaacagcagcgaccuggacagacugagccagagccaccccauccugaacaugaucgacaccaagaagagcagccugaacaucagcggcuacaacuucagccugggcgccgccgugaaggccggcgccugcaugcuggacggcggcaacaugcuggagaccaucaaggugagcccccagaccauggacggcauccugaagagcauccugaaggugaagaagagccugggcauguucgugagcgacacccccggcgagagaaaccccuacgagaacauccuguacaagaucugccugagcggcgacggcuggagcuacaucgccagcagaaccagcaucgugggcagagccugggagaacaccgugguggaccuggagcaggacaacaagccccagaagaucggcaacggcggcagcaacaagagccugcagagcgccggcuucgccgccggccugaucuacagccagcugaugacccugaaggacuucaagugcuucaaccugauccccaacgccaagaccuggauggacaucgagggcagacccgaggaccccguggagaucgcccuguaccagcccagcagcggcugcuacgugcacuucuucagagagcccaccgaccugaagcaguucaagcaggacgccaaguacagccacggcagagacgugaccgaccuguucgccgcccagcccggccugaccagcgccgugaucgaggcccugcccagaaacauggugaucaccugccagggcagcgaggacaucagaaagcugcuggagagccagggcagaagagacaucaagcugaucgacaucacccugagcaaggccgacagcagaaaguucgagaacgccgugugggaccaguucaaggaccugugccacaugcacaccggcguggugguggagaagaagaagagaggcggcaaggaggagaucaccccccacugcgcccugauggacugcaucauguucgacgccgccgugagcggcggccuggacgccaaggugcugagaguggugcugcccagagacaugguguucagaaccagcacccccaagguggugcugugaggacuaguaauaaggaaacuguaugaaugucugugggcaggaagugaagagauccuucuguaaagguuuuuggaauuaugucugcugaauaauaaacuuuuuugaaauaauaaaucugguagaaaaaugagaucuaaaaaaaaaaaaaaaaaaaaaaaaaaaaaaaaaaaaaaaaaaaaaaaaaaaaaaaaaaaaaaaaaaaaaaaaaaaaaaaaaaaaaaaaaaaaaaaaaaaa

SEQ ID NO: 17617 - RNA, 2022 nt, Artificial Sequence
  mRNA product Design b-4 (A100) comprising derived and/or modified sequence from LASV(Nig08-A19;Clade III)__ADU56619__NP (opt4)
aggagagucccgcagucggcguccagcggcucugcuuguucgugugugugucguugcaggccuuauucaagcuuaccaugagcgccagcaaggaggugaagagcuuccuguggacccagagccugagaagagagcugagcggcuacugcagcaacaucaagcugcagguggugaaggacgcccaggcccugcugcacggccuggacuucagcgaggugagcaacgugcagagacugaugagaaagcagaagagagacgacggcgaccugaagagacugagagaccugaaccaggccgugaacaaccugguggagcugaagagcacccagcagaagagcgugcugagagugggcacccugagcagcgacgaccugcuggugcuggccgccgaccuggagaagcugaagagcaagguggugagaaccgagagaccccugagcagcggcaucuacaugggcaaccugagcagccagcagcuggaccagagaaaggcccugcugaacaugaucggcaugaccggcggcaacggcggcagaaacaccaccagcgacggcaucgugagagugugggacgugaagaacgccgagcugcugaacaaccaguucggcaccaugcccagccugacccuggccugccugaccaagcagggccagguggaccugaacgacgccgugcaggcccugaccgaccugggccugaucuacaccgccaaguaccccaacagcagcgaccuggacagacuggcccagagccaccccauccugaacaugaucgacaccaagaagagcagccugaacaucagcggcuacaacuucagccugggcgccgccgugaaggccggcgccugcaugcuggacggcggcaacaugcuggagaccaucaaggugagcccccagaccauggacggcauccugaagagcauccugaaggugaagagaagccugggcauguucaucagcgacacccccggcgagagaaaccccuacgagaacauccuguacaagaucugccugagcggcgacggcuggcccuacaucgccagcagaaccagcaucgugggcagagccugggagaacaccgugguggaccuggagagcgacaacaagccccagaagaccggcaacggcggcagcaacaagagccugcagagcgccggcuucgccgccggccugaccuacagccagcugaugacccugaaggacagcaugcugcagcuggaccccaacgccaagaccuggauggacaucgagggcagacccgaggaccccguggagaucgcccuguaccagcccagcagcggcugcuacauccacuucuucagagagcccaccgaccugaagcaguucaagcaggacgccaaguacagccacggcaucgacgugaccgaccuguucgccgcccagcccggccugaccagcgccgugaucgaggcccugcccagaaacauggugaucaccugccagggcagcgaggacaucagaaagcugcuggagagccagggcagaagagacaucaagcugaucgacaucagccugagcaagguggacagcagaaaguucgagaacgccgugugggaccaguucaaggaccugugccacaugcacaccggcaucgugguggagaagaagaagagaggcggcaaggaggagaucaccccccacugcgcccugauggacugcaucauguucgacgccgccgugagcggcggcguggacgccaaggugcugagagccgugcugcccagagacaugguguucagaaccagcacccccaagguggugcugugaggacuaguaauaaggaaacuguaugaaugucugugggcaggaagugaagagauccuucuguaaagguuuuuggaauuaugucugcugaauaauaaacuuuuuugaaauaauaaaucugguagaaaaaugagaucuaaaaaaaaaaaaaaaaaaaaaaaaaaaaaaaaaaaaaaaaaaaaaaaaaaaaaaaaaaaaaaaaaaaaaaaaaaaaaaaaaaaaaaaaaaaaaaaaaaaa

SEQ ID NO: 17618 - RNA, 2022 nt, Artificial Sequence
  mRNA product Design b-4 (A100) comprising derived and/or modified sequence from LASV(G1180-SLE-2010;Clade IV)__AIT17169__NP (opt4)
aggagagucccgcagucggcguccagcggcucugcuuguucgugugugugucguugcaggccuuauucaagcuuaccaugagcgccagcaaggagaucaagagcuuccuguggacccagagccugagaagagagcugagcggcuacugcagcaacaucaagcugcagguggugaaggacgcccaggcccugcugcacggccuggacuucagcgaggugagcaacgugcagagacugaugagaaaggagagaagagacgacaacgaccugaagagacugagagaccugaaccaggccgugaacaaccugguggagcugaagagcacccagcagaagagcauccugagagugggcacccugaccagcgacgaccugcugauccuggccgccgaccuggagaagcugaagagcaaggugaucagaaccgagagaccccugagcgccggcguguacaugggcaaccugagcagccagcagcuggaccagagaagagcccugcugagcaugaucggcaugagcagcggcaaccagagagcccaggccggcagagacggcguggugagagugugggacgugaagaacguggagcugcugaacaaccaguucggcaccaugcccagccugacccuggccugccugaccaagcagggccagguggaccugaacgacgccgugcaggcccugaccgaccugggccugaucuacaccgccaaguaccccaacaccagcgaccuggacagacugacccagagccaccccauccugaacaugaucgacaccaagaagagcagccugaacaucagcggcuacaacuucagccugggcgccgccgugaaggccggcgccugcaugcuggacggcggcaacaugcuggagaccaucaaggugagcccccagaccauggacggcauccugaagagcauccugaaggugaagaaggcccugggcauguucaucagcgacacccccggcgagagaaaccccuacgagaacauccuguacaagaucugccugagcggcgacggcuggcccuacaucgccagcagaaccagcaucaccggcagagccugggagaacaccgugguggaccuggagagcgacggcaagccccagaaggccggcagcaacaacagcaacaagagccugcagagcgugggcuucaccgccggccugaccuacagccagcugaugacccugaaggacgccaugcugcagcuggaccccaacgccaagaccuggauggacaucgagggcagacccgaggaccccguggagaucgcccuguaccagcccagcagcggcugcuacauccacuucuucagagagcccaccgaccugaagcaguucaagcaggacgccaaguacagccacggcaucgacgugaccgaccuguucgccgcccagcccggccugaccagcgccgugaucgacgcccugcccagaaacauggugaucaccugccagggcagcgacgacaucagaaagcugcuggagagccagggcagaaaggacaucaagcugaucgacaucgcccugagcaagaccgacagcagaaaguacgagaacgccgugugggaccaguacaaggaccugugccacaugcacaccggcguggugguggagaagaagaagagaggcggcaaggaggagaucaccccccacugcgcccugauggacugcaucauguucgacgccgccgugagcggcggccugaacaccagcgugcugagagccgugcugcccagagacaugguguucagaaccagcacccccagaguggugcugugaggacuaguaauaaggaaacuguaugaaugucugugggcaggaagugaagagauccuucuguaaagguuuuuggaauuaugucugcugaauaauaaacuuuuuugaaauaauaaaucugguagaaaaaugagaucuaaaaaaaaaaaaaaaaaaaaaaaaaaaaaaaaaaaaaaaaaaaaaaaaaaaaaaaaaaaaaaaaaaaaaaaaaaaaaaaaaaaaaaaaaaaaaaaaaaaa

SEQ ID NO: 17619 - RNA, 2022 nt, Artificial Sequence
  mRNA product Design b-4 (A100) comprising derived and/or modified sequence from LASV(G1442-SLE-2011;Clade IV)__AIT17181__NP (opt4)
aggagagucccgcagucggcguccagcggcucugcuuguucgugugugugucguugcaggccuuauucaagcuuaccaugagcgccagcaaggaggugaagagcuuccuguggacccagagccugagaagagagcugagcggcuacugcagcaacaucaagcugcagguggugaaggacgcccaggcccugcugcacggccuggacuucagcgaggugagcaacgugcagagacugaugagaaagcagagaagagacgacaacgaccugaagagacugagagaccugaaccaggccgugaacaaccugguggagcugaagagcacccagcagaagagcgugcugagagugggcacccugaccagcgacgaccugcuggugcuggccgccgaccuggagaagcugaagagcaaggugaucagaaccgagagaccccugagcgccggcguguacaugggcaaccugagcagccagcagcuggaccagagaagagcccugcugaacaugaucggcaugagcggcggcauccagggcaccagaaccggcagagacggcguggugagagugugggacgugaagaacgccgaccugcugaacaaccaguucggcaccaugcccagccugacccuggccugccugaccaagcagggccagguggaccugaacgacguggugcaggcccugaccgaccugggccugaucuacaccgccaaguaccccaacgccagcgaccuggacagacugacccagagccaccccauccugaacaugaucgacaccaagaagagcagccugaacaucagcggcuacaacuucagccugggcgccgccgugaaggccggcgccugcaugcuggacggcggcaacaugcuggagaccaucaaggugagcccccagaccauggacggcauccugaagagcauccugaaggugaagaagacccugggcauguucaucagcgacacccccggcgagagaaaccccuacgagaacauccuguacaagaucugccugagcggcgacggcuggcccuacaucgccagcagaaccagcaucaccggcagagccugggagaacaccgugguggaccuggagagcgacggcaagccccagaaggccggcagcaacaacagcaacaagagccugcagagcgccggcuucgccgccggccugaccuacagccagcugaugacccugaaggacgccaugcugcagcuggaccccaacgccaagaccuggauggacaucgagggcagacccgaggaccccguggagaucgcccuguaccagcccagcagcggcugcuacauccacuucuucagagagcccaccgaccugaagcaguucaagcaggacgccaaguacagccacggcaucgacgugaccgaccuguucgccgcccagcccggccugaccagcgccgugaucgaggcccugcccagaaacauggugaucaccugccagggcagcgacgacaucaagaagcugcuggagagccagggcagaaaggacaucaagcugaucgacaucgcccugagcaagaccgacagcagaaaguacgagaacgccgugugggaccaguacaaggaccugugccacaugcacaccggcguggugguggagaagaagaagagaggcggcaaggaggagaucaccccccacugcgcccugauggacugcaucauguucgacgccgccgugagcggcggccugaacacccuggugcugagagccgugcugcccagagacaugguguucagaaccagcacccccagaguggugcugugaggacuaguaauaaggaaacuguaugaaugucugugggcaggaagugaagagauccuucuguaaagguuuuuggaauuaugucugcugaauaauaaacuuuuuugaaauaauaaaucugguagaaaaaugagaucuaaaaaaaaaaaaaaaaaaaaaaaaaaaaaaaaaaaaaaaaaaaaaaaaaaaaaaaaaaaaaaaaaaaaaaaaaaaaaaaaaaaaaaaaaaaaaaaaaaaa

SEQ ID NO: 17620 - RNA, 2022 nt, Artificial Sequence
  mRNA product Design b-4 (A100) comprising derived and/or modified sequence from LASV(G3010-SLE-2013;Clade IV)__AIT17345__NP (opt4)
aggagagucccgcagucggcguccagcggcucugcuuguucgugugugugucguugcaggccuuauucaagcuuaccaugagcgccagcaaggagaucaagagcuuccuguggacccagagccugagaagagagcugagcggcuacugcagcaacaucaagcugcagguggugaaggacgcccaggcccugcugcacggccuggacuucagcgaggugagcaacgugcagagacugaugagaaaggagagaagagacgacaacgaccugaagagacugagagaccugaaccaggccgugaacaaccugguggagcugaagagcacccagcagaagagcauccugagagugggcacccugaccagcgacgaccugcugauccuggccgccgaccuggagaagcugaagagcaaggugaccagaaccgagagaccccugagcgccggcguguacaugggcaaccugagcagccagcagcuggaccagagaagagcccugcugagcaugaucggcaugagcagcggcgugcagggcgccagagccggcagagacggcguggugagagugugggacgugaagaacgccgagcugcugaacaaccaguucggcaccaugcccagccugacccuggccugccugaccaagcagggccagguggaccugaacgacguggugcaggcccugaccgaccugggccugaucuacaccgccaaguaccccaacaccagcgaccuggacagacugacccagagccaccccauccugaacaugaucgacaccaagaagagcagccugaacaucagcggcuacaacuucagccugggcgccgccgugaaggccggcgccugcaugcuggacggcggcaacaugcuggagaccaucaaggugagcccccagaccauggacggcauccugaagagcauccugaaggugaagaaggcccugggcauguucaucagcgagacccccggcgagagaaaccccuacgagaacauccuguacaagaucugccugagcggcgacggcuggcccuacaucgccagcagaaccagcaucaccggcagagccugggagaacaccgugguggaccuggagagcgacggcaagccccagaaggccggcagcaacaacagcaacaagagccugcagagcgccggcuucaccgccggccugaccuacagccagcugaugacccugaaggacgccaugcugcagcuggaccccaacgccaagaccuggauggacaucgagggcagacccgaggaccccguggagguggcccuguaccagcccagcagcggcugcuacauccacuucuucagagagcccaccgaccugaagcaguucaagcaggacgccaaguacagccacggcaucgacgugaccgaccuguucgccgcccagcccggccugaccagcgccgugaucgacgcccugcccagaaacauggugaucaccugccagggcagcgacgacaucaagaagcugcuggagagccagggcagaaaggacaucaagcugaucgacaucgcccugagcaagaccgacagcagaaaguacgagaacgccgugugggaccaguacaaggaccugugccacaugcacaccggcguggugguggagaagaagaagagaggcggcaaggaggagaucaccccccacugcgcccugauggacugcaucauguucgacgccgccgugagcggcggccugaacaccagcgugcugagagccgugcugcccagagacaugguguucagaaccagcacccccagaguggugcugugaggacuaguaauaaggaaacuguaugaaugucugugggcaggaagugaagagauccuucuguaaagguuuuuggaauuaugucugcugaauaauaaacuuuuuugaaauaauaaaucugguagaaaaaugagaucuaaaaaaaaaaaaaaaaaaaaaaaaaaaaaaaaaaaaaaaaaaaaaaaaaaaaaaaaaaaaaaaaaaaaaaaaaaaaaaaaaaaaaaaaaaaaaaaaaaaa

SEQ ID NO: 17621 - RNA, 2022 nt, Artificial Sequence
  mRNA product Design b-4 (A100) comprising derived and/or modified sequence from LASV(G502-SLE-2009;Clade IV)__AIT17127__NP (opt4)
aggagagucccgcagucggcguccagcggcucugcuuguucgugugugugucguugcaggccuuauucaagcuuaccaugagcgccagcaaggagaucaagagcuuccuguggacccagagccugagaagagagcugagcggcuacugcagcaacaucaagcugcagguggugaaggacgcccaggcccugcugcacggccuggacuucagcgaggugagcaacgugcagagacugaugagaaaggagagaagagacgacaacgaccugaagagacugagagaccugaaccaggccgugaacaaccugguggagcugaagagcacccagcagaagagcauccugagagugggcacccugaccagcgacgaccugcugauccuggccgccgaccuggagaagcugaagagcaaggugaucagaaccgagagaccccugagcgccggcguguacaugggcaaccugagcagccagcagcuggaccagagaagagcccugcugagcaugaucggcaugagcggcggcaaccagggcgugagagccggcaaggacggcguggugagagugugggacgugaagaacgccgagcugcugaacaaccaguucggcaccaugcccagccugacccuggccugccugaccaagcagggccagguggaccugaacgacgccgugcaggcccugaccgaccugggccugaucuacaccgccaaguaccccaacaccagcgaccuggacagacugacccagagccaccccauccugaacaugaucgacaccaagaagagcagccugaacaucagcggcuacaacuucagccugggcgccgccgugaaggccggcgccugcaugcuggacggcggcaacaugcuggagaccaucaaggugagcccccagaccauggacggcauccugaagagcauccugaaggugaagaaggcccugggcauguucaucagcgacacccccggcgagagaaaccccuacgagaacauccuguacaagaucugccugagcggcgacggcuggcccuacaucgccagcagaaccagcaucaccggcagagccugggagaacaccgugguggaccuggagagcgacggcaagccccagaaggccggcagcaacaacagcaacaagagccugcagagcgccggcuucaccgccggccugaccuacagccagcugaugacccugaaggacgccaugcugcagcuggaccccaacaccaagaccuggauggacaucgagggcagacccgaggaccccguggagaucgcccuguaccagcccagcagcggcugcuacauccacuucuucagagagcccaccgaccugaagcaguucaagcaggacgccaaguacagccacggcaucgacgugaccgaccuguucgccgcccagcccggccugaccagcgccgugaucgacgcccugcccagaaacauggugaucaccugccagggcagcgacgacaucagaaagcugcuggagagccagggcagaaaggacaucaagcugaucgacaucgcccugaacaagaccgacagcagaaaguacgagaacgccgugugggaccaguacaaggaccugugccacaugcacaccggcguggugguggagaagaagaagagaggcggcaaggaggagaucaccccccacugcgcccugauggacugcaucauguucgacgccgccgugagcggcggccugaacaccagcgugcugagagccgugcugcccagagacaugguguucagaaccagcacccccagaguggugcugugaggacuaguaauaaggaaacuguaugaaugucugugggcaggaagugaagagauccuucuguaaagguuuuuggaauuaugucugcugaauaauaaacuuuuuugaaauaauaaaucugguagaaaaaugagaucuaaaaaaaaaaaaaaaaaaaaaaaaaaaaaaaaaaaaaaaaaaaaaaaaaaaaaaaaaaaaaaaaaaaaaaaaaaaaaaaaaaaaaaaaaaaaaaaaaaaa

SEQ ID NO: 17622 - RNA, 2022 nt, Artificial Sequence
  mRNA product Design b-4 (A100) comprising derived and/or modified sequence from LASV(G733-SLE-2010;Clade IV)__AIT17155__NP (opt4)
aggagagucccgcagucggcguccagcggcucugcuuguucgugugugugucguugcaggccuuauucaagcuuaccaugagcgccagcaaggagaucaagagcuuccuguggacccagagccugagaagagagcugagcggcuacugcagcaacaucaagcugcagguggugaaggacgcccaggcccugcugcacggccuggacuucagcgaggugagcaacgugcagagacugaugagaaaggagagaagagacgacaacgaccugaagagacugagagaccugaaccaggccgugaacaaccugguggagcugaagagcacccagcagaagagcgugcugagagugggcacccugaccagcgacgagcugcuggugcuggccgccgaccuggagaagcugaagagcaaggugaucagaaccgagagaccccugagcgccggcguguacaugggcaaccugagcagccagcagcuggaccagagaagagcccugcugagcaugaucggcaugagcggcggcaaccagggcgccagaaccggcagagacggcguggugagagugugggacgugaagaacgccgagcugcugaacaaccaguucggcaccaugcccagccugacccuggccugccugaccaagcagggccagguggaccugaacgacgccgugcaggcccugaccgaccugggccugaucuacaccgccaaguaccccaacaccagcgaccuggacagacugacccagagccaccccauccugaacaugaucgacaccaagaagagcagccugaacaucagcggcuacaacuucagccugggcgccgccgugaaggccggcgccugcaugcuggacggcggcaacaugcuggagaccaucaaggugagcccccagaccauggacggcauccugaagagcauccugaaggugaagaaggcccugggcauguucaucagcgacacccccggcgagagaaaccccuacgagaacauccuguacaagaucugccugagcggcgacggcuggcccuacaucgccagcagaaccagcaucaccggcagagccugggagaacaccgugguggaccuggagagcgacggcaagccccagaaggccggcagcaacaacagcaacaagagccugcagagcgccggcuucaccgccggccugaccuacagccagcugaugacccugaaggacgccaugcugcagcuggaccccaacgccaagaccuggauggacaucgagggcagacccgaggaccccguggagaucgcccuguaccagcccagcagcggcugcuacauccacuucuucagagagcccaccgaccugaagcaguucaagcaggacgccaaguacagccacggcaucgacgugaccgaccuguucgccgcccagcccggccugaccagcgccgugaucgacgcccugcccagaaacauggugaucaccugccagggcagcgacgacaucagaaagcugcuggagagccagggcagaaaggacaucaagcugaucgacaucgcccugagcaagaucgacagcagaaaguacgagaacgccgugugggaccaguacaaggaccugugccacaugcacaccggcguggugguggagaagaagaagagaggcggcaaggaggagaucaccccccacugcgcccugauggacugcaucauguucgacgccgccgugagcggcggccugaacagccuggugcugagagccgugcugcccagagacaugguguucagaaccagcacccccagaguggugcugugaggacuaguaauaaggaaacuguaugaaugucugugggcaggaagugaagagauccuucuguaaagguuuuuggaauuaugucugcugaauaauaaacuuuuuugaaauaauaaaucugguagaaaaaugagaucuaaaaaaaaaaaaaaaaaaaaaaaaaaaaaaaaaaaaaaaaaaaaaaaaaaaaaaaaaaaaaaaaaaaaaaaaaaaaaaaaaaaaaaaaaaaaaaaaaaaa

SEQ ID NO: 17623 - RNA, 2022 nt, Artificial Sequence
  mRNA product Design b-4 (A100) comprising derived and/or modified sequence from MOPV/LASV reassortant(IGS-1;Clade IV)__AFY05578__NP (opt4)
aggagagucccgcagucggcguccagcggcucugcuuguucgugugugugucguugcaggccuuauucaagcuuaccaugagcgccagcaaggagaucaagagcuuccuguggacccagagccugagaagagagcugagcggcuacugcagcaacaucaagcugcagguggugaaggacgcccaggcccugcugcacggccuggacuucagcgaggugagcaacgugcagagacugaugagaaaggagagaagagacgacaacgaccugaagagacugagagaccugaaccaggccgugaacaaccugguggagcugaagagcacccagcagaagagcauccugagagugggcacccugaccagcgacgaccugcugauccuggccgccgaccuggagaagcugagaagcaaggugaucagaaccgagagaccccugagcgccggcguguacaugggcaaccugagcagccagcagcuggaccagagaagagcccugcugaacaugaucggcaugagcggcggcaaccagggcgccagagccggcagagacggcguggugagagugugggacgugaagaacgccgagcugcugagcaaccaguucggcaccaugcccagccugacccuggccugccugaccaagcagggccagguggaccugaacgacgccgugcaggcccugaccgaccugggccugaucuacaccgccaaguaccccaacaccagcgaccuggacagacugacccagagccaccccauccugaacaugaucgacaccaagaagagcagccugaacaucagcggcuacaacuucagccugggcgccgccgugaaggccggcgccugcaugcuggacggcggcaacaugcuggagaccaucaaggugagcccccagaccauggacggcauccugaagagcauccugaaggugaagaaggcccugggcauguucaucagcgacacccccggcgagagaaaccccuacgagaacauccuguacaagaucugccugagcggcgacggcuggcccuacaucgccagcagaaccagcaucaccggcagagccugggagaacaccgugguggaccuggagagcgacggcaagccccagaaggccgacagcaacaacagcagcaagagccugcagagcgccggcuucaccgccggccugaccuacagccagcugaugacccugaaggacgccaugcugcagcuggaccccaacgccaagaccuggauggacaucgagggcagacccgaggaccccguggagaucgcccuguaccagcccagcagcggcugcuacauccacuucuucagagagcccaccgaccugaagcaguucaagcaggacgccaaguacagccacggcaucgacgugaccgaccuguucgccacccagcccggccugaccagcgccgugaucgacgcccugcccagaaacauggugaucaccugccagggcagcgacgacaucagaaagcugcuggagagccagggcagaaaggacaucaagcugaucgacaucgaccugagcaagaccgacagcagaaaguacgagaacgccgugugggaccaguacaaggaccugugccacaugcacaccggcguggugguggagaagaagaagagaggcggcaaggaggagaucaccccccacugcgcccugauggacugcaucauguucgacgccgccgugagcggcggccugaacaccagcgugcugagagccgugcugcccagagacaugguguucagaaccagcacccccagaguggugcugugaggacuaguaauaaggaaacuguaugaaugucugugggcaggaagugaagagauccuucuguaaagguuuuuggaauuaugucugcugaauaauaaacuuuuuugaaauaauaaaucugguagaaaaaugagaucuaaaaaaaaaaaaaaaaaaaaaaaaaaaaaaaaaaaaaaaaaaaaaaaaaaaaaaaaaaaaaaaaaaaaaaaaaaaaaaaaaaaaaaaaaaaaaaaaaaaa

SEQ ID NO: 17624 - RNA, 2022 nt, Artificial Sequence
  mRNA product Design b-4 (A100) comprising derived and/or modified sequence from LASV(LM765-SLE-2012;Clade IV)__AIT17815__NP (opt4)
aggagagucccgcagucggcguccagcggcucugcuuguucgugugugugucguugcaggccuuauucaagcuuaccaugagcgccagcaaggagaucaagagcuuccuguggacccagagccugagaagagagcugagcggcuacugcagcaacaucaagcugcagguggugaaggacgcccaggcccugcugcacggccuggacuucagcgaggugagcaacgugcagagacugaugagaaaggagagaagagacgacaacgaccugaagagacugagagaccugaaccaggccgugaacaaccugguggagcugaagagcacccagcagaagagcauccugagagugggcacccugaccagcgacgaccugcugauccuggccgccgaccuggagaagcugaagagcaaggugaccagaaccgagagaccccugagcgccggcguguacaugggcaaccugagcagccagcagcuggaccagagaagagcccugcuggacaugaucggcaugagcggcagcaaccagggcgccagagccggcagagacggcguggugagagugugggacgugaagaacgccgagcugcugaacaaccaguucggcaccaugcccagccugacccuggccugccugaccaagcagggccagguggaccugaacgacgccgugcaggcccugaccgaccugggccugaucuacaccgccaaguaccccaacaccagcgaccuggacagacugacccagagccaccccauccugaacaugaucgacaccaagaagagcagccugaacaucagcggcuacaacuucagccugggcgccgccgugaaggccggcgccugcaugcuggacggcggcaacaugcuggagaccaucaaggugagcccccagaccauggacggcauccugaagagcauccugaaggugaagaaggcccugggcauguucaucagcgacgcccccggcgagagaaaccccuacgagaacauccuguacaagaucugccugagcggcgacggcuggcccuacaucgccagcagaaccagcaucaccggcagagccugggagaacaccgugguggaccuggagagcgacggcaagccccagaaggccggcagcaacggcagcaacaagagccugcagagcgccggcuucaccgccggccugaccuacagccagcugaugacccugaaggacgccaugcugcagcuggaccccaacgccaagaccuggauggacaucgagggcagacccgaggaccccguggagaucgcccuguaccagcccagcagcggcugcuacauccacuucuucagagagcccaccgaccugaagcaguucaagcaggacgccaaguacagccacggcaucgacgugaccgaccuguucgccgcccagcccggccugaccagcgccgugaucgacgcccugcccagaaacauggugaucaccugccagggcagcgacgacaucagaaagcuguucgagagccagggcagaaaggacaucaagcugaucgacaucgcccugagcaagaccgacagcagaaaguacgagaacgccgugugggaccaguacaaggaccugugccacaugcacaccggcaucgugguggagaagaagaagagaggcggcaaggaggagaucaccccccacugcgcccugauggacugcaucauguucgacgccgccgugagcggcggccugaacaccagcgugcugagagccgugcugcccagagacaugguguucagaaccagcacccccagaguggugcugugaggacuaguaauaaggaaacuguaugaaugucugugggcaggaagugaagagauccuucuguaaagguuuuuggaauuaugucugcugaauaauaaacuuuuuugaaauaauaaaucugguagaaaaaugagaucuaaaaaaaaaaaaaaaaaaaaaaaaaaaaaaaaaaaaaaaaaaaaaaaaaaaaaaaaaaaaaaaaaaaaaaaaaaaaaaaaaaaaaaaaaaaaaaaaaaaa

SEQ ID NO: 17625 - RNA, 2022 nt, Artificial Sequence
  mRNA product Design b-4 (A100) comprising derived and/or modified sequence from LASV(LM776-SLE-2012;Clade IV)__AIT17825__NP (opt4)
aggagagucccgcagucggcguccagcggcucugcuuguucgugugugugucguugcaggccuuauucaagcuuaccaugagcgccagcaaggagaucaagagcuuccuguggacccagagccugagaagagagcugagcagcuacugcagcaacaucaagcugcagguggugaaggacgcccaggcccugcugcacggccuggacuucagcgaggugagcaacgugcagagacugaugagaaaggagagaagagacgacaacgaccugaagagacugagagaccugaaccaggccgugaacaaccugguggagcugaagagcacccagcagaagagcauccugagagugggcacccugaccagcgacgaccugcugauccuggccgccgaccuggagaagcugaagagcaaggugaccagaaccgagagaccccugagcgccggcguguacaugggcaaccugagcagccagcagcuggaccagagaagagcccugcugagcaugaucggcaugagcggcagcaaccagggcgccagagccggcagagacggcguggugagagugugggacgugaagaacgccgagcugcugaacaaccaguucggcaccaugcccagccugacccuggccugccugaccaagcagggccagguggaccugaacgacgccgugcaggcccugaccgaccugggccugaucuacaccgccaaguaccccaacaccagcgaccuggacagacugacccagagccaccccauccugaacaugaucgacaccaagaagagcagccugaacaucagcggcuacaacuucagccugggcgccgccgugaaggccggcgccugcaugcuggacggcggcaacaugcuggagaccaucaaggugagcccccagaccauggacggcauccugaagagcauccugaaggugaagaaggcccugggcauguucaucagcgacacccccggcgagagaaaccccuacgagaacauccuguacaagaucugccugagcggcgacggcuggcccuacaucgccagcagaaccagcaucaccggcagagccugggagaacaccgugguggaccuggagagcgacggcaagccccagaaggccggcagcaacaacagcaacaagagccugcagagcgccggcuucaccgccggccugaccuacagccagcugaugacccugaaggacgccaugcugcagcuggaccccaacgccaagaccuggauggacaucgagggcagacccgaggaccccguggagguggcccuguaccagcccagcagcggcugcuacauccacuucuucagagagcccaccgaccugaagcaguucaagcaggacgccaaguacagccacggcaucgacgugaccgaccuguucgccgcccagcccggccugaccagcgccgugaucgacgcccugcccagaaacauggugaucaccugccagggcagcgacgacaucagaaagcugcuggagagccagggcagaaaggacaucaagcugaucgacaucgcccugagcaagaccgacagcagaaaguacgagaacgccgugugggaccaguacaaggaccugugccacaugcacaccggcguggugguggagaagaagaagagaggcggcaaggaggagaucaccccccacugcgcccugauggacugcaucauguucgacgccgccgugagcggcggccugaacaccagcgugcugagagccgugcugcccagagacaugguguucagaaccagcacccccagaguggugcugugaggacuaguaauaaggaaacuguaugaaugucugugggcaggaagugaagagauccuucuguaaagguuuuuggaauuaugucugcugaauaauaaacuuuuuugaaauaauaaaucugguagaaaaaugagaucuaaaaaaaaaaaaaaaaaaaaaaaaaaaaaaaaaaaaaaaaaaaaaaaaaaaaaaaaaaaaaaaaaaaaaaaaaaaaaaaaaaaaaaaaaaaaaaaaaaaa

SEQ ID NO: 17626 - RNA, 2022 nt, Artificial Sequence
  mRNA product Design b-4 (A100) comprising derived and/or modified sequence from LASV(Mad39;Clade IV)__ANH09723__NP (opt4)
aggagagucccgcagucggcguccagcggcucugcuuguucgugugugugucguugcaggccuuauucaagcuuaccaugagcgccagcaaggagaucaagagcuuccuguggacccagagccugagaagagagcugagcggcuacugcagcaacaucaagcugcagguggugaaggacgcccaggcccugcugcacggccuggacuucagcgaggugagcaacgugcagagacugaugagaaagcagagaagagacgacaacgaccugaagagacugagagaccugaaccaggccgugaacaaccugguggagcugaagagcacccagcagaagagcgugcugagagugggcacccugaccagcgacgaccugcugacccuggccgccgaccuggagaagcugaagagcaaggugaccagaaccgagagaccccugaccgccggcguguacaugggcaaccugagcagccagcagcuggaccagagaagagcccugcugaacaugaucggcaugagcggcggcaaccagggcgccagaaccggcagagacggcguggugagagugugggacgugaagaacgccgagcugcugaacaaccaguucggcaccaugcccagccugacccuggccugccugaccaagcagggccagguggaccugaacgacguggugcaggcccugaccgaccugggccugaucuacaccgccaaguaccccaacaccagcgaccuggacagacugacccagagccaccccauccugaacaugaucgacaccaacaagagcagccugaacaucagcggcuacaacuucagccugggcgccgccgugaaggccggcgccugcaugcuggacggcggcaacaugcuggagaccaucaaggugagcccccagaccauggacggcauccugaagagcauccugaaggugaagaagagccugggcauguucaucagcgacacccccggcgagagaaaccccuacgagaacauccuguacaagaucugccugagcggcgacggcuggcccuacaucgccagcagaaccagcaucaccggcagagccugggagaacaccgugguggaccuggagagcggcggcaagccccagaaggccggcagcaacaacagcaacaagagccugcagagcgccggcuucgccgccggccugaccuacagccagcugaugacccugaaggacgccaugcugcagcuggaccccaacgccaagaccuggauggacaucgagggcagacccgaggaccccguggagaucgcccuguaccagcccaucagcggcugcuacauccacuucuucagagagcccaccgaccugaagcaguucaagcaggacgccaaguacagccacggcaucgacgugaccgaccuguucgccgcccagcccggccugaccagcgccgugaucgaggcccugcccagaaacauggugaucaccugccagggcagcgacgacaucagaaagcuguucgagagccagggcagaaaggacaucaagcugaucgacaucgcccugagcaagaccgacagcagaaaguacgagaacgccgugugggaccaguacaaggaccugugccacaugcacaccggcguggugguggagaagaagaagaagggcggcaaggaggagaucaccccccacugcgcccugauggacugcaucauguucgacgccgccgugagcggcggccugaacacccuggugcugagagccgugcugcccagagacaugguguucagaaccagcacccccaagguggugcugugaggacuaguaauaaggaaacuguaugaaugucugugggcaggaagugaagagauccuucuguaaagguuuuuggaauuaugucugcugaauaauaaacuuuuuugaaauaauaaaucugguagaaaaaugagaucuaaaaaaaaaaaaaaaaaaaaaaaaaaaaaaaaaaaaaaaaaaaaaaaaaaaaaaaaaaaaaaaaaaaaaaaaaaaaaaaaaaaaaaaaaaaaaaaaaaaa

SEQ ID NO: 17627 - RNA, 2022 nt, Artificial Sequence
  mRNA product Design b-4 (A100) comprising derived and/or modified sequence from LASV(Z0947-SLE-2011;Clade IV)__AIT17841__NP (opt4)
aggagagucccgcagucggcguccagcggcucugcuuguucgugugugugucguugcaggccuuauucaagcuuaccaugagcgccagcaaggagaucaagagcuuccuguggacccagagccugagaagagagcugagcggcuacugcagcaacaucaagcugcagguggugaaggacgcccaggcccugcugcacggccuggacuucagcgaggugagcaacgugcagagacugaugagaaaggagagaagagacgacaacgaccugaagagacugagagaccugaaccaggccgugaacaaccugguggagcugaagagcacccagcagaagagcauccugagagugggcacccugaccagcgacgaccugcugauccuggccgccgaccuggagaagcugaagagcaaggugaccagaaccgagagaccccugagcgccggcguguacaugggcaaccugagcagccagcagcuggaccagagaagagcccugcugaacaugaucggcaugagcggcagcaaccagggcgccagaaccggcagagacggcguggugagagugugggacgugaagaacgccgagcugcugaacaaccaguucggcaccaugcccagccugacccuggccugccugaccaagcagggccagguggaccugaacgacgccgugcaggcccugaccgaccugggccugaucuacaccgccaaguaccccaacaccagcgaccuggacagacugacccagagccaccccauccugaacaugaucgacaccaagaagagcagccugaacaucagcggcuacaacuucagccugggcgccgccgugaaggccggcgccugcaugcuggacggcggcaacaugcuggagaccaucaaggugagcccccagaccauggacggcauccugaagagcauccugaaggugaagaaggcccugggcauguucaucagcgacgcccccggcgagagaaaccccuacgagaacauccuguacaagaucugccugagcggcgacggcuggcccuacaucgccagcagaaccagcaucaccggcagagccugggagaacaccgugguggaccuggagagcgacggcaagccccagaaggccggcagcaacggcagcaacaagagccugcagagcgccggcuucaccgccggccugaccuacagccagcugaugacccugaaggacgccaugcugcagcuggaccccaacgccaagaccuggauggacaucgagggcagacccgaggaccccguggagaucgcccuguaccagcccagcagcggcugcuacauccacuucuucagagagcccaccgaccugaagcaguucaagcaggacgccaaguacagccacggcaucgacgugaccgaccuguucgccgcccagcccggccugaccagcgccgugaucgacgcccugcccagaaacauggugaucaccugccagggcagcgacgacaucagaaagcuguucgagagccagggcagaaaggacaucaagcugaucgacaucgcccugagcaagaccgacagcagaaaguacgagaacgccgugugggaccaguacaaggaccugugccacaugcacaccggcaucgugguggagaagaagaagagaggcggcaaggaggagaucaccccccacugcgcccugauggacugcaucauguucgacgccgccgugagcggcggccugaacaccagcgugcugagagccgugcugcccagagacaugguguucagaaccagcacccccagaguggugcugugaggacuaguaauaaggaaacuguaugaaugucugugggcaggaagugaagagauccuucuguaaagguuuuuggaauuaugucugcugaauaauaaacuuuuuugaaauaauaaaucugguagaaaaaugagaucuaaaaaaaaaaaaaaaaaaaaaaaaaaaaaaaaaaaaaaaaaaaaaaaaaaaaaaaaaaaaaaaaaaaaaaaaaaaaaaaaaaaaaaaaaaaaaaaaaaaa

SEQ ID NO: 17628 - RNA, 2022 nt, Artificial Sequence
  mRNA product Design b-4 (A100) comprising derived and/or modified sequence from LASV(Josiah;Clade IV)__NP_694869__NP (opt5)
aggagagucccgcagucggcguccagcggcucugcuuguucgugugugugucguugcaggccuuauucaagcuuaccaugagcgccuccaaggagaucaaaucuuuccuguggacccagagccucagacgggaacuguccggcuacugcucuaacauuaagcugcaaguggucaaagacgcucaggcccugcuccacgggcuggauuuuagcgagguuuccaaugugcagcgccuuaugagaaaggaacggcgcgacgauaacgaccugaaaagacuccgggaucugaaucaggcggugaacaaucuggucgagcucaagucuacacaacaaaagagcauccugcgcgugggaacgcuuaccuccgacgaucugcucauucuggcugccgaccuugaaaaacuuaagagcaaaguuaucagaacagagcggccccucucugccggcguguauauggggaaccuguccagccagcagcuggaucagcgcagagcucuccugaauaugauuggaaugucuggcgggaaccagggagcccgggcuggccgcgacggcgucgugagaguuugggaugugaagaaugccgagcuucugaacaaucaguucgggaccaugccuucccucacacuggcgugucuuaccaaacagggacaagucgaccugaacgaugccgugcaggcucucacagaccugggccugaucuacaccgccaaguauccgaauacgagcgaccucgaucggcugacccagucucaucccauccuuaacaugauugacacaaagaaauccagccugaauaucuccggguacaacuuuucucucggagcugccgugaaggcgggcgccugcaugcuggaugggggaaacaugcuugaaaccauuaaagucagcccucaaacaauggacggcauccugaaguccauucucaaaguuaagaaagcucugggcauguucaucagcgauacccccggggagcgcaauccuuaugaaaacauucuguacaagaucugucucucuggagacggcuggcccuauaucgccuccagaacgagcauuacagggcgggcuugggagaauaccgugguggaucuggagucugacggaaagccucagaaagccgauagcaacaauuccucuaagagccuucaguccgccggcuuuacagcugggcugaccuacagccagcucaugacccugaaagacgcgaugcugcaacuugauccgaacgccaagacauggauggacaucgaaggaagacccgaggacccugucgaaauugcucucuaccagcccucuuccggcugcuauauccacuucuuucgcgagccuacggaucugaaacaguucaagcaggacgccaaguacagccauggcauugaugugaccgaccuguuugccacacaacccgggcucaccucugcuguuaucgaugcccugccgcggaauauggugaucacaugucagggauccgacgauauuagaaaacuucuggaaagccagggccgcaaggacaucaaacucauugauaucgcgcuguccaagaccgacucucggaaauaugagaacgcugucugggaucaguacaaggaccugugccacaugcauacgggggugguuguggagaagaaaaagagaggaggcaaagaagagauuacaccucacugugcccuuauggauugcaucauguucgacgccgcugucagcgggggccucaauaccuccgugcugcgcgccguccugccccgggacaugguguuuagaaccucuacaccucgcguugugcucugaggacuaguaauaaggaaacuguaugaaugucugugggcaggaagugaagagauccuucuguaaagguuuuuggaauuaugucugcugaauaauaaacuuuuuugaaauaauaaaucugguagaaaaaugagaucuaaaaaaaaaaaaaaaaaaaaaaaaaaaaaaaaaaaaaaaaaaaaaaaaaaaaaaaaaaaaaaaaaaaaaaaaaaaaaaaaaaaaaaaaaaaaaaaaaaaa

SEQ ID NO: 17629 - RNA, 2022 nt, Artificial Sequence
  mRNA product Design b-4 (A100) comprising derived and/or modified sequence from LASV(LP;Clade I)__AAF86702__NP (opt5)
aggagagucccgcagucggcguccagcggcucugcuuguucgugugugugucguugcaggccuuauucaagcuuaccaugagcaacuccaaggagaucaaaucuuuccuguggacccagagccucagacgggaacuguccggcuacugcucuaauauuaagcuccaaguggucaaagacgcccaggcucugcuccacgggcuggauuuuagcgagguuuccaacgugcagcgccuuaugagaaagcagaaacgggacgaugccgaccugaagcgccucagagaucugaaucaagcggugaacaaucuggucgaacucaagucuacacagcagaaaaacgugcugcggguuggaacgcuuagcuccgacgaucugaucacccucgcugccgaccuggagaaacuuaaaagcaaggugauucgcacagaaagaccccugucuuccggcgucuauauggggaaucucagcucucagcaacuggaucagcggcgcgcccugcucuccaugaucggaaugagcggcgggccucagggaaacagaaccggcggcgacggggugguucgggugugggaugucaaaaaugcugagcugcuuaacaaucaguucggaacaaugccgucucugacccucgccugucugacaaagcaaggccagguggaccuuaacgaugcugugcaggcccugaccgaccucgggcugauuuacacggcgaaguaucccaauuccagcgaccuggauaugcucacccaaucccauccuauccugggaauggucgacacaaagaagucuagccuuaacaucuccggcuacaauuuuagccugggggccgcuguuaaagccggagcuugcaugcucgauggcggcaacaugcuggagaccauuaaggugucuccccagacaauggacgggauccuuaaauccauucugaaggugaaacgcagccucggaauguucaucucugauaccccuggcgaaagaaaccccuaugagaauauucuguacaagaucugucugagcggggaaggauggccuuauauugccucccggacgucuaucacaggccgcgcgugggagaacacccucgucgaccuggagagcgauaauaagccgcccaaacuuaacuccgccgggagcaauaagucucugcaggcugccggacucaacgcuggccugacauacucccagcugaugacccuuaaagacugcaugcuccaacuggauccuagcucuaagaccuggaucgacauugaaggcagacccgaggauccuguggaaaucgcccuguuucagcccuccagcggguguuacauucacuucuuucgggagccgacagaccucaaacaguucaagcaggacgccaaguauucccauggaaucgauguuacggaccuguuuucuacccaaccuggccuuacaagcgcugugauugaagcgcugcccagaaauaugguccuuaccugccagggguccgaugacaucaaaaagcugcuggagucucagggacgccgggauaucaaacuuauugacaucagccucuccaaggccgauagcagaaaauucgagaacgcugugugggaccaguacaaggaucugugucacaugcauacaggcguuguggucgaaaagaaaaagcgcgggggcaaagaggaaauuaccccucacugcgcccugcucgacuguaucauguuugaugccgcuacgacaggaucucugaauauuaccacccuucgggccgugcugcccagagacauggucuuccgcacauccacccccaaggugguucucugaggacuaguaauaaggaaacuguaugaaugucugugggcaggaagugaagagauccuucuguaaagguuuuuggaauuaugucugcugaauaauaaacuuuuuugaaauaauaaaucugguagaaaaaugagaucuaaaaaaaaaaaaaaaaaaaaaaaaaaaaaaaaaaaaaaaaaaaaaaaaaaaaaaaaaaaaaaaaaaaaaaaaaaaaaaaaaaaaaaaaaaaaaaaaaaaa

SEQ ID NO: 17630 - RNA, 2022 nt, Artificial Sequence
  mRNA product Design b-4 (A100) comprising derived and/or modified sequence from LASV(803213;Clade II)__AAF86704__NP (opt5)
aggagagucccgcagucggcguccagcggcucugcuuguucgugugugugucguugcaggccuuauucaagcuuaccaugagcgccuccaaggaggugaaaucuuuccuguggacccagagccucagacgggaacuguccggcuacugcucuaacaucaaacuucaagucguuaaggacgcucaggcccugcuccacgggcuggauuuuagcgaggugaauaacgugcagcgccuuaugagaaagcagaaacgggacgauggagaccugaagcgccucagagaucugaaucaagcggucaacaaucugguggaacucaaguccacacagcagaaaucuauucugcggguuggcacgcuuaccagcgacgaucugcucacacuggcugccgaccuugagaagcugaaauccaaggugauccgcaccgaaagaccccucagcucuggggucuauaugggaaaccuguccacacagcaacuggagcagcggcgcgcccuccugaauaugauuggcauggugggaggagcucagggcacccagccuggcagagaugggguugugcgggucugggacgugaaaaacccggaucuucugaauaaccaauucggaacaaugcccagccucacccuggccugucuuacgaagcagggccagguggaccugaaugaugcuguccucgcccugaccgaccuggggcucaucuacacagcgaaguauccuaacucuuccgaccuggaucgccuuagccaaucucaucccauucugaauaugguugacaccaaaaaguccagccucaacaucuccggauacaauuuuucucugggcgccgcugugaaagccggggcuugcaugcuugauggaggcaacaugcuggagacaaucaaggugaccccucagacgauggacggcauucucaaaagcauccugaaggucaaaagaucccuggggauguucgugagcgauacacccggagaacggaacccuuaugagaauauucucuacaagaucugucugucuggcgacggguggccguauauugccucccgcaccagcaucguugggagagcgugggaaaacacaaccguggaucuugagucugacggcaagccccagaaagucgggaccgccggaagcaauaagucccugcagucugcuggcuuuccuacaggccucacguacagccaacugaugacccugaaagauuccaugaugcagcuugaccccagcgccaagacauggauugauaucgaggggcggccugaagaccccguggagaucgcucucuaccagccgaugucuggaugcuauauucacuucuuuagagaaccuaccgaccugaaacaguucaagcaagaugccaaguacucccauggcaucgacguugccgaucuguuucccgcucagccugggcucacaagcgcggugauugaggcccugccccgcaacaugguccuuaccugucagggaucugacgauaucaaaaagcugcucgacucccagggccggagagauauuaaacugaucgacaucagccuguccaagguggauucucgcaaauucgaaaaugcugucugggaccaaugcaaggaucuuugucacaugcauacgggggugguuguggagaagaaaaagcggggcggaaaagaggaaauuacaccccacugcgcccucauggacuguaucauguuugaugccgcugucagcggcgggcugaacauuccugugcugagagccguucucccgcgcgacaugguguuccggaccuccucucccaaggucgugcugugaggacuaguaauaaggaaacuguaugaaugucugugggcaggaagugaagagauccuucuguaaagguuuuuggaauuaugucugcugaauaauaaacuuuuuugaaauaauaaaucugguagaaaaaugagaucuaaaaaaaaaaaaaaaaaaaaaaaaaaaaaaaaaaaaaaaaaaaaaaaaaaaaaaaaaaaaaaaaaaaaaaaaaaaaaaaaaaaaaaaaaaaaaaaaaaaa

SEQ ID NO: 17631 - RNA, 2025 nt, Artificial Sequence
  mRNA product Design b-4 (A100) comprising derived and/or modified sequence from LASV(GA391;Clade III)__CAA36646__NP (opt5)
aggagagucccgcagucggcguccagcggcucugcuuguucgugugugugucguugcaggccuuauucaagcuuaccaugagcgccuccaaggaggugagaucuuuccuguggacccagagccuccggcgcgaacuguccggcuacugcucuaacaucaaacuucaagucguuaaggacgcucaggcccugcuccacgggcuggauuuuagcgagguguccaaugugcagagacuuaugcggaaacagaagcgcgacgauggagaccugaaaagacuccgggaucugaaccaagcggucaauaaccugguggaacucaagucuacacagcagaaaagcguucugcgcgugggcacgcuuuccagcgacgaucugcucauucuggcugccgaccuugagaaacugaagucuaaagucaccagaacagaacggccccucuccagcgggguguauaugggaaaucugucuucccagcaacuggaucagcgcagagcccuccugaacaugaucggcaugaccgggguuagcggaggcggcaagggggcuucugacggaauugugcgggucugggaugugaaaaaugccgagcuucugaacaaucaguucggcacaaugccuucccucacccuggcuugucuuacaaagcaggggcaaguggaccugaacgaugccguccaggcgcucaccgaccugggacugaucuacacggccaaguauccgaauagcuccgaccucgaucgccugucucagagccaucccauucuuaacaugaucgacaccaaaaaguccagccugaauaucucuggcuacaacuuuucccucggggcugccguuaaagcuggagccugcaugcuggauggcggcaauaugcuugagacaauuaaggugagcccucaaaccauggacgggauccugaaaucuauucucaaggugaaaaagagccugggaauguucgucuccgauacacccggcgaaagaaacccuuaugagaacauccuguacaagauuugucucucuggggacggauggcccuauaucgcgagccggaccuccauugugggccgcgccugggaaaauacgguuguggaucuggagcaggacaacaaaccucagaagaucgggaauggaggcagcaacaaaucucuucaguccgcuggcuuugccgcugggcugacauacagccaacucaugacccugaaggauuucaaaugcuuuaaucugaucccgaacgccaagacauggauggacauugagggaagacccgaagauccugucgagaucgcccuuuaccagcccucuuccggcuguuaugugcacuucuuucgggaaccuaccgaccucaagcaguucaaacaggacgcuaaguacagccaugggauugauguuaccgaccuguuugcggcccaacccggacugacauccgcugugaucgaggcccucccgagaaauauggucauuacgugccagggcucugaagauauccgcaaacugcuugagagccaggggcggagagacaucaagcugauugauaucacccucuccaaagccgacucucgcaaguucgagaacgcugugugggaucaguuuaaggaccugugucacaugcauacaggcgucgugguugaaaagaagaaacggggaggcaaggaggaaauuaccccucacugcgcccugauggauuguaucauguucgacgcggcugugagcgggggacuugaugccaaaguccucagagugguucugccccgcgacaugguguuccggacauccaccccuaaggucgugcugugaggacuaguaauaaggaaacuguaugaaugucugugggcaggaagugaagagauccuucuguaaagguuuuuggaauuaugucugcugaauaauaaacuuuuuugaaauaauaaaucugguagaaaaaugagaucuaaaaaaaaaaaaaaaaaaaaaaaaaaaaaaaaaaaaaaaaaaaaaaaaaaaaaaaaaaaaaaaaaaaaaaaaaaaaaaaaaaaaaaaaaaaaaaaaaaaa

SEQ ID NO: 17632 - RNA, 2022 nt, Artificial Sequence
  mRNA product Design b-4 (A100) comprising derived and/or modified sequence from LASV(AV;Clade V)__CCA30315__NP (opt5)
aggagagucccgcagucggcguccagcggcucugcuuguucgugugugugucguugcaggccuuauucaagcuuaccaugagcgccuccaaggaggugaaaucuuuccuguggacccagagccucagacgggaacuguccggcuacugcucuaacaucaaacuucaagucguuaaggacgcucaggcccugcuccacgggcuggauuuuagcgagguguccaaugugcagcgccuuaugagaaagcagcggcgcgacgauucugaccugaaaagacuccgggaucugaaccaagcggucaauaaccugguggaacucaagagcacacagcagaaguccguucugcgcgugggaacgcuuagcucugacgaucugcucacccuggcugccgaccuugagaaacugaaguccaaagucacaagaaccgaacggccccucagcucuggcguguauauggggaaucuguccagccagcaacuggaucagcgcagagcccuccugaaccuuauuggaaugacaaauggcucucaggggucccaggcuggacgggacggcguugugcgcgucugggaugugaagaacgccgagcugcucaauaaccaauucggcaccaugccuagccugacacuugcuugucugaccaaacagggacagguggaccucaaugaugucguucaagcccugacggaccuggggcucaucuacaccgcgaaguauccgaacacauccgaccuggauagacuuacccagucucaucccauucugaauaugaucgacacaaagaaaagcucccucaacauuagcggcuacaauuuuucucugggggccgcugugaaggccggagcuugcaugcuugauggcgggaacaugcuggagaccaucaaaguguccccucagagcauggacggaauccucaagucuauucugaaagucaagcgggcccugggcauguucgugagcgauacgcccggcgaacgcaacccuuaugagaauauccucuacaaaauuugucuguccggggacggauggcccuauaucgcgucuagaacaagcauuguuggccgggccugggaaaacaccguggucgaucuugagacagacgggaagccucagaagaucggauccggcaauagcaacaaaucucugcaauccgcuggguuuagcgccggacucaccuacucucagcugaugacccugaaggaugcuaugcuucagcucgacccgaaugccaaaacauggauggauauugagggcagacccgaagacccuguggagguugcccuguaccagcccaucuccggcugcuauauccacuucuuucgcgaaccuacggaccugaagcaauucaaacaggaugcuaaguacagccaugggauugacaucgcggaucucuuugccgcucagcccggacugaccuccgccgugauugaggcccuuccgcggaacauggucaucacaugucagggcucugaagacauuaagaaacugcucgagagccaagggagaaaggauaucaaacugaucgacauugcucuguccaagaucgauucucgcaaauucgagaaugccgugugggaccaguauaaggaucuuugccacaugcauaccggagucgugguugaaaagaaaaagcggggcgggaaagaggaaauuacaccucacugugcgcucauggacugcaucauguuugaugcugccgugagcggcggacugaacacccugguccucagagccgugcugccccgcgacaugguuuuccggacguccacaccuagagugguccuuugaggacuaguaauaaggaaacuguaugaaugucugugggcaggaagugaagagauccuucuguaaagguuuuuggaauuaugucugcugaauaauaaacuuuuuugaaauaauaaaucugguagaaaaaugagaucuaaaaaaaaaaaaaaaaaaaaaaaaaaaaaaaaaaaaaaaaaaaaaaaaaaaaaaaaaaaaaaaaaaaaaaaaaaaaaaaaaaaaaaaaaaaaaaaaaaaa

SEQ ID NO: 17633 - RNA, 2022 nt, Artificial Sequence
  mRNA product Design b-4 (A100) comprising derived and/or modified sequence from LASV(Togo/2016/7082;Clade VI)__AMR44578__NP (opt5)
aggagagucccgcagucggcguccagcggcucugcuuguucgugugugugucguugcaggccuuauucaagcuuaccaugagcaacuccaaggaggugaaaucuuuccuguggacccagagccucagacgggaacuguccggcuacugcucuaauaucaaacuucaagucguuaaagacgcccaggcucugcuccacgggcuggauuuuagcgagguguccaacgugcagcgccuuaugagaaagcagaaacgggacgauggagaccugaagcgccucagagaucugaaucaagccgucaacaaucugguggaacucaagucuguucagcagaaaagcauucugcgggugggcacacuuacguccgacgaucugcucacccuggcggcugaccuugagaagcugaaaagcaaggucacacgcaccgaaagaccccucucuuccgggguguauaugggaaaccugagcucucagcaacuggaucagcggcgcgcccuccuguccaugaucggcaugagcgggggaaaucagaacucucagccuaaaggcgacggcguugugagagucugggaugugaagaaugccgaccuucugaacaaucaauucgggacaaugccgucccucacccuggcuugucuuacaaagcagggacagguggaucugaacgacgccguccaagcucucaccgaccugggccugauuuacacggccaaauaucccaauagcuccgaucucgaccggcugucucagagccauccuauccuuaacaugauugauaccaagaaauccagccugaauaucucuggguacaacuuuucccucggagcggccaucaagacaggcgcuugcaugcuggacgggggaaacaugcuugagaccauuaaaguuacaccccagaccauggauggcauccucaagagcauucugaaagugaagcgcucucugggcauguucaucagcgacacgccuggggagagaaaucccuaugaaaacauucuguacaagaucugucucuccggagauggcuggccuuauauugccucucggacagcuaucaucgggcgcgccugggagaauaccguggucgaccuggaaagcgauuccaaaccgcagaagauuggaagcaacggcucuaauaaaucccuucaaagcgcgggguuugcccccggacugacauacucucagcucaugacccugaaggacuccaugcugcagcuugauccuaacgcuaaaaccuggaucgacauugagggcagacccgaggacccuguggaaguugcccucuuccagcccaucagcggcugcuacauucacuuuuuccgggagccgacagaucugaagcaauuuaagcaggacgcuaaauauucccaugggaucgaugugacggaccuguucgccgcccagccuggacucaccucugcugucaucgaagcgcugcccagaaauauggugcuuacaugucagggcagcgaugacauuaagaaacugcucgauucccaagggcgccgggacaucaagcugauugauguuucucugaacaaaaucgacagcagaaaguuugagaaugccgugugggaucaguacaaggaccuuugccacaugcauaccggagucguggucgaaaagaagaaaaagggcgggaaagaggagauuacaccucacugugcucuccuggauugcaucauguucgacgccgccguguccggcggacugaacgcuaccguucuccgcgccgugcugccccgggacauggucuuuagaacgagcucucccaaggugguucuuugaggacuaguaauaaggaaacuguaugaaugucugugggcaggaagugaagagauccuucuguaaagguuuuuggaauuaugucugcugaauaauaaacuuuuuugaaauaauaaaucugguagaaaaaugagaucuaaaaaaaaaaaaaaaaaaaaaaaaaaaaaaaaaaaaaaaaaaaaaaaaaaaaaaaaaaaaaaaaaaaaaaaaaaaaaaaaaaaaaaaaaaaaaaaaaaaa

SEQ ID NO: 17634 - RNA, 2022 nt, Artificial Sequence
  mRNA product Design b-4 (A100) comprising derived and/or modified sequence from LASV(KAK-428;Clade n.d. (VII))__ANH09741__NP (opt5)
aggagagucccgcagucggcguccagcggcucugcuuguucgugugugugucguugcaggccuuauucaagcuuaccaugagcaacuccaaggaggugaaaucuuuccuguggacccagagccucagacgggaacuguccggcuacugcacaaauaucaaacuucaagucguuaaggacgcccaggcucugcuccacgggcuggauuuuucugaggugagcaacgugcagcgccuuaugagaaagcagaaacgggacgauaaugaccugaagcgccucagagaucugaaccaagccgucaauaaccugguggaacucaaguccguucagcagaaaucugugcugaaggucggaacgcuuaauagcgacgaucugcucacccuggcggcugaccuugagaaacugaaguccaaagugguucggacagaacgcccccucagcucuggcguguauauggggaaccuguccagccagcaacuggaucagagacgggcccuccugaauaugauuggaauggccggcgggucucagggaaaccagccuucccgcgacggcgucgugagagugugggaugucaagaaugcugaccuucugaacaaucaauucggcaccaugccgagccucacacuggccugucuuaccaagcaggggcagguugaucugaacgacguggugcucgcucugacagaccugggacucaucuacaccgccaaauaucccaauucuuccgaucuggaccggcuuagccaaaaccauccuguccugaacaugauugaugugaauaaguccucucucaacaucagcggcuacaauuuuucccugggggcggccguuaaagcuggagccugcaugcuugacggcgggaacaugcuggagacgauuaagaucagcccccagaccguggauggaauccucaaaucuauucugaaggucaaacgcgcucugggcauguucguguccgacacaccuggcgagagaaaucccuaugaaaacauccucuacaagguuugucugagcgggaauggauggccuuauauugccucucggaccagcaucgugggccgcgcgugggagaacacagucguggaucuugaauccaauaagaaccagccgaaagucgggaauaacggaucuaauaagaugcugcagagcuccggcuuugccaccgggcucacguacagccaacugaugacacugagagacucuaugcuucagcucgaucccaccgcuaaaacauggauugacaucgagggacggccugaggaucccguggaacuggcccuguuccagccuuccagcggcugcuacauucacuuuuucagagagcccaccgaccucaagcaguuuaaacaagacgcuaaguauucucauggcaucgauguuaacgaccuguucuccgcccagccggggcuuaccagcgccgugcuggaagcucucccucgcaauaugguccugacaugucagggauccgaugacauccggaagcugcuugauucucaggacagaaaagauauuaagcucaucgacauuagccuguccaaagcggaugcccgcaaguuugagaacgacgugugggaucaauucaaagaccugugccacaugcauacgggcaucguuguggaaaagaagaaaaagggagggaaacaggagaugacaccccacugugcucuccuggauugcauuauguuugacgccgccgucucuggcgggcuuaacgugccuacccugcgggcugugcuccccaccgacaugguuuucagaacaaucaccacgaaggucgugcugugaggacuaguaauaaggaaacuguaugaaugucugugggcaggaagugaagagauccuucuguaaagguuuuuggaauuaugucugcugaauaauaaacuuuuuugaaauaauaaaucugguagaaaaaugagaucuaaaaaaaaaaaaaaaaaaaaaaaaaaaaaaaaaaaaaaaaaaaaaaaaaaaaaaaaaaaaaaaaaaaaaaaaaaaaaaaaaaaaaaaaaaaaaaaaaaaa

SEQ ID NO: 17635 - RNA, 2022 nt, Artificial Sequence; identical to SEQ ID NO: 17629
  mRNA product Design b-4 (A100) comprising derived and/or modified sequence from LASV(Pinneo-NIG-1969;Clade I)__AIT17837__NP (opt5)

SEQ ID NO: 17636 - RNA, 2022 nt, Artificial Sequence
  mRNA product Design b-4 (A100) comprising derived and/or modified sequence from LASV(ISTH0009-NIG-2011;Clade II)__AIT17405__NP (opt5)
aggagagucccgcagucggcguccagcggcucugcuuguucgugugugugucguugcaggccuuauucaagcuuaccaugagcguguccaaggaggucaaaucuuuccuguggacccagagccucagacgggaacuguccggcuacugcucuaacaucaaacuucaaguugugaaggacgcccaggcucugcuccacgggcuggauuuuagcgagguguccaauguccagcgccuuaugagaaagcagaaacgggacgauucugaccugaagcgccucagagaucugaaccaagccgugaauaaccugguugaacucaagagcacacagcagaaauccauucugcgggugggaacgcuuaccagcgacgaucugcucacacuggcggcugaccuugagaagcugaaaucuaaggucauccgcaccgaaagaccccucuccagcggcguguauauggggaaucugucuacacagcaacuggagcagcggcgcgcccuccugaacaugauuggaaugguuggcggggcccagggaacccagccuggcagagauggcgugguccgggugugggacgugaaaaauccggaucuucugaacaaucaauucgggacaaugcccucccucacccuggcuugucuuacgaagcagggacaggucgaccugaacgaugccguucucgcucugaccgaccugggccucaucuacacagccaaguauccuaauagcucugaccuggaucgccuuucccaaagccaucccauucugaacaugguggacaucaaaaaguccucucucaauaucagcggguacaacuuuucccugggagcggccgugaaagcuggcgccugcaugcuugaugggggaaauaugcuggagaccauuaaggucacaccucagaccauggacggcauccucaaaagcauucugaaggugaaaagaucucugggcauguucguuuccgauacgcccggggaacggaacccuuaugagaacauccucuacaagauuugucugagcggagacggcuggccguauaucgcuucucgcacaagcauuguggggagagccugggaaaauaccacagucgaucuugaguccgacggaaagccccagaaagugggcucugcggggagcaacaagucccugcagagcgccggauuuccuaccggccucaccuacucucaacugaugacacugaaagauuccaugaugcagcuugaccccagcgcuaagacguggaucgauaucgagggccggccugaagaccccguugagauugcccucuaccagccgaugucugggugcuauauccacuucuuuagagaaccuaccgaccugaaacaguucaagcaagaugcuaaguacucccauggaauugacguggccgaucuguuucccgcccagccuggccucacaagcgcugucaucgaggcgcugccccgcaauauggugcuuaccugucagggguccgacgauauuaaacggcugcucgacucucagggaagacgcgauaucaagcugaucgacauugcccugagcaaagcugauucccggagauucgaaaacgccgucugggaccaaugcaaggaucuuugucacaugcauacaggcgugguuguggagaaaaagaagcgcgggggcaaagaggaaaucacgccccacugcgcccucauggacuguauuauguaugaugcugccgucucuggaggccugaauaucccugugcugcgggcgguucucccgagagacaugguguuucgcaccagcucccccaaggucgugcugugaggacuaguaauaaggaaacuguaugaaugucugugggcaggaagugaagagauccuucuguaaagguuuuuggaauuaugucugcugaauaauaaacuuuuuugaaauaauaaaucugguagaaaaaugagaucuaaaaaaaaaaaaaaaaaaaaaaaaaaaaaaaaaaaaaaaaaaaaaaaaaaaaaaaaaaaaaaaaaaaaaaaaaaaaaaaaaaaaaaaaaaaaaaaaaaaa

SEQ ID NO: 17637 - RNA, 2022 nt, Artificial Sequence
  mRNA product Design b-4 (A100) comprising derived and/or modified sequence from LASV(ISTH2010-NIG-2012;Clade II)__AIT17483__NP (opt5)
aggagagucccgcagucggcguccagcggcucugcuuguucgugugugugucguugcaggccuuauucaagcuuaccaugagcgccuccaaggaggugaaaucuuuccuguggacccagagccucagacgggaacuguccggcuacugcucuaacaucaaacuucaagucguuaaggacgcucaggcccugcuccacgggcuggauuuuagcgagguguccaaugugcagcgccuuaugagaaagcagaaacgggacgauucugaccugaagcgccucagagaucugaaccaagcggucaauaaccugguggaacucaagagcacacagcagaaauccauucugcggguuggaacgcuuaccagcgacgaucugcucacacuggcugccgaccuugagaagcugaaaucuaaggugauccgcaccgaaagaccccucuccagcggcgucuauauggggaaucugucuacacagcaacuggagcagcggcgcgcccuccugaaccuuauuggaauggugggcggggcucagggaacccagccuggcagagauggcguugugcgggucugggacgugaaaaauccggaucugcucaacaaucaauucgggacaaugcccucccugacccuugccugucugacgaagcagggacagguggaccucaacgaugcuguccuggcccugaccgaccucggccugaucuacacagcgaaguauccuaauagcucugaccuugaucgccugucccaaagccaucccauucucaacaugguugacaccaaaaaguccucucugaauaucagcggguuuaacuucucccuuggagccgcugugaaagccggcgcuugcaugcuggaugggggaaauaugcucgagacaaucaaggugaccccucagacgauggacggcauucugaaaagcauccugaaggucaaaaagucucucggcauguuuguguccgauacacccggggaaagaaacccuuacgagaacauucuguauaagaucugucuuagcggagacggcuggccguacauugccucucggaccagcaucguugggcgcgcgugggaaaauacaaccguggaucuggaguccgacggaaaaccccacaaggucggcaccgccgggucuaacaaaagccuccaguccgcuggauucccuacaggccugacguauagccagcugaugacccuuaaggauucuaugaugcaacucgaccccuccgccaaaacauggauugauaucgagggcagaccugaagaccccguggagaucgcucuguaccagccgaugagcgggugcuacauucacuuuuuccgggaaccuaccgaccugaagcaguuuaagcaggaugccaaauauucucauggaaucgacguugccgaucucuuccccgcucaaccuggccugacauccgcggugauugaggcccuucccagaaauaugguccugaccugucaggggagcgacgauaucaagcgccuccuggacucccagggacggagagauauuaaacugaucgacaucgcucuuucuaaggccgauagccgccgguuugaaaacgccgugugggaccagugcaaagaucucugucauaugcacacgggcgucgugguugagaagaagaaaagagggggcaaggaggaaauuacaccccacugcgcucugauggacuguaucauguacgaugccgcgguguccggaggccugaauauuccuguccuccgcgcugugcugccgcgggacaugguuuucagaaccucuagccccaaagugguccuuugaggacuaguaauaaggaaacuguaugaaugucugugggcaggaagugaagagauccuucuguaaagguuuuuggaauuaugucugcugaauaauaaacuuuuuugaaauaauaaaucugguagaaaaaugagaucuaaaaaaaaaaaaaaaaaaaaaaaaaaaaaaaaaaaaaaaaaaaaaaaaaaaaaaaaaaaaaaaaaaaaaaaaaaaaaaaaaaaaaaaaaaaaaaaaaaaa

SEQ ID NO: 17638 - RNA, 2022 nt, Artificial Sequence
  mRNA product Design b-4 (A100) comprising derived and/or modified sequence from LASV(Lassa virus/H.sapiens-wt/NGA/2015/ISTH_0543;Clade II)__AVO03640__NP (opt5)
aggagagucccgcagucggcguccagcggcucugcuuguucgugugugugucguugcaggccuuauucaagcuuaccaugagcgccuccaaggaggugaaaucuuuccuguggacccagagccucagacgggaacuguccggcuacugcucuaacaucaaacuucaagucguuaaggacgcucaggcccugcuccacgggcuggauuuuagcgagguguccaaugugcagcgccuuaugagaaagcagaaacgggacgauucugaccugaagcgccucagagaucugaaccaagcggucaauaaccugguggaacucaagagcacacagcagaaauccauucugcggguuggaacgcuuaccagcgacgaucugcucacacuggcugccgaccuugagaagcugaaaucuaaggugauccgcaccgaaagaccccucuccagcggcgucuauauggggaaucugucuacacagcaacuggagcagcggcgcgcccuccugaacaugauuggaauggugggcggggcucagggaacccagccuggcagagauggcguugugcgggucugggacgugaaaaauccggaucuucugaacaaucaauucgggacaaugcccucccucacccuggccugucuuacgaagcagggacagguggaccugaacgaugcuguccucgcccugaccgaccugggccucaucuacacagcgaaguauccuaauagcucugaccuggaucgccuuucccaaagccaucccauucugaacaugguugacaccaaaaaguccucucucaauaucagcggguacaacuuuucccugggagccgcugugaaagccggcgcuugcaugcuugaugggggaaauaugcuggagacaaucaaggugaccccucagacgauggacggcauucucaaaagcauccugaaggucaaaaagucucugggcauguucguguccgauacacccggggaaagaaacccuuaugagaacauucucuacaagaucugucugagcggagacggcuggccguauauugccucucggaccagcaucguugggcgcgcgugggaaaauacaaccguggaucuugaguccgacggaaaaccccagaaggucggcucugccgggagcaacaaaucccugcagagcgcuggauuuccuaccggccucacauacucucaacugaugacgcugaaggauuccaugaugcagcuugaccccagcgccaaaaccuggauugauaucgagggcagaccugaagaccccguggagaucgcucucuaccagccgaugucugggugcuauauucacuucuuucgggaaccuacagaccugaagcaguucaagcaagaugccaaauacucccauggaaucgacguugccgaucuguuucccgcucagccuggccucaccagcgcggugauugaggcccugcccagaaauaugguccuuacaugucagggguccgacgauaucaagcgccugcucgacucucagggacggaaagauauuaagcugaucgacaucgcucugagcaaagccgauuccagacgcuucgaaaacgccgugugggaccaaugcaaggaucuuugucacaugcauaccggcgucgugguugagaagaaaaagagagggggcaaagaggaaauuacgccccacugcgcucucauggacuguaucauguaugaugccgcggugucuggaggccugaauauuccuguccugcgggcugugcucccgcgcgacaugguuuuucggacaagcucccccaaggugguccugugaggacuaguaauaaggaaacuguaugaaugucugugggcaggaagugaagagauccuucuguaaagguuuuuggaauuaugucugcugaauaauaaacuuuuuugaaauaauaaaucugguagaaaaaugagaucuaaaaaaaaaaaaaaaaaaaaaaaaaaaaaaaaaaaaaaaaaaaaaaaaaaaaaaaaaaaaaaaaaaaaaaaaaaaaaaaaaaaaaaaaaaaaaaaaaaaa

SEQ ID NO: 17639 - RNA, 2022 nt, Artificial Sequence
  mRNA product Design b-4 (A100) comprising derived and/or modified sequence from LASV(Lassa virus/H.sapiens-wt/NGA/2016/ISTH_0009;Clade II)__AVO03572__NP (opt5)
aggagagucccgcagucggcguccagcggcucugcuuguucgugugugugucguugcaggccuuauucaagcuuaccaugagcgccuccaaggaggugaaaucuuuccuguggacccagagccucagacgggaacuguccggcuacugcucuaacaucaaacuucaagucguuaaggacgcucaggcccugcuccacgggcuggauuuuagcgagguguccaaugugcagcgccuuaugagaaagcagaaacgggacgauucugaccugaagcgccucagagaucugaaccaagcggucaauaaccugguggaacucaagagcacacagcagaaauccauucugcggguuggaacgcuuaccagcgacgaucugcucacacuggcugccgaccuugagaagcugaaaucuaaggugauccgcaccgaaagaccccucuccagcggcgucuauauggggaaucugucuacacagcaacuggagcagcggcgcgcccuccugaacaugauuggaauggugggcggggcucagggaacccagccuggcagagauggcguugugcgggucugggacgugaaaaauccggaucuucugaacaaucaauucgggacaaugcccucccucacccuggccugucuuacgaagcagggacagguggaccugaacgaugcuguccucgcccugaccgaccugggccucaucuacacagcgaaguauccuaauagcucugaccuggaucgccuuucccaaagccaucccauucugaacaugguugacaccaaaaaguccucucucaauaucagcggguacaacuuuucccugggagccgcugugaaagccggcgcuugcaugcuugaugggggaaauaugcuggagacaaucaaggugaccccucagacgauggacggcauucucaaaagcauccugaaggucaaaaagucucugggcauguucguguccgauacacccggggaaagaaacccuuaugagaacauucucuacaagaucugucugagcggagacggcuggccguauauugccucucggaccagcaucguugggcgcgcgugggaaaauacaaccguggaucuugaguccgacggaaaaccccagaaggucggcucugccgggagcaacaaaucccugcagagcgcuggauuuccuaccggccucacauacucucaacugaugacgcugaaggauuccaugaugcagcuugaccccagcgccaaaaccuggauugauaucgagggcagaccugaagaccccguggagaucgcucucuaccagccgaugucugggugcuauauucacuucuuucgggaaccuacagaccugaagcaguucaagcaagaugccaaauacucccauggaaucgacguugccgaucuguuucccgcucagccuggccucaccagcgcggugauugaggcccugcccagaaauaugguccuuacaugucagggguccgacgauaucaagcgccugcucgacucucagggacggagagauauuaaacugaucgacaucgcucugagcaaggccgauucccgccgguucgaaaacgccgugugggaccaaugcaaagaucuuugucacaugcauaccggcgucgugguugagaagaagaaaagagggggcaaggaggaaauuacgccccacugcgcucucauggacuguaucauguaugaugccgcggugucuggaggccugaauauuccuguccugcgcgcugugcucccgcgggacaugguuuuuagaacaagcucccccaaagugguccugugaggacuaguaauaaggaaacuguaugaaugucugugggcaggaagugaagagauccuucuguaaagguuuuuggaauuaugucugcugaauaauaaacuuuuuugaaauaauaaaucugguagaaaaaugagaucuaaaaaaaaaaaaaaaaaaaaaaaaaaaaaaaaaaaaaaaaaaaaaaaaaaaaaaaaaaaaaaaaaaaaaaaaaaaaaaaaaaaaaaaaaaaaaaaaaaaa

SEQ ID NO: 17640 - RNA, 2022 nt, Artificial Sequence
  mRNA product Design b-4 (A100) comprising derived and/or modified sequence from LASV(Lassa virus/H.sapiens-wt/NGA/2016/ISTH_0017;Clade II)__AVO03568__NP (opt5)
aggagagucccgcagucggcguccagcggcucugcuuguucgugugugugucguugcaggccuuauucaagcuuaccaugagcgccuccaaggaggugaaaucuuuccuguggacccagagccucagacgggaacuguccggcuacugcucuagcaucaaacuucaagucguuaaggacgcucaggcccugcuccacgggcuggauuuuuccgaggugucuaacgugcagcgccuuaugagaaagcagaaacgggacgauagcgaccugaagcgccucagagaucugaaucaagcggucaacaaucugguggaacucaaguccacacagcagaaaagcauucugcggguuggaacgcuuaccucugacgaucugcucacacuggcugccgaccuugagaagcugaaauccaaggugauccgcaccgaaagaccccucagcucuggcgucuauauggggaaccuguccacacagcaacuggagcagcggcgcgcccuccugaauaugauuggaauggcuggcggggcccagggaacccagccuggcagagauggcgugguucgggugugggacgucaaaaacccggaucuucugaauaaccaauucgggacaaugcccagccucacccuggcuugucuuacgaagcagggacagguggaccugaaugaugccgugcucgcgcugaccgaccugggccucaucuacacagccaaguauccuaacucuuccgaccuggaucgccuuagccaaucccaucccauucugaauauggucgacaccaaaaagucuagccucaacaucuccggguacaauuuuagccugggagcugccguuaaagcuggcgccugcaugcuugaugggggaaacaugcuggagacaaucaaggugaccccucagacgauggacggcauucucaaaucuauccugaaggugaaaagaucccugggcauguucgucagcgaugcgcccggggaacggaauccuuaugagaacauucucuacaagaucugucugucuggagacggcuggccguauauugccagccgcacauccaucguggggagagcuugggaaaacaccacaguugaucuugagucugacggaaagccccagaaagugggcgccaccgggagcaauaagucccugcagagcgcuggauuuccuaccggccucacauacucucaacugaugacgcugaaagauuccaugaugcagcuugaccccagcgccaagaccuggauugauaucgagggccggccugaagaccccgucgagguggcccucuaccagccgguuucugggugcuauauccacuucuuuagagaaccuacagaccugaaacaguucaagcaagaugcuaaguacucccauggaauugacguggcggaucuguuucccgcccagccuggccucaccagcgcugucaucgaggcccugccccgcaacauggugcuuacaugucagggguccgacgauauuaaaaagcugcucgacucucagggacggaaagauaucaagcugauugacaucgcccugagcaaagcugauuccagacgcuucgaaaaugccgucugggaccaaugcaaggaucuuugucacaugcauaccggcgugguuguggagaagaaaaagagagggggcaaagaggaaaucacgccccacugcgcgcucauggacuguauuauguaugaugcugccgucucuggaggccugaacaucccugugcugcgggccguucucccgcgcgacaugguguuucggacaagcucccccaaggucgugcugugaggacuaguaauaaggaaacuguaugaaugucugugggcaggaagugaagagauccuucuguaaagguuuuuggaauuaugucugcugaauaauaaacuuuuuugaaauaauaaaucugguagaaaaaugagaucuaaaaaaaaaaaaaaaaaaaaaaaaaaaaaaaaaaaaaaaaaaaaaaaaaaaaaaaaaaaaaaaaaaaaaaaaaaaaaaaaaaaaaaaaaaaaaaaaaaaa

SEQ ID NO: 17641 - RNA, 2022 nt, Artificial Sequence
  mRNA product Design b-4 (A100) comprising derived and/or modified sequence from LASV(Lassa virus/H.sapiens-wt/NGA/2018/ISTH_0959;Clade II)__AVV65100__NP (opt5)
aggagagucccgcagucggcguccagcggcucugcuuguucgugugugugucguugcaggccuuauucaagcuuaccaugagcgccuccaaggaggugaaaucuuuccuguggacccagagccucagacgggaacuguccggcuacugcucuaacaucaaacuucaagucguuaaggacgcucaggcccugcuccacgggcuggauuuuagcgagguguccaaugugcagcgccuuaugagaaagcagaaacgggacgauucugaccugaagcgccucagagaucugaaccaagcggucaauaaccugguggaacucaagagcacccagcagaaauccauucugcggguuggaacgcuuaccagcgacgaucugcucacacuggcugccgaccuugagaagcugaaaucuaaggugauccgcaccgaaagaccccucuccagcggcgucuauauggggaaucugucuacacagcaacuggagcagcggcgcgcccuccugaaccuuauuggaauggugggcggggcucagggaacccagccuggcagagauggcguugugcgggucugggacgugaaaaauccggaucugcucaacaaucaauucgggacaaugcccucccugacccuugccugucugacgaagcagggacagguggaccucaacgaugucguucuggcucugaccgaccucggccugaucuacacagccaaguauccuaauagcucugaccuugaucgccugucccaaagccaucccauucucaacaugguggacaccaaaaaguccucucugaauaucagcggguuuaacuucucccuuggagcggccgugaaagcuggcgccugcaugcuggaugggggaaauaugcucgagacaaucaaggucaccccucagacgauggacggcauucugaaaagcauccugaaggugaaaaagucucucggcauguuuguuuccgauacacccggggaaagaaacccuuacgagaacauucuguauaagaucugucuuagcggagacggcuggccguacauugcuucucggaccagcaucguggggcgcgccugggaaaauacaaccgucgaucuggaguccgacggaaaaccccacaaggugggcaccgcggggucuaacaaaagccuccaguccgccggauucccuacaggccugacguauagccagcugaugacccuuaaggauucuaugaugcaacucgaccccuccgcuaaaacauggauugauaucgagggcagaccugaagaccccguugagaucgcccuguaccagccgaugagcgggugcuacauucacuuuuuccgggaaccuaccgaccugaagcaguuuaagcaggaugcuaaauauucucauggaaucgacguggccgaucucuuccccgcccaaccuggccugacauccgcugucauugaggcgcuucccagaaauauggugcugaccugucaggggagcgacgauaucaagcgccuccuggacucccagggacggaaagauauuaagcugaucgacaucgcccuuucuaaaacggauagcagacgcuuugaaaacgcugucugggaccagugcaaggaucucugucauaugcacacaggcgugguuguggagaagaaaaagagagggggcaaagaggaaauuacaccccacugcgcccugauggacuguaucauguacgaugccgcugucuccggaggccugaauauuccugugcuccgggccguucugccgcgcgacaugguguuccggaccucuagccccaaggucgugcuuugaggacuaguaauaaggaaacuguaugaaugucugugggcaggaagugaagagauccuucuguaaagguuuuuggaauuaugucugcugaauaauaaacuuuuuugaaauaauaaaucugguagaaaaaugagaucuaaaaaaaaaaaaaaaaaaaaaaaaaaaaaaaaaaaaaaaaaaaaaaaaaaaaaaaaaaaaaaaaaaaaaaaaaaaaaaaaaaaaaaaaaaaaaaaaaaaa

SEQ ID NO: 17642 - RNA, 2022 nt, Artificial Sequence
  mRNA product Design b-4 (A100) comprising derived and/or modified sequence from LASV(LASV003-NIG-2008;Clade II)__AIT17581__NP (opt5)
aggagagucccgcagucggcguccagcggcucugcuuguucgugugugugucguugcaggccuuauucaagcuuaccaugagcgccuccaaggaggugaaaucuuuccuguggacccagagccucagacgggaacuguccggcuacugcucuagcaucaaacuucaagucguuaaggacgcucaggcccugcuccacgggcuggauuuuuccgaggugucuaacgugcagcgccuuaugagaaagcagaaacgggacgauagcgaccugaagcgccucagagaucugaaucaagcggucaacaaucugguggaacucaaguccacccagcagaaaagcguucugcgggugggaacgcuuaccucugacgaucugcucacacuggcugccgaccuugagaagcugaaauccaaggucauucgcaccgaaagaccccucagcucuggcguguauauggggaaccuguccgcccagcaacuggagcagcggcgcacacuccugaauaugaucggaaugguuggcggggcucagggaacccagccuggcagagauggcgugguccgggugugggacgugaaaaacccggaucuucugaauaaccaauucgggacaaugcccagccucacccuggccugucuuacgaagcagggacaggucgaccugaaugauguugugcucgcucugaccgaccugggccucauuuacacagccaaguauccuaacucuuccgaccuggaucgccuuagccaaucccaucccauccugucuaugguggacaccaaaaagagcucccucaauauuagcggguacaacuuuucucugggagcggccgucaaagcuggcgccugcaugcuugaugggggaaauaugcuggagacaaucaaggugaccccucagacgauggacggcauccucaaauccauucugaagguuaaaaagagccugggcauguucgugucugauacacccggggaaagaaacccuuaugagaauauccucuacaagauuugucugagcggagacggcuggccguauaucgcuucccggaccucuauugucgggcgcgccugggaaaacacaaccguggaucuugagagcgacggaaaaccccagaagguuggcaccgcgggguccaacaaaagccugcagucugccggauuuccuacaggccucacguacucccaacugaugacccugaaggauagcaugaugcagcuugaccccucugcuaaaacauggaucgauauugagggcagaccugaagaccccguggagaucgcccucuaccagccgauguccgggugcuauauccacuucuuucgggaaccuaccgaccugaagcaguucaagcaagaugcuaaauacagccauggaauugacgucacagaucuguuucccgcccagccuggccucaccuccgccgugaucgaggcucugcccagaaauaugguccuuacgugucaggggucugacgauauuaagcgccugcucgacagccagggacggagagauaucaaacugauugacaucgcgcuguccaaggccgauucucgccgguucgaaaacgcugugugggaccaaugcaaagaucuuugucacaugcauacaggcguuguggucgagaagaagaaaagagggggcaaggaggaaaucacaccccacugcgcccucauggacuguauuauguaugaugccgcugugagcggaggccugaauaucccuguucugcgcgccgugcucccgcgggacauggucuuuagaaccuccagccccaaaguggugcugugaggacuaguaauaaggaaacuguaugaaugucugugggcaggaagugaagagauccuucuguaaagguuuuuggaauuaugucugcugaauaauaaacuuuuuugaaauaauaaaucugguagaaaaaugagaucuaaaaaaaaaaaaaaaaaaaaaaaaaaaaaaaaaaaaaaaaaaaaaaaaaaaaaaaaaaaaaaaaaaaaaaaaaaaaaaaaaaaaaaaaaaaaaaaaaaaa

SEQ ID NO: 17643 - RNA, 2022 nt, Artificial Sequence
  mRNA product Design b-4 (A100) comprising derived and/or modified sequence from LASV(LASV035-NIG-2009;Clade II)__AIT17589__NP (opt5)
aggagagucccgcagucggcguccagcggcucugcuuguucgugugugugucguugcaggccuuauucaagcuuaccaugagcgccuccaaggaggugaaaucuuuccuguggacccagagccucagacgggaacuguccggcuacugcucuagcaucaaacuucaagucguuaaagacgcucaggcccugcuccacgggcuggauuuuuccgaggugucuaacgugcagcgccuuaugagaaagcagaaacgggacgauagcgaccugaagcgccucagagaucugaaucaagcggucaacaaucugguggaacucaaguccacacagcagaaaagcauucugcggguuggaacgcuuaccucugacgaucugcucacacuggcugccgaccuugagaagcugaaauccaaggugauccgcaccgaaagaccccucagcucuggcgucuauauggggaaccuguccgcccagcaacuggagcagcggcgcgcucuccugaauaugauuggaauggugggcggggcccagggaacacagccuggcagagauggcguugugcgggucugggacgugaaaaacccggaucuucugaauaaccaauucgggaccaugcccagccucacacuggcuugucuuaccaagcagggacagguggaccugaaugaugccguccucgcgcugacggaccugggccucaucuacaccgccaaguauccuaacucuuccgaccuggaucgccuuagccaaucccaucccauucugaauaugguugacacaaagaagucuagccucaacaucuccggguacaauuuuagccugggagcugccgugaaagcuggcgccugcaugcuugaugggggaaacaugcuggagaccaucaaggugacaccucagaccauggacggcauucucaaaucuauccugaaggucaaaagaucccugggcauguucgugagcgauacgcccggggaacggaauccuuaugagaacauucucuacaagaucugucugucuggagacggcuggccguauauugcgagccgcacauccaucguugggagagccugggaaaacaccacaguggaucuugagucugacggaaagccccagaaagucggcaccaccgggagcaauaagucccugcagagcgcuggauuuccuacaggccucacguacucucaacugaugacccugaaagauuccaugaugcagcuugaccccagcgccaagacauggauugauaucgagggccggccugaagaccccguggagaucgcucucuaccagccgaugucugggugcuauauucacuucuuuagagaaccuaccgaccugaaacaguucaagcaagaugccaaguacucccauggaaucgacguugccgaucuguuucccgcucagccuggccucacaagcgcggugauugaggcccugccccgcaacaugguccuuaccugucagggguccgacgauaucaaaaagcugcucgacucucagggacggagagauauuaaacugaucgacaucgcucugagcaaggccgauucccgcaaauucgaaaaugccgugugggaccaaugcaaggaucuuugucacaugcauacgggcgucgugguugagaagaaaaagagagggggcaaagaggaaauuacaccccacugcgcucucauggacuguaucauguaugaugccgcggugucuggaggccugaacauuccuguccugcgggcugugcucccgcgcgacaugguuuuucggaccagcucccccaaggugguccugugaggacuaguaauaaggaaacuguaugaaugucugugggcaggaagugaagagauccuucuguaaagguuuuuggaauuaugucugcugaauaauaaacuuuuuugaaauaauaaaucugguagaaaaaugagaucuaaaaaaaaaaaaaaaaaaaaaaaaaaaaaaaaaaaaaaaaaaaaaaaaaaaaaaaaaaaaaaaaaaaaaaaaaaaaaaaaaaaaaaaaaaaaaaaaaaaa

SEQ ID NO: 17644 - RNA, 2022 nt, Artificial Sequence
  mRNA product Design b-4 (A100) comprising derived and/or modified sequence from LASV(LASV1000-NIG-2009;Clade II)__AIT17783__NP (opt5)
aggagagucccgcagucggcguccagcggcucugcuuguucgugugugugucguugcaggccuuauucaagcuuaccaugagcgccuccaaggaggugaaaucuuuccuguggacccagagccucagacgggaacuguccggcuacugcucuaacaucaaacuucaagucguuaaggacgcucaggcccugcuccacgggcuggauuuuagcgagguguccaaugugcagcgccuuaugagaaagcagaaacgggacgauucugaccugaagcgccucagagaucugaaccaagcggucaauaaccugguggaacucaagagcacacagcagaaauccauucugcggguuggaacgcuuaccagcgacgaucugcucacacuggcugccgaccuugagaagcugaaaucuaaggugauccgcaccgaaagaccccucuccagcggcgucuauauggggaaucugucuacacagcaacuggagcagcggcgcgcccuccugaacaugauuggaauggugggcggggcucagggaacccagccuggcagagauggcguugugcgggucugggacgugaaaaauccggaucuucugaacaaucaauucgggacaaugcccucccucacccuggccugucuuacgaagcagggacagguggaccugaacgaugucguucucgcucugaccgaccugggccucaucuacacagccaaguauccuaauagcucugaccuggaucgccuuucccaaagccaucccauucugaacaugguggacaccaaaaaguccucucucaauaucagcggguacaacuuuucccugggagcggccgugaaagcuggcgccugcaugcuugaugggggaaauaugcuggagacaaucaaggucaccccucagacgauggacggcauucucaaaagcauccugaaggugaaaaagucucugggcauguucguuuccgauacacccggggaaagaaacccuuaugagaacauucucuacaagaucugucugagcggagacggcuggccguauauugcuucucggaccagcaucguggggcgcgccugggaaaauacaaccgucgaucuugaguccgacggaaaaccccagaaggugggcaccgcggggucuaacaaaagccugcaguccgccggauuuccuacaggccucacguacagccaacugaugacccugaaggauucuaugaugcagcuugaccccuccgcuaaaacauggauugauaucgagggcagaccugaagaccccguugagaucgcccucuaccagccggugagcgggugcuauauucacuucuuucgggaaccuaccgaccugaagcaguucaagcaagaugcuaaauacucucauggaaucgacgucgccgaucuguuucccgcccagccuggccucacauccgcugugauugaggcgcugcccagaaauaugguccuuaccugucaggggagcgacgauaucaagcgccugcucgacucccagggacggagagauauuaaacugaucgacaucgcccugucuaaggcugauagccgccgguucgaaaacgccgugugggaccaaugcaaagaucuuugucacaugcauacgggcguuguggucgagaagaagaaaagagggggcaaggaggaaauuacaccccacugcgcccucauggacuguaucauguaugaugcugccguguccggaggccugaauauuccuguucugcgcgcggugcucccgcgggacauggucuuuagaaccucuagccccaaaguggugcugugaggacuaguaauaaggaaacuguaugaaugucugugggcaggaagugaagagauccuucuguaaagguuuuuggaauuaugucugcugaauaauaaacuuuuuugaaauaauaaaucugguagaaaaaugagaucuaaaaaaaaaaaaaaaaaaaaaaaaaaaaaaaaaaaaaaaaaaaaaaaaaaaaaaaaaaaaaaaaaaaaaaaaaaaaaaaaaaaaaaaaaaaaaaaaaaaa

SEQ ID NO: 17645 - RNA, 2022 nt, Artificial Sequence
  mRNA product Design b-4 (A100) comprising derived and/or modified sequence from LASV(LASV221-NIG-2010;Clade II)__AIT17625__NP (opt5)
aggagagucccgcagucggcguccagcggcucugcuuguucgugugugugucguugcaggccuuauucaagcuuaccaugagcgccuccaaggaggugaaaucuuuccuguggacccagagccucagacgggaacuguccggcuacugcucuagcaucaaacuucaagucguuaaggacgcucaggcccugcuccacgggcuggauuuuuccgaggugucuaacgugcagcgccuuaugagaaagcagcggcgcgacgauagcgaccugaaaagacuccgggaucugaaucaagcggucaacaaucugguggaacucaaguccacacagcaaaagagcauucugcgcguuggaacgcuuaccucugacgaucugcucacacuggcugccgaccuugagaaacugaaguccaaagugaucagaaccgaacggccccucagcucuggcgucuauauggggaaccuguccacacagcagcuggagcagcgcagagcccuccugaauaugauuggaauggugggcggggcucagggaacccagccuggccgggauggcguugugcgcgucugggacgugaagaacccggaucuucugaauaaccaauucgggacaaugcccagccucacccuggccugucuuacgaaacagggacagguggaccugaaugaugcuguccucgcccugaccgaccugggccucaucuacacagcgaaguauccuaacucuuccgaccuggauagacuuagccaaucccaucccauucugaauaugguugacaccaagaaaucuagccucaacaucuccggguacaauuuuagccugggagccgcugugaaggccggcgcuugcaugcuugaugggggaaacaugcuggagacaaucaaagugaccccucagacggucgacggcauucucaagucuauccugaaagugaagcggucccugggcauguucguuagcgauacacccggggaacgcaauccuuaugagaacauucucuacaaaaucugucugucuggagacggcuggccguauauugccagcagaaccuccaucguggggcgggcgugggaaaacacaaccgucgaucuugagucugacggaaagccccagaaggugggcaccgccgggagcaauaaaucccugcagagcgcuggauuuccuacaggccucacguacucucaacugaugacccugaaggauuccaugaugcagcuugaccccagcgccaaaacauggauugauaucgagggcagaccugaagaccccguugagaucgcucucuaccagccgaugucugggugcuauauucacuucuuucgcgaaccuaccgaccugaagcaguucaaacaagaugccaaguacucccauggaaucgacguggccgaucuguuucccgcucagccuggccucacaagcgcggucauugaggcccugccccggaacauggugcuuaccugucagggguccgacgauaucaagagacugcucgacucucagggacgccgggauauuaaacugaucgacaucgcucugagcaaggccgauuccagaaaauucgaaaaugccgucugggaccaaugcaaggaucuuugucacaugcauacgggcgugguuguggagaaaaagaagcgcgggggcaaagaggaaauuacaccccacugcgcucucauggacuguaucauguaugaugccgcggucucuggaggccugaacauuccugugcugcgggcuguucucccgagagacaugguguuucgcaccagcucccccaaggucgugcugugaggacuaguaauaaggaaacuguaugaaugucugugggcaggaagugaagagauccuucuguaaagguuuuuggaauuaugucugcugaauaauaaacuuuuuugaaauaauaaaucugguagaaaaaugagaucuaaaaaaaaaaaaaaaaaaaaaaaaaaaaaaaaaaaaaaaaaaaaaaaaaaaaaaaaaaaaaaaaaaaaaaaaaaaaaaaaaaaaaaaaaaaaaaaaaaaa

SEQ ID NO: 17646 - RNA, 2022 nt, Artificial Sequence
  mRNA product Design b-4 (A100) comprising derived and/or modified sequence from LASV(LASV237-NIG-2010;Clade II)__AIT17639__NP (opt5)
aggagagucccgcagucggcguccagcggcucugcuuguucgugugugugucguugcaggccuuauucaagcuuaccaugagcgccuccaaggaggugaaaucuuuccuguggacccagagccucagacgggaacuguccggcuacugcucuaacaucaaacuucaagucguuaaggacgcucaggcccugcuccacgggcuggauuuuagcgagguguccaaugugcagcgccuuaugagaaagcagaaacgggacgauucugaccugaagcgccucagagaucugaaccaagcggucaauaaccugguggaacucaagagcacacagcagaaauccauucugcggguuggaacgcuuaccagcgacgaucugcucacacuggcugccgaccuugagaagcugaaaucuaaggugauccgcaccgaaagaccccucuccagcggcgucuauauggggaaucugucuacacagcaacuggagcagcggcgcgcccuccugaacaugauuggaauggugggcggggcucagggaacccagccuggcagagauggcguugugcgggucugggacgugaaaaauccggaucuucugaacaaucaauucgggacaaugcccucccucacccuggccugucuuacgaagcagggacagguggaccugaacgaugcuguccucgcccugaccgaccugggccucaucuacacagcgaaguauccuaauagcucugaccuggaucgccuuucccaaagccaucccauucugaacaugguugacaucaaaaaguccucucucaauaucagcggguacaacuuuucccugggagccgcugugaaagccggcgcuugcaugcuugaugggggaaauaugcuggagaccauuaaggugacaccucagaccauggacggcauccucaaaagcauucugaaggucaaaagaucucugggcauguucguguccgauacgcccggggaacggaacccuuaugagaacauccucuacaagauuugucugagcggagacggcuggccguauaucgccucucgcacaagcauuguugggagagcgugggaaaauaccacaguggaucuugaguccgacggaaagccccagaaagucggcucugccgggagcaacaagucccugcagagcgcuggauuuccuaccggccucaccuacucucaacugaugacacugaaagauuccaugaugcagcuugaccccagcgccaagacguggaucgauaucgagggccggccugaagaccccguggagauugcucucuaccagccgaugucugggugcuauauccacuucuuuagagaaccuaccgaccugaaacaguucaagcaagaugccaaguacucccauggaauugacguugccgaucuguuucccgcucagccuggccucacaagcgcggugaucgaggcccugccccgcaauaugguccuuaccugucagggguccgacgauauuaaacggcugcucgacucucagggaagacgcgauaucaagcugaucgacauugcucugagcaaagccgauucccggagauucgaaaacgccgugugggaccaaugcaaggaucuuugucacaugcauacaggcgucgugguugagaaaaagaagcgcgggggcaaagaggaaaucacgccccacugcgcucucauggacuguauuauguaugaugccgcggugucuggaggccugaauaucccuguccugcgggcugugcucccgagagacaugguuuuucgcaccagcucccccaaggugguccugugaggacuaguaauaaggaaacuguaugaaugucugugggcaggaagugaagagauccuucuguaaagguuuuuggaauuaugucugcugaauaauaaacuuuuuugaaauaauaaaucugguagaaaaaugagaucuaaaaaaaaaaaaaaaaaaaaaaaaaaaaaaaaaaaaaaaaaaaaaaaaaaaaaaaaaaaaaaaaaaaaaaaaaaaaaaaaaaaaaaaaaaaaaaaaaaaa

SEQ ID NO: 17647 - RNA, 2022 nt, Artificial Sequence
  mRNA product Design b-4 (A100) comprising derived and/or modified sequence from LASV(LASV253-NIG-2011;Clade II)__AIT17671__NP (opt5)
aggagagucccgcagucggcguccagcggcucugcuuguucgugugugugucguugcaggccuuauucaagcuuaccaugagcgccuccaaggaggugaaaucuuuccuguggacccagagccucagacgggaacuguccggcuacugcucuagcaucaaacuucaagucguuaaggacgcucaggcccugcuccacgggcuggauuuuuccgaggugucuaacgugcagcgccuuaugagaaagcagaaacgggacgauagcgaccugaagcgccucagagaucugaaucaagcggucaacaaucugguggaacucaaguccacccagcagaaaagcguucugcgggugggaacgcuuaccucugacgaucugcucacacuggcugccgaccuugagaagcugaaauccaaggucauucgcaccgaaagaccccucagcucuggcguguauauggggaaccuguccacacagcaacuggagcagcggcgcgcccuccugaauaugaucggaaugguuggcggggcucagggaacccagccuggcagagauggcgugguccgggugugggacgugaaaaacccggaucuucugaauaaccaauucgggacaaugcccagccucacccuggccugucuuacgaagcagggacaggucgaccugaaugauguugugcucgcucugaccgaccugggccucauuuacacagccaaguauccuaacucuuccgaccuggaucgccuuagccaaucccaucccauccugaauaugguggacaccaaaaagucuagccucaacauuuccggguacaauuuuagccugggagcggccgucaaagcuggcgccugcaugcuugaugggggaaacaugcuggagacaaucaaggugaccccucagacgauggacggcauccucaaaucuauucugaagguuaaaaagucccugggcauguucgugagcgauacacccggggaaagaaauccuuaugagaacauccucuacaagauuugucugucuggagacggcuggccguauaucgcuagccggaccuccauugucgggcgcgccugggaaaacacaaccguggaucuugagucugacggaaaaccccagaagguuggcaccgcggggagcaauaaaucccugcagagcgccggauuuccuacaggccucacguacucucaacugaugacccugaaggauuccaugaugcagcuugaccccagcgcuaaaacauggaucgauauugagggcagaccugaagaccccguggagaucgcccucuaccagccgaugucugggugcuauauccacuucuuucgggaaccuaccgaccugaagcaguucaagcaagaugcuaaauacucccauggaauugacgucacagaucuguuucccgcccagccuggccucaccagcgccgugaucgaggcucugcccagaaacaugguccuuacgugucagggguccgacgauauuaagcgccugcucgacucucagggacggagagauaucaaacugauugacaucgcgcugagcaaggccgauucccgccgguucgaaaaugcugugugggaccaaugcaaagaucuuugucacaugcauacaggcguuguggucgagaagaagaaaagagggggcaaggaggaaaucacaccccacugcgcccucauggacuguauuauguaugaugccgcugugucuggaggccugaacaucccuguucugcgcgccgugcucccgcgggacauggucuuuagaaccagcucccccaaaguggugcugugaggacuaguaauaaggaaacuguaugaaugucugugggcaggaagugaagagauccuucuguaaagguuuuuggaauuaugucugcugaauaauaaacuuuuuugaaauaauaaaucugguagaaaaaugagaucuaaaaaaaaaaaaaaaaaaaaaaaaaaaaaaaaaaaaaaaaaaaaaaaaaaaaaaaaaaaaaaaaaaaaaaaaaaaaaaaaaaaaaaaaaaaaaaaaaaaa

SEQ ID NO: 17648 - RNA, 2022 nt, Artificial Sequence
  mRNA product Design b-4 (A100) comprising derived and/or modified sequence from LASV(LASV254-NIG-2011;Clade II)__AIT17675__NP (opt5)
aggagagucccgcagucggcguccagcggcucugcuuguucgugugugugucguugcaggccuuauucaagcuuaccaugagcgccuccaaggaggugaaaucuuuccuguggacccagagccucagacgggaacuguccggcuacugcucuagcaucaaacuucaagucguuaaggacgcucaggcccugcuccacgggcuggauuuuuccgaggugucuaacgugcagcgccuuaugagaaagcagaaacgggacgauagcgaccugaagcgccucagagaucugaaucaagcggucaacaaucugguggaacucaaguccacacagcagaaaagcguucugcgggugggaacgcuuaccucugacgaucugcucacacuggcugccgaccuugagaagcugaaauccaaggucauucgcaccgaaagaccccucagcucuggcguguauauggggaaccuguccacacagcaacuggagcagcggcgcgcccuccugaauaugaucggaaugguuggcggggcucagggaacccagccuggcagagauggcgugguccgggugugggacgugaaaaacccggaucuucugaauaaccaauucgggacaaugcccagccucacccuggccugucuuacgaagcagggacaggucgaccugaaugaugcuguucucgcccugaccgaccugggccucauuuacacagcgaaguauccuaacucuuccgaccuggaucgccuuagccaaucccaucccauccugaauaugguggacaccaaaaagucuagccucaacauuuccggguacaauuuuagccugggagccgcugugaaagccggcgcuugcaugcuugaugggggaaacaugcuggagacaaucaaggucaccccucagacgauggacggcauccucaaaucuauucugaaggugaaaaagucccugggcauguucguuagcgauacacccggggaaagaaauccuuaugagaacauccucuacaagauuugucugucuggagacggcuggccguauaucgccagccggaccuccauuguggggcgcgcgugggaaaacacaaucgucgaucuugagucugacggaaaaccccagaaggugggcaccgccgggagcaauaaaucccugcagagcgcuggauuuccuaccggccucacauacucucaacugaugacgcugaaggauuccaugaugcagcuugaccccagcgccaaaaccuggauugauaucgagggcagaccugaagaccccguugagaucgcucucuaccagccgaugucugggugcuauauucacuucuuucgggaaccuacagaccugaagcaguucaagcaagaugccaaauacucccauggaaucgacguggccgaucuguuucccgcucagccuggccucaccagcgcggucauugaggcccugcccagaaacauggugcuuacaugucagggguccgacgauaucaagcgccugcucgacucucagggacggagagauauuaaacugaucgacaucgcucugagcaaggccgauucccgccgguucgaaaaugccgucugggaccaaugcaaagaucuuugucacaugcauaccggcgugguuguggagaagaagaaaagagggggcaaggaggaaauuacgccccacugcgcucucauggacuguaucauguaugaugccgcggucucuggaggccugaacauuccugugcugcgcgcuguucucccgcgggacaugguguuuagaacaagcucccccaaagucgugcugugaggacuaguaauaaggaaacuguaugaaugucugugggcaggaagugaagagauccuucuguaaagguuuuuggaauuaugucugcugaauaauaaacuuuuuugaaauaauaaaucugguagaaaaaugagaucuaaaaaaaaaaaaaaaaaaaaaaaaaaaaaaaaaaaaaaaaaaaaaaaaaaaaaaaaaaaaaaaaaaaaaaaaaaaaaaaaaaaaaaaaaaaaaaaaaaaa

SEQ ID NO: 17649 - RNA, 2022 nt, Artificial Sequence
  mRNA product Design b-4 (A100) comprising derived and/or modified sequence from LASV(Nig08-04;Clade II)__ADU56611__NP (opt5)
aggagagucccgcagucggcguccagcggcucugcuuguucgugugugugucguugcaggccuuauucaagcuuaccaugagcgccuccaaggaggugaaaucuuuccuguggacccagagccucagacgggaacuguccggcuacugcucuaacaucaaacuucaagucguuaaggacgcucaggcccugcuccacgggcuggauuuuagcgagguguccaaugugcagcgccuuaugagaaagcagaaacgggacgauggagaccugaagcgccucagagaucugaaccaagcggucaauaaccugguggaacucaagucuacccagcagaaaagcguucugcgggugggcacgcuuaccuccgacgaucugcucacacuggcugccgaccuugagaagcugaaaagcaaggucauucgcaccgaaagaccccucucuuccgggguguauaugggaaaucugagcacacagcaacuggagcagcggaaagcccuccugucuaugaucggcaugguugggggagcucagggcacccagccuggccgcgaugggguggucagagugugggacgugaagaacccggaucuucugaauaaccaauucggaacaaugcccucccucacccuggccugucuuacgaagcagggccaggucgaccugaaugaugcuguucucgcccugaccgaccuggggcucauuuacacagcgaaauauccuaacagcucugaccuggaucggcuuucccaaagccaucccauccugaauaugguggacaccaagaaauccucucucaacauuagcggauacaauuuuucccugggcgccgcugugaaggccggggcuugcaugcuugauggaggcaacaugcuggagacaaucaaagucaccccucagacgauggacggcauccucaagagcauucugaaagugaagcgcucucuggggauguucguuuccgauacacccggagaaagaaauccuuaugagaacauccucuacaagauuugucugagcggcgacggguggccguauaucgccucucggaccagcauugugggacgcgcgugggaaaacacaaccgucgaucuugaguccgacggcaaaccccagaagguggggaccgccggaucuaauaaaagccugcaguccgcuggcuuuccuacaggccucacguacagccaacugaugacccugaaggauucuaugaugcagcuugaccccuccgccaaaacauggaucgauauugaggggagaccugaagaccccguugagaucgcucucuaccagccgaugagcggaugcuauauccacuucuuucgggaaccuaccgaccugaagcaguucaagcaagaugccaaauacucucauggcauugacgugacagaucuguuuuccgcccagcccgggcucaccagcgcugucaucgaggcgcugccuagaaacauggugcuuacgugucagggauccgacgauauuaagaaacugcucgacucucagggccgccgggauaucaagcugauugacaucagccugaauaaagccgauuccagacgcuucgaaaacgcugucugggaccaaugcaaggaucuuugucacaugcauacaggggugguuguggagaagaaaaagcggggcggaaaagaggaaaucacaccccacugcgcccucauggacuguauuauguuugaugccgcugucucuggcgggcugaauauccccauucugagagccgugcucccucgcgacaugguuuuccggaccagcuccccgaaggugguccugugaggacuaguaauaaggaaacuguaugaaugucugugggcaggaagugaagagauccuucuguaaagguuuuuggaauuaugucugcugaauaauaaacuuuuuugaaauaauaaaucugguagaaaaaugagaucuaaaaaaaaaaaaaaaaaaaaaaaaaaaaaaaaaaaaaaaaaaaaaaaaaaaaaaaaaaaaaaaaaaaaaaaaaaaaaaaaaaaaaaaaaaaaaaaaaaaa

SEQ ID NO: 17650 - RNA, 2025 nt, Artificial Sequence
  mRNA product Design b-4 (A100) comprising derived and/or modified sequence from LASV(GA391;Clade III)__AAA46284__NP (opt5)
aggagagucccgcagucggcguccagcggcucugcuuguucgugugugugucguugcaggccuuauucaagcuuaccaugagcgccuccaaggaggugagaucuugccuguggacccagagccuccggcgcgaacuguccggcuacuguucuaacaucaaacuucaagucguuaaggacgcucaggcccugcuccacgggcuggauuucagcgagguguccaaugugcagagacuuaugcggaaacagaagcgcgacgauggagaccugaaaagacuccgggaucugaaccaagcggucaauaaccugguggaacucaagucuacacagcagaaaagcguucugcgcgugggcacgcuuuccagcgacgaucugcucauucuggcugccgaccuugagaaacugaagucuaaagucaccagaacagaacggccccucuccagcgggguguauaugggaaaucugucuucccagcaacuggaucagcgcagagcccuccugaacaugaucggcaugaccgggguuagcggaggcggcaagggggcuucuaauggaauugugcgggucugggacgugaaaaacgccgagcuucugaauaaccaguuuggcacaaugccuucccucacccuggcuugccuuacaaagcaggggcaaguggaucugaaugacgccguccaggcgcucaccgaucugggacugaucuacacggccaaguauccgaacagcuccgaccucgaccgccugucucagagccaucccauucuuaauaugaucgauaccaaaaaguccagccugaacaucucuggcuacaauuucucccucggggcugccguuaaagcuggagccuguaugcuggacggcggcaacaugcuugagacaauuaaggugagcccucaaaccauggaugggauccugaaaucuauucucaaggugaaaaagagccugggaauguuugucuccgacacacccggcgaaagaaacccuuaugagaauauccuguacaagauuugccucucuggggauggauggagcuauaucgcgucccggaccagcauugugggccgcgccugggaaaacacgguuguggaccuggagcaggauaauaaaccccagaagaucgggaacggaggcucuaauaaaucccuucagagcgcuggcuucgccgcugggcugaucuacucucaacucaugacacugaaggacuuuaaauguuucaaccugauuccuaaugccaagaccuggauggauaucgagggaagaccggaagaccccgucgagauugcccuuuaccagccuuccagcggcugcuaugugcacuuuuuccgggaacccacagaucucaagcaguuuaaacaggacgcuaaguacucccaugggagagacguuaccgaucuguucgcggcccaaccuggacugaccucugcugugaucgaggcccucccccgcaacauggucauuacaugucagggcagcgaagacauccggaaacugcuugagucccaggggagacgcgauaucaagcugauugacaucacgcucucuaaagccgauagccggaaguuugagaaugcugugugggaccaguucaaggaucugugccacaugcauaccggcgucgugguugaaaagaagaaaagaggaggcaaggaggaaauuacaccgcacugugcccugauggacugcaucauguuugaugcggcuguguccgggggacuugacgccaaaguccuccgcgugguucugccucgggauaugguguucagaaccagcacacccaaggucgugcugugaggacuaguaauaaggaaacuguaugaaugucugugggcaggaagugaagagauccuucuguaaagguuuuuggaauuaugucugcugaauaauaaacuuuuuugaaauaauaaaucugguagaaaaaugagaucuaaaaaaaaaaaaaaaaaaaaaaaaaaaaaaaaaaaaaaaaaaaaaaaaaaaaaaaaaaaaaaaaaaaaaaaaaaaaaaaaaaaaaaaaaaaaaaaaaaaa

SEQ ID NO: 17651 - RNA, 2022 nt, Artificial Sequence
  mRNA product Design b-4 (A100) comprising derived and/or modified sequence from LASV(Nig08-A19;Clade III)__ADU56619__NP (opt5)
aggagagucccgcagucggcguccagcggcucugcuuguucgugugugugucguugcaggccuuauucaagcuuaccaugagcgccuccaaggaggugaaaucuuuccuguggacccagagccucagacgggaacuguccggcuacugcucuaacaucaaacuucaagucguuaaggacgcucaggcccugcuccacgggcuggauuuuagcgagguguccaaugugcagcgccuuaugagaaagcagaaacgggacgauggagaccugaagcgccucagagaucugaaccaagcggucaauaaccugguggaacucaagucuacacagcagaaaagcguucugcgggugggcacgcuuuccagcgacgaucugcucguccuggcugccgaccuugagaagcugaaaucuaaggugguucgcaccgaaagaccccucuccagcgggauuuauaugggaaaucugucuucccagcaacuggaucagcggaaagcccuccugaacaugaucggcaugacagggggaaauggcggccgcaacaccacaagcgacgggauugugagagucugggaugugaagaaugcugagcuucugaacaaucaguucggaaccaugccuucucucacacuggccugucuuaccaagcagggccaaguggaccugaacgaugcuguccaggcccucacggaccuggggcugaucuacaccgcgaaauaucccaauuccagcgaccucgaucggcuggcccagucccauccgauucuuaacaugaucgacacaaagaaaucuagccugaauaucuccggauacaacuuuagccucggcgcugccguuaaggcuggggccugcaugcuggauggaggcaacaugcuugagaccauuaaagugucuccucaaacaauggacggcauccugaaguccauucucaaagugaagcgcagccuggggauguucaucucugauacccccggagaaagaaauccuuaugagaacauucuguacaagaucugucucagcggcgacggguggcccuauauugcgucccggacgucuaucgucggacgcgccugggaaaauacagugguugaucuggagagcgacaacaaaccucagaagaccggcaaugggggauccaacaaaagccuucagucugcuggcuuugccgcuggccugacauacucccagcucaugacccugaaggauagcaugcugcaacuugacccgaaugccaaaaccuggauggauaucgaggggagacccgaagacccuguggagauugcccucuaccagcccucuuccggaugcuauauccacuucuuucgggaaccuacagaccugaagcaguucaagcaggaugcuaaauacagccauggcauugacgucacggaucuguuugcggcccaacccgggcucaccuccgcugugaucgaggcccugccgagaaacaugguuauuacaugucagggaucugaagacauccgcaaacuucuggagagccagggccggagagauaucaagcucauugacaucucccugucuaagguggauagccgcaaauucgagaaugccgucugggaccaguuuaaggaucugugccacaugcauaccgggauuguggucgaaaagaaaaagcggggcggaaaagaggaaaucacaccucacugugcucuuauggacugcauuauguucgaugccgcgguguccggcgggguugacgcuaaggugcucagagccguccugccccgcgauaugguguuucggaccagcacgccuaaaguugugcugugaggacuaguaauaaggaaacuguaugaaugucugugggcaggaagugaagagauccuucuguaaagguuuuuggaauuaugucugcugaauaauaaacuuuuuugaaauaauaaaucugguagaaaaaugagaucuaaaaaaaaaaaaaaaaaaaaaaaaaaaaaaaaaaaaaaaaaaaaaaaaaaaaaaaaaaaaaaaaaaaaaaaaaaaaaaaaaaaaaaaaaaaaaaaaaaaa

SEQ ID NO: 17652 - RNA, 2022 nt, Artificial Sequence
  mRNA product Design b-4 (A100) comprising derived and/or modified sequence from LASV(G1180-SLE-2010;Clade IV)__AIT17169__NP (opt5)
aggagagucccgcagucggcguccagcggcucugcuuguucgugugugugucguugcaggccuuauucaagcuuaccaugagcgccuccaaggagaucaaaucuuuccuguggacccagagccucagacgggaacuguccggcuacugcucuaacauuaagcugcaaguggucaaagacgcucaggcccugcuccacgggcuggauuuuagcgagguuuccaaugugcagcgccuuaugagaaaggaacggcgcgacgauaacgaccugaaaagacuccgggaucugaaucaggcggugaacaaucuggucgagcucaagucuacacaacaaaagagcauccugcgcgugggaacgcuuaccuccgacgaucugcucauucuggcugccgaccuugaaaaacuuaagagcaaaguuaucagaacagagcggccccucucugccggcguguauauggggaaccuguccagccagcagcuggaucagcgcagagcucuccugucuaugauuggaauguccagcggcaaucagcgggcccaggcugggcgcgacggagucgugagaguuugggaugugaagaacgucgagcuucugaauaaccaguucggcaccaugccuucucucacacuggccugucuuaccaaacaaggccagguggaccugaaugaugcggugcaggcccucacagaccuggggcugaucuacaccgcuaaguauccgaacacguccgaccucgaucggcugacccaaagccaucccauccuuaauaugauugacacaaagaaauccucucugaacaucagcggauacaauuuuucccucggcgccgcugucaaggccggggcgugcaugcuggauggaggcaacaugcuugaaaccauuaaaguuagcccucagacaauggacgggauccugaagucuauucucaaagugaagaaagcccugggaauguucaucuccgauacccccggcgagcgcaacccuuaugaaaauauucuguacaagaucugucucagcggcgacggguggcccuauaucgcuucuagaacgagcauuacaggacgggccugggagaacaccguggucgaucuggaguccgacggcaagccucagaaagcugggucuaauaacagcaauaagucccuucagagcgugggauuuacagccggccugaccuacucucaacucaugacccugaaagaugccaugcugcagcuugacccgaacgcuaagacauggauggauaucgaagggagacccgaggacccuguugaaauugcgcucuaccagcccuccagcggaugcuauauccacuucuuucgcgagccuacggaccugaaacaguucaagcaagaugccaaguacucucauggcauugacgugaccgaucuguuugcugcccagcccggccucacauccgccgucaucgacgcucugccgcggaauauggugaucaccugucaggggagcgaugacauuagaaaacuucuggaaucccagggacgcaaggauaucaaacucauugacaucgcccugucuaagacagauagccggaaauaugagaacgcgguuugggaccaauacaaggaucugugccacaugcauaccggcguggucguggagaagaaaaagagagggggaaaagaagagauuacgccucacugugcucuuauggacugcaucauguucgaugccgccgucuccggcgggcucaauacaucugugcugcgcgcuguucugccccgggacaugguguuuagaaccagcaccccucgcgucgugcucugaggacuaguaauaaggaaacuguaugaaugucugugggcaggaagugaagagauccuucuguaaagguuuuuggaauuaugucugcugaauaauaaacuuuuuugaaauaauaaaucugguagaaaaaugagaucuaaaaaaaaaaaaaaaaaaaaaaaaaaaaaaaaaaaaaaaaaaaaaaaaaaaaaaaaaaaaaaaaaaaaaaaaaaaaaaaaaaaaaaaaaaaaaaaaaaaa

SEQ ID NO: 17653 - RNA, 2022 nt, Artificial Sequence
  mRNA product Design b-4 (A100) comprising derived and/or modified sequence from LASV(G1442-SLE-2011;Clade IV)__AIT17181__NP (opt5)
aggagagucccgcagucggcguccagcggcucugcuuguucgugugugugucguugcaggccuuauucaagcuuaccaugagcgccuccaaggaggugaaaucuuuccuguggacccagagccucagacgggaacuguccggcuacugcucuaacaucaaacuucaagucguuaaggacgcucaggcccugcuccacgggcuggauuuuagcgagguguccaaugugcagcgccuuaugagaaagcagcggcgcgacgauaacgaccugaaaagacuccgggaucugaaucaagcggucaacaaucugguggaacucaagucuacacagcaaaagagcguucugcgcgugggaacgcuuaccuccgacgaucugcucguccuggcugccgaccuugagaaacuuaagagcaaagugauuagaacagaacggccccucucugccggcguuuauauggggaaccuguccagccagcagcuggaucagcgcagagcucuccugaauaugaucggaaugucuggcgggauucagggaacccggacaggccgcgacggcguggucagagugugggaugugaagaacgccgaccuucugaauaaccaguucgggaccaugccuucccucacacuggcuugucuuaccaaacaaggacaggucgaucugaaugacguugugcaggcccucacggaccugggccugaucuacaccgcgaaguauccgaacgccagcgaucucgaccggcugacacaaucucaucccauucuuaauaugaucgauaccaagaaauccagccugaacaucuccggguacaauuuuucucucggagcugccgugaaggcuggcgccugcaugcuggacgggggaaacaugcuugagacaauuaaagucagcccucagaccauggauggcauccugaaguccauucucaaagugaagaaaacgcugggcauguucaucagcgacacacccggggagcgcaacccuuaugaaaauauucuguacaagaucugucucucuggagauggcuggcccuauauugcguccagaaccagcaucacagggcgggccugggagaacaccguuguggaccuggaaucugauggaaagccucagaaagcuggcagcaauaacuccaauaagucucuucagagcgccggguuugcugccggacugaccuacucccaacucaugacacugaaagacgccaugcugcagcuugauccgaacgcuaagacguggauggacaucgagggcagacccgaggacccugucgaaauugcgcucuaccagcccagcucuggcugcuauauccacuucuuucgcgagccuaccgaucugaaacaguucaagcaagacgccaaguacucccaugggauugaugugacagaccuguuugcugcccagcccggacucaccagcgccguuaucgaagcucugccgcggaauauggugauuacaugucagggcucugaugacaucaaaaagcugcuggagucccaggggagaaaagauaucaagcucauugacaucgcccugagcaaaaccgauucccgcaaguaugaaaacgcggucugggaccaauacaaggaucugugccacaugcauacgggaguggucguggagaaaaagaaacggggcgggaaggaggaaauuacaccucacugugcucuuauggacugcaucauguucgaugccgccguuucuggcggacucaauacccuggugcugagagcuguccucccccgcgacaugguguuucggaccagcacaccuagaguugugcugugaggacuaguaauaaggaaacuguaugaaugucugugggcaggaagugaagagauccuucuguaaagguuuuuggaauuaugucugcugaauaauaaacuuuuuugaaauaauaaaucugguagaaaaaugagaucuaaaaaaaaaaaaaaaaaaaaaaaaaaaaaaaaaaaaaaaaaaaaaaaaaaaaaaaaaaaaaaaaaaaaaaaaaaaaaaaaaaaaaaaaaaaaaaaaaaaa

SEQ ID NO: 17654 - RNA, 2022 nt, Artificial Sequence
  mRNA product Design b-4 (A100) comprising derived and/or modified sequence from LASV(G3010-SLE-2013;Clade IV)__AIT17345__NP (opt5)
aggagagucccgcagucggcguccagcggcucugcuuguucgugugugugucguugcaggccuuauucaagcuuaccaugagcgccuccaaggagaucaaaucuuuccuguggacccagagccucagacgggaacuguccggcuacugcucuaacauuaaacuucaaguggucaaagacgcucaggcccugcuccacgggcuggauuuuagcgagguuuccaaugugcagcgccuuaugagaaaggaacggcgcgacgauaacgaccugaaaagacuccgggaucugaaucaggcggugaacaaucuggucgagcucaagucuacacaacaaaagagcauccugcgcgugggaacgcuuaccuccgacgaucugcucauucuggcugccgaccuugaaaaacuuaagagcaaaguuacaagaaccgagcggccccucucugccggcguguauauggggaaccuguccagccagcagcuggaucagcgcagagcucuccugucuaugaucggaauguccagcggcguccagggggcccgggcuggacgcgacggcgugguuagagugugggaugucaagaaugccgagcuucugaacaaucaguucggcacaaugccuucucucacccuggcgugucuuacaaaacaggggcaaguggaccugaacgaugugguccaggcccucaccgaccugggacugauuuacacggcuaaguauccgaauaccuccgaccucgaucggcugacacagagccaucccauccuuaacaugaucgacaccaagaaauccucucugaauauuagcggcuacaacuuuucccucggggccgcuguuaaggccggagcgugcaugcuggauggcgggaauaugcuugaaacaaucaaagugagcccucaaaccauggacggcauucugaagucuauccucaaagugaagaaagcccugggaauguucauuuccgagacgcccggcgaacgcaacccuuaugagaacauccuguacaagauuugucucagcggggauggauggcccuauaucgcuucuagaacaagcaucaccggccgggccugggagaauacagucguggaccuggaauccgaugggaagccucagaaagcuggaucuaacaauagcaacaagucccuucagagcgccggcuuuaccgccgggcugaccuacucucagcucaugacacugaaagacgcuaugcugcaacuugauccgaaugcgaagacguggauggacauugagggaagacccgaagauccuguugagguggcccucuaccagcccuccagcggcugcuauauccacuucuuucgcgaaccuaccgaccugaaacaguucaagcaggacgcuaaguacucucauggcauugaugucacagaccuguuugccgcccaacccgggcucaccuccgcugugaucgaugcccugccgcggaacaugguuauuacaugucagggaagcgacgauaucaaaaagcugcuggagucccagggcagaaaagacaucaagcucauugauaucgcgcugucuaaaaccgacagccgcaaguaugagaaugcugugugggaucaguacaaggaccugugccacaugcauacgggggucguggucgaaaagaagaaacggggaggcaaggaggaaauuacaccucacugugcccuuauggauugcaucauguucgacgccgcuguguccgggggccucaacaccucuguucugagagccgugcugccccgcgauauggucuuucggaccagcacaccuagagugguucucugaggacuaguaauaaggaaacuguaugaaugucugugggcaggaagugaagagauccuucuguaaagguuuuuggaauuaugucugcugaauaauaaacuuuuuugaaauaauaaaucugguagaaaaaugagaucuaaaaaaaaaaaaaaaaaaaaaaaaaaaaaaaaaaaaaaaaaaaaaaaaaaaaaaaaaaaaaaaaaaaaaaaaaaaaaaaaaaaaaaaaaaaaaaaaaaaa

SEQ ID NO: 17655 - RNA, 2022 nt, Artificial Sequence
  mRNA product Design b-4 (A100) comprising derived and/or modified sequence from LASV(G502-SLE-2009;Clade IV)__AIT17127__NP (opt5)
aggagagucccgcagucggcguccagcggcucugcuuguucgugugugugucguugcaggccuuauucaagcuuaccaugagcgccuccaaggagaucaaaucuuuccuguggacccagagccucagacgggaacuguccggcuacugcucuaacauuaagcugcaaguggucaaagacgcucaggcccugcuccacgggcuggauuuuagcgagguuuccaaugugcagcgccuuaugagaaaggaacggcgcgacgauaacgaccugaaaagacuccgggaucugaaucaggcggugaacaaucuggucgagcucaagucuacacaacaaaagagcauccugcgcgugggaacgcuuaccuccgacgaucugcucauucuggcugccgaccuugaaaaacuuaagagcaaaguuaucagaacagagcggccccucucugccggcguguauauggggaaccuguccagccagcagcuggaucagcgcagagcucuccugucuaugauuggaauguccggcgggaaucagggaguccgggccggcaaggacggcgugguucgcgugugggaugucaaaaacgcugagcuucugaauaaccaguucgggaccaugccuagccucacacuggccugucuuaccaagcagggacaaguggaccugaaugaugcggugcaggcccucacagaccugggccugaucuacaccgcuaaguauccgaacacgucugaccucgauagacugacccagucccaucccauccuuaauaugauugacaccaaaaagagcucccugaacaucucuggguacaauuuuagccucggagccgcugucaaagccggcgcgugcaugcuggaugggggaaacaugcuugaaacaauuaagguuuccccucaaacaauggacggcauccugaaaagcauucucaaggugaaaaaggcccugggcauguucaucucugauacccccggggagcggaacccuuaugaaaauauucuguacaagaucugucucuccggagacggcuggcccuauaucgcuagccgcacgucuauuacagggagagccugggagaacaccguggucgaucuggagagcgacggaaaaccucagaaggcuggcuccaauaacucuaauaaaagccuucaguccgccggguuuacagccggacugaccuacagccagcucaugacccugaaggaugcuaugcugcaacuugacccgaacacaaaaacguggauggauaucgaaggccggcccgaggacccuguggaaauugcgcucuaccagcccucuuccggcugcuauauccacuucuuuagagagccuaccgaccugaagcaguucaagcaggaugccaaauacagccaugggauugacguuacagaucuguuugcugcccaacccggacucaccucugccgugaucgacgcucugccgcgcaauauggucaucacaugucagggcuccgaugacauucggaaacuucuggaaagccaggggagaaaggauaucaagcucauugacaucgcccugaacaaaaccgauucccgcaaguaugagaaugcggugugggaccaguacaaggaucugugccacaugcauacgggaguuguggucgagaaaaagaaacggggcgggaaggaagagauuacaccucacugugcucuuauggacugcaucauguucgaugccgccgugucuggcggacucaacaccagcguccugagagcugugcugccccgcgacaugguuuuucggaccuccacaccuagagugguccucugaggacuaguaauaaggaaacuguaugaaugucugugggcaggaagugaagagauccuucuguaaagguuuuuggaauuaugucugcugaauaauaaacuuuuuugaaauaauaaaucugguagaaaaaugagaucuaaaaaaaaaaaaaaaaaaaaaaaaaaaaaaaaaaaaaaaaaaaaaaaaaaaaaaaaaaaaaaaaaaaaaaaaaaaaaaaaaaaaaaaaaaaaaaaaaaaa

SEQ ID NO: 17656 - RNA, 2022 nt, Artificial Sequence
  mRNA product Design b-4 (A100) comprising derived and/or modified sequence from LASV(G733-SLE-2010;Clade IV)__AIT17155__NP (opt5)
aggagagucccgcagucggcguccagcggcucugcuuguucgugugugugucguugcaggccuuauucaagcuuaccaugagcgccuccaaggagaucaaaucuuuccuguggacccagagccucagacgggaacuguccggcuacugcucuaacauuaagcugcaaguggucaaagacgcucaggcccugcuccacgggcuggauuuuagcgagguuuccaaugugcagcgccuuaugagaaaggaacggcgcgacgauaacgaccugaaaagacuccgggaucugaaucaggcggugaacaaucuggucgagcucaagucuacacaacaaaagagcgugcugcgcguuggaacgcuuaccuccgacgaacugcucgugcuggcugccgaucuugagaaacuuaagagcaaagucaucagaacagagcggccccucucugccggcguguauauggggaaccuguccagccagcagcuggaccagcgcagagcucuccugucuaugauuggaauguccggcgggaaucagggagcccggaccggccgcgauggcguugugagagucugggacgugaagaacgcugaacuucugaauaaccaguucgggacaaugccuagccucacccuggccugucuuacaaaacagggacaaguggaucugaaugacgcgguccaggcccucaccgaucugggccugaucuacacggcuaaguauccgaacaccucugaccucgaccggcugacacagucccaucccauucuuaauaugaucgauaccaagaaaagcucccugaacaucucuggguacaauuuuagccucggagccgcuguuaaggccggcgcgugcaugcuggacgggggaaacaugcuugagacaauuaaaguguccccucaaaccauggauggcauccucaagagcauucugaaagugaagaaagcccugggcauguucaucucugacacgcccggggaacgcaacccuuaugagaauauucuguacaagaucugucucuccggagauggcuggcccuauauugcuagcagaacaucuaucaccgggcgggccugggagaacacagucguggaccuggaaagcgauggaaagccucagaaagcuggcuccaauaacucuaauaagagccuucaguccgccggguuuaccgccggacugaccuacagccagcucaugacacugaaagacgcuaugcugcaacuugauccgaacgcgaagacguggauggacaucgagggcagacccgaagauccuguugagauugcccucuaccagcccucuuccggcugcuauauccacuucuuucgcgaaccuaccgaccugaaacaguucaagcaggacgcuaaguacagccaugggauugaugugacagaccuguuugccgcccaacccggacucaccucugcugucaucgaugcccugccgcggaauauggugauuacaugucagggcuccgacgauaucagaaaacuucuggagagccaggggcgcaaggacaucaaacucauugauaucgcgcuguccaagauugacucucggaaauaugagaacgcuguuugggaucaguacaaggaccugugccacaugcauaccggaguggucguggaaaagaaaaagagaggcgggaaagaggaaaucacgccucacugugcccuuauggauugcauuauguucgacgccgcugucagcggcggacucaauucccuggugcugcgcgccguucucccccgggauaugguguuuagaacaucuaccccucgcgucgugcugugaggacuaguaauaaggaaacuguaugaaugucugugggcaggaagugaagagauccuucuguaaagguuuuuggaauuaugucugcugaauaauaaacuuuuuugaaauaauaaaucugguagaaaaaugagaucuaaaaaaaaaaaaaaaaaaaaaaaaaaaaaaaaaaaaaaaaaaaaaaaaaaaaaaaaaaaaaaaaaaaaaaaaaaaaaaaaaaaaaaaaaaaaaaaaaaaa

SEQ ID NO: 17657 - RNA, 2022 nt, Artificial Sequence
  mRNA product Design b-4 (A100) comprising derived and/or modified sequence from MOPV/LASV reassortant(IGS-1;Clade IV)__AFY05578__NP (opt5)
aggagagucccgcagucggcguccagcggcucugcuuguucgugugugugucguugcaggccuuauucaagcuuaccaugagcgccuccaaggagaucaaaucuuuccuguggacccagagccucagacgggaacuguccggcuacugcucuaacauuaaacuucaaguggucaaggacgcucaggcccugcuccacgggcuggauuuuagcgagguuuccaaugugcagcgccuuaugagaaaggaacggcgcgacgauaacgaccugaaaagacuccgggaucugaaucaggcggugaacaaucuggucgagcucaagucuacacaacaaaagagcauccugcgcgugggaacgcuuaccuccgacgaucugcucauucuggcugccgaccuugaaaaacugagaagcaagguuauccggacagagcgcccccucucugccggcguguauauggggaaccuguccagccagcagcuggaucagagacgggcucuccugaauaugauuggaaugucuggcgggaaccagggagcccgcgcuggcagagacggcgucgugcggguuugggaugugaaaaaugccgagcuucuguccaaccaguucgggaccaugccuagccucacacuggcgugucuuaccaagcagggacaagucgaccugaaugaugccgugcaggcucucacagaccugggccugaucuacaccgccaaauauccgaacacgucugaccucgaucgccugacccagucccaucccauccuuaauaugauugacacaaagaaaagcucccugaacaucucuggguacaauuuuagccucggagcugccgugaaggcgggcgccugcaugcuggaugggggaaacaugcuugaaaccauuaaggucuccccucaaacaauggacggcauccugaaaagcauucucaagguuaaaaaggcucugggcauguucaucucugauacccccggggagagaaacccuuaugaaaauauucuguacaaaaucugucucuccggagacggcuggcccuauaucgccagccggacgucuauuacagggagagcuugggagaacaccgugguggaucuggagagcgacggaaagccucagaaggccgauuccaauaacucuagcaaaucccuucagagcgccggcuuuacagcugggcugaccuacucucagcucaugacccugaaggacgcgaugcugcaacuugauccgaaugccaaaacauggauggacaucgaaggacgccccgaggacccugucgaaauugcucucuaccagcccuccagcggcugcuauauccacuucuuucgggagccuacggaucugaagcaguucaaacaggacgccaaguacucucauggcauugaugugaccgaccuguuugccacacaacccgggcucaccuccgcuguuaucgaugcccugccgagaaacauggugaucacaugucagggaagcgacgauauucgcaaacuucuggaaucccagggccggaaggacaucaagcucauugauaucgaccugucuaaaaccgauagcagaaaguaugagaaugcggucugggaccaguacaaagaucugugccacaugcauacgggggugguuguggagaagaagaaacgcggaggcaaggaagagauuacaccucacugugcucuuauggacugcaucauguucgacgccgccgucuccgggggccucaacaccucugugcugcgggcuguccugcccagagauaugguguuucgcaccagcacaccucggguugugcucugaggacuaguaauaaggaaacuguaugaaugucugugggcaggaagugaagagauccuucuguaaagguuuuuggaauuaugucugcugaauaauaaacuuuuuugaaauaauaaaucugguagaaaaaugagaucuaaaaaaaaaaaaaaaaaaaaaaaaaaaaaaaaaaaaaaaaaaaaaaaaaaaaaaaaaaaaaaaaaaaaaaaaaaaaaaaaaaaaaaaaaaaaaaaaaaaa

SEQ ID NO: 17658 - RNA, 2022 nt, Artificial Sequence
  mRNA product Design b-4 (A100) comprising derived and/or modified sequence from LASV(LM765-SLE-2012;Clade IV)__AIT17815__NP (opt5)
aggagagucccgcagucggcguccagcggcucugcuuguucgugugugugucguugcaggccuuauucaagcuuaccaugagcgccuccaaggagaucaaaucuuuccuguggacccagagccucagacgggaacuguccggcuacugcucuaacauuaagcugcaaguggucaaagacgcucaggcccugcuccacgggcuggauuuuagcgagguuuccaaugugcagcgccuuaugagaaaggaacggcgcgacgauaacgaccugaaaagacuccgggaucugaaucaggcggugaacaaucuggucgagcucaagucuacacaacaaaagagcauccugcgcgugggaacgcuuaccuccgacgaucugcucauucuggcugccgaccuugaaaaacuuaagagcaaaguuacaagaaccgagcggccccucucugccggcguguauauggggaaccuguccagccagcagcuggaucagcgcagagcucuccuggacaugaucggaaugucuggcuccaaucagggggcccgggcuggacgcgauggcgucgugagaguuugggacgugaagaacgccgagcuucugaauaaccaguucggcacaaugccuagccucacccuggcgugucuuacaaaacaggggcaagucgaucugaaugacgccgugcaggcucucaccgaccugggacugauuuacacggccaaguauccgaacaccucugaucucgaccggcugacacagucccaucccauccuuaauaugaucgauaccaagaaaagcucccugaacauuucuggcuacaauuuuagccucggggcugccgugaaggcgggagccugcaugcuggacggcgggaacaugcuugaaacaaucaaagucuccccucaaaccauggauggcauucucaagagcauccugaaaguuaagaaagcucugggaauguucauuucugacgcccccggcgagcgcaacccuuaugaaaauauccuguacaagauuugucucuccggggauggauggcccuauaucgcuagcagaacgucuaucacaggccgggccugggagaacaccgugguggaccuggagagcgaugggaagccucagaaagccggauccaauggcucuaacaagagccuucaguccgcuggguuuacagcgggacugaccuacagccagcucaugacccugaaagacgccaugcugcaacuugauccgaaugcuaagacauggauggacauugaaggcagacccgaggacccugucgaaaucgcccucuaccagcccucuuccggcugcuauauucacuucuuucgcgagccuacggaucugaaacaguucaagcaggacgccaaguacagccaugggaucgaugugaccgaccuguuugcugcccaacccggacucacaucugcgguuauugaugcucugccgcggaacauggugaucaccugucagggcuccgacgauaucagaaaacuuuucgaaagccaggggcgcaaggacauuaaacugaucgauauugcccucuccaagacagacucucggaaauaugagaaugccgucugggaucaguacaaggaccugugccacaugcauaccggaaucgugguugagaagaaaaagagaggcgggaaagaagagauuacgccucacugugcucugauggauugcaucauguuugacgccgcugugagcggcggacuuaacacauccguccuccgcgccgugcugccccgggacauggucuucagaaccucuaccccucgcgugguucugugaggacuaguaauaaggaaacuguaugaaugucugugggcaggaagugaagagauccuucuguaaagguuuuuggaauuaugucugcugaauaauaaacuuuuuugaaauaauaaaucugguagaaaaaugagaucuaaaaaaaaaaaaaaaaaaaaaaaaaaaaaaaaaaaaaaaaaaaaaaaaaaaaaaaaaaaaaaaaaaaaaaaaaaaaaaaaaaaaaaaaaaaaaaaaaaaa

SEQ ID NO: 17659 - RNA, 2022 nt, Artificial Sequence
  mRNA product Design b-4 (A100) comprising derived and/or modified sequence from LASV(LM776-SLE-2012;Clade IV)__AIT17825__NP (opt5)
aggagagucccgcagucggcguccagcggcucugcuuguucgugugugugucguugcaggccuuauucaagcuuaccaugagcgccuccaaggagaucaaaucuuuccuguggacccagagccucagacgggaacuguccucuuacugcagcaacauuaaacuucaaguggucaaggacgcucaggcccugcuccacggccuggauuuuuccgagguuucuaaugugcagcgccuuaugagaaaggaacggcgcgacgauaacgaccugaaaagacuccgggaucugaaucaggcggugaacaaucuggucgagcucaagagcacacaacagaaguccauccugcgcguggggacgcuuaccagcgacgaucugcucauucuggcugccgaccuugaaaaacugaagucuaaaguuacaagaaccgagcggccccucuccgccggaguguauaugggcaaccugagcucucagcagcuggaucaacgcagagcucuccuguccaugaucgggaugagcggaucuaaucagggcgcccgggcugggcgcgacggagucgugagaguuugggaugugaagaacgccgagcuucugaauaaccaguucggcacaaugccuucccucacccuggcgugucuuacaaaacagggccaagucgaccugaaugaugccgugcaggcucucaccgaccuggggcugauuuacacggccaaguauccgaacaccagcgaccucgaucggcugacacagucccaucccauccuuaauaugaucgacaccaagaaaucuagccugaacauuuccggauacaauuuuagccucggcgcugccgugaaggcgggggccugcaugcuggauggaggcaacaugcuugaaacaaucaaagucucuccucaaaccauggacgggauucugaaguccauccucaaaguuaagaaagcucugggaauguucauuagcgauacgcccggcgagcgcaacccuuaugaaaauauccuguacaagauuugucucucuggcgacggguggcccuauaucgccagcagaacauccaucaccggacgggcuugggagaacacagugguggaucuggagucugacggcaagccucagaaagccgggagcaauaacuccaauaagagccuucagucugccggauuuaccgcuggccugaccuacucccagcucaugacacugaaagaugcgaugcugcaacuugacccgaacgccaagacguggauggauauugaagggagacccgaggacccugucgaaguggcucucuaccagcccagcucuggaugcuauauccacuucuuucgcgagccuaccgaccugaaacaguucaagcaggaugccaaguacucccauggcauugacguuacagaucuguuugccgcucaacccggccucaccagcgccgugaucgacgcgcugccgcggaauauggucauuacaugucagggguccgaugacaucagaaaacuucuggaaucucagggacgcaaggauaucaaacucauugacaucgcucugagcaagaccgauucccggaaauaugagaacgccgugugggaccaguacaaggaucugugccacaugcauacgggcguuguggucgagaagaaaaagagagggggaaaagaagagauuacaccucacugugcccuuauggacugcaucauguucgaugcugccgugucuggcgggcucaauaccagcguccugcgcgcugugcugccccgggacaugguuuuuagaaccuccacaccucgcgugguccucugaggacuaguaauaaggaaacuguaugaaugucugugggcaggaagugaagagauccuucuguaaagguuuuuggaauuaugucugcugaauaauaaacuuuuuugaaauaauaaaucugguagaaaaaugagaucuaaaaaaaaaaaaaaaaaaaaaaaaaaaaaaaaaaaaaaaaaaaaaaaaaaaaaaaaaaaaaaaaaaaaaaaaaaaaaaaaaaaaaaaaaaaaaaaaaaaa

SEQ ID NO: 17660 - RNA, 2022 nt, Artificial Sequence
  mRNA product Design b-4 (A100) comprising derived and/or modified sequence from LASV(Mad39;Clade IV)__ANH09723__NP (opt5)
aggagagucccgcagucggcguccagcggcucugcuuguucgugugugugucguugcaggccuuauucaagcuuaccaugagcgccuccaaggagaucaaaucuuuccuguggacccagagccucagacgggaacuguccggcuacugcucuaacauuaagcugcaaguggucaaagacgcucaggcccugcuccacgggcuggauuuuagcgagguuuccaaugugcagcgccuuaugagaaagcagcggcgcgacgauaacgaccugaaaagacuccgggaucugaaucaagcggugaacaaucuggucgaacucaagucuacacagcaaaagagcgugcugcgcguuggaacgcuuaccuccgacgaucugcucacacuggcugccgaccuugagaaacuuaagagcaaagugaccagaacagaacggccccucaccgccggcgucuauauggggaaccugucuucccagcagcuggaucagcgcagagcucuccugaauaugaucggaaugagcggcgggaaccagggagcccggacaggccgcgacggcgugguuagagugugggaugucaagaaugcugagcuucugaacaaucaguucgggaccaugccuucucucacgcuggccugucuuaccaaacaaggacagguggaccugaacgaugugguccaggcgcucacagaccugggccugauuuacaccgccaaguauccgaauacauccgaccucgaucggcugacccaaagccaucccauccuuaacaugauugacacgaauaagucuucccugaacaucagcggguacaacuuuucccucggagcugccguuaaagcuggcgccugcaugcuggaugggggaaauaugcuugagacaaucaaggugucuccucagaccauggacggcauucugaaaagcauccucaaggugaaaaagucccugggcauguucauuagcgauacacccggggaacgcaacccuuaugagaauauccuguacaaaauuugucucucuggagacggcuggcccuauaucgcguccagaaccagcauuaccgggcgggccugggaaaacacagucguggaucuggagucuggaggcaagccucagaaggcugggagcaauaacuccaauaaaucucuucagagcgccggauuugcugccggccugacguacucccaacucaugacccugaaggacgccaugcugcagcuugauccgaacgcuaaaacauggauggacaucgagggcagacccgaagauccuguugagaucgcgcucuaccagcccauuagcgggugcuauauccacuucuuucgcgaaccuaccgaccugaagcaguucaaacaagacgccaaguacucucauggaauugaugugacagaccuguuugcugcccagcccggccucaccuccgccgucaucgaggcucugccgcggaauauggugauuacgugucaggggagcgaugacaucagaaaacuuuucgaaucucagggacgcaaggauaucaagcugauugacaucgcccucuccaaaacagauagccggaaguaugagaacgcgguuugggaccaauacaaagaucugugccacaugcauaccggcguggucguggagaagaagaaaaagggcgggaaagaagagauuaccccucacugugcucugauggacugcaucauguuugaugccgccgucuccggaggccuuaauacacucgugcugagagcuguucugccccgcgacaugguguuccggaccucuacaccuaaggucgugcucugaggacuaguaauaaggaaacuguaugaaugucugugggcaggaagugaagagauccuucuguaaagguuuuuggaauuaugucugcugaauaauaaacuuuuuugaaauaauaaaucugguagaaaaaugagaucuaaaaaaaaaaaaaaaaaaaaaaaaaaaaaaaaaaaaaaaaaaaaaaaaaaaaaaaaaaaaaaaaaaaaaaaaaaaaaaaaaaaaaaaaaaaaaaaaaaaa

SEQ ID NO: 17661 - RNA, 2022 nt, Artificial Sequence
  mRNA product Design b-4 (A100) comprising derived and/or modified sequence from LASV(Z0947-SLE-2011;Clade IV)__AIT17841__NP (opt5)
aggagagucccgcagucggcguccagcggcucugcuuguucgugugugugucguugcaggccuuauucaagcuuaccaugagcgccuccaaggagaucaaaucuuuccuguggacccagagccucagacgggaacuguccggcuacugcucuaacauuaagcugcaaguggucaaagacgcucaggcccugcuccacgggcuggauuuuagcgagguuuccaaugugcagcgccuuaugagaaaggaacggcgcgacgauaacgaccugaaaagacuccgggaucugaaucaggcggugaacaaucuggucgagcucaagucuacacaacaaaagagcauccugcgcgugggaacgcuuaccuccgacgaucugcucauucuggcugccgaccuugaaaaacuuaagagcaaaguuacaagaaccgagcggccccucucugccggcguguauauggggaaccuguccagccagcagcuggaucagcgcagagcucuccugaauaugaucggaaugucuggcuccaaccagggggcccggacaggacgcgacggcgucgugagaguuugggaugugaagaaugcugagcuucugaacaaucaguucggcaccaugccuagccucacacuggccugucuuaccaaacaggggcaagucgaccugaacgaugcggugcaggcccucacggaccugggacugauuuacaccgcuaaguauccgaauacaucugaccucgaucggcugacccagucccaucccauccuuaacaugaucgacacaaagaaaagcucccugaauauuucuggcuacaacuuuagccucggggccgcugugaaggccggagcgugcaugcuggauggcgggaacaugcuugaaaccaucaaagucuccccucaaacgauggacggcauucucaagagcauccugaaaguuaagaaagcccugggaauguucauuucugaugcucccggcgagcgcaauccuuaugaaaacauccuguacaagauuugucucuccggggacggauggcccuauaucgccagcagaacaucuaucaccggccgggcuugggagaauacagugguggaucuggagagcgacgggaagccucagaaagccggauccaacggcucuaauaagagccuucaguccgccggguuuaccgcuggacugaccuacagccagcucaugacacugaaagaugcgaugcugcaacuugacccgaacgccaagacguggauggauauugaaggcagacccgaggacccugucgaaaucgcucucuaccagcccucuuccggcugcuauauucacuucuuucgcgagccuaccgaccugaaacaguucaagcaggaugccaaguacagccaugggaucgacgugacagaucuguuugccgcucaacccggacucaccucugccguuauugacgcgcugccgcggaauauggugaucacaugucagggcuccgaugacaucagaaaacuuuucgaaagccaggggcgcaaggauauuaaacugaucgacauugcucucuccaagaccgauucucggaaauaugagaacgccgucugggaccaguacaaggaucugugccacaugcauacgggaaucgugguugagaagaaaaagagaggcgggaaagaagagauuacaccucacugugcccugauggacugcaucauguuugaugcugccgugagcggcggacuuaauaccuccguccuccgcgcugugcugccccgggacauggucuucagaaccucuacaccucgcgugguucugugaggacuaguaauaaggaaacuguaugaaugucugugggcaggaagugaagagauccuucuguaaagguuuuuggaauuaugucugcugaauaauaaacuuuuuugaaauaauaaaucugguagaaaaaugagaucuaaaaaaaaaaaaaaaaaaaaaaaaaaaaaaaaaaaaaaaaaaaaaaaaaaaaaaaaaaaaaaaaaaaaaaaaaaaaaaaaaaaaaaaaaaaaaaaaaaaa

SEQ ID NO: 17662 - RNA, 1892 nt, Artificial Sequence
  mRNA product Design i-3 (hSL-A64-N5) comprising derived and/or modified sequence from LASV(Josiah;Clade IV)__NP_694869__NP (opt1)
aggagaaagcuuaccaugagcgccuccaaggagaucaagagcuuccuguggacccagucccuccgccgggagcugagcggcuacugcuccaacaucaagcuccagguggucaaggacgcccaggcgcugcugcacgggcuggacuucagcgagguguccaacgugcagcgccucaugcggaaggagcgccgggacgacaacgaccugaagcgccugcgggaccucaaccaggccgucaacaaccugguggagcucaagagcacccagcagaaguccauccugcgcgugggcacccugaccagcgacgaccugcucauccuggccgccgaccuggagaagcucaaguccaaggucauccggaccgagcgcccccugagcgccgggguguacaugggcaaccuguccagccagcagcucgaccagcggcgcgcgcugcugaacaugaucgggauguccggcggcaaccagggggcccgggccggccgcgacggggugguccgggugugggacgugaagaacgccgagcuccugaacaaccaguucggcaccaugccgagccugacgcucgcgugccugaccaagcaggggcaggucgaccugaacgacgccgugcaggcccucaccgaccugggccugaucuacaccgccaaguaccccaacacguccgaccucgaccgccugacccagagccaccccauccugaacaugaucgacaccaagaaguccagccucaacaucagcggcuacaacuucucccugggggccgcggugaaggccggcgccugcaugcuggacgggggcaacaugcucgagaccaucaaggucagcccccagacgauggacggcauccugaaguccauccugaaggugaagaaggcccucgggauguucaucagcgacaccccgggcgagcggaaccccuacgagaacauccuguacaagaucugccuguccggggacggcuggcccuacaucgccagccgcaccuccaucaccgggcgggcgugggagaacacgguggucgaccucgagagcgacggcaagccccagaaggccgacuccaacaacagcuccaagagccugcaguccgccggcuucaccgccgggcugaccuacagccagcucaugacccugaaggacgccaugcugcagcuggacccgaacgcgaagacguggauggacaucgagggccgccccgaggaccccguggagaucgcccucuaccagcccuccagcgggugcuacauccacuucuuccgggagccgaccgaccugaagcaguucaagcaggacgccaaguacucccacggcaucgacgugaccgaccuguucgccacccagcccgggcucacgagcgccgucaucgacgcgcugccccgcaacauggugaucacgugccagggcuccgacgacauccgcaagcugcucgagagccagggccggaaggacaucaagcugaucgacaucgcccugagcaagaccgacucccgcaaguacgagaacgccgugugggaccaguacaaggaccucugccacaugcacaccggggucguggucgagaagaagaagcggggcgggaaggaggagaucaccccgcacugcgcccugauggacugcaucauguucgacgcggccgugagcggcgggcugaacaccuccgugcuccgcgccguccugccccgggacaugguguuccgcaccagcacgccccgggugguccugugaggacuaguuauaagacugacuagcccgaugggccucccaacgggcccuccuccccuccuugcaccgagauuaaucaaaggcucuuuucagagccaccaaaaaaaaaaaaaaaaaaaaaaaaaaaaaaaaaaaaaaaaaaaaaaaaaaaaaaaaaaaaaaaaagaauu

SEQ ID NO: 17663 - RNA, 1892 nt, Artificial Sequence
  mRNA product Design i-3 (hSL-A64-N5) comprising derived and/or modified sequence from LASV(LP;Clade I)__AAF86702__NP (opt1)
aggagaaagcuuaccaugagcaacuccaaggagaucaagagcuuccuguggacccagucccuccgccgggagcugagcggcuacugcuccaacaucaagcuccagguggucaaggacgcccaggcccugcugcacgggcuggacuucagcgagguguccaacgugcagcgccucaugcggaagcagaagcgcgacgacgcggaccugaagcggcugcgcgaccucaaccaggccgucaacaaccugguggagcucaagagcacccagcagaagaacgugcugcgggucggcacgcuguccagcgacgaccugaucacccucgccgccgaccuggagaagcugaaguccaaggugauccgcaccgagcggccccucagcuccgggguguacaugggcaaccugagcucccagcagcuggaccagcgccgggcccuccugagcaugaucgggauguccggcggcccgcaggggaaccgcaccggcggggacggcgucgugcgggugugggacgucaagaacgcggagcugcucaacaaccaguucgggacgaugcccagccugacccuggccugccucaccaagcagggccagguggaccugaacgacgccgugcaggcccugaccgaccucggccugaucuacacggcgaaguaccccaacuccagcgaccuggacaugcucacccagagccaccccauccuggggauggucgacaccaagaaguccagccugaacaucuccggcuacaacuucagccucggggccgccgugaaggccggcgccugcaugcuggacggcgggaacaugcuggagaccaucaagguguccccgcagacgauggacggcauccucaagagcauccugaaggucaagcgcucccuggggauguucaucagcgacacccccggcgagcggaaccccuacgagaacauccucuacaagaucugccuguccggggagggcuggcccuacaucgcgagccgcaccuccaucaccggccgggccugggagaacacgcugguggaccucgagagcgacaacaagccgcccaagcugaacuccgccgggagcaacaagucccugcaggccgccggccucaacgcggggcugaccuacagccagcugaugacccugaaggacugcaugcuccagcuggaccccuccagcaagaccuggaucgacaucgagggccgccccgaggacccgguggagaucgcccuguuccagcccuccagcgggugcuacauccacuucuuccgggagcccacggaccucaagcaguucaagcaggacgccaaguacagccacggcaucgacgucaccgaccuguucuccacccagcccggccugaccagcgccgugaucgaggcccucccgcgcaacauggugcugacgugccagggguccgacgacaucaagaagcugcucgagagccagggccggcgcgacaucaagcugaucgacaucucccugagcaaggcggacucccgcaaguucgagaacgccgucugggaccaguacaaggaccucugccacaugcacaccgggguggucguggagaagaagaagcggggcgggaaggaggagaucacgccccacugcgcccugcuggacugcaucauguucgacgccgccaccaccggcagccucaacaucaccacccugcgcgcggugcugccccgggacauggucuuccgcaccuccacgcccaagguggugcucugaggacuaguuauaagacugacuagcccgaugggccucccaacgggcccuccuccccuccuugcaccgagauuaaucaaaggcucuuuucagagccaccaaaaaaaaaaaaaaaaaaaaaaaaaaaaaaaaaaaaaaaaaaaaaaaaaaaaaaaaaaaaaaaaagaauu

SEQ ID NO: 17664 - RNA, 1892 nt, Artificial Sequence
  mRNA product Design i-3 (hSL-A64-N5) comprising derived and/or modified sequence from LASV(803213;Clade II)__AAF86704__NP (opt1)
aggagaaagcuuaccaugagcgccuccaaggaggugaaguccuuccuguggacccagagccuccgccgggagcugagcggcuacugcuccaacaucaagcugcaggucgugaaggacgcccaggcgcuccugcacgggcuggacuucagcgaggugaacaacguccagcgccucaugcggaagcagaagcgcgacgacggcgaccugaagcggcugcgcgaccucaaccaggccgugaacaaccugguggagcugaaguccacccagcagaaguccauccuccgggucgggacgcugaccagcgacgaccugcucacccuggccgccgaccuggagaagcucaagagcaaggugauccgcaccgagcggccccuguccagcggcguguacauggggaaccuguccacgcagcagcucgagcagcgccgggcccugcugaacaugaucggcauggucggcggggcgcagggcacccagccggggcgcgacggcguggugcgggucugggacgugaagaaccccgaccuccugaacaaccaguucgggaccaugcccagccugacccucgccugccugacgaagcagggccagguggaccugaacgacgccguccucgcccugaccgaccugggccucaucuacaccgcgaaguaccccaacuccagcgaccuggaccgccugucccagagccacccgauccucaacaugguggacaccaagaaguccagccugaacaucagcggguacaacuucucccugggcgccgccgugaaggccggggccugcaugcucgacggcggcaacaugcuggagacgaucaaggucacgccccagaccauggacgggauccucaagagcauccugaaggugaagcggucccugggcauguucgugagcgacacccccggggagcgcaaccccuacgagaacauccuguacaagaucugccucuccggcgacggguggccguacaucgcgagccggaccuccaucgucggccgcgccugggagaacaccaccguggaccuggagagcgacggcaagccccagaagguggggaccgccggcuccaacaagagccugcaguccgccggguuccccacgggccucaccuacagccagcugaugacccugaaggacuccaugaugcagcuggaccccagcgccaagaccuggaucgacaucgaggggcggccggaggaccccgucgagaucgcgcucuaccagcccauguccggcugcuacauccacuucuuccgcgagcccacggaccugaagcaguucaagcaggacgccaaguacagccacggcaucgacguggccgaccuguucccggcccagcccgggcucaccuccgccgucaucgaggcgcugccccggaacauggugcugaccugccagggcagcgacgacaucaagaagcuccuggacucccaggggcgccgcgacaucaagcugaucgacaucagccucagcaagguggacucccggaaguucgagaacgccgucugggaccagugcaaggaccugugccacaugcacaccggcgugguggucgagaagaagaagcgcgggggcaaggaggagaucacgccccacugcgcccugauggacugcaucauguucgacgccgccgugagcggcgggcucaacaucccggugcugcgggcgguccugccccgcgacaugguguuccggaccuccagccccaaggugguccucugaggacuaguuauaagacugacuagcccgaugggccucccaacgggcccuccuccccuccuugcaccgagauuaaucaaaggcucuuuucagagccaccaaaaaaaaaaaaaaaaaaaaaaaaaaaaaaaaaaaaaaaaaaaaaaaaaaaaaaaaaaaaaaaaagaauu

SEQ ID NO: 17665 - RNA, 1895 nt, Artificial Sequence
  mRNA product Design i-3 (hSL-A64-N5) comprising derived and/or modified sequence from LASV(GA391;Clade III)__CAA36646__NP (opt1)
aggagaaagcuuaccaugagcgccuccaaggaggugcgcagcuuccuguggacccagucccuccggcgcgagcugagcggcuacugcuccaacaucaagcugcaggucgugaaggacgcccaggcgcuccugcacgggcuggacuucagcgagguguccaacguccagcggcucaugcgcaagcagaagcgggacgacggcgaccugaagcgccugcgggaccucaaccaggccgugaacaaccugguggagcucaagagcacccagcagaaguccguccugcgcguggggacccugagcuccgacgaccugcucauccuggccgccgaccuggagaagcucaagagcaaggugacccggaccgagcgcccccuguccagcggcgucuacauggggaaccuguccagccagcagcucgaccagcggcgcgcccugcugaacaugaucggcaugaccggcguguccgggggcgggaagggcgcgagcgacgggaucgugcgggucugggacgugaagaacgccgagcuccugaacaaccaguucggcacgaugccgucccugacccucgccugccugaccaagcagggccagguggaccugaacgacgccguccaggcgcucaccgaccuggggcugaucuacacggccaaguaccccaacagcagcgaccucgaccgccugucccagagccaccccauccugaacaugaucgacaccaagaaguccagccucaacaucuccggcuacaacuucagccugggggccgccgugaaggccggcgcgugcaugcuggacggcgggaacaugcucgagaccaucaaggugagcccccagaccauggacggcauccucaaguccauccugaaggucaagaagucccuggggauguucgugagcgacacgccgggcgagcggaaccccuacgagaacauccuguacaagaucugccuguccggggacggcuggcccuacaucgccagccgcaccuccaucgugggccgggccugggagaacaccgucguggaccucgagcaggacaacaagccccagaagaucgggaacggcgggagcaacaagucccugcagagcgccggcuucgccgcggggcugaccuacucccagcucaugacgcugaaggacuucaagugcuucaaccugaucccgaacgccaagaccuggauggacaucgagggccgccccgaggaccccguggagaucgcccuguaccagcccagcuccggcugcuacguccacuucuuccgggagccgaccgaccucaagcaguucaagcaggacgccaaguacagccacgggaucgacgugaccgaccuguucgccgcgcagcccggccugacgagcgccgucaucgaggcccucccccgcaacauggugaucacgugccagggguccgaggacauccggaagcugcuggagagccagggccgccgcgacaucaagcucaucgacaucacccuguccaaggccgacagccggaaguucgagaacgccgugugggaccaguucaaggaccugugccacaugcacaccggggucgugguggagaagaagaagcgcggcggcaaggaggagaucacgccccacugcgcgcucauggacugcaucauguucgacgccgccgucuccgggggccuggacgccaaggugcugcgggugguccucccgcgcgacaugguguuccggaccagcacccccaaggugguccugugaggacuaguuauaagacugacuagcccgaugggccucccaacgggcccuccuccccuccuugcaccgagauuaaucaaaggcucuuuucagagccaccaaaaaaaaaaaaaaaaaaaaaaaaaaaaaaaaaaaaaaaaaaaaaaaaaaaaaaaaaaaaaaaaagaauu

SEQ ID NO: 17666 - RNA, 1892 nt, Artificial Sequence
  mRNA product Design i-3 (hSL-A64-N5) comprising derived and/or modified sequence from LASV(AV;Clade V)__CCA30315__NP (opt1)
aggagaaagcuuaccaugagcgccuccaaggaggugaaguccuuccuguggacccagagccuccgccgggagcugagcggcuacugcuccaacaucaagcugcaggucgugaaggacgcccaggcgcuccugcacgggcuggacuucagcgagguguccaacguccagcgccucaugcggaagcagcgccgggacgacagcgaccugaagcgccugcgggaccucaaccaggccgugaacaaccugguggagcugaaguccacccagcagaaguccguccuccgcgugggcacgcugagcagcgacgaccugcucacccuggccgccgaccuggagaagcucaaguccaaggugacccggaccgagcgcccccugagcuccggggucuacaugggcaaccugagcucccagcagcucgaccagcggcgcgcccugcugaaccucaucgggaugacgaacggcagccagggcucccaggcggggcgggacggcguggugcgcgucugggacgugaagaacgccgagcugcugaacaaccaguucgggaccaugccgagccucacccuggccugccugaccaagcagggccagguggaccucaacgacgucgugcaggcccugacggaccuggggcucaucuacaccgcgaaguaccccaacaccagcgaccuggaccggcugacccagucccaccccauccucaacaugaucgacacgaagaaguccagccugaacaucagcggcuacaacuucucccugggcgccgccgugaaggccggggccugcaugcucgacggcgggaacaugcuggagaccaucaaggucagcccccaguccauggacggcauccucaagagcauccugaaggugaagcgcgcgcugggcauguucguguccgacaccccgggggagcggaaccccuacgagaacauccuguacaagaucugccucagcggcgacggguggcccuacaucgccucccgcaccagcaucgucggccgggccugggagaacacggugguggaccuggagaccgacgggaagccccagaagaucggcuccggcaacagcaacaagucccugcagagcgccggguucuccgccggccucaccuacagccagcugaugacccugaaggacgcgaugcugcagcucgacccgaacgccaagacguggauggacaucgaggggcgccccgaggaccccgucgagguggcccuguaccagcccaucuccggcugcuacauccacuucuuccgggagccgaccgaccugaagcaguucaagcaggacgccaaguacagccacgggaucgacaucgccgaccucuucgcggcccagcccggccugaccagcgccgucaucgaggcccugccccgcaacauggugaucacgugccagggcuccgaggacaucaagaagcuccuggagagccaggggcgcaaggacaucaagcugaucgacaucgcccucuccaagaucgacagccggaaguucgagaacgcggugugggaccaguacaaggaccugugccacaugcacaccggcgucgugguggagaagaagaagcgcgggggcaaggaggagaucaccccgcacugcgcccugauggacugcaucauguucgacgccgccgucuccgggggccucaacacccuggugcugcgggcggugcucccccgcgacauggucuuccggaccagcacgccccgcguggugcugugaggacuaguuauaagacugacuagcccgaugggccucccaacgggcccuccuccccuccuugcaccgagauuaaucaaaggcucuuuucagagccaccaaaaaaaaaaaaaaaaaaaaaaaaaaaaaaaaaaaaaaaaaaaaaaaaaaaaaaaaaaaaaaaaagaauu

SEQ ID NO: 17667 - RNA, 1892 nt, Artificial Sequence
  mRNA product Design i-3 (hSL-A64-N5) comprising derived and/or modified sequence from LASV(Togo/2016/7082;Clade VI)__AMR44578__NP (opt1)
aggagaaagcuuaccaugagcaacuccaaggaggugaaguccuuccuguggacccagagccuccgccgggagcugagcggcuacugcuccaacaucaagcugcaggucgugaaggacgcccaggcccuccugcacgggcuggacuucagcgagguguccaacguccagcgccucaugcggaagcagaagcgcgacgacggcgaccugaagcggcugcgcgaccucaaccaggcggugaacaaccugguggagcucaagagcguccagcagaaguccauccugcggguggggacccugaccagcgacgaccugcucacccuggccgccgaccuggagaagcucaaguccaaggugacccgcaccgagcggccccugagcuccggcgucuacauggggaaccugagcucccagcagcucgaccagcgccgggcccugcugagcaugaucggcauguccggcgggaaccagaacagccagccgaagggcgacgggguggugcgcgucugggacgugaagaacgccgaccuccugaacaaccaguucggcacgaugcccucccugacccucgcgugccugaccaagcagggccagguggaccugaacgacgccguccaggcccucaccgaccuggggcugaucuacacggccaaguaccccaacagcagcgaccucgaccggcugucccagagccaccccauccugaacaugaucgacaccaagaaguccagccucaacaucuccggcuacaacuucagccugggggcggccaucaagaccggcgccugcaugcuggacgggggcaacaugcucgagaccaucaaggugacgccgcagaccauggacggcauccugaaguccauccugaaggugaagcgcagccucgggauguucaucuccgacacccccggcgagcggaaccccuacgagaacauccuguacaagaucugccugagcggggacggcuggcccuacaucgccucccgcaccgccaucaucgggcgggcgugggagaacacggucguggaccucgagagcgacuccaagccgcagaagaucggcagcaacggcuccaacaagagccugcaguccgccggguucgcccccggccugaccuacagccagcucaugacccugaaggacuccaugcugcagcuggaccccaacgccaagaccuggaucgacaucgaggggcgccccgaggacccgguggaggucgcccucuuccagcccaucagcggcugcuacauccacuucuuccgggagcccacggaccugaagcaguucaagcaggacgcgaaguacagccacgggaucgacgugaccgaccuguucgccgcccagcccggccucaccuccgccgugaucgaggcccugccgcgcaacaugguccugaccugccagggcagcgacgacaucaagaagcuccuggacucccaggggcggcgcgacaucaagcugaucgacgugagccucaacaagaucgacucccgcaaguucgagaacgcggucugggaccaguacaaggaccugugccacaugcacacgggcgugguggucgagaagaagaagaagggcgggaaggaggagaucacgccccacugcgcccugcucgacugcaucauguucgacgccgccgugagcgggggccugaacgccaccgugcugcgggcgguccucccccgcgacaugguguuccggaccuccagccccaaggugguccugugaggacuaguuauaagacugacuagcccgaugggccucccaacgggcccuccuccccuccuugcaccgagauuaaucaaaggcucuuuucagagccaccaaaaaaaaaaaaaaaaaaaaaaaaaaaaaaaaaaaaaaaaaaaaaaaaaaaaaaaaaaaaaaaaagaauu

SEQ ID NO: 17668 - RNA, 1892 nt, Artificial Sequence
  mRNA product Design i-3 (hSL-A64-N5) comprising derived and/or modified sequence from LASV(KAK-428;Clade n.d. (VII))__ANH09741__NP (opt1)
aggagaaagcuuaccaugagcaacuccaaggaggugaaguccuuccuguggacccagagccuccgccgggagcugagcggcuacugcaccaacaucaagcugcaggucgugaaggacgcccaggcccuccugcacgggcuggacuucuccgaggugagcaacguccagcgccucaugcggaagcagaagcgcgacgacaacgaccugaagcggcugcgcgaccucaaccaggcggugaacaaccugguggagcugaaguccguccagcagaaguccgugcucaaggugggcacgcugaacagcgacgaccugcucacccuggccgccgaccuggagaagcucaagagcaaggucgugcggaccgagcgcccccuguccagcgggguguacaugggcaaccuguccagccagcagcucgaccagcggcgcgcccugcugaacaugaucgggauggccggcggcucccaggggaaccagccgagccgggacggcgucgugcgcgugugggacgucaagaacgcggaccuccugaacaaccaguucgggaccaugcccucccugacgcucgccugccugaccaagcagggccagguggaccugaacgacgugguccucgcccugaccgaccuggggcucaucuacaccgccaaguaccccaacagcuccgaccuggaccggcugagccagaaccaccccgugcucaacaugaucgacgugaacaagagcucccugaacaucagcggcuacaacuucucccugggcgcggccgucaaggccggggccugcaugcucgacggcgggaacaugcuggagacgaucaagaucagcccgcagaccguggacggcauccugaaguccauccucaaggugaagcgcgcccugggcauguucgucagcgacacccccggggagcggaaccccuacgagaacauccuguacaaggugugccucuccggcaacggguggcccuacaucgcgagccgcaccuccaucgucggccgggccugggagaacacggugguggaccuggagagcaacaagaaccagccgaaggucgggaacaacggcuccaacaagaugcugcagagcuccggcuucgccaccgggcucaccuacagccagcugaugacccugcgcgacuccaugcugcagcucgaccccacggccaagaccuggaucgacaucgagggccggcccgaggaccccguggagcuggcccuguuccagccgagcuccgggugcuacauccacuucuuccgcgagcccaccgaccucaagcaguucaagcaggacgcgaaguacagccacggcaucgacgugaacgaccuguucuccgcccagcccgggcugaccagcgccguccucgaggcccugccccggaacauggugcugacgugccagggcagcgacgacauccgcaagcuccuggacucccaggaccgcaaggacaucaagcugaucgacaucagccucuccaaggccgacgcgcggaaguucgagaacgacgugugggaccaguucaaggaccugugccacaugcacaccggcaucgucguggagaagaagaagaagggcgggaagcaggagaugaccccgcacugcgcccugcucgacugcaucauguucgacgccgccgugagcgggggccugaacguccccacccugcgcgccgugcuccccacggacaugguguuccggaccaucaccaccaaggucgugcugugaggacuaguuauaagacugacuagcccgaugggccucccaacgggcccuccuccccuccuugcaccgagauuaaucaaaggcucuuuucagagccaccaaaaaaaaaaaaaaaaaaaaaaaaaaaaaaaaaaaaaaaaaaaaaaaaaaaaaaaaaaaaaaaaagaauu

SEQ ID NO: 17669 - RNA, 1892 nt, Artificial Sequence; identical to SEQ ID NO: 17663
  mRNA product Design i-3 (hSL-A64-N5) comprising derived and/or modified sequence from LASV(Pinneo-NIG-1969;Clade I)__AIT17837__NP (opt1)

SEQ ID NO: 17670 - RNA, 1892 nt, Artificial Sequence
  mRNA product Design i-3 (hSL-A64-N5) comprising derived and/or modified sequence from LASV(ISTH0009-NIG-2011;Clade II)__AIT17405__NP (opt1)
aggagaaagcuuaccaugagcguguccaaggaggucaagagcuuccuguggacccagucccuccgccgggagcugagcggcuacugcuccaacaucaagcuccagguggugaaggacgcccaggcccugcugcacgggcuggacuucagcgaggucuccaacgugcagcgccucaugcggaagcagaagcgcgacgacagcgaccugaagcggcugcgcgaccucaaccaggcggugaacaaccuggucgagcugaaguccacccagcagaaguccauccuccgggugggcacccugaccagcgacgaccugcucacccuggccgccgaccuggagaagcucaagagcaaggugauccgcaccgagcggccccuguccagcggggucuacaugggcaaccuguccacgcagcagcucgagcagcgccgggcccugcugaacaugaucgggauggugggcggcgcccaggggacccagccgggccgcgacggggugguccgggugugggacgugaagaaccccgaccuccugaacaaccaguucggcaccaugcccagccugacccucgcgugccugacgaagcaggggcaggucgaccugaacgacgccgugcucgcccugaccgaccugggccucaucuacaccgccaaguaccccaacuccagcgaccuggaccgccugucccagagccacccgauccucaacaugguggacaucaagaaguccagccugaacaucagcggcuacaacuucucccugggggcggccgucaaggccggcgccugcaugcucgacgggggcaacaugcuggagaccaucaaggugacgccccagaccauggacggcauccucaagagcauccugaaggugaagcggucccuggggauguucgucagcgacacccccggcgagcgcaaccccuacgagaacauccuguacaagaucugccucuccggggacggcuggccguacaucgccagccggaccuccaucguggggcgcgcgugggagaacacgaccguggaccuggagagcgacggcaagccccagaaggucggcuccgccgggagcaacaagucccugcagagcgccggcuuccccaccgggcucaccuacucccagcugaugacgcugaaggacagcaugaugcagcuggaccccuccgccaagaccuggaucgacaucgagggccggccggaggaccccguggagaucgcccucuaccagcccaugagcgggugcuacauccacuucuuccgcgagcccaccgaccugaagcaguucaagcaggacgcgaaguacucccacggcaucgacgucgccgaccuguucccggcccagcccggccucaccagcgccgugaucgaggcccugccccggaacauggugcugacgugccaggggagcgacgacaucaagcgccuccuggacucccagggccgccgggacaucaagcugaucgacaucgcgcucagcaaggccgacucccgccgguucgagaacgccgucugggaccagugcaaggaccugugccacaugcacaccggggugguggucgagaagaagaagcgcggcgggaaggaggagaucacgccccacugcgcccugauggacugcaucauguacgacgccgcggugagcggcggccucaacaucccggugcugcgggccguccugccccgcgacaugguguuccggaccuccagccccaaggugguccucugaggacuaguuauaagacugacuagcccgaugggccucccaacgggcccuccuccccuccuugcaccgagauuaaucaaaggcucuuuucagagccaccaaaaaaaaaaaaaaaaaaaaaaaaaaaaaaaaaaaaaaaaaaaaaaaaaaaaaaaaaaaaaaaaagaauu

SEQ ID NO: 17671 - RNA, 1892 nt, Artificial Sequence
  mRNA product Design i-3 (hSL-A64-N5) comprising derived and/or modified sequence from LASV(ISTH2010-NIG-2012;Clade II)__AIT17483__NP (opt1)
aggagaaagcuuaccaugagcgccuccaaggaggugaaguccuuccuguggacccagagccuccgccgggagcugagcggcuacugcuccaacaucaagcugcaggucgugaaggacgcccaggcgcuccugcacgggcuggacuucagcgagguguccaacguccagcgccucaugcggaagcagaagcgcgacgacagcgaccugaagcggcugcgcgaccucaaccaggccgugaacaaccugguggagcugaaguccacccagcagaaguccauccuccgggucggcacgcugaccagcgacgaccugcucacccuggccgccgaccuggagaagcucaagagcaaggugauccgcaccgagcggccccuguccagcgggguguacaugggcaaccuguccacgcagcagcucgagcagcgccgggcccugcugaaccucaucgggauggucggcggcgcgcaggggacccagccgggccgcgacgggguggugcgggucugggacgugaagaaccccgaccugcugaacaaccaguucggcaccaugcccagccucacccuggccugccugacgaagcagggccagguggaccucaacgacgccguccuggcccugaccgaccucgggcugaucuacaccgcgaaguaccccaacuccagcgaccuggaccgccucucccagagccacccgauccugaacaugguggacaccaagaaguccagccugaacaucagcggcuucaacuucucccucggggccgccgugaaggccggcgccugcaugcuggacgggggcaacaugcuggagacgaucaaggucacgccccagaccauggacggcauccucaagagcauccugaaggugaagaagucccuggggauguucgugagcgacacccccggcgagcggaaccccuacgagaacauccucuacaagaucugccuguccggggacggcuggccguacaucgcgagccgcaccuccaucgucgggcgggccugggagaacaccaccguggaccuggagagcgacggcaagccccacaaggugggcaccgccggguccaacaagagccuccaguccgccggcuuccccacggggcugaccuacagccagcugaugacccugaaggacuccaugaugcagcucgaccccagcgccaagaccuggaucgacaucgagggccgcccggaggaccccgucgagaucgcgcuguaccagcccauguccgggugcuacauccacuucuuccgggagcccacggaccugaagcaguucaagcaggacgccaaguacagccacggcaucgacguggccgaccucuucccggcccagcccggccugaccuccgccgucaucgaggcgcugccccgcaacauggugcugaccugccaggggagcgacgacaucaagcggcuccuggacagccagggccgccgcgacaucaagcucaucgacaucgcccuguccaaggccgacagccggcgcuucgagaacgccgugugggaccagugcaaggaccugugccacaugcacaccggggucgugguggagaagaagaagcggggcgggaaggaggagaucacgccccacugcgcccucauggacugcaucauguacgacgcggccgucuccggcggccugaacaucccggugcugcgcgccgugcucccccgggacauggucuuccgcaccagcucccccaagguggugcugugaggacuaguuauaagacugacuagcccgaugggccucccaacgggcccuccuccccuccuugcaccgagauuaaucaaaggcucuuuucagagccaccaaaaaaaaaaaaaaaaaaaaaaaaaaaaaaaaaaaaaaaaaaaaaaaaaaaaaaaaaaaaaaaaagaauu

SEQ ID NO: 17672 - RNA, 1892 nt, Artificial Sequence
  mRNA product Design i-3 (hSL-A64-N5) comprising derived and/or modified sequence from LASV(Lassa virus/H.sapiens-wt/NGA/2015/ISTH_0543;Clade II)__AVO03640__NP (opt1)
aggagaaagcuuaccaugagcgccuccaaggaggugaaguccuuccuguggacccagagccuccgccgggagcugagcggcuacugcuccaacaucaagcugcaggucgugaaggacgcccaggcgcuccugcacgggcuggacuucagcgagguguccaacguccagcgccucaugcggaagcagaagcgcgacgacagcgaccugaagcggcugcgcgaccucaaccaggccgugaacaaccugguggagcugaaguccacccagcagaaguccauccuccgggucggcacgcugaccagcgacgaccugcucacccuggccgccgaccuggagaagcucaagagcaaggugauccgcaccgagcggccccuguccagcgggguguacaugggcaaccuguccacgcagcagcucgagcagcgccgggcccugcugaacaugaucgggauggucggcggcgcgcaggggacccagccgggccgcgacgggguggugcgggucugggacgugaagaaccccgaccuccugaacaaccaguucggcaccaugcccagccugacccucgccugccugacgaagcagggccagguggaccugaacgacgccguccucgcccugaccgaccuggggcucaucuacaccgcgaaguaccccaacuccagcgaccuggaccgccugucccagagccacccgauccucaacaugguggacaccaagaaguccagccugaacaucagcggcuacaacuucucccugggggccgccgugaaggccggcgccugcaugcucgacgggggcaacaugcuggagacgaucaaggucacgccccagaccauggacggcauccucaagagcauccugaaggugaagaagucccuggggauguucgugagcgacacccccggcgagcggaaccccuacgagaacauccuguacaagaucugccucuccggggacggcuggccguacaucgcgagccgcaccuccaucgucgggcgggccugggagaacaccaccguggaccuggagagcgacggcaagccccagaaggugggcuccgccgggagcaacaagucccugcagagcgccggcuuccccaccgggcucacguacucccagcugaugacccugaaggacagcaugaugcagcuggaccccuccgccaagaccuggaucgacaucgagggccgcccggaggaccccgucgagaucgcgcucuaccagcccaugagcgggugcuacauccacuucuuccgggagcccaccgaccugaagcaguucaagcaggacgccaaguacucccacggcaucgacguggccgaccuguucccggcccagcccggccucacgagcgccgucaucgaggcgcugccccgcaacauggugcugaccugccaggggagcgacgacaucaagcggcuccuggacucccagggccgcaaggacaucaagcugaucgacaucgcccucagcaaggccgacucccgccgguucgagaacgccgugugggaccagugcaaggaccugugccacaugcacaccggggucgugguggagaagaagaagcgcggcgggaaggaggagaucacgccccacugcgcccugauggacugcaucauguacgacgcggccgucagcggcggccucaacaucccggugcugcgggccgugcugccccgcgacauggucuuccggaccuccagccccaagguggugcucugaggacuaguuauaagacugacuagcccgaugggccucccaacgggcccuccuccccuccuugcaccgagauuaaucaaaggcucuuuucagagccaccaaaaaaaaaaaaaaaaaaaaaaaaaaaaaaaaaaaaaaaaaaaaaaaaaaaaaaaaaaaaaaaaagaauu

SEQ ID NO: 17673 - RNA, 1892 nt, Artificial Sequence
  mRNA product Design i-3 (hSL-A64-N5) comprising derived and/or modified sequence from LASV(Lassa virus/H.sapiens-wt/NGA/2016/ISTH_0009;Clade II)__AVO03572__NP (opt1)
aggagaaagcuuaccaugagcgccuccaaggaggugaaguccuuccuguggacccagagccuccgccgggagcugagcggcuacugcuccaacaucaagcugcaggucgugaaggacgcccaggcgcuccugcacgggcuggacuucagcgagguguccaacguccagcgccucaugcggaagcagaagcgcgacgacagcgaccugaagcggcugcgcgaccucaaccaggccgugaacaaccugguggagcugaaguccacccagcagaaguccauccuccgggucggcacgcugaccagcgacgaccugcucacccuggccgccgaccuggagaagcucaagagcaaggugauccgcaccgagcggccccuguccagcgggguguacaugggcaaccuguccacgcagcagcucgagcagcgccgggcccugcugaacaugaucgggauggucggcggcgcgcaggggacccagccgggccgcgacgggguggugcgggucugggacgugaagaaccccgaccuccugaacaaccaguucggcaccaugcccagccugacccucgccugccugacgaagcagggccagguggaccugaacgacgccguccucgcccugaccgaccuggggcucaucuacaccgcgaaguaccccaacuccagcgaccuggaccgccugucccagagccacccgauccucaacaugguggacaccaagaaguccagccugaacaucagcggcuacaacuucucccugggggccgccgugaaggccggcgccugcaugcucgacgggggcaacaugcuggagacgaucaaggucacgccccagaccauggacggcauccucaagagcauccugaaggugaagaagucccuggggauguucgugagcgacacccccggcgagcggaaccccuacgagaacauccuguacaagaucugccucuccggggacggcuggccguacaucgcgagccgcaccuccaucgucgggcgggccugggagaacaccaccguggaccuggagagcgacggcaagccccagaaggugggcuccgccgggagcaacaagucccugcagagcgccggcuuccccaccgggcucacguacucccagcugaugacccugaaggacagcaugaugcagcuggaccccuccgccaagaccuggaucgacaucgagggccgcccggaggaccccgucgagaucgcgcucuaccagcccaugagcgggugcuacauccacuucuuccgggagcccaccgaccugaagcaguucaagcaggacgccaaguacucccacggcaucgacguggccgaccuguucccggcccagcccggccucacgagcgccgucaucgaggcgcugccccgcaacauggugcugaccugccaggggagcgacgacaucaagcggcuccuggacucccagggccgccgcgacaucaagcugaucgacaucgcccucagcaaggccgacucccggcgcuucgagaacgccgugugggaccagugcaaggaccugugccacaugcacaccggggucgugguggagaagaagaagcggggcgggaaggaggagaucacgccccacugcgcccugauggacugcaucauguacgacgcggccgucagcggcggccucaacaucccggugcugcgcgccgugcugccccgggacauggucuuccgcaccuccagccccaagguggugcucugaggacuaguuauaagacugacuagcccgaugggccucccaacgggcccuccuccccuccuugcaccgagauuaaucaaaggcucuuuucagagccaccaaaaaaaaaaaaaaaaaaaaaaaaaaaaaaaaaaaaaaaaaaaaaaaaaaaaaaaaaaaaaaaaagaauu

SEQ ID NO: 17674 - RNA, 1892 nt, Artificial Sequence
  mRNA product Design i-3 (hSL-A64-N5) comprising derived and/or modified sequence from LASV(Lassa virus/H.sapiens-wt/NGA/2016/ISTH_0017;Clade II)__AVO03568__NP (opt1)
aggagaaagcuuaccaugagcgccuccaaggaggugaaguccuuccuguggacccagagccuccgccgggagcugagcggcuacugcuccagcaucaagcugcaggucgugaaggacgcccaggcgcuccugcacgggcuggacuucuccgaggugagcaacguccagcgccucaugcggaagcagaagcgcgacgacuccgaccugaagcggcugcgcgaccucaaccaggccgugaacaaccugguggagcucaagagcacccagcagaaguccauccugcgggucggcacgcugaccagcgacgaccugcucacccuggccgccgaccuggagaagcucaaguccaaggugauccgcaccgagcggccccugagcuccgggguguacaugggcaaccugagcacgcagcagcucgagcagcgccgggcccugcugaacaugaucgggauggcgggcggcgcccaggggacccagccgggccgcgacggggucgugcgggugugggacgucaagaaccccgaccuccugaacaaccaguucggcaccaugcccucccugacccucgccugccugacgaagcagggccagguggaccugaacgacgccgugcucgcgcugaccgaccuggggcucaucuacaccgccaaguaccccaacagcuccgaccuggaccgccugagccagagccacccgauccucaacauggucgacaccaagaaguccagccugaacaucuccggcuacaacuucagccugggggccgccgugaaggccggcgcgugcaugcucgacgggggcaacaugcuggagacgaucaaggugacgccccagaccauggacggcauccugaaguccauccucaaggucaagcggagccuggggauguucguguccgacgcccccggcgagcgcaaccccuacgagaacauccuguacaagaucugccucagcggggacggcuggccguacaucgccucccggaccagcaucguggggcgcgccugggagaacaccaccgucgaccuggaguccgacggcaagccccagaaggugggcgccaccgggagcaacaagucccugcagagcgcgggcuuccccaccgggcucacguacucccagcugaugacccugaaggacagcaugaugcagcuggaccccuccgccaagaccuggaucgacaucgagggccggccggaggaccccguggaggucgcccucuaccagcccgugagcgggugcuacauccacuucuuccgcgagcccaccgaccugaagcaguucaagcaggacgccaaguacucccacggcaucgacgucgccgaccuguucccggcgcagcccggccucacgagcgccgugaucgaggcccugccccggaacauggugcugaccugccaggggagcgacgacaucaagaagcuccuggacucccagggccgcaaggacaucaagcugaucgacaucgcccucagcaaggccgacucccgccgguucgagaacgcggucugggaccagugcaaggaccugugccacaugcacaccggggugguggucgagaagaagaagcgcggcgggaaggaggagaucacgccccacugcgcccugauggacugcaucauguacgacgccgccgugagcggcggccucaacaucccggugcugcgggcgguccugccccgcgacaugguguuccggaccuccagccccaaggugguccucugaggacuaguuauaagacugacuagcccgaugggccucccaacgggcccuccuccccuccuugcaccgagauuaaucaaaggcucuuuucagagccaccaaaaaaaaaaaaaaaaaaaaaaaaaaaaaaaaaaaaaaaaaaaaaaaaaaaaaaaaaaaaaaaaagaauu

SEQ ID NO: 17675 - RNA, 1892 nt, Artificial Sequence
  mRNA product Design i-3 (hSL-A64-N5) comprising derived and/or modified sequence from LASV(Lassa virus/H.sapiens-wt/NGA/2018/ISTH_0959;Clade II)__AVV65100__NP (opt1)
aggagaaagcuuaccaugagcgccuccaaggaggugaaguccuuccuguggacccagagccuccgccgggagcugagcggcuacugcuccaacaucaagcugcaggucgugaaggacgcccaggcgcuccugcacgggcuggacuucagcgagguguccaacguccagcgccucaugcggaagcagaagcgcgacgacagcgaccugaagcggcugcgcgaccucaaccaggccgugaacaaccugguggagcugaaguccacccagcagaaguccauccuccgggucggcacccugaccagcgacgaccugcucacccuggccgccgaccuggagaagcucaagagcaaggugauccgcaccgagcggccccuguccagcgggguguacaugggcaaccuguccacgcagcagcucgagcagcgccgggcccugcugaaccucaucgggauggucggcggcgcgcaggggacccagccgggccgcgacgggguggugcgggucugggacgugaagaaccccgaccugcugaacaaccaguucggcaccaugcccagccucacccuggccugccugacgaagcagggccagguggaccucaacgacgucgugcuggcccugaccgaccucgggcugaucuacaccgccaaguaccccaacuccagcgaccuggaccgccucucccagagccacccgauccugaacaugguggacaccaagaaguccagccugaacaucagcggcuucaacuucucccucggggcggccgucaaggccggcgccugcaugcuggacgggggcaacaugcuggagacgaucaaggugacgccccagaccauggacggcauccucaagagcauccugaaggugaagaagucccuggggauguucgucagcgacacccccggcgagcggaaccccuacgagaacauccucuacaagaucugccuguccggggacggcuggccguacaucgccagccgcaccuccaucguggggcgggcgugggagaacaccaccguggaccuggagagcgacggcaagccccacaaggucggcaccgccggguccaacaagagccuccaguccgccggcuuccccacggggcugaccuacagccagcugaugacccugaaggacuccaugaugcagcucgaccccagcgccaagaccuggaucgacaucgagggccgcccggaggaccccguggagaucgcccuguaccagcccauguccgggugcuacauccacuucuuccgggagcccacggaccugaagcaguucaagcaggacgcgaaguacagccacggcaucgacgucgccgaccucuucccggcccagcccggccugaccuccgccgugaucgaggcccugccccgcaacauggugcugaccugccaggggagcgacgacaucaagcggcuccuggacagccagggccgcaaggacaucaagcucaucgacaucgcgcuguccaagaccgacagccgccgguucgagaacgccgucugggaccagugcaaggaccugugccacaugcacacgggggugguggucgagaagaagaagcgcggcgggaaggaggagaucacgccccacugcgcccucauggacugcaucauguacgacgccgccguguccggcggccugaacaucccggugcugcgggcgguccucccccgcgacaugguguuccggaccagcucccccaaggugguccugugaggacuaguuauaagacugacuagcccgaugggccucccaacgggcccuccuccccuccuugcaccgagauuaaucaaaggcucuuuucagagccaccaaaaaaaaaaaaaaaaaaaaaaaaaaaaaaaaaaaaaaaaaaaaaaaaaaaaaaaaaaaaaaaaagaauu

SEQ ID NO: 17676 - RNA, 1892 nt, Artificial Sequence
  mRNA product Design i-3 (hSL-A64-N5) comprising derived and/or modified sequence from LASV(LASV003-NIG-2008;Clade II)__AIT17581__NP (opt1)
aggagaaagcuuaccaugagcgccuccaaggaggugaaguccuuccuguggacccagagccuccgccgggagcugagcggcuacugcuccagcaucaagcugcaggucgugaaggacgcccaggcgcuccugcacgggcuggacuucuccgaggugagcaacguccagcgccucaugcggaagcagaagcgcgacgacuccgaccugaagcggcugcgcgaccucaaccaggccgugaacaaccugguggagcucaagagcacccagcagaaguccguccugcgggugggcacccugaccagcgacgaccugcucacccuggccgccgaccuggagaagcucaaguccaaggugauccgcaccgagcggccccugagcuccggggucuacaugggcaaccugagcgcccagcagcucgagcagcgccggacgcugcugaacaugaucgggauggugggcggcgcgcaggggacccagccgggccgcgacggggugguccgggugugggacgugaagaaccccgaccuccugaacaaccaguucggcaccaugcccucccugacccucgccugccugacgaagcaggggcaggucgaccugaacgacguggugcucgcccugaccgaccugggccucaucuacaccgccaaguaccccaacagcuccgaccuggaccgccugagccagagccacccgauccucuccauggucgacaccaagaaguccagccugaacaucagcggcuacaacuucucccugggggcggccgugaaggccggcgccugcaugcucgacgggggcaacaugcuggagacgaucaaggugacgccccagaccauggacggcauccucaagagcauccugaaggucaagaagucccuggggauguucgugagcgacacccccggcgagcggaaccccuacgagaacauccuguacaagaucugccucuccggggacggcuggccguacaucgccagccgcaccuccaucguggggcgggcgugggagaacaccaccgucgaccuggagagcgacggcaagccccagaaggugggcaccgccggguccaacaagagccugcaguccgccggcuuccccacggggcucaccuacagccagcugaugacccugaaggacuccaugaugcagcuggaccccagcgccaagaccuggaucgacaucgagggccgcccggaggaccccgucgagaucgcccucuaccagcccauguccgggugcuacauccacuucuuccgggagcccacggaccugaagcaguucaagcaggacgcgaaguacagccacggcaucgacgugaccgaccuguucccggcccagcccggccucaccagcgccgugaucgaggcccugccccgcaacaugguccugaccugccagggguccgacgacaucaagcggcuccuggacagccagggccgccgcgacaucaagcugaucgacaucgcccucuccaaggcggacagccggcgcuucgagaacgccgugugggaccagugcaaggaccugugccacaugcacacggggguggucguggagaagaagaagcggggcgggaaggaggagaucacgccccacugcgcccugauggacugcaucauguacgacgccgccguguccggcggccucaacaucccgguccugcgcgcggugcugccccgggacaugguguuccgcaccagcucccccaaggucgugcucugaggacuaguuauaagacugacuagcccgaugggccucccaacgggcccuccuccccuccuugcaccgagauuaaucaaaggcucuuuucagagccaccaaaaaaaaaaaaaaaaaaaaaaaaaaaaaaaaaaaaaaaaaaaaaaaaaaaaaaaaaaaaaaaaagaauu

SEQ ID NO: 17677 - RNA, 1892 nt, Artificial Sequence
  mRNA product Design i-3 (hSL-A64-N5) comprising derived and/or modified sequence from LASV(LASV035-NIG-2009;Clade II)__AIT17589__NP (opt1)
aggagaaagcuuaccaugagcgccuccaaggaggugaaguccuuccuguggacccagagccuccgccgggagcugagcggcuacugcuccagcaucaagcugcaggucgugaaggacgcccaggcgcuccugcacgggcuggacuucuccgaggugagcaacguccagcgccucaugcggaagcagaagcgcgacgacuccgaccugaagcggcugcgcgaccucaaccaggccgugaacaaccugguggagcucaagagcacccagcagaaguccauccugcgggucggcacgcugaccagcgacgaccugcucacccuggccgccgaccuggagaagcucaaguccaaggugauccgcaccgagcggccccugagcuccgggguguacaugggcaaccugagcgcccagcagcucgagcagcgccgggcgcugcugaacaugaucgggauggucggcggcgcccaggggacgcagccgggccgcgacgggguggugcgggucugggacgugaagaaccccgaccuccugaacaaccaguucggcaccaugcccucccugacccucgccugccugaccaagcagggccagguggaccugaacgacgccguccucgcgcugacggaccuggggcucaucuacaccgccaaguaccccaacagcuccgaccuggaccgccugagccagagccacccgauccucaacaugguggacaccaagaaguccagccugaacaucuccggcuacaacuucagccugggggccgccgugaaggccggcgcgugcaugcucgacgggggcaacaugcuggagaccaucaaggucacgccccagaccauggacggcauccugaaguccauccucaaggugaagcggagccuggggauguucguguccgacacccccggcgagcgcaaccccuacgagaacauccuguacaagaucugccucagcggggacggcuggccguacaucgccucccggaccagcaucgucgggcgcgccugggagaacacgaccguggaccuggaguccgacggcaagccccagaaggugggcaccaccgggagcaacaagucccugcagagcgccggcuuccccacggggcucaccuacucccagcugaugacccugaaggacagcaugaugcagcuggaccccuccgccaagaccuggaucgacaucgagggccggccggaggaccccgucgagaucgcgcucuaccagcccaugagcgggugcuacauccacuucuuccgcgagcccacggaccugaagcaguucaagcaggacgccaaguacucccacggcaucgacguggccgaccuguucccggcccagcccggccucaccagcgccgucaucgaggcgcugccccggaacauggugcugaccugccaggggagcgacgacaucaagaagcuccuggacucccagggccgccgcgacaucaagcugaucgacaucgcccucagcaaggccgacucccggaaguucgagaacgccgugugggaccagugcaaggaccugugccacaugcacaccggggucgugguggagaagaagaagcgcggcgggaaggaggagaucacgccccacugcgcccugauggacugcaucauguacgacgcggccgucagcggcggccucaacaucccggugcugcgggccgugcugccccgcgacauggucuuccggaccuccagccccaagguggugcucugaggacuaguuauaagacugacuagcccgaugggccucccaacgggcccuccuccccuccuugcaccgagauuaaucaaaggcucuuuucagagccaccaaaaaaaaaaaaaaaaaaaaaaaaaaaaaaaaaaaaaaaaaaaaaaaaaaaaaaaaaaaaaaaaagaauu

SEQ ID NO: 17678 - RNA, 1892 nt, Artificial Sequence
  mRNA product Design i-3 (hSL-A64-N5) comprising derived and/or modified sequence from LASV(LASV1000-NIG-2009;Clade II)__AIT17783__NP (opt1)
aggagaaagcuuaccaugagcgccuccaaggaggugaaguccuuccuguggacccagagccuccgccgggagcugagcggcuacugcuccaacaucaagcugcaggucgugaaggacgcccaggcgcuccugcacgggcuggacuucagcgagguguccaacguccagcgccucaugcggaagcagaagcgcgacgacagcgaccugaagcggcugcgcgaccucaaccaggccgugaacaaccugguggagcugaaguccacccagcagaaguccauccuccgggucggcacgcugaccagcgacgaccugcucacccuggccgccgaccuggagaagcucaagagcaaggugauccgcaccgagcggccccuguccagcgggguguacaugggcaaccuguccacgcagcagcucgagcagcgccgggcccugcugaacaugaucgggauggucggcggcgcgcaggggacccagccgggccgcgacgggguggugcgggucugggacgugaagaaccccgaccuccugaacaaccaguucggcaccaugcccagccugacccucgccugccugacgaagcagggccagguggaccugaacgacgucgugcucgcccugaccgaccuggggcucaucuacaccgccaaguaccccaacuccagcgaccuggaccgccugucccagagccacccgauccucaacaugguggacaccaagaaguccagccugaacaucagcggcuacaacuucucccugggggcggccgucaaggccggcgccugcaugcucgacgggggcaacaugcuggagacgaucaaggugacgccccagaccauggacggcauccucaagagcauccugaaggugaagaagucccuggggauguucgucagcgacacccccggcgagcggaaccccuacgagaacauccuguacaagaucugccucuccggggacggcuggccguacaucgccagccgcaccuccaucguggggcgggcgugggagaacaccaccguggaccuggagagcgacggcaagccccagaaggucggcaccgccggguccaacaagagccugcaguccgccggcuuccccacggggcucaccuacagccagcugaugacccugaaggacuccaugaugcagcuggaccccagcgccaagaccuggaucgacaucgagggccgcccggaggaccccguggagaucgcccucuaccagcccgucuccgggugcuacauccacuucuuccgggagcccacggaccugaagcaguucaagcaggacgcgaaguacagccacggcaucgacguggccgaccuguucccggcccagcccggccucaccuccgccgugaucgaggcccugccccgcaacaugguccugaccugccaggggagcgacgacaucaagcggcuccuggacagccagggccgccgcgacaucaagcugaucgacaucgcgcucuccaaggccgacagccggcgcuucgagaacgccgugugggaccagugcaaggaccugugccacaugcacaccgggguggucguggagaagaagaagcggggcgggaaggaggagaucacgccccacugcgcccugauggacugcaucauguacgacgccgcgguguccggcggccucaacaucccgguccugcgcgccgugcugccccgggacaugguguuccgcaccagcucccccaaggucgugcucugaggacuaguuauaagacugacuagcccgaugggccucccaacgggcccuccuccccuccuugcaccgagauuaaucaaaggcucuuuucagagccaccaaaaaaaaaaaaaaaaaaaaaaaaaaaaaaaaaaaaaaaaaaaaaaaaaaaaaaaaaaaaaaaaagaauu

SEQ ID NO: 17679 - RNA, 1892 nt, Artificial Sequence
  mRNA product Design i-3 (hSL-A64-N5) comprising derived and/or modified sequence from LASV(LASV221-NIG-2010;Clade II)__AIT17625__NP (opt1)
aggagaaagcuuaccaugagcgccuccaaggaggugaaguccuuccuguggacccagagccuccgccgggagcugagcggcuacugcuccagcaucaagcugcaggucgugaaggacgcccaggcgcuccugcacgggcuggacuucuccgaggugagcaacguccagcgccucaugcggaagcagcgccgggacgacuccgaccugaagcgccugcgggaccucaaccaggccgugaacaaccugguggagcucaagagcacccagcagaaguccauccugcgcgucggcacgcugaccagcgacgaccugcucacccuggccgccgaccuggagaagcucaaguccaaggugauccggaccgagcgcccccugagcuccgggguguacaugggcaaccugagcacgcagcagcucgagcagcggcgcgcccugcugaacaugaucgggauggucggcggcgcgcaggggacccagccgggccgggacgggguggugcgcgucugggacgugaagaaccccgaccuccugaacaaccaguucggcaccaugcccucccugacccucgccugccugacgaagcagggccagguggaccugaacgacgccguccucgcccugaccgaccuggggcucaucuacaccgcgaaguaccccaacagcuccgaccuggaccggcugagccagagccacccgauccucaacaugguggacaccaagaaguccagccugaacaucuccggcuacaacuucagccugggggccgccgugaaggccggcgccugcaugcucgacgggggcaacaugcuggagacgaucaaggucacgccccagaccguggacggcauccugaaguccauccucaaggugaagcgcagccuggggauguucgucuccgacacccccggcgagcggaaccccuacgagaacauccuguacaagaucugccucagcggggacggcuggccguacaucgcgucccgcaccagcaucguggggcgggccugggagaacaccaccguggaccuggaguccgacggcaagccccagaaggucggcaccgccgggagcaacaagucccugcagagcgccggcuuccccacggggcucaccuacucccagcugaugacccugaaggacagcaugaugcagcuggaccccuccgccaagaccuggaucgacaucgagggccgcccggaggaccccguggagaucgcgcucuaccagcccaugagcgggugcuacauccacuucuuccgggagcccacggaccugaagcaguucaagcaggacgccaaguacucccacggcaucgacgucgccgaccuguucccggcccagcccggccucaccagcgccgugaucgaggcgcugccccgcaacauggugcugaccugccaggggagcgacgacaucaagcgccuccuggacucccagggccggcgcgacaucaagcugaucgacaucgcccucagcaaggccgacucccggaaguucgagaacgccgucugggaccagugcaaggaccugugccacaugcacaccggggugguggucgagaagaagaagcgcggcgggaaggaggagaucacgccccacugcgcccugauggacugcaucauguacgacgcggccgugagcggcggccucaacaucccggugcugcgggccguccugccccgcgacaugguguuccggaccuccagccccaaggugguccucugaggacuaguuauaagacugacuagcccgaugggccucccaacgggcccuccuccccuccuugcaccgagauuaaucaaaggcucuuuucagagccaccaaaaaaaaaaaaaaaaaaaaaaaaaaaaaaaaaaaaaaaaaaaaaaaaaaaaaaaaaaaaaaaaagaauu

SEQ ID NO: 17680 - RNA, 1892 nt, Artificial Sequence
  mRNA product Design i-3 (hSL-A64-N5) comprising derived and/or modified sequence from LASV(LASV237-NIG-2010;Clade II)__AIT17639__NP (opt1)
aggagaaagcuuaccaugagcgccuccaaggaggugaaguccuuccuguggacccagagccuccgccgggagcugagcggcuacugcuccaacaucaagcugcaggucgugaaggacgcccaggcgcuccugcacgggcuggacuucagcgagguguccaacguccagcgccucaugcggaagcagaagcgcgacgacagcgaccugaagcggcugcgcgaccucaaccaggccgugaacaaccugguggagcugaaguccacccagcagaaguccauccuccgggucggcacccugaccagcgacgaccugcucacccuggccgccgaccuggagaagcucaagagcaaggugauccgcaccgagcggccccuguccagcgggguguacaugggcaaccuguccacgcagcagcucgagcagcgccgggcccugcugaacaugaucgggauggucggcggcgcgcaggggacccagccgggccgcgacgggguggugcgggucugggacgugaagaaccccgaccuccugaacaaccaguucggcaccaugcccagccugacccucgccugccugacgaagcagggccagguggaccugaacgacgccguccucgcccugaccgaccuggggcucaucuacaccgcgaaguaccccaacuccagcgaccuggaccgccugucccagagccacccgauccucaacaugguggacaucaagaaguccagccugaacaucagcggcuacaacuucucccugggggccgccgugaaggccggcgccugcaugcucgacgggggcaacaugcuggagaccaucaaggucacgccccagaccauggacggcauccucaagagcauccugaaggugaagcggucccuggggauguucgugagcgacacccccggcgagcgcaaccccuacgagaacauccuguacaagaucugccucuccggggacggcuggccguacaucgcgagccggaccuccaucgucgggcgcgccugggagaacacgaccguggaccuggagagcgacggcaagccccagaaggugggcuccgccgggagcaacaagucccugcagagcgccggcuuccccaccgggcucaccuacucccagcugaugacgcugaaggacagcaugaugcagcuggaccccuccgccaagaccuggaucgacaucgagggccggccggaggaccccgucgagaucgcgcucuaccagcccaugagcgggugcuacauccacuucuuccgcgagcccaccgaccugaagcaguucaagcaggacgccaaguacucccacggcaucgacguggccgaccuguucccggcccagcccggccucaccagcgccgucaucgaggcgcugccccggaacauggugcugacgugccaggggagcgacgacaucaagcgccuccuggacucccagggccgccgggacaucaagcugaucgacaucgcccucagcaaggccgacucccgccgguucgagaacgccgugugggaccagugcaaggaccugugccacaugcacaccggggucgugguggagaagaagaagcgcggcgggaaggaggagaucacgccccacugcgcccugauggacugcaucauguacgacgcggccgucagcggcggccucaacaucccggugcugcgggccgugcugccccgcgacauggucuuccggaccuccagccccaagguggugcucugaggacuaguuauaagacugacuagcccgaugggccucccaacgggcccuccuccccuccuugcaccgagauuaaucaaaggcucuuuucagagccaccaaaaaaaaaaaaaaaaaaaaaaaaaaaaaaaaaaaaaaaaaaaaaaaaaaaaaaaaaaaaaaaaagaauu

SEQ ID NO: 17681 - RNA, 1892 nt, Artificial Sequence
  mRNA product Design i-3 (hSL-A64-N5) comprising derived and/or modified sequence from LASV(LASV253-NIG-2011;Clade II)__AIT17671__NP (opt1)
aggagaaagcuuaccaugagcgccuccaaggaggugaaguccuuccuguggacccagagccuccgccgggagcugagcggcuacugcuccagcaucaagcugcaggucgugaaggacgcccaggcgcuccugcacgggcuggacuucuccgaggugagcaacguccagcgccucaugcggaagcagaagcgcgacgacuccgaccugaagcggcugcgcgaccucaaccaggccgugaacaaccugguggagcucaagagcacccagcagaaguccguccugcgggugggcacccugaccagcgacgaccugcucacccuggccgccgaccuggagaagcucaaguccaaggugauccgcaccgagcggccccugagcuccggggucuacaugggcaaccugagcacgcagcagcucgagcagcgccgggcccugcugaacaugaucgggauggugggcggcgcgcaggggacccagccgggccgcgacggggugguccgggugugggacgugaagaaccccgaccuccugaacaaccaguucggcaccaugcccucccugacccucgccugccugacgaagcaggggcaggucgaccugaacgacguggugcucgcccugaccgaccugggccucaucuacaccgccaaguaccccaacagcuccgaccuggaccgccugagccagagccacccgauccucaacauggucgacaccaagaaguccagccugaacaucuccggcuacaacuucagccugggggcggccgugaaggccggcgccugcaugcucgacgggggcaacaugcuggagacgaucaaggugacgccccagaccauggacggcauccugaaguccauccucaaggucaagaagucccuggggauguucgugagcgacacccccggcgagcggaaccccuacgagaacauccuguacaagaucugccucagcggggacggcuggccguacaucgccucccgcaccagcaucguggggcgggcgugggagaacaccaccgucgaccuggaguccgacggcaagccccagaaggugggcaccgccgggagcaacaagucccugcagagcgccggcuuccccacggggcucaccuacucccagcugaugacccugaaggacagcaugaugcagcuggaccccuccgccaagaccuggaucgacaucgagggccgcccggaggaccccgucgagaucgcccucuaccagcccaugagcgggugcuacauccacuucuuccgggagcccacggaccugaagcaguucaagcaggacgcgaaguacucccacggcaucgacgugaccgaccuguucccggcccagcccggccucaccagcgccgugaucgaggcccugccccgcaacaugguccugaccugccaggggagcgacgacaucaagcggcuccuggacucccagggccgccgcgacaucaagcugaucgacaucgcccucagcaaggcggacucccggcgcuucgagaacgccgugugggaccagugcaaggaccugugccacaugcacacggggguggucguggagaagaagaagcggggcgggaaggaggagaucacgccccacugcgcccugauggacugcaucauguacgacgccgccgugagcggcggccucaacaucccgguccugcgcgcggugcugccccgggacaugguguuccgcaccuccagccccaaggucgugcucugaggacuaguuauaagacugacuagcccgaugggccucccaacgggcccuccuccccuccuugcaccgagauuaaucaaaggcucuuuucagagccaccaaaaaaaaaaaaaaaaaaaaaaaaaaaaaaaaaaaaaaaaaaaaaaaaaaaaaaaaaaaaaaaaagaauu

SEQ ID NO: 17682 - RNA, 1892 nt, Artificial Sequence
  mRNA product Design i-3 (hSL-A64-N5) comprising derived and/or modified sequence from LASV(LASV254-NIG-2011;Clade II)__AIT17675__NP (opt1)
aggagaaagcuuaccaugagcgccuccaaggaggugaaguccuuccuguggacccagagccuccgccgggagcugagcggcuacugcuccagcaucaagcugcaggucgugaaggacgcccaggcgcuccugcacgggcuggacuucuccgaggugagcaacguccagcgccucaugcggaagcagaagcgcgacgacuccgaccugaagcggcugcgcgaccucaaccaggccgugaacaaccugguggagcucaagagcacccagcagaaguccguccugcgggugggcacgcugaccagcgacgaccugcucacccuggccgccgaccuggagaagcucaaguccaaggugauccgcaccgagcggccccugagcuccggggucuacaugggcaaccugagcacgcagcagcucgagcagcgccgggcccugcugaacaugaucgggauggugggcggcgcgcaggggacccagccgggccgcgacggggugguccgggugugggacgugaagaaccccgaccuccugaacaaccaguucggcaccaugcccucccugacccucgccugccugacgaagcaggggcaggucgaccugaacgacgccgugcucgcccugaccgaccugggccucaucuacaccgcgaaguaccccaacagcuccgaccuggaccgccugagccagagccacccgauccucaacaugguggacaccaagaaguccagccugaacaucuccggcuacaacuucagccugggggccgccgucaaggccggcgccugcaugcucgacgggggcaacaugcuggagacgaucaaggugacgccccagaccauggacggcauccugaaguccauccucaaggugaagaagucccuggggauguucgucagcgacacccccggcgagcggaaccccuacgagaacauccuguacaagaucugccucagcggggacggcuggccguacaucgcgucccgcaccagcaucguggggcgggccugggagaacaccaucguggaccuggaguccgacggcaagccccagaaggucggcaccgccgggagcaacaagucccugcagagcgccggcuuccccaccgggcucacguacucccagcugaugacccugaaggacagcaugaugcagcuggaccccuccgccaagaccuggaucgacaucgagggccgcccggaggaccccguggagaucgcgcucuaccagcccaugagcgggugcuacauccacuucuuccgggagcccaccgaccugaagcaguucaagcaggacgccaaguacucccacggcaucgacgucgccgaccuguucccggcccagcccggccucacgagcgccgugaucgaggcgcugccccgcaacauggugcugaccugccaggggagcgacgacaucaagcggcuccuggacucccagggccgccgcgacaucaagcugaucgacaucgcccucagcaaggccgacucccggcgcuucgagaacgccgucugggaccagugcaaggaccugugccacaugcacaccggggugguggucgagaagaagaagcggggcgggaaggaggagaucacgccccacugcgcccugauggacugcaucauguacgacgcggccgugagcggcggccucaacaucccggugcugcgcgccguccugccccgggacaugguguuccgcaccuccagccccaaggugguccucugaggacuaguuauaagacugacuagcccgaugggccucccaacgggcccuccuccccuccuugcaccgagauuaaucaaaggcucuuuucagagccaccaaaaaaaaaaaaaaaaaaaaaaaaaaaaaaaaaaaaaaaaaaaaaaaaaaaaaaaaaaaaaaaaagaauu

SEQ ID NO: 17683 - RNA, 1892 nt, Artificial Sequence
  mRNA product Design i-3 (hSL-A64-N5) comprising derived and/or modified sequence from LASV(Nig08-04;Clade II)__ADU56611__NP (opt1)
aggagaaagcuuaccaugagcgccuccaaggaggugaaguccuuccuguggacccagagccuccgccgggagcugagcggcuacugcuccaacaucaagcugcaggucgugaaggacgcccaggcgcuccugcacgggcuggacuucagcgagguguccaacguccagcgccucaugcggaagcagaagcgcgacgacggcgaccugaagcggcugcgcgaccucaaccaggccgugaacaaccugguggagcucaagagcacccagcagaaguccguccugcggguggggacccugaccagcgacgaccugcucacccuggccgccgaccuggagaagcucaaguccaaggugauccgcaccgagcggccccugagcuccggcgucuacauggggaaccugagcacgcagcagcucgagcagcgcaaggcccugcuguccaugaucggcauggugggcggggcgcagggcacccagccggggcgggacggcgugguccgcgugugggacgugaagaaccccgaccuccugaacaaccaguucgggaccaugcccagccugacccucgccugccugacgaagcagggccaggucgaccugaacgacgccgugcucgcccugaccgaccugggccucaucuacaccgcgaaguaccccaacuccagcgaccuggaccggcugucccagagccacccgauccucaacaugguggacaccaagaaguccagccugaacaucagcggguacaacuucucccugggcgccgccgucaaggccggggccugcaugcucgacggcggcaacaugcuggagacgaucaaggugacgccccagaccauggacgggauccucaagagcauccugaaggugaagcgcucccugggcauguucgucagcgacacccccggggagcggaaccccuacgagaacauccuguacaagaucugccucuccggcgacggguggccguacaucgcgagccgcaccuccaucgugggccgggccugggagaacaccaccguggaccuggagagcgacggcaagccccagaaggucgggaccgccggcuccaacaagagccugcaguccgccggguuccccacgggccucaccuacagccagcugaugacccugaaggacuccaugaugcagcuggaccccagcgccaagaccuggaucgacaucgaggggcgcccggaggaccccguggagaucgcgcucuaccagcccauguccggcugcuacauccacuucuuccgggagcccacggaccugaagcaguucaagcaggacgccaaguacagccacggcaucgacgucaccgaccuguucuccgcccagccggggcucaccagcgccgugaucgaggcccugccccgcaacauggugcugaccugccagggcagcgacgacaucaagaagcuccuggacucccaggggcggcgcgacaucaagcugaucgacaucagccucaacaaggcggacucccgccgguucgagaacgccgucugggaccagugcaaggaccugugccacaugcacacgggcgugguggucgagaagaagaagcgcgggggcaaggaggagaucacgccccacugcgcccugauggacugcaucauguucgacgccgccgugagcggcgggcucaacauccccauccugcgggcggugcugccgcgcgacauggucuuccggaccuccagccccaagguggugcucugaggacuaguuauaagacugacuagcccgaugggccucccaacgggcccuccuccccuccuugcaccgagauuaaucaaaggcucuuuucagagccaccaaaaaaaaaaaaaaaaaaaaaaaaaaaaaaaaaaaaaaaaaaaaaaaaaaaaaaaaaaaaaaaaagaauu

SEQ ID NO: 17684 - RNA, 1895 nt, Artificial Sequence
  mRNA product Design i-3 (hSL-A64-N5) comprising derived and/or modified sequence from LASV(GA391;Clade III)__AAA46284__NP (opt1)
aggagaaagcuuaccaugagcgccuccaaggaggugcgcagcugccuguggacccagucccuccggcgcgagcugagcggcuacugcuccaacaucaagcugcaggucgugaaggacgcccaggcgcuccugcacgggcuggacuucagcgagguguccaacguccagcggcucaugcgcaagcagaagcgggacgacggcgaccugaagcgccugcgggaccucaaccaggccgugaacaaccugguggagcugaaguccacccagcagaaguccguccuccgcguggggacgcugagcuccgacgaccugcucauccuggccgccgaccuggagaagcucaagagcaaggugacccggaccgagcgcccccuguccagcggcgucuacauggggaaccuguccagccagcagcucgaccagcggcgcgcccugcugaacaugaucggcaugaccggcguguccgggggcgggaagggcgcgagcaacgggaucgugcgggucugggacgugaagaacgccgagcuccugaacaaccaguucggcacgaugccgucccugacccucgccugccugaccaagcagggccagguggaccugaacgacgccguccaggcgcucaccgaccuggggcugaucuacacggccaaguaccccaacagcagcgaccucgaccgccugucccagagccaccccauccugaacaugaucgacaccaagaaguccagccucaacaucuccggcuacaacuucagccugggggccgccgugaaggccggcgcgugcaugcuggacggcgggaacaugcucgagaccaucaaggugagcccccagaccauggacggcauccucaagagcauccugaaggucaagaagucccuggggauguucgugagcgacacgccgggcgagcggaaccccuacgagaacauccuguacaagaucugccuguccggggacggcuggagcuacaucgccucccgcaccagcaucgugggccgggccugggagaacaccgucguggaccucgagcaggacaacaagccccagaagaucgggaacggcggguccaacaagagccugcaguccgccggcuucgccgcggggcugaucuacagccagcucaugacccugaaggacuucaagugcuucaaccugauccccaacgccaagacguggauggacaucgagggccgcccggaggaccccguggagaucgcccuguaccagcccuccagcggcugcuacguccacuucuuccgggagcccaccgaccucaagcaguucaagcaggacgccaaguacagccacgggcgcgacgugaccgaccuguucgccgcgcagccgggccugaccuccgccgucaucgaggcccucccccggaacauggugaucacgugccaggggagcgaggacauccgcaagcugcuggagucccagggccgccgggacaucaagcucaucgacaucacccugagcaaggccgacucccgcaaguucgagaacgccgugugggaccaguucaaggaccugugccacaugcacaccggggucgugguggagaagaagaagcggggcggcaaggaggagaucacgccccacugcgcgcucauggacugcaucauguucgacgccgccgucagcgggggccuggacgccaaggugcugcgcgugguccucccccgggacaugguguuccgcaccuccaccccgaaggugguccugugaggacuaguuauaagacugacuagcccgaugggccucccaacgggcccuccuccccuccuugcaccgagauuaaucaaaggcucuuuucagagccaccaaaaaaaaaaaaaaaaaaaaaaaaaaaaaaaaaaaaaaaaaaaaaaaaaaaaaaaaaaaaaaaaagaauu

SEQ ID NO: 17685 - RNA, 1892 nt, Artificial Sequence
  mRNA product Design i-3 (hSL-A64-N5) comprising derived and/or modified sequence from LASV(Nig08-A19;Clade III)__ADU56619__NP (opt1)
aggagaaagcuuaccaugagcgccuccaaggaggugaaguccuuccuguggacccagucccuccgccgggagcugagcggcuacugcuccaacaucaagcugcaggucgugaaggacgcccaggcgcuccugcacgggcuggacuucagcgagguguccaacguccagcgccucaugcggaagcagaagcgcgacgacggcgaccugaagcggcugcgcgaccucaaccaggccgugaacaaccugguggagcucaagagcacccagcagaaguccguccugcggguggggacccugagcuccgacgaccugcucgugcuggccgccgaccuggagaagcucaagagcaaggucgugcgcaccgagcggccccuguccagcggcaucuacauggggaaccuguccagccagcagcucgaccagcgcaaggcccugcugaacaugaucggcaugaccggcgggaacggcgggcggaacaccacguccgacggcaucgugcgcgucugggacgugaagaacgcggagcuccugaacaaccaguucgggaccaugccgagccugacccucgccugccugaccaagcagggccagguggaccugaacgacgccguccaggcccucacggaccugggccugaucuacaccgcgaaguaccccaacuccagcgaccucgaccggcuggcccagagccaccccauccugaacaugaucgacaccaagaaguccagccucaacaucuccggguacaacuucagccugggcgccgccgugaaggccggggcgugcaugcuggacggcggcaacaugcucgagaccaucaaggugagcccccagacgauggacgggauccucaagagcauccugaaggucaagcgcucccugggcauguucaucagcgacaccccgggggagcggaaccccuacgagaacauccuguacaagaucugccuguccggcgacggguggcccuacaucgccagccgcaccuccaucgugggccgggccugggagaacaccguggucgaccucgagagcgacaacaagccccagaagacgggcaacgggggcuccaacaagagccugcaguccgccggguucgccgcgggccugaccuacagccagcucaugacccugaaggacuccaugcugcagcuggacccgaacgccaagaccuggauggacaucgaggggcgccccgaggaccccguggagaucgcccucuaccagcccagcuccggcugcuacauccacuucuuccgggagccgacggaccugaagcaguucaagcaggacgccaaguacagccacggcaucgacgugaccgaccuguucgccgcgcagcccgggcucaccagcgccgucaucgaggcccugccccgcaacauggugaucacgugccagggcuccgaggacauccggaagcugcucgagagccaggggcgccgcgacaucaagcugaucgacaucucccugagcaaggucgacucccggaaguucgagaacgccgugugggaccaguucaaggaccucugccacaugcacaccggcaucguggucgagaagaagaagcgcgggggcaaggaggagaucacgccccacugcgcccugauggacugcaucauguucgacgcggccgugagcggcgggguggacgccaagguccugcgggccgugcucccgcgcgacaugguguuccggaccuccacccccaaggucgugcugugaggacuaguuauaagacugacuagcccgaugggccucccaacgggcccuccuccccuccuugcaccgagauuaaucaaaggcucuuuucagagccaccaaaaaaaaaaaaaaaaaaaaaaaaaaaaaaaaaaaaaaaaaaaaaaaaaaaaaaaaaaaaaaaaagaauu

SEQ ID NO: 17686 - RNA, 1892 nt, Artificial Sequence
  mRNA product Design i-3 (hSL-A64-N5) comprising derived and/or modified sequence from LASV(G1180-SLE-2010;Clade IV)__AIT17169__NP (opt1)
aggagaaagcuuaccaugagcgccuccaaggagaucaagagcuuccuguggacccagucccuccgccgggagcugagcggcuacugcuccaacaucaagcuccagguggucaaggacgcccaggcgcugcugcacgggcuggacuucagcgagguguccaacgugcagcgccucaugcggaaggagcgccgggacgacaacgaccugaagcgccugcgggaccucaaccaggccgucaacaaccugguggagcucaagagcacccagcagaaguccauccugcgcgugggcacccugaccagcgacgaccugcucauccuggccgccgaccuggagaagcucaaguccaaggucauccggaccgagcgcccccugagcgccgggguguacaugggcaaccuguccagccagcagcucgaccagcggcgcgcgcugcuguccaugaucgggaugagcuccggcaaccagcgggcccaggccggccgcgacggggugguccgggugugggacgugaagaacgucgagcuccugaacaaccaguucggcaccaugccgagccugacgcucgccugccugaccaagcagggccagguggaccugaacgacgcggugcaggcccucaccgaccuggggcugaucuacaccgccaaguaccccaacacguccgaccucgaccgccugacccagagccaccccauccugaacaugaucgacaccaagaaguccagccucaacaucagcggguacaacuucucccugggcgccgccgucaaggcgggcgccugcaugcuggacgggggcaacaugcucgagaccaucaaggugagcccccagacgauggacgggauccugaaguccauccugaaggugaagaaggcccucggcauguucaucagcgacaccccgggcgagcggaaccccuacgagaacauccuguacaagaucugccuguccggggacggcuggcccuacaucgccagccgcaccuccaucaccgggcgggccugggagaacacggucguggaccucgagagcgacggcaagccccagaaggcgggguccaacaacagcaacaagucccugcagagcgugggcuucaccgccggccugaccuacucccagcucaugacccugaaggacgccaugcugcagcuggacccgaacgccaagacguggauggacaucgaggggcgccccgaggaccccgucgagaucgcccucuaccagcccagcuccggcugcuacauccacuucuuccgggagccgaccgaccugaagcaguucaagcaggacgcgaaguacagccacgggaucgacgugaccgaccuguucgccgcccagcccggccucaccuccgccgugaucgacgcccugccccgcaacauggucaucacgugccaggggagcgacgacauccgcaagcugcucgagagccagggccggaaggacaucaagcugaucgacaucgcgcuguccaagaccgacagccgcaaguacgagaacgccgugugggaccaguacaaggaccucugccacaugcacaccggcgucgugguggagaagaagaagcgcgggggcaaggaggagaucacgccccacugcgcccugauggacugcaucauguucgacgccgcggucuccgggggccugaacaccagcgugcuccgggccgugcugccgcgggacauggucuuccgcaccuccacgccccggguggugcugugaggacuaguuauaagacugacuagcccgaugggccucccaacgggcccuccuccccuccuugcaccgagauuaaucaaaggcucuuuucagagccaccaaaaaaaaaaaaaaaaaaaaaaaaaaaaaaaaaaaaaaaaaaaaaaaaaaaaaaaaaaaaaaaaagaauu

SEQ ID NO: 17687 - RNA, 1892 nt, Artificial Sequence
  mRNA product Design i-3 (hSL-A64-N5) comprising derived and/or modified sequence from LASV(G1442-SLE-2011;Clade IV)__AIT17181__NP (opt1)
aggagaaagcuuaccaugagcgccuccaaggaggugaaguccuuccuguggacccagagccuccgccgggagcugagcggcuacugcuccaacaucaagcugcaggucgugaaggacgcccaggcgcuccugcacgggcuggacuucagcgagguguccaacguccagcgccucaugcggaagcagcgccgggacgacaacgaccugaagcgccugcgggaccucaaccaggccgugaacaaccugguggagcucaagagcacccagcagaaguccguccugcgcgugggcacccugaccagcgacgaccugcucgugcuggccgccgaccuggagaagcucaaguccaaggucauccggaccgagcgcccccugagcgccgggguguacaugggcaaccuguccagccagcagcucgaccagcggcgcgcgcugcugaacaugaucgggauguccggcggcauccaggggacccggacgggccgcgacggggugguccgggugugggacgugaagaacgccgaccuccugaacaaccaguucggcaccaugccgagccugacccucgccugccugaccaagcaggggcaggucgaccugaacgacguggugcaggcccucacggaccugggccugaucuacaccgcgaaguaccccaacgccuccgaccucgaccgccugacccagagccaccccauccugaacaugaucgacaccaagaaguccagccucaacaucagcggcuacaacuucucccugggggccgccgucaaggccggcgcgugcaugcuggacgggggcaacaugcucgagacgaucaaggugagcccccagaccauggacggcauccugaaguccauccugaaggugaagaagacccucgggauguucaucagcgacaccccgggcgagcggaaccccuacgagaacauccuguacaagaucugccuguccggggacggcuggcccuacaucgccagccgcacguccaucaccgggcgggccugggagaacaccgucguggaccucgagagcgacggcaagccccagaaggccggcuccaacaacagcaacaagucccugcagagcgccggguucgcggccggccugaccuacucccagcucaugacgcugaaggacgccaugcugcagcuggacccgaacgccaagaccuggauggacaucgaggggcgccccgaggaccccguggagaucgcccucuaccagcccagcuccggcugcuacauccacuucuuccgggagccgaccgaccugaagcaguucaagcaggacgcgaaguacagccacgggaucgacgucaccgaccuguucgccgcccagcccggccucacguccgccgugaucgaggcccugccccgcaacauggucaucacgugccagggcagcgacgacaucaagaagcugcucgagucccaggggcgcaaggacaucaagcugaucgacaucgcgcugagcaagaccgacagccggaaguacgagaacgccgugugggaccaguacaaggaccucugccacaugcacaccggcguggucguggagaagaagaagcgcgggggcaaggaggagaucaccccgcacugcgcccugauggacugcaucauguucgacgccgcgguguccgggggccugaacacccucguccugcgggccgugcugccccgcgacaugguguuccggaccagcacgccccgcgucgugcucugaggacuaguuauaagacugacuagcccgaugggccucccaacgggcccuccuccccuccuugcaccgagauuaaucaaaggcucuuuucagagccaccaaaaaaaaaaaaaaaaaaaaaaaaaaaaaaaaaaaaaaaaaaaaaaaaaaaaaaaaaaaaaaaaagaauu

SEQ ID NO: 17688 - RNA, 1892 nt, Artificial Sequence
  mRNA product Design i-3 (hSL-A64-N5) comprising derived and/or modified sequence from LASV(G3010-SLE-2013;Clade IV)__AIT17345__NP (opt1)
aggagaaagcuuaccaugagcgccuccaaggagaucaagagcuuccuguggacccagucccuccgccgggagcugagcggcuacugcuccaacaucaagcuccagguggucaaggacgcccaggcgcugcugcacgggcuggacuucagcgagguguccaacgugcagcgccucaugcggaaggagcgccgggacgacaacgaccugaagcgccugcgggaccucaaccaggccgucaacaaccugguggagcucaagagcacccagcagaaguccauccugcgcgugggcacccugaccagcgacgaccugcucauccuggccgccgaccuggagaagcucaaguccaaggucacccggaccgagcgcccccugagcgccgggguguacaugggcaaccuguccagccagcagcucgaccagcggcgcgcgcugcuguccaugaucgggaugagcuccggcgugcagggcgcccgggccgggcgcgacggcgucgugcgggugugggacgucaagaacgccgagcuccugaacaaccaguucgggacgaugccgagccugacccucgcgugccugaccaagcagggccagguggaccugaacgacgugguccaggcccucaccgaccuggggcugaucuacacggccaaguaccccaacaccuccgaccucgaccgccugacccagagccaccccauccugaacaugaucgacaccaagaaguccagccucaacaucagcggcuacaacuucucccugggcgccgccgugaaggcgggggccugcaugcuggacggcgggaacaugcucgagacgaucaaggugagcccccagaccauggacggcauccugaaguccauccugaaggucaagaaggcccucggcauguucaucagcgagaccccgggggagcggaaccccuacgagaacauccuguacaagaucugccuguccggcgacggguggcccuacaucgccagccgcaccuccaucacgggccgggccugggagaacaccgugguggaccucgagagcgacgggaagccccagaaggcgggcuccaacaacagcaacaagucccugcagagcgccggcuucaccgccgggcugaccuacucccagcucaugacgcugaaggacgccaugcugcagcuggacccgaacgccaagaccuggauggacaucgagggccgccccgaggaccccgucgagguggcgcucuaccagcccagcuccgggugcuacauccacuucuuccgggagccgaccgaccugaagcaguucaagcaggacgccaaguacagccacggcaucgacgugaccgaccuguucgccgcccagcccgggcucacguccgccgucaucgacgcgcugccccgcaacauggugaucacgugccagggcagcgacgacaucaagaagcugcucgagagccagggccgcaaggacaucaagcugaucgacaucgcccuguccaagaccgacagccggaaguacgagaacgccgucugggaccaguacaaggaccucugccacaugcacaccggggugguggucgagaagaagaagcgcggcgggaaggaggagaucaccccgcacugcgcccugauggacugcaucauguucgacgcggccguguccggcgggcugaacaccagcgugcuccgggccguccugccccgcgacaugguguuccggaccuccacgccccgcgugguccugugaggacuaguuauaagacugacuagcccgaugggccucccaacgggcccuccuccccuccuugcaccgagauuaaucaaaggcucuuuucagagccaccaaaaaaaaaaaaaaaaaaaaaaaaaaaaaaaaaaaaaaaaaaaaaaaaaaaaaaaaaaaaaaaaagaauu

SEQ ID NO: 17689 - RNA, 1892 nt, Artificial Sequence
  mRNA product Design i-3 (hSL-A64-N5) comprising derived and/or modified sequence from LASV(G502-SLE-2009;Clade IV)__AIT17127__NP (opt1)
aggagaaagcuuaccaugagcgccuccaaggagaucaagagcuuccuguggacccagucccuccgccgggagcugagcggcuacugcuccaacaucaagcuccagguggucaaggacgcccaggcgcugcugcacgggcuggacuucagcgagguguccaacgugcagcgccucaugcggaaggagcgccgggacgacaacgaccugaagcgccugcgggaccucaaccaggccgucaacaaccugguggagcucaagagcacccagcagaaguccauccugcgcgugggcacccugaccagcgacgaccugcucauccuggccgccgaccuggagaagcucaaguccaaggucauccggaccgagcgcccccugagcgccgggguguacaugggcaaccuguccagccagcagcucgaccagcggcgcgcgcugcuguccaugaucgggaugagcggcggcaaccagggggugcgggccggcaaggacggggucgugcgcgugugggacgucaagaacgccgagcuccugaacaaccaguucggcaccaugccgucccugacgcucgccugccugaccaagcagggccagguggaccugaacgacgcggugcaggcccucaccgaccuggggcugaucuacaccgccaaguaccccaacacgagcgaccucgaccggcugacccagucccaccccauccugaacaugaucgacaccaagaaguccagccucaacaucuccggcuacaacuucagccugggggccgccgucaaggcgggcgccugcaugcuggacgggggcaacaugcucgagaccaucaaggugagcccccagacgauggacggcauccucaagagcauccugaaggugaagaaggcccuggggauguucaucuccgacaccccgggcgagcgcaaccccuacgagaacauccuguacaagaucugccugagcggggacggcuggcccuacaucgccucccggaccagcaucaccgggcgcgccugggagaacacggucguggaccucgaguccgacggcaagccccagaaggcgggcagcaacaacuccaacaagagccugcaguccgccggguucaccgccggccugaccuacagccagcucaugacccugaaggacgccaugcugcagcuggacccgaacacgaagaccuggauggacaucgaggggcggcccgaggaccccguggagaucgcccucuaccagcccuccagcggcugcuacauccacuucuuccgcgagccgaccgaccugaagcaguucaagcaggacgcgaaguacucccacgggaucgacgucaccgaccuguucgccgcccagcccggccucacgagcgccgugaucgacgcccugccccggaacauggugaucacgugccagggcuccgacgacauccgcaagcugcucgagagccaggggcgcaaggacaucaagcugaucgacaucgcgcugaacaagaccgacagccggaaguacgagaacgccgucugggaccaguacaaggaccucugccacaugcacaccggcguggucguggagaagaagaagcgcgggggcaaggaggagaucaccccgcacugcgcccugauggacugcaucauguucgacgccgcgguguccgggggccugaacaccagcguccuccgggccgugcugccccgcgacaugguguuccggaccuccacgccccgcgucgugcugugaggacuaguuauaagacugacuagcccgaugggccucccaacgggcccuccuccccuccuugcaccgagauuaaucaaaggcucuuuucagagccaccaaaaaaaaaaaaaaaaaaaaaaaaaaaaaaaaaaaaaaaaaaaaaaaaaaaaaaaaaaaaaaaaagaauu

SEQ ID NO: 17690 - RNA, 1892 nt, Artificial Sequence
  mRNA product Design i-3 (hSL-A64-N5) comprising derived and/or modified sequence from LASV(G733-SLE-2010;Clade IV)__AIT17155__NP (opt1)
aggagaaagcuuaccaugagcgccuccaaggagaucaagagcuuccuguggacccagucccuccgccgggagcugagcggcuacugcuccaacaucaagcuccagguggucaaggacgcccaggcgcugcugcacgggcuggacuucagcgagguguccaacgugcagcgccucaugcggaaggagcgccgggacgacaacgaccugaagcgccugcgggaccucaaccaggccgucaacaaccugguggagcucaagagcacccagcagaaguccgugcugcgcgucggcacccugaccagcgacgagcugcucgugcuggccgccgaccuggagaagcucaaguccaaggugauccggaccgagcgcccccugagcgccggggucuacaugggcaaccuguccagccagcagcucgaccagcggcgcgcgcugcuguccaugaucgggaugagcggcggcaaccagggggcccggaccggccgcgacgggguggugcgggucugggacgugaagaacgccgagcuccugaacaaccaguucggcaccaugccgucccugacccucgccugccugaccaagcagggccagguggaccugaacgacgcgguccaggcccucaccgaccuggggcugaucuacacggccaaguaccccaacaccagcgaccucgaccgccugacccagucccaccccauccugaacaugaucgacaccaagaaguccagccucaacaucuccggcuacaacuucagccugggggccgccgugaaggcgggcgccugcaugcuggacgggggcaacaugcucgagacgaucaaggugagcccccagaccauggacggcauccucaagagcauccugaaggucaagaaggcccuggggauguucaucuccgacaccccgggcgagcggaaccccuacgagaacauccuguacaagaucugccugagcggggacggcuggcccuacaucgccucccgcaccagcaucacggggcgggccugggagaacaccgugguggaccucgaguccgacggcaagccccagaaggcgggcagcaacaacuccaacaagagccugcaguccgccggguucaccgccggccugaccuacagccagcucaugacgcugaaggacgccaugcugcagcuggacccgaacgccaagaccuggauggacaucgaggggcgccccgaggaccccgucgagaucgcgcucuaccagcccuccagcggcugcuacauccacuucuuccgggagccgaccgaccugaagcaguucaagcaggacgccaaguacucccacgggaucgacgugaccgaccuguucgccgcccagcccggccucacgagcgccgugaucgacgcgcugccccgcaacauggucaucacgugccagggcuccgacgacauccgcaagcugcucgagagccaggggcggaaggacaucaagcugaucgacaucgcccugagcaagaucgacucccgcaaguacgagaacgccgugugggaccaguacaaggaccucugccacaugcacaccggcgucgugguggagaagaagaagcgcgggggcaaggaggagaucacgccccacugcgcccugauggacugcaucauguucgacgcggccgucagcgggggccugaacucccucgugcugcgggccgugcugccgcgggacauggucuuccgcaccagcacgccccggguggugcucugaggacuaguuauaagacugacuagcccgaugggccucccaacgggcccuccuccccuccuugcaccgagauuaaucaaaggcucuuuucagagccaccaaaaaaaaaaaaaaaaaaaaaaaaaaaaaaaaaaaaaaaaaaaaaaaaaaaaaaaaaaaaaaaaagaauu

SEQ ID NO: 17691 - RNA, 1892 nt, Artificial Sequence
  mRNA product Design i-3 (hSL-A64-N5) comprising derived and/or modified sequence from MOPV/LASV reassortant(IGS-1;Clade IV)__AFY05578__NP (opt1)
aggagaaagcuuaccaugagcgccuccaaggagaucaagagcuuccuguggacccagucccuccgccgggagcugagcggcuacugcuccaacaucaagcuccagguggucaaggacgcccaggcgcugcugcacgggcuggacuucagcgagguguccaacgugcagcgccucaugcggaaggagcgccgggacgacaacgaccugaagcgccugcgggaccucaaccaggccgucaacaaccugguggagcucaagagcacccagcagaaguccauccugcgcgugggcacccugaccagcgacgaccugcucauccuggccgccgaccuggagaagcuccgguccaaggucauccgcaccgagcggccccugagcgccgggguguacaugggcaaccuguccagccagcagcucgaccagcgccgggcgcugcugaacaugaucgggauguccggcggcaaccagggggcccgcgccggccgggacggggugguccgcgugugggacgugaagaacgccgagcuccugagcaaccaguucggcaccaugccgucccugacgcucgcgugccugaccaagcaggggcaggucgaccugaacgacgccgugcaggcccucaccgaccugggccugaucuacaccgccaaguaccccaacacgagcgaccucgaccggcugacccagucccaccccauccugaacaugaucgacaccaagaaguccagccucaacaucuccggcuacaacuucagccugggggccgcggugaaggccggcgccugcaugcuggacgggggcaacaugcucgagaccaucaaggucagcccccagacgauggacggcauccucaagagcauccugaaggugaagaaggcccuggggauguucaucuccgacaccccgggcgagcgcaaccccuacgagaacauccuguacaagaucugccugagcggggacggcuggcccuacaucgccucccggaccagcaucaccgggcgcgcgugggagaacacgguggucgaccucgaguccgacggcaagccccagaaggccgacagcaacaacuccagcaagucccugcagagcgccggcuucaccgccgggcugaccuacucccagcucaugacccugaaggacgccaugcugcagcuggacccgaacgcgaagacguggauggacaucgagggccggcccgaggaccccguggagaucgcccucuaccagcccagcuccgggugcuacauccacuucuuccgcgagccgaccgaccugaagcaguucaagcaggacgccaaguacagccacggcaucgacgugaccgaccuguucgccacccagcccgggcucacguccgccgucaucgacgcgcugccccgcaacauggugaucacgugccagggcagcgacgacauccggaagcugcucgagagccagggccgcaaggacaucaagcugaucgacaucgaccuguccaagaccgacagccggaaguacgagaacgccgugugggaccaguacaaggaccucugccacaugcacaccggggucguggucgagaagaagaagcgcggcgggaaggaggagaucaccccgcacugcgcccugauggacugcaucauguucgacgccgcgguguccggcgggcugaacaccagcgugcuccgggccguccugccccgcgacaugguguuccggaccuccacgccccgcgugguccugugaggacuaguuauaagacugacuagcccgaugggccucccaacgggcccuccuccccuccuugcaccgagauuaaucaaaggcucuuuucagagccaccaaaaaaaaaaaaaaaaaaaaaaaaaaaaaaaaaaaaaaaaaaaaaaaaaaaaaaaaaaaaaaaaagaauu

SEQ ID NO: 17692 - RNA, 1892 nt, Artificial Sequence
  mRNA product Design i-3 (hSL-A64-N5) comprising derived and/or modified sequence from LASV(LM765-SLE-2012;Clade IV)__AIT17815__NP (opt1)
aggagaaagcuuaccaugagcgccuccaaggagaucaagagcuuccuguggacccagucccuccgccgggagcugagcggcuacugcuccaacaucaagcuccagguggucaaggacgcccaggcgcugcugcacgggcuggacuucagcgagguguccaacgugcagcgccucaugcggaaggagcgccgggacgacaacgaccugaagcgccugcgggaccucaaccaggccgucaacaaccugguggagcucaagagcacccagcagaaguccauccugcgcgugggcacccugaccagcgacgaccugcucauccuggccgccgaccuggagaagcucaaguccaaggucacccggaccgagcgcccccugagcgccgggguguacaugggcaaccuguccagccagcagcucgaccagcggcgcgcgcugcuggacaugaucgggauguccggcagcaaccagggcgcccgggccgggcgcgacggcgugguccgggugugggacgugaagaacgccgagcuccugaacaaccaguucgggacgaugccgucccugacccucgcgugccugaccaagcagggccaggucgaccugaacgacgccgugcaggcccucaccgaccuggggcugaucuacacggccaaguaccccaacaccagcgaccucgaccgccugacccagucccaccccauccugaacaugaucgacaccaagaaguccagccucaacaucuccggcuacaacuucagccugggcgccgcggugaaggccggggccugcaugcuggacggcgggaacaugcucgagacgaucaaggucagcccccagaccauggacggcauccucaagagcauccugaaggugaagaaggcccugggcauguucaucuccgacgccccgggggagcggaaccccuacgagaacauccuguacaagaucugccugagcggcgacggguggcccuacaucgcgucccgcaccagcaucaccggccgggccugggagaacacgguggucgaccucgaguccgacgggaagccccagaaggccggcagcaacggcuccaacaagagccugcaguccgccggguucaccgccggccugaccuacagccagcucaugacccugaaggacgcgaugcugcagcuggacccgaacgccaagacguggauggacaucgaggggcgccccgaggaccccguggagaucgcccucuaccagcccuccagcggcugcuacauccacuucuuccgggagccgaccgaccugaagcaguucaagcaggacgccaaguacucccacgggaucgacgugaccgaccuguucgccgcgcagcccggccucaccagcgccgucaucgacgcccugccccgcaacauggugaucacgugccagggcuccgacgacauccgcaagcuguucgagagccaggggcggaaggacaucaagcucaucgacaucgcccugagcaagaccgacucccgcaaguacgagaacgcggugugggaccaguacaaggaccugugccacaugcacaccggcaucgucguggagaagaagaagcgcgggggcaaggaggagaucacgccccacugcgcccucauggacugcaucauguucgacgccgccgucagcgggggccugaacaccuccgugcugcgggccgugcucccgcgggacauggucuuccgcaccagcacgccccggguggugcugugaggacuaguuauaagacugacuagcccgaugggccucccaacgggcccuccuccccuccuugcaccgagauuaaucaaaggcucuuuucagagccaccaaaaaaaaaaaaaaaaaaaaaaaaaaaaaaaaaaaaaaaaaaaaaaaaaaaaaaaaaaaaaaaaagaauu

SEQ ID NO: 17693 - RNA, 1892 nt, Artificial Sequence
  mRNA product Design i-3 (hSL-A64-N5) comprising derived and/or modified sequence from LASV(LM776-SLE-2012;Clade IV)__AIT17825__NP (opt1)
aggagaaagcuuaccaugagcgccuccaaggagaucaagagcuuccuguggacccagucccuccgccgggagcugagcuccuacugcagcaacaucaagcuccagguggucaaggacgcccaggcgcugcugcacggccuggacuucuccgaggugagcaacgugcagcgccucaugcggaaggagcgccgggacgacaacgaccugaagcgccugcgggaccucaaccaggccgucaacaaccugguggagcugaaguccacccagcagaaguccauccuccgcguggggacccugaccuccgacgaccugcucauccuggccgccgaccuggagaagcucaagagcaaggucacccggaccgagcgcccccuguccgccggcguguacauggggaaccugagcucccagcagcucgaccagcggcgcgcgcugcugagcaugaucggcauguccgggagcaaccagggcgcccgggccggccgcgacggggugguccgggugugggacgugaagaacgccgagcuccugaacaaccaguucggcacgaugccgucccugacccucgcgugccugaccaagcaggggcaggucgaccugaacgacgccgugcaggcccucaccgaccugggccugaucuacacggccaaguaccccaacaccagcgaccucgaccgccugacccagagccaccccauccugaacaugaucgacaccaagaaguccagccucaacaucuccggguacaacuucagccugggcgccgcggugaaggccggcgccugcaugcuggacgggggcaacaugcucgagacgaucaaggucagcccccagaccauggacgggauccucaagagcauccugaaggugaagaaggcccugggcauguucaucuccgacaccccgggcgagcggaaccccuacgagaacauccuguacaagaucugccugagcggggacggcuggcccuacaucgccucccgcaccagcaucacggggcgggcgugggagaacaccguggucgaccucgaguccgacggcaagccccagaaggccgggagcaacaacuccaacaagagccugcaguccgccggcuucaccgccggccugaccuacagccagcucaugacgcugaaggacgccaugcugcagcuggacccgaacgcgaagaccuggauggacaucgaggggcgccccgaggaccccguggagguggcccucuaccagcccuccagcggcugcuacauccacuucuuccgggagccgaccgaccugaagcaguucaagcaggacgccaaguacucccacgggaucgacgucaccgaccuguucgccgcccagcccggccucacgagcgcggugaucgacgcccugccccgcaacauggugaucacgugccaggggagcgacgacauccgcaagcugcucgagucccagggccggaaggacaucaagcugaucgacaucgcccugagcaagaccgacucccgcaaguacgagaacgccgucugggaccaguacaaggaccucugccacaugcacaccggcguggucguggagaagaagaagcgcgggggcaaggaggagaucaccccgcacugcgcgcugauggacugcaucauguucgacgccgccgugagcgggggccugaacaccuccguccuccgggccgugcugccccgggacaugguguuccgcaccagcacgccccgggucgugcugugaggacuaguuauaagacugacuagcccgaugggccucccaacgggcccuccuccccuccuugcaccgagauuaaucaaaggcucuuuucagagccaccaaaaaaaaaaaaaaaaaaaaaaaaaaaaaaaaaaaaaaaaaaaaaaaaaaaaaaaaaaaaaaaaagaauu

SEQ ID NO: 17694 - RNA, 1892 nt, Artificial Sequence
  mRNA product Design i-3 (hSL-A64-N5) comprising derived and/or modified sequence from LASV(Mad39;Clade IV)__ANH09723__NP (opt1)
aggagaaagcuuaccaugagcgccuccaaggagaucaagagcuuccuguggacccagucccuccgccgggagcugagcggcuacugcuccaacaucaagcuccagguggucaaggacgcccaggcgcugcugcacgggcuggacuucagcgagguguccaacgugcagcgccucaugcggaagcagcgccgggacgacaacgaccugaagcgccugcgggaccucaaccaggccgucaacaaccugguggagcugaaguccacccagcagaaguccgugcuccgcgucggcacgcugaccagcgacgaccugcucacccuggccgccgaccuggagaagcucaaguccaaggugacccggacggagcgcccccugaccgccgggguguacaugggcaaccugagcucccagcagcucgaccagcggcgcgcgcugcugaacaugaucgggaugagcggcggcaaccagggggcccggaccggccgcgacggggucgugcgggugugggacgucaagaacgccgagcuccugaacaaccaguucggcaccaugccgucccugacgcucgccugccugaccaagcagggccagguggaccugaacgacgugguccaggcgcucaccgaccuggggcugaucuacaccgccaaguaccccaacacgagcgaccucgaccgccugacccagucccaccccauccugaacaugaucgacaccaacaagagcucccucaacaucagcggcuacaacuucagccugggggccgccgugaaggccggcgcgugcaugcuggacgggggcaacaugcucgagaccaucaaggugagcccccagacgauggacggcauccucaagagcauccugaaggucaagaagucccuggggauguucaucagcgacaccccgggcgagcggaaccccuacgagaacauccuguacaagaucugccuguccggggacggcuggcccuacaucgccagccgcaccuccaucaccgggcgggccugggagaacacggugguggaccucgagagcggcggcaagccccagaaggccggguccaacaacagcaacaagucccugcagagcgccggcuucgcggccgggcugaccuacucccagcucaugacccugaaggacgccaugcugcagcuggacccgaacgccaagaccuggauggacaucgagggccgccccgaggaccccgucgagaucgcccucuaccagcccaucagcgggugcuacauccacuucuuccgggagccgacggaccugaagcaguucaagcaggacgcgaaguacucccacggcaucgacgugaccgaccuguucgccgcccagcccggccucaccagcgccgugaucgaggcccugccccgcaacauggucaucacgugccagggguccgacgacauccgcaagcuguucgagagccagggccggaaggacaucaagcucaucgacaucgcgcuguccaagaccgacagccgcaaguacgagaacgccgugugggaccaguacaaggaccugugccacaugcacaccggggucgugguggagaagaagaagaagggcgggaaggaggagaucacgccccacugcgcccucauggacugcaucauguucgacgccgcggucagcggcggccugaacacccuggugcuccgggccgugcugccgcgcgacauggucuuccggaccuccacccccaagguggugcugugaggacuaguuauaagacugacuagcccgaugggccucccaacgggcccuccuccccuccuugcaccgagauuaaucaaaggcucuuuucagagccaccaaaaaaaaaaaaaaaaaaaaaaaaaaaaaaaaaaaaaaaaaaaaaaaaaaaaaaaaaaaaaaaaagaauu

SEQ ID NO: 17695 - RNA, 1892 nt, Artificial Sequence
  mRNA product Design i-3 (hSL-A64-N5) comprising derived and/or modified sequence from LASV(Z0947-SLE-2011;Clade IV)__AIT17841__NP (opt1)
aggagaaagcuuaccaugagcgccuccaaggagaucaagagcuuccuguggacccagucccuccgccgggagcugagcggcuacugcuccaacaucaagcuccagguggucaaggacgcccaggcgcugcugcacgggcuggacuucagcgagguguccaacgugcagcgccucaugcggaaggagcgccgggacgacaacgaccugaagcgccugcgggaccucaaccaggccgucaacaaccugguggagcucaagagcacccagcagaaguccauccugcgcgugggcacccugaccagcgacgaccugcucauccuggccgccgaccuggagaagcucaaguccaaggucacccggaccgagcgcccccugagcgccgggguguacaugggcaaccuguccagccagcagcucgaccagcggcgcgcgcugcugaacaugaucgggauguccggcagcaaccagggcgcccggacggggcgcgacggcgugguccgggugugggacgugaagaacgccgagcuccugaacaaccaguucgggaccaugccgucccugacccucgccugccugaccaagcagggccaggucgaccugaacgacgcggugcaggcccucacggaccuggggcugaucuacaccgccaaguaccccaacaccagcgaccucgaccgccugacccagucccaccccauccugaacaugaucgacacgaagaaguccagccucaacaucuccggcuacaacuucagccugggcgccgccgugaaggcgggggccugcaugcuggacggcgggaacaugcucgagaccaucaaggucagcccccagaccauggacggcauccucaagagcauccugaaggugaagaaggcccugggcauguucaucuccgacgccccgggggagcggaaccccuacgagaacauccuguacaagaucugccugagcggcgacggguggcccuacaucgccucccgcaccagcaucacgggccgggcgugggagaacaccguggucgaccucgaguccgacgggaagccccagaaggccggcagcaacggcuccaacaagagccugcaguccgccggguucaccgccggccugaccuacagccagcucaugacgcugaaggacgccaugcugcagcuggacccgaacgcgaagaccuggauggacaucgaggggcgccccgaggaccccguggagaucgcccucuaccagcccuccagcggcugcuacauccacuucuuccgggagccgaccgaccugaagcaguucaagcaggacgccaaguacucccacgggaucgacgugaccgaccuguucgccgcccagcccggccucacgagcgcggucaucgacgcccugccccgcaacauggugaucacgugccagggcuccgacgacauccgcaagcuguucgagagccaggggcggaaggacaucaagcucaucgacaucgcccugagcaagaccgacucccgcaaguacgagaacgccgugugggaccaguacaaggaccugugccacaugcacaccggcaucgucguggagaagaagaagcgcgggggcaaggaggagaucaccccgcacugcgcgcucauggacugcaucauguucgacgccgccgucagcgggggccugaacaccuccgugcugcgggccgugcucccccgggacauggucuuccgcaccagcacgccccggguggugcugugaggacuaguuauaagacugacuagcccgaugggccucccaacgggcccuccuccccuccuugcaccgagauuaaucaaaggcucuuuucagagccaccaaaaaaaaaaaaaaaaaaaaaaaaaaaaaaaaaaaaaaaaaaaaaaaaaaaaaaaaaaaaaaaaagaauu

SEQ ID NO: 17696 - RNA, 1892 nt, Artificial Sequence
  mRNA product Design i-3 (hSL-A64-N5) comprising derived and/or modified sequence from LASV(Josiah;Clade IV)__NP_694869__NP (opt4)
aggagaaagcuuaccaugagcgccagcaaggagaucaagagcuuccuguggacccagagccugagaagagagcugagcggcuacugcagcaacaucaagcugcagguggugaaggacgcccaggcccugcugcacggccuggacuucagcgaggugagcaacgugcagagacugaugagaaaggagagaagagacgacaacgaccugaagagacugagagaccugaaccaggccgugaacaaccugguggagcugaagagcacccagcagaagagcauccugagagugggcacccugaccagcgacgaccugcugauccuggccgccgaccuggagaagcugaagagcaaggugaucagaaccgagagaccccugagcgccggcguguacaugggcaaccugagcagccagcagcuggaccagagaagagcccugcugaacaugaucggcaugagcggcggcaaccagggcgccagagccggcagagacggcguggugagagugugggacgugaagaacgccgagcugcugaacaaccaguucggcaccaugcccagccugacccuggccugccugaccaagcagggccagguggaccugaacgacgccgugcaggcccugaccgaccugggccugaucuacaccgccaaguaccccaacaccagcgaccuggacagacugacccagagccaccccauccugaacaugaucgacaccaagaagagcagccugaacaucagcggcuacaacuucagccugggcgccgccgugaaggccggcgccugcaugcuggacggcggcaacaugcuggagaccaucaaggugagcccccagaccauggacggcauccugaagagcauccugaaggugaagaaggcccugggcauguucaucagcgacacccccggcgagagaaaccccuacgagaacauccuguacaagaucugccugagcggcgacggcuggcccuacaucgccagcagaaccagcaucaccggcagagccugggagaacaccgugguggaccuggagagcgacggcaagccccagaaggccgacagcaacaacagcagcaagagccugcagagcgccggcuucaccgccggccugaccuacagccagcugaugacccugaaggacgccaugcugcagcuggaccccaacgccaagaccuggauggacaucgagggcagacccgaggaccccguggagaucgcccuguaccagcccagcagcggcugcuacauccacuucuucagagagcccaccgaccugaagcaguucaagcaggacgccaaguacagccacggcaucgacgugaccgaccuguucgccacccagcccggccugaccagcgccgugaucgacgcccugcccagaaacauggugaucaccugccagggcagcgacgacaucagaaagcugcuggagagccagggcagaaaggacaucaagcugaucgacaucgcccugagcaagaccgacagcagaaaguacgagaacgccgugugggaccaguacaaggaccugugccacaugcacaccggcguggugguggagaagaagaagagaggcggcaaggaggagaucaccccccacugcgcccugauggacugcaucauguucgacgccgccgugagcggcggccugaacaccagcgugcugagagccgugcugcccagagacaugguguucagaaccagcacccccagaguggugcugugaggacuaguuauaagacugacuagcccgaugggccucccaacgggcccuccuccccuccuugcaccgagauuaaucaaaggcucuuuucagagccaccaaaaaaaaaaaaaaaaaaaaaaaaaaaaaaaaaaaaaaaaaaaaaaaaaaaaaaaaaaaaaaaaagaauu

SEQ ID NO: 17697 - RNA, 1892 nt, Artificial Sequence
  mRNA product Design i-3 (hSL-A64-N5) comprising derived and/or modified sequence from LASV(LP;Clade I)__AAF86702__NP (opt4)
aggagaaagcuuaccaugagcaacagcaaggagaucaagagcuuccuguggacccagagccugagaagagagcugagcggcuacugcagcaacaucaagcugcagguggugaaggacgcccaggcccugcugcacggccuggacuucagcgaggugagcaacgugcagagacugaugagaaagcagaagagagacgacgccgaccugaagagacugagagaccugaaccaggccgugaacaaccugguggagcugaagagcacccagcagaagaacgugcugagagugggcacccugagcagcgacgaccugaucacccuggccgccgaccuggagaagcugaagagcaaggugaucagaaccgagagaccccugagcagcggcguguacaugggcaaccugagcagccagcagcuggaccagagaagagcccugcugagcaugaucggcaugagcggcggcccccagggcaacagaaccggcggcgacggcguggugagagugugggacgugaagaacgccgagcugcugaacaaccaguucggcaccaugcccagccugacccuggccugccugaccaagcagggccagguggaccugaacgacgccgugcaggcccugaccgaccugggccugaucuacaccgccaaguaccccaacagcagcgaccuggacaugcugacccagagccaccccauccugggcaugguggacaccaagaagagcagccugaacaucagcggcuacaacuucagccugggcgccgccgugaaggccggcgccugcaugcuggacggcggcaacaugcuggagaccaucaaggugagcccccagaccauggacggcauccugaagagcauccugaaggugaagagaagccugggcauguucaucagcgacacccccggcgagagaaaccccuacgagaacauccuguacaagaucugccugagcggcgagggcuggcccuacaucgccagcagaaccagcaucaccggcagagccugggagaacacccugguggaccuggagagcgacaacaagccccccaagcugaacagcgccggcagcaacaagagccugcaggccgccggccugaacgccggccugaccuacagccagcugaugacccugaaggacugcaugcugcagcuggaccccagcagcaagaccuggaucgacaucgagggcagacccgaggaccccguggagaucgcccuguuccagcccagcagcggcugcuacauccacuucuucagagagcccaccgaccugaagcaguucaagcaggacgccaaguacagccacggcaucgacgugaccgaccuguucagcacccagcccggccugaccagcgccgugaucgaggcccugcccagaaacauggugcugaccugccagggcagcgacgacaucaagaagcugcuggagagccagggcagaagagacaucaagcugaucgacaucagccugagcaaggccgacagcagaaaguucgagaacgccgugugggaccaguacaaggaccugugccacaugcacaccggcguggugguggagaagaagaagagaggcggcaaggaggagaucaccccccacugcgcccugcuggacugcaucauguucgacgccgccaccaccggcagccugaacaucaccacccugagagccgugcugcccagagacaugguguucagaaccagcacccccaagguggugcugugaggacuaguuauaagacugacuagcccgaugggccucccaacgggcccuccuccccuccuugcaccgagauuaaucaaaggcucuuuucagagccaccaaaaaaaaaaaaaaaaaaaaaaaaaaaaaaaaaaaaaaaaaaaaaaaaaaaaaaaaaaaaaaaaagaauu

SEQ ID NO: 17698 - RNA, 1892 nt, Artificial Sequence
  mRNA product Design i-3 (hSL-A64-N5) comprising derived and/or modified sequence from LASV(803213;Clade II)__AAF86704__NP (opt4)
aggagaaagcuuaccaugagcgccagcaaggaggugaagagcuuccuguggacccagagccugagaagagagcugagcggcuacugcagcaacaucaagcugcagguggugaaggacgcccaggcccugcugcacggccuggacuucagcgaggugaacaacgugcagagacugaugagaaagcagaagagagacgacggcgaccugaagagacugagagaccugaaccaggccgugaacaaccugguggagcugaagagcacccagcagaagagcauccugagagugggcacccugaccagcgacgaccugcugacccuggccgccgaccuggagaagcugaagagcaaggugaucagaaccgagagaccccugagcagcggcguguacaugggcaaccugagcacccagcagcuggagcagagaagagcccugcugaacaugaucggcauggugggcggcgcccagggcacccagcccggcagagacggcguggugagagugugggacgugaagaaccccgaccugcugaacaaccaguucggcaccaugcccagccugacccuggccugccugaccaagcagggccagguggaccugaacgacgccgugcuggcccugaccgaccugggccugaucuacaccgccaaguaccccaacagcagcgaccuggacagacugagccagagccaccccauccugaacaugguggacaccaagaagagcagccugaacaucagcggcuacaacuucagccugggcgccgccgugaaggccggcgccugcaugcuggacggcggcaacaugcuggagaccaucaaggugaccccccagaccauggacggcauccugaagagcauccugaaggugaagagaagccugggcauguucgugagcgacacccccggcgagagaaaccccuacgagaacauccuguacaagaucugccugagcggcgacggcuggcccuacaucgccagcagaaccagcaucgugggcagagccugggagaacaccaccguggaccuggagagcgacggcaagccccagaaggugggcaccgccggcagcaacaagagccugcagagcgccggcuuccccaccggccugaccuacagccagcugaugacccugaaggacagcaugaugcagcuggaccccagcgccaagaccuggaucgacaucgagggcagacccgaggaccccguggagaucgcccuguaccagcccaugagcggcugcuacauccacuucuucagagagcccaccgaccugaagcaguucaagcaggacgccaaguacagccacggcaucgacguggccgaccuguuccccgcccagcccggccugaccagcgccgugaucgaggcccugcccagaaacauggugcugaccugccagggcagcgacgacaucaagaagcugcuggacagccagggcagaagagacaucaagcugaucgacaucagccugagcaagguggacagcagaaaguucgagaacgccgugugggaccagugcaaggaccugugccacaugcacaccggcguggugguggagaagaagaagagaggcggcaaggaggagaucaccccccacugcgcccugauggacugcaucauguucgacgccgccgugagcggcggccugaacauccccgugcugagagccgugcugcccagagacaugguguucagaaccagcagccccaagguggugcugugaggacuaguuauaagacugacuagcccgaugggccucccaacgggcccuccuccccuccuugcaccgagauuaaucaaaggcucuuuucagagccaccaaaaaaaaaaaaaaaaaaaaaaaaaaaaaaaaaaaaaaaaaaaaaaaaaaaaaaaaaaaaaaaaagaauu

SEQ ID NO: 17699 - RNA, 1895 nt, Artificial Sequence
  mRNA product Design i-3 (hSL-A64-N5) comprising derived and/or modified sequence from LASV(GA391;Clade III)__CAA36646__NP (opt4)
aggagaaagcuuaccaugagcgccagcaaggaggugagaagcuuccuguggacccagagccugagaagagagcugagcggcuacugcagcaacaucaagcugcagguggugaaggacgcccaggcccugcugcacggccuggacuucagcgaggugagcaacgugcagagacugaugagaaagcagaagagagacgacggcgaccugaagagacugagagaccugaaccaggccgugaacaaccugguggagcugaagagcacccagcagaagagcgugcugagagugggcacccugagcagcgacgaccugcugauccuggccgccgaccuggagaagcugaagagcaaggugaccagaaccgagagaccccugagcagcggcguguacaugggcaaccugagcagccagcagcuggaccagagaagagcccugcugaacaugaucggcaugaccggcgugagcggcggcggcaagggcgccagcgacggcaucgugagagugugggacgugaagaacgccgagcugcugaacaaccaguucggcaccaugcccagccugacccuggccugccugaccaagcagggccagguggaccugaacgacgccgugcaggcccugaccgaccugggccugaucuacaccgccaaguaccccaacagcagcgaccuggacagacugagccagagccaccccauccugaacaugaucgacaccaagaagagcagccugaacaucagcggcuacaacuucagccugggcgccgccgugaaggccggcgccugcaugcuggacggcggcaacaugcuggagaccaucaaggugagcccccagaccauggacggcauccugaagagcauccugaaggugaagaagagccugggcauguucgugagcgacacccccggcgagagaaaccccuacgagaacauccuguacaagaucugccugagcggcgacggcuggcccuacaucgccagcagaaccagcaucgugggcagagccugggagaacaccgugguggaccuggagcaggacaacaagccccagaagaucggcaacggcggcagcaacaagagccugcagagcgccggcuucgccgccggccugaccuacagccagcugaugacccugaaggacuucaagugcuucaaccugauccccaacgccaagaccuggauggacaucgagggcagacccgaggaccccguggagaucgcccuguaccagcccagcagcggcugcuacgugcacuucuucagagagcccaccgaccugaagcaguucaagcaggacgccaaguacagccacggcaucgacgugaccgaccuguucgccgcccagcccggccugaccagcgccgugaucgaggcccugcccagaaacauggugaucaccugccagggcagcgaggacaucagaaagcugcuggagagccagggcagaagagacaucaagcugaucgacaucacccugagcaaggccgacagcagaaaguucgagaacgccgugugggaccaguucaaggaccugugccacaugcacaccggcguggugguggagaagaagaagagaggcggcaaggaggagaucaccccccacugcgcccugauggacugcaucauguucgacgccgccgugagcggcggccuggacgccaaggugcugagaguggugcugcccagagacaugguguucagaaccagcacccccaagguggugcugugaggacuaguuauaagacugacuagcccgaugggccucccaacgggcccuccuccccuccuugcaccgagauuaaucaaaggcucuuuucagagccaccaaaaaaaaaaaaaaaaaaaaaaaaaaaaaaaaaaaaaaaaaaaaaaaaaaaaaaaaaaaaaaaaagaauu

SEQ ID NO: 17700 - RNA, 1892 nt, Artificial Sequence
  mRNA product Design i-3 (hSL-A64-N5) comprising derived and/or modified sequence from LASV(AV;Clade V)__CCA30315__NP (opt4)
aggagaaagcuuaccaugagcgccagcaaggaggugaagagcuuccuguggacccagagccugagaagagagcugagcggcuacugcagcaacaucaagcugcagguggugaaggacgcccaggcccugcugcacggccuggacuucagcgaggugagcaacgugcagagacugaugagaaagcagagaagagacgacagcgaccugaagagacugagagaccugaaccaggccgugaacaaccugguggagcugaagagcacccagcagaagagcgugcugagagugggcacccugagcagcgacgaccugcugacccuggccgccgaccuggagaagcugaagagcaaggugaccagaaccgagagaccccugagcagcggcguguacaugggcaaccugagcagccagcagcuggaccagagaagagcccugcugaaccugaucggcaugaccaacggcagccagggcagccaggccggcagagacggcguggugagagugugggacgugaagaacgccgagcugcugaacaaccaguucggcaccaugcccagccugacccuggccugccugaccaagcagggccagguggaccugaacgacguggugcaggcccugaccgaccugggccugaucuacaccgccaaguaccccaacaccagcgaccuggacagacugacccagagccaccccauccugaacaugaucgacaccaagaagagcagccugaacaucagcggcuacaacuucagccugggcgccgccgugaaggccggcgccugcaugcuggacggcggcaacaugcuggagaccaucaaggugagcccccagagcauggacggcauccugaagagcauccugaaggugaagagagcccugggcauguucgugagcgacacccccggcgagagaaaccccuacgagaacauccuguacaagaucugccugagcggcgacggcuggcccuacaucgccagcagaaccagcaucgugggcagagccugggagaacaccgugguggaccuggagaccgacggcaagccccagaagaucggcagcggcaacagcaacaagagccugcagagcgccggcuucagcgccggccugaccuacagccagcugaugacccugaaggacgccaugcugcagcuggaccccaacgccaagaccuggauggacaucgagggcagacccgaggaccccguggagguggcccuguaccagcccaucagcggcugcuacauccacuucuucagagagcccaccgaccugaagcaguucaagcaggacgccaaguacagccacggcaucgacaucgccgaccuguucgccgcccagcccggccugaccagcgccgugaucgaggcccugcccagaaacauggugaucaccugccagggcagcgaggacaucaagaagcugcuggagagccagggcagaaaggacaucaagcugaucgacaucgcccugagcaagaucgacagcagaaaguucgagaacgccgugugggaccaguacaaggaccugugccacaugcacaccggcguggugguggagaagaagaagagaggcggcaaggaggagaucaccccccacugcgcccugauggacugcaucauguucgacgccgccgugagcggcggccugaacacccuggugcugagagccgugcugcccagagacaugguguucagaaccagcacccccagaguggugcugugaggacuaguuauaagacugacuagcccgaugggccucccaacgggcccuccuccccuccuugcaccgagauuaaucaaaggcucuuuucagagccaccaaaaaaaaaaaaaaaaaaaaaaaaaaaaaaaaaaaaaaaaaaaaaaaaaaaaaaaaaaaaaaaaagaauu

SEQ ID NO: 17701 - RNA, 1892 nt, Artificial Sequence
  mRNA product Design i-3 (hSL-A64-N5) comprising derived and/or modified sequence from LASV(Togo/2016/7082;Clade VI)__AMR44578__NP (opt4)
aggagaaagcuuaccaugagcaacagcaaggaggugaagagcuuccuguggacccagagccugagaagagagcugagcggcuacugcagcaacaucaagcugcagguggugaaggacgcccaggcccugcugcacggccuggacuucagcgaggugagcaacgugcagagacugaugagaaagcagaagagagacgacggcgaccugaagagacugagagaccugaaccaggccgugaacaaccugguggagcugaagagcgugcagcagaagagcauccugagagugggcacccugaccagcgacgaccugcugacccuggccgccgaccuggagaagcugaagagcaaggugaccagaaccgagagaccccugagcagcggcguguacaugggcaaccugagcagccagcagcuggaccagagaagagcccugcugagcaugaucggcaugagcggcggcaaccagaacagccagcccaagggcgacggcguggugagagugugggacgugaagaacgccgaccugcugaacaaccaguucggcaccaugcccagccugacccuggccugccugaccaagcagggccagguggaccugaacgacgccgugcaggcccugaccgaccugggccugaucuacaccgccaaguaccccaacagcagcgaccuggacagacugagccagagccaccccauccugaacaugaucgacaccaagaagagcagccugaacaucagcggcuacaacuucagccugggcgccgccaucaagaccggcgccugcaugcuggacggcggcaacaugcuggagaccaucaaggugaccccccagaccauggacggcauccugaagagcauccugaaggugaagagaagccugggcauguucaucagcgacacccccggcgagagaaaccccuacgagaacauccuguacaagaucugccugagcggcgacggcuggcccuacaucgccagcagaaccgccaucaucggcagagccugggagaacaccgugguggaccuggagagcgacagcaagccccagaagaucggcagcaacggcagcaacaagagccugcagagcgccggcuucgcccccggccugaccuacagccagcugaugacccugaaggacagcaugcugcagcuggaccccaacgccaagaccuggaucgacaucgagggcagacccgaggaccccguggagguggcccuguuccagcccaucagcggcugcuacauccacuucuucagagagcccaccgaccugaagcaguucaagcaggacgccaaguacagccacggcaucgacgugaccgaccuguucgccgcccagcccggccugaccagcgccgugaucgaggcccugcccagaaacauggugcugaccugccagggcagcgacgacaucaagaagcugcuggacagccagggcagaagagacaucaagcugaucgacgugagccugaacaagaucgacagcagaaaguucgagaacgccgugugggaccaguacaaggaccugugccacaugcacaccggcguggugguggagaagaagaagaagggcggcaaggaggagaucaccccccacugcgcccugcuggacugcaucauguucgacgccgccgugagcggcggccugaacgccaccgugcugagagccgugcugcccagagacaugguguucagaaccagcagccccaagguggugcugugaggacuaguuauaagacugacuagcccgaugggccucccaacgggcccuccuccccuccuugcaccgagauuaaucaaaggcucuuuucagagccaccaaaaaaaaaaaaaaaaaaaaaaaaaaaaaaaaaaaaaaaaaaaaaaaaaaaaaaaaaaaaaaaaagaauu

SEQ ID NO: 17702 - RNA, 1892 nt, Artificial Sequence
  mRNA product Design i-3 (hSL-A64-N5) comprising derived and/or modified sequence from LASV(KAK-428;Clade n.d. (VII))__ANH09741__NP (opt4)
aggagaaagcuuaccaugagcaacagcaaggaggugaagagcuuccuguggacccagagccugagaagagagcugagcggcuacugcaccaacaucaagcugcagguggugaaggacgcccaggcccugcugcacggccuggacuucagcgaggugagcaacgugcagagacugaugagaaagcagaagagagacgacaacgaccugaagagacugagagaccugaaccaggccgugaacaaccugguggagcugaagagcgugcagcagaagagcgugcugaaggugggcacccugaacagcgacgaccugcugacccuggccgccgaccuggagaagcugaagagcaagguggugagaaccgagagaccccugagcagcggcguguacaugggcaaccugagcagccagcagcuggaccagagaagagcccugcugaacaugaucggcauggccggcggcagccagggcaaccagcccagcagagacggcguggugagagugugggacgugaagaacgccgaccugcugaacaaccaguucggcaccaugcccagccugacccuggccugccugaccaagcagggccagguggaccugaacgacguggugcuggcccugaccgaccugggccugaucuacaccgccaaguaccccaacagcagcgaccuggacagacugagccagaaccaccccgugcugaacaugaucgacgugaacaagagcagccugaacaucagcggcuacaacuucagccugggcgccgccgugaaggccggcgccugcaugcuggacggcggcaacaugcuggagaccaucaagaucagcccccagaccguggacggcauccugaagagcauccugaaggugaagagagcccugggcauguucgugagcgacacccccggcgagagaaaccccuacgagaacauccuguacaaggugugccugagcggcaacggcuggcccuacaucgccagcagaaccagcaucgugggcagagccugggagaacaccgugguggaccuggagagcaacaagaaccagcccaaggugggcaacaacggcagcaacaagaugcugcagagcagcggcuucgccaccggccugaccuacagccagcugaugacccugagagacagcaugcugcagcuggaccccaccgccaagaccuggaucgacaucgagggcagacccgaggaccccguggagcuggcccuguuccagcccagcagcggcugcuacauccacuucuucagagagcccaccgaccugaagcaguucaagcaggacgccaaguacagccacggcaucgacgugaacgaccuguucagcgcccagcccggccugaccagcgccgugcuggaggcccugcccagaaacauggugcugaccugccagggcagcgacgacaucagaaagcugcuggacagccaggacagaaaggacaucaagcugaucgacaucagccugagcaaggccgacgccagaaaguucgagaacgacgugugggaccaguucaaggaccugugccacaugcacaccggcaucgugguggagaagaagaagaagggcggcaagcaggagaugaccccccacugcgcccugcuggacugcaucauguucgacgccgccgugagcggcggccugaacgugcccacccugagagccgugcugcccaccgacaugguguucagaaccaucaccaccaagguggugcugugaggacuaguuauaagacugacuagcccgaugggccucccaacgggcccuccuccccuccuugcaccgagauuaaucaaaggcucuuuucagagccaccaaaaaaaaaaaaaaaaaaaaaaaaaaaaaaaaaaaaaaaaaaaaaaaaaaaaaaaaaaaaaaaaagaauu

SEQ ID NO: 17703 - RNA, 1892 nt, Artificial Sequence; identical to SEQ ID NO: 17697
  mRNA product Design i-3 (hSL-A64-N5) comprising derived and/or modified sequence from LASV(Pinneo-NIG-1969;Clade I)__AIT17837__NP (opt4)

SEQ ID NO: 17704 - RNA, 1892 nt, Artificial Sequence
  mRNA product Design i-3 (hSL-A64-N5) comprising derived and/or modified sequence from LASV(ISTH0009-NIG-2011;Clade II)__AIT17405__NP (opt4)
aggagaaagcuuaccaugagcgugagcaaggaggugaagagcuuccuguggacccagagccugagaagagagcugagcggcuacugcagcaacaucaagcugcagguggugaaggacgcccaggcccugcugcacggccuggacuucagcgaggugagcaacgugcagagacugaugagaaagcagaagagagacgacagcgaccugaagagacugagagaccugaaccaggccgugaacaaccugguggagcugaagagcacccagcagaagagcauccugagagugggcacccugaccagcgacgaccugcugacccuggccgccgaccuggagaagcugaagagcaaggugaucagaaccgagagaccccugagcagcggcguguacaugggcaaccugagcacccagcagcuggagcagagaagagcccugcugaacaugaucggcauggugggcggcgcccagggcacccagcccggcagagacggcguggugagagugugggacgugaagaaccccgaccugcugaacaaccaguucggcaccaugcccagccugacccuggccugccugaccaagcagggccagguggaccugaacgacgccgugcuggcccugaccgaccugggccugaucuacaccgccaaguaccccaacagcagcgaccuggacagacugagccagagccaccccauccugaacaugguggacaucaagaagagcagccugaacaucagcggcuacaacuucagccugggcgccgccgugaaggccggcgccugcaugcuggacggcggcaacaugcuggagaccaucaaggugaccccccagaccauggacggcauccugaagagcauccugaaggugaagagaagccugggcauguucgugagcgacacccccggcgagagaaaccccuacgagaacauccuguacaagaucugccugagcggcgacggcuggcccuacaucgccagcagaaccagcaucgugggcagagccugggagaacaccaccguggaccuggagagcgacggcaagccccagaaggugggcagcgccggcagcaacaagagccugcagagcgccggcuuccccaccggccugaccuacagccagcugaugacccugaaggacagcaugaugcagcuggaccccagcgccaagaccuggaucgacaucgagggcagacccgaggaccccguggagaucgcccuguaccagcccaugagcggcugcuacauccacuucuucagagagcccaccgaccugaagcaguucaagcaggacgccaaguacagccacggcaucgacguggccgaccuguuccccgcccagcccggccugaccagcgccgugaucgaggcccugcccagaaacauggugcugaccugccagggcagcgacgacaucaagagacugcuggacagccagggcagaagagacaucaagcugaucgacaucgcccugagcaaggccgacagcagaagauucgagaacgccgugugggaccagugcaaggaccugugccacaugcacaccggcguggugguggagaagaagaagagaggcggcaaggaggagaucaccccccacugcgcccugauggacugcaucauguacgacgccgccgugagcggcggccugaacauccccgugcugagagccgugcugcccagagacaugguguucagaaccagcagccccaagguggugcugugaggacuaguuauaagacugacuagcccgaugggccucccaacgggcccuccuccccuccuugcaccgagauuaaucaaaggcucuuuucagagccaccaaaaaaaaaaaaaaaaaaaaaaaaaaaaaaaaaaaaaaaaaaaaaaaaaaaaaaaaaaaaaaaaagaauu

SEQ ID NO: 17705 - RNA, 1892 nt, Artificial Sequence
  mRNA product Design i-3 (hSL-A64-N5) comprising derived and/or modified sequence from LASV(ISTH2010-NIG-2012;Clade II)__AIT17483__NP (opt4)
aggagaaagcuuaccaugagcgccagcaaggaggugaagagcuuccuguggacccagagccugagaagagagcugagcggcuacugcagcaacaucaagcugcagguggugaaggacgcccaggcccugcugcacggccuggacuucagcgaggugagcaacgugcagagacugaugagaaagcagaagagagacgacagcgaccugaagagacugagagaccugaaccaggccgugaacaaccugguggagcugaagagcacccagcagaagagcauccugagagugggcacccugaccagcgacgaccugcugacccuggccgccgaccuggagaagcugaagagcaaggugaucagaaccgagagaccccugagcagcggcguguacaugggcaaccugagcacccagcagcuggagcagagaagagcccugcugaaccugaucggcauggugggcggcgcccagggcacccagcccggcagagacggcguggugagagugugggacgugaagaaccccgaccugcugaacaaccaguucggcaccaugcccagccugacccuggccugccugaccaagcagggccagguggaccugaacgacgccgugcuggcccugaccgaccugggccugaucuacaccgccaaguaccccaacagcagcgaccuggacagacugagccagagccaccccauccugaacaugguggacaccaagaagagcagccugaacaucagcggcuucaacuucagccugggcgccgccgugaaggccggcgccugcaugcuggacggcggcaacaugcuggagaccaucaaggugaccccccagaccauggacggcauccugaagagcauccugaaggugaagaagagccugggcauguucgugagcgacacccccggcgagagaaaccccuacgagaacauccuguacaagaucugccugagcggcgacggcuggcccuacaucgccagcagaaccagcaucgugggcagagccugggagaacaccaccguggaccuggagagcgacggcaagccccacaaggugggcaccgccggcagcaacaagagccugcagagcgccggcuuccccaccggccugaccuacagccagcugaugacccugaaggacagcaugaugcagcuggaccccagcgccaagaccuggaucgacaucgagggcagacccgaggaccccguggagaucgcccuguaccagcccaugagcggcugcuacauccacuucuucagagagcccaccgaccugaagcaguucaagcaggacgccaaguacagccacggcaucgacguggccgaccuguuccccgcccagcccggccugaccagcgccgugaucgaggcccugcccagaaacauggugcugaccugccagggcagcgacgacaucaagagacugcuggacagccagggcagaagagacaucaagcugaucgacaucgcccugagcaaggccgacagcagaagauucgagaacgccgugugggaccagugcaaggaccugugccacaugcacaccggcguggugguggagaagaagaagagaggcggcaaggaggagaucaccccccacugcgcccugauggacugcaucauguacgacgccgccgugagcggcggccugaacauccccgugcugagagccgugcugcccagagacaugguguucagaaccagcagccccaagguggugcugugaggacuaguuauaagacugacuagcccgaugggccucccaacgggcccuccuccccuccuugcaccgagauuaaucaaaggcucuuuucagagccaccaaaaaaaaaaaaaaaaaaaaaaaaaaaaaaaaaaaaaaaaaaaaaaaaaaaaaaaaaaaaaaaaagaauu

SEQ ID NO: 17706 - RNA, 1892 nt, Artificial Sequence
  mRNA product Design i-3 (hSL-A64-N5) comprising derived and/or modified sequence from LASV(Lassa virus/H.sapiens-wt/NGA/2015/ISTH_0543;Clade II)__AVO03640__NP (opt4)
aggagaaagcuuaccaugagcgccagcaaggaggugaagagcuuccuguggacccagagccugagaagagagcugagcggcuacugcagcaacaucaagcugcagguggugaaggacgcccaggcccugcugcacggccuggacuucagcgaggugagcaacgugcagagacugaugagaaagcagaagagagacgacagcgaccugaagagacugagagaccugaaccaggccgugaacaaccugguggagcugaagagcacccagcagaagagcauccugagagugggcacccugaccagcgacgaccugcugacccuggccgccgaccuggagaagcugaagagcaaggugaucagaaccgagagaccccugagcagcggcguguacaugggcaaccugagcacccagcagcuggagcagagaagagcccugcugaacaugaucggcauggugggcggcgcccagggcacccagcccggcagagacggcguggugagagugugggacgugaagaaccccgaccugcugaacaaccaguucggcaccaugcccagccugacccuggccugccugaccaagcagggccagguggaccugaacgacgccgugcuggcccugaccgaccugggccugaucuacaccgccaaguaccccaacagcagcgaccuggacagacugagccagagccaccccauccugaacaugguggacaccaagaagagcagccugaacaucagcggcuacaacuucagccugggcgccgccgugaaggccggcgccugcaugcuggacggcggcaacaugcuggagaccaucaaggugaccccccagaccauggacggcauccugaagagcauccugaaggugaagaagagccugggcauguucgugagcgacacccccggcgagagaaaccccuacgagaacauccuguacaagaucugccugagcggcgacggcuggcccuacaucgccagcagaaccagcaucgugggcagagccugggagaacaccaccguggaccuggagagcgacggcaagccccagaaggugggcagcgccggcagcaacaagagccugcagagcgccggcuuccccaccggccugaccuacagccagcugaugacccugaaggacagcaugaugcagcuggaccccagcgccaagaccuggaucgacaucgagggcagacccgaggaccccguggagaucgcccuguaccagcccaugagcggcugcuacauccacuucuucagagagcccaccgaccugaagcaguucaagcaggacgccaaguacagccacggcaucgacguggccgaccuguuccccgcccagcccggccugaccagcgccgugaucgaggcccugcccagaaacauggugcugaccugccagggcagcgacgacaucaagagacugcuggacagccagggcagaaaggacaucaagcugaucgacaucgcccugagcaaggccgacagcagaagauucgagaacgccgugugggaccagugcaaggaccugugccacaugcacaccggcguggugguggagaagaagaagagaggcggcaaggaggagaucaccccccacugcgcccugauggacugcaucauguacgacgccgccgugagcggcggccugaacauccccgugcugagagccgugcugcccagagacaugguguucagaaccagcagccccaagguggugcugugaggacuaguuauaagacugacuagcccgaugggccucccaacgggcccuccuccccuccuugcaccgagauuaaucaaaggcucuuuucagagccaccaaaaaaaaaaaaaaaaaaaaaaaaaaaaaaaaaaaaaaaaaaaaaaaaaaaaaaaaaaaaaaaaagaauu

SEQ ID NO: 17707 - RNA, 1892 nt, Artificial Sequence
  mRNA product Design i-3 (hSL-A64-N5) comprising derived and/or modified sequence from LASV(Lassa virus/H.sapiens-wt/NGA/2016/ISTH_0009;Clade II)__AVO03572__NP (opt4)
aggagaaagcuuaccaugagcgccagcaaggaggugaagagcuuccuguggacccagagccugagaagagagcugagcggcuacugcagcaacaucaagcugcagguggugaaggacgcccaggcccugcugcacggccuggacuucagcgaggugagcaacgugcagagacugaugagaaagcagaagagagacgacagcgaccugaagagacugagagaccugaaccaggccgugaacaaccugguggagcugaagagcacccagcagaagagcauccugagagugggcacccugaccagcgacgaccugcugacccuggccgccgaccuggagaagcugaagagcaaggugaucagaaccgagagaccccugagcagcggcguguacaugggcaaccugagcacccagcagcuggagcagagaagagcccugcugaacaugaucggcauggugggcggcgcccagggcacccagcccggcagagacggcguggugagagugugggacgugaagaaccccgaccugcugaacaaccaguucggcaccaugcccagccugacccuggccugccugaccaagcagggccagguggaccugaacgacgccgugcuggcccugaccgaccugggccugaucuacaccgccaaguaccccaacagcagcgaccuggacagacugagccagagccaccccauccugaacaugguggacaccaagaagagcagccugaacaucagcggcuacaacuucagccugggcgccgccgugaaggccggcgccugcaugcuggacggcggcaacaugcuggagaccaucaaggugaccccccagaccauggacggcauccugaagagcauccugaaggugaagaagagccugggcauguucgugagcgacacccccggcgagagaaaccccuacgagaacauccuguacaagaucugccugagcggcgacggcuggcccuacaucgccagcagaaccagcaucgugggcagagccugggagaacaccaccguggaccuggagagcgacggcaagccccagaaggugggcagcgccggcagcaacaagagccugcagagcgccggcuuccccaccggccugaccuacagccagcugaugacccugaaggacagcaugaugcagcuggaccccagcgccaagaccuggaucgacaucgagggcagacccgaggaccccguggagaucgcccuguaccagcccaugagcggcugcuacauccacuucuucagagagcccaccgaccugaagcaguucaagcaggacgccaaguacagccacggcaucgacguggccgaccuguuccccgcccagcccggccugaccagcgccgugaucgaggcccugcccagaaacauggugcugaccugccagggcagcgacgacaucaagagacugcuggacagccagggcagaagagacaucaagcugaucgacaucgcccugagcaaggccgacagcagaagauucgagaacgccgugugggaccagugcaaggaccugugccacaugcacaccggcguggugguggagaagaagaagagaggcggcaaggaggagaucaccccccacugcgcccugauggacugcaucauguacgacgccgccgugagcggcggccugaacauccccgugcugagagccgugcugcccagagacaugguguucagaaccagcagccccaagguggugcugugaggacuaguuauaagacugacuagcccgaugggccucccaacgggcccuccuccccuccuugcaccgagauuaaucaaaggcucuuuucagagccaccaaaaaaaaaaaaaaaaaaaaaaaaaaaaaaaaaaaaaaaaaaaaaaaaaaaaaaaaaaaaaaaaagaauu

SEQ ID NO: 17708 - RNA, 1892 nt, Artificial Sequence
  mRNA product Design i-3 (hSL-A64-N5) comprising derived and/or modified sequence from LASV(Lassa virus/H.sapiens-wt/NGA/2016/ISTH_0017;Clade II)__AVO03568__NP (opt4)
aggagaaagcuuaccaugagcgccagcaaggaggugaagagcuuccuguggacccagagccugagaagagagcugagcggcuacugcagcagcaucaagcugcagguggugaaggacgcccaggcccugcugcacggccuggacuucagcgaggugagcaacgugcagagacugaugagaaagcagaagagagacgacagcgaccugaagagacugagagaccugaaccaggccgugaacaaccugguggagcugaagagcacccagcagaagagcauccugagagugggcacccugaccagcgacgaccugcugacccuggccgccgaccuggagaagcugaagagcaaggugaucagaaccgagagaccccugagcagcggcguguacaugggcaaccugagcacccagcagcuggagcagagaagagcccugcugaacaugaucggcauggccggcggcgcccagggcacccagcccggcagagacggcguggugagagugugggacgugaagaaccccgaccugcugaacaaccaguucggcaccaugcccagccugacccuggccugccugaccaagcagggccagguggaccugaacgacgccgugcuggcccugaccgaccugggccugaucuacaccgccaaguaccccaacagcagcgaccuggacagacugagccagagccaccccauccugaacaugguggacaccaagaagagcagccugaacaucagcggcuacaacuucagccugggcgccgccgugaaggccggcgccugcaugcuggacggcggcaacaugcuggagaccaucaaggugaccccccagaccauggacggcauccugaagagcauccugaaggugaagagaagccugggcauguucgugagcgacgcccccggcgagagaaaccccuacgagaacauccuguacaagaucugccugagcggcgacggcuggcccuacaucgccagcagaaccagcaucgugggcagagccugggagaacaccaccguggaccuggagagcgacggcaagccccagaaggugggcgccaccggcagcaacaagagccugcagagcgccggcuuccccaccggccugaccuacagccagcugaugacccugaaggacagcaugaugcagcuggaccccagcgccaagaccuggaucgacaucgagggcagacccgaggaccccguggagguggcccuguaccagcccgugagcggcugcuacauccacuucuucagagagcccaccgaccugaagcaguucaagcaggacgccaaguacagccacggcaucgacguggccgaccuguuccccgcccagcccggccugaccagcgccgugaucgaggcccugcccagaaacauggugcugaccugccagggcagcgacgacaucaagaagcugcuggacagccagggcagaaaggacaucaagcugaucgacaucgcccugagcaaggccgacagcagaagauucgagaacgccgugugggaccagugcaaggaccugugccacaugcacaccggcguggugguggagaagaagaagagaggcggcaaggaggagaucaccccccacugcgcccugauggacugcaucauguacgacgccgccgugagcggcggccugaacauccccgugcugagagccgugcugcccagagacaugguguucagaaccagcagccccaagguggugcugugaggacuaguuauaagacugacuagcccgaugggccucccaacgggcccuccuccccuccuugcaccgagauuaaucaaaggcucuuuucagagccaccaaaaaaaaaaaaaaaaaaaaaaaaaaaaaaaaaaaaaaaaaaaaaaaaaaaaaaaaaaaaaaaaagaauu

SEQ ID NO: 17709 - RNA, 1892 nt, Artificial Sequence
  mRNA product Design i-3 (hSL-A64-N5) comprising derived and/or modified sequence from LASV(Lassa virus/H.sapiens-wt/NGA/2018/ISTH_0959;Clade II)__AVV65100__NP (opt4)
aggagaaagcuuaccaugagcgccagcaaggaggugaagagcuuccuguggacccagagccugagaagagagcugagcggcuacugcagcaacaucaagcugcagguggugaaggacgcccaggcccugcugcacggccuggacuucagcgaggugagcaacgugcagagacugaugagaaagcagaagagagacgacagcgaccugaagagacugagagaccugaaccaggccgugaacaaccugguggagcugaagagcacccagcagaagagcauccugagagugggcacccugaccagcgacgaccugcugacccuggccgccgaccuggagaagcugaagagcaaggugaucagaaccgagagaccccugagcagcggcguguacaugggcaaccugagcacccagcagcuggagcagagaagagcccugcugaaccugaucggcauggugggcggcgcccagggcacccagcccggcagagacggcguggugagagugugggacgugaagaaccccgaccugcugaacaaccaguucggcaccaugcccagccugacccuggccugccugaccaagcagggccagguggaccugaacgacguggugcuggcccugaccgaccugggccugaucuacaccgccaaguaccccaacagcagcgaccuggacagacugagccagagccaccccauccugaacaugguggacaccaagaagagcagccugaacaucagcggcuucaacuucagccugggcgccgccgugaaggccggcgccugcaugcuggacggcggcaacaugcuggagaccaucaaggugaccccccagaccauggacggcauccugaagagcauccugaaggugaagaagagccugggcauguucgugagcgacacccccggcgagagaaaccccuacgagaacauccuguacaagaucugccugagcggcgacggcuggcccuacaucgccagcagaaccagcaucgugggcagagccugggagaacaccaccguggaccuggagagcgacggcaagccccacaaggugggcaccgccggcagcaacaagagccugcagagcgccggcuuccccaccggccugaccuacagccagcugaugacccugaaggacagcaugaugcagcuggaccccagcgccaagaccuggaucgacaucgagggcagacccgaggaccccguggagaucgcccuguaccagcccaugagcggcugcuacauccacuucuucagagagcccaccgaccugaagcaguucaagcaggacgccaaguacagccacggcaucgacguggccgaccuguuccccgcccagcccggccugaccagcgccgugaucgaggcccugcccagaaacauggugcugaccugccagggcagcgacgacaucaagagacugcuggacagccagggcagaaaggacaucaagcugaucgacaucgcccugagcaagaccgacagcagaagauucgagaacgccgugugggaccagugcaaggaccugugccacaugcacaccggcguggugguggagaagaagaagagaggcggcaaggaggagaucaccccccacugcgcccugauggacugcaucauguacgacgccgccgugagcggcggccugaacauccccgugcugagagccgugcugcccagagacaugguguucagaaccagcagccccaagguggugcugugaggacuaguuauaagacugacuagcccgaugggccucccaacgggcccuccuccccuccuugcaccgagauuaaucaaaggcucuuuucagagccaccaaaaaaaaaaaaaaaaaaaaaaaaaaaaaaaaaaaaaaaaaaaaaaaaaaaaaaaaaaaaaaaaagaauu

SEQ ID NO: 17710 - RNA, 1892 nt, Artificial Sequence
  mRNA product Design i-3 (hSL-A64-N5) comprising derived and/or modified sequence from LASV(LASV003-NIG-2008;Clade II)__AIT17581__NP (opt4)
aggagaaagcuuaccaugagcgccagcaaggaggugaagagcuuccuguggacccagagccugagaagagagcugagcggcuacugcagcagcaucaagcugcagguggugaaggacgcccaggcccugcugcacggccuggacuucagcgaggugagcaacgugcagagacugaugagaaagcagaagagagacgacagcgaccugaagagacugagagaccugaaccaggccgugaacaaccugguggagcugaagagcacccagcagaagagcgugcugagagugggcacccugaccagcgacgaccugcugacccuggccgccgaccuggagaagcugaagagcaaggugaucagaaccgagagaccccugagcagcggcguguacaugggcaaccugagcgcccagcagcuggagcagagaagaacccugcugaacaugaucggcauggugggcggcgcccagggcacccagcccggcagagacggcguggugagagugugggacgugaagaaccccgaccugcugaacaaccaguucggcaccaugcccagccugacccuggccugccugaccaagcagggccagguggaccugaacgacguggugcuggcccugaccgaccugggccugaucuacaccgccaaguaccccaacagcagcgaccuggacagacugagccagagccaccccauccugagcaugguggacaccaagaagagcagccugaacaucagcggcuacaacuucagccugggcgccgccgugaaggccggcgccugcaugcuggacggcggcaacaugcuggagaccaucaaggugaccccccagaccauggacggcauccugaagagcauccugaaggugaagaagagccugggcauguucgugagcgacacccccggcgagagaaaccccuacgagaacauccuguacaagaucugccugagcggcgacggcuggcccuacaucgccagcagaaccagcaucgugggcagagccugggagaacaccaccguggaccuggagagcgacggcaagccccagaaggugggcaccgccggcagcaacaagagccugcagagcgccggcuuccccaccggccugaccuacagccagcugaugacccugaaggacagcaugaugcagcuggaccccagcgccaagaccuggaucgacaucgagggcagacccgaggaccccguggagaucgcccuguaccagcccaugagcggcugcuacauccacuucuucagagagcccaccgaccugaagcaguucaagcaggacgccaaguacagccacggcaucgacgugaccgaccuguuccccgcccagcccggccugaccagcgccgugaucgaggcccugcccagaaacauggugcugaccugccagggcagcgacgacaucaagagacugcuggacagccagggcagaagagacaucaagcugaucgacaucgcccugagcaaggccgacagcagaagauucgagaacgccgugugggaccagugcaaggaccugugccacaugcacaccggcguggugguggagaagaagaagagaggcggcaaggaggagaucaccccccacugcgcccugauggacugcaucauguacgacgccgccgugagcggcggccugaacauccccgugcugagagccgugcugcccagagacaugguguucagaaccagcagccccaagguggugcugugaggacuaguuauaagacugacuagcccgaugggccucccaacgggcccuccuccccuccuugcaccgagauuaaucaaaggcucuuuucagagccaccaaaaaaaaaaaaaaaaaaaaaaaaaaaaaaaaaaaaaaaaaaaaaaaaaaaaaaaaaaaaaaaaagaauu

SEQ ID NO: 17711 - RNA, 1892 nt, Artificial Sequence
  mRNA product Design i-3 (hSL-A64-N5) comprising derived and/or modified sequence from LASV(LASV035-NIG-2009;Clade II)__AIT17589__NP (opt4)
aggagaaagcuuaccaugagcgccagcaaggaggugaagagcuuccuguggacccagagccugagaagagagcugagcggcuacugcagcagcaucaagcugcagguggugaaggacgcccaggcccugcugcacggccuggacuucagcgaggugagcaacgugcagagacugaugagaaagcagaagagagacgacagcgaccugaagagacugagagaccugaaccaggccgugaacaaccugguggagcugaagagcacccagcagaagagcauccugagagugggcacccugaccagcgacgaccugcugacccuggccgccgaccuggagaagcugaagagcaaggugaucagaaccgagagaccccugagcagcggcguguacaugggcaaccugagcgcccagcagcuggagcagagaagagcccugcugaacaugaucggcauggugggcggcgcccagggcacccagcccggcagagacggcguggugagagugugggacgugaagaaccccgaccugcugaacaaccaguucggcaccaugcccagccugacccuggccugccugaccaagcagggccagguggaccugaacgacgccgugcuggcccugaccgaccugggccugaucuacaccgccaaguaccccaacagcagcgaccuggacagacugagccagagccaccccauccugaacaugguggacaccaagaagagcagccugaacaucagcggcuacaacuucagccugggcgccgccgugaaggccggcgccugcaugcuggacggcggcaacaugcuggagaccaucaaggugaccccccagaccauggacggcauccugaagagcauccugaaggugaagagaagccugggcauguucgugagcgacacccccggcgagagaaaccccuacgagaacauccuguacaagaucugccugagcggcgacggcuggcccuacaucgccagcagaaccagcaucgugggcagagccugggagaacaccaccguggaccuggagagcgacggcaagccccagaaggugggcaccaccggcagcaacaagagccugcagagcgccggcuuccccaccggccugaccuacagccagcugaugacccugaaggacagcaugaugcagcuggaccccagcgccaagaccuggaucgacaucgagggcagacccgaggaccccguggagaucgcccuguaccagcccaugagcggcugcuacauccacuucuucagagagcccaccgaccugaagcaguucaagcaggacgccaaguacagccacggcaucgacguggccgaccuguuccccgcccagcccggccugaccagcgccgugaucgaggcccugcccagaaacauggugcugaccugccagggcagcgacgacaucaagaagcugcuggacagccagggcagaagagacaucaagcugaucgacaucgcccugagcaaggccgacagcagaaaguucgagaacgccgugugggaccagugcaaggaccugugccacaugcacaccggcguggugguggagaagaagaagagaggcggcaaggaggagaucaccccccacugcgcccugauggacugcaucauguacgacgccgccgugagcggcggccugaacauccccgugcugagagccgugcugcccagagacaugguguucagaaccagcagccccaagguggugcugugaggacuaguuauaagacugacuagcccgaugggccucccaacgggcccuccuccccuccuugcaccgagauuaaucaaaggcucuuuucagagccaccaaaaaaaaaaaaaaaaaaaaaaaaaaaaaaaaaaaaaaaaaaaaaaaaaaaaaaaaaaaaaaaaagaauu

SEQ ID NO: 17712 - RNA, 1892 nt, Artificial Sequence
  mRNA product Design i-3 (hSL-A64-N5) comprising derived and/or modified sequence from LASV(LASV1000-NIG-2009;Clade II)__AIT17783__NP (opt4)
aggagaaagcuuaccaugagcgccagcaaggaggugaagagcuuccuguggacccagagccugagaagagagcugagcggcuacugcagcaacaucaagcugcagguggugaaggacgcccaggcccugcugcacggccuggacuucagcgaggugagcaacgugcagagacugaugagaaagcagaagagagacgacagcgaccugaagagacugagagaccugaaccaggccgugaacaaccugguggagcugaagagcacccagcagaagagcauccugagagugggcacccugaccagcgacgaccugcugacccuggccgccgaccuggagaagcugaagagcaaggugaucagaaccgagagaccccugagcagcggcguguacaugggcaaccugagcacccagcagcuggagcagagaagagcccugcugaacaugaucggcauggugggcggcgcccagggcacccagcccggcagagacggcguggugagagugugggacgugaagaaccccgaccugcugaacaaccaguucggcaccaugcccagccugacccuggccugccugaccaagcagggccagguggaccugaacgacguggugcuggcccugaccgaccugggccugaucuacaccgccaaguaccccaacagcagcgaccuggacagacugagccagagccaccccauccugaacaugguggacaccaagaagagcagccugaacaucagcggcuacaacuucagccugggcgccgccgugaaggccggcgccugcaugcuggacggcggcaacaugcuggagaccaucaaggugaccccccagaccauggacggcauccugaagagcauccugaaggugaagaagagccugggcauguucgugagcgacacccccggcgagagaaaccccuacgagaacauccuguacaagaucugccugagcggcgacggcuggcccuacaucgccagcagaaccagcaucgugggcagagccugggagaacaccaccguggaccuggagagcgacggcaagccccagaaggugggcaccgccggcagcaacaagagccugcagagcgccggcuuccccaccggccugaccuacagccagcugaugacccugaaggacagcaugaugcagcuggaccccagcgccaagaccuggaucgacaucgagggcagacccgaggaccccguggagaucgcccuguaccagcccgugagcggcugcuacauccacuucuucagagagcccaccgaccugaagcaguucaagcaggacgccaaguacagccacggcaucgacguggccgaccuguuccccgcccagcccggccugaccagcgccgugaucgaggcccugcccagaaacauggugcugaccugccagggcagcgacgacaucaagagacugcuggacagccagggcagaagagacaucaagcugaucgacaucgcccugagcaaggccgacagcagaagauucgagaacgccgugugggaccagugcaaggaccugugccacaugcacaccggcguggugguggagaagaagaagagaggcggcaaggaggagaucaccccccacugcgcccugauggacugcaucauguacgacgccgccgugagcggcggccugaacauccccgugcugagagccgugcugcccagagacaugguguucagaaccagcagccccaagguggugcugugaggacuaguuauaagacugacuagcccgaugggccucccaacgggcccuccuccccuccuugcaccgagauuaaucaaaggcucuuuucagagccaccaaaaaaaaaaaaaaaaaaaaaaaaaaaaaaaaaaaaaaaaaaaaaaaaaaaaaaaaaaaaaaaaagaauu

SEQ ID NO: 17713 - RNA, 1892 nt, Artificial Sequence
  mRNA product Design i-3 (hSL-A64-N5) comprising derived and/or modified sequence from LASV(LASV221-NIG-2010;Clade II)__AIT17625__NP (opt4)
aggagaaagcuuaccaugagcgccagcaaggaggugaagagcuuccuguggacccagagccugagaagagagcugagcggcuacugcagcagcaucaagcugcagguggugaaggacgcccaggcccugcugcacggccuggacuucagcgaggugagcaacgugcagagacugaugagaaagcagagaagagacgacagcgaccugaagagacugagagaccugaaccaggccgugaacaaccugguggagcugaagagcacccagcagaagagcauccugagagugggcacccugaccagcgacgaccugcugacccuggccgccgaccuggagaagcugaagagcaaggugaucagaaccgagagaccccugagcagcggcguguacaugggcaaccugagcacccagcagcuggagcagagaagagcccugcugaacaugaucggcauggugggcggcgcccagggcacccagcccggcagagacggcguggugagagugugggacgugaagaaccccgaccugcugaacaaccaguucggcaccaugcccagccugacccuggccugccugaccaagcagggccagguggaccugaacgacgccgugcuggcccugaccgaccugggccugaucuacaccgccaaguaccccaacagcagcgaccuggacagacugagccagagccaccccauccugaacaugguggacaccaagaagagcagccugaacaucagcggcuacaacuucagccugggcgccgccgugaaggccggcgccugcaugcuggacggcggcaacaugcuggagaccaucaaggugaccccccagaccguggacggcauccugaagagcauccugaaggugaagagaagccugggcauguucgugagcgacacccccggcgagagaaaccccuacgagaacauccuguacaagaucugccugagcggcgacggcuggcccuacaucgccagcagaaccagcaucgugggcagagccugggagaacaccaccguggaccuggagagcgacggcaagccccagaaggugggcaccgccggcagcaacaagagccugcagagcgccggcuuccccaccggccugaccuacagccagcugaugacccugaaggacagcaugaugcagcuggaccccagcgccaagaccuggaucgacaucgagggcagacccgaggaccccguggagaucgcccuguaccagcccaugagcggcugcuacauccacuucuucagagagcccaccgaccugaagcaguucaagcaggacgccaaguacagccacggcaucgacguggccgaccuguuccccgcccagcccggccugaccagcgccgugaucgaggcccugcccagaaacauggugcugaccugccagggcagcgacgacaucaagagacugcuggacagccagggcagaagagacaucaagcugaucgacaucgcccugagcaaggccgacagcagaaaguucgagaacgccgugugggaccagugcaaggaccugugccacaugcacaccggcguggugguggagaagaagaagagaggcggcaaggaggagaucaccccccacugcgcccugauggacugcaucauguacgacgccgccgugagcggcggccugaacauccccgugcugagagccgugcugcccagagacaugguguucagaaccagcagccccaagguggugcugugaggacuaguuauaagacugacuagcccgaugggccucccaacgggcccuccuccccuccuugcaccgagauuaaucaaaggcucuuuucagagccaccaaaaaaaaaaaaaaaaaaaaaaaaaaaaaaaaaaaaaaaaaaaaaaaaaaaaaaaaaaaaaaaaagaauu

SEQ ID NO: 17714 - RNA, 1892 nt, Artificial Sequence
  mRNA product Design i-3 (hSL-A64-N5) comprising derived and/or modified sequence from LASV(LASV237-NIG-2010;Clade II)__AIT17639__NP (opt4)
aggagaaagcuuaccaugagcgccagcaaggaggugaagagcuuccuguggacccagagccugagaagagagcugagcggcuacugcagcaacaucaagcugcagguggugaaggacgcccaggcccugcugcacggccuggacuucagcgaggugagcaacgugcagagacugaugagaaagcagaagagagacgacagcgaccugaagagacugagagaccugaaccaggccgugaacaaccugguggagcugaagagcacccagcagaagagcauccugagagugggcacccugaccagcgacgaccugcugacccuggccgccgaccuggagaagcugaagagcaaggugaucagaaccgagagaccccugagcagcggcguguacaugggcaaccugagcacccagcagcuggagcagagaagagcccugcugaacaugaucggcauggugggcggcgcccagggcacccagcccggcagagacggcguggugagagugugggacgugaagaaccccgaccugcugaacaaccaguucggcaccaugcccagccugacccuggccugccugaccaagcagggccagguggaccugaacgacgccgugcuggcccugaccgaccugggccugaucuacaccgccaaguaccccaacagcagcgaccuggacagacugagccagagccaccccauccugaacaugguggacaucaagaagagcagccugaacaucagcggcuacaacuucagccugggcgccgccgugaaggccggcgccugcaugcuggacggcggcaacaugcuggagaccaucaaggugaccccccagaccauggacggcauccugaagagcauccugaaggugaagagaagccugggcauguucgugagcgacacccccggcgagagaaaccccuacgagaacauccuguacaagaucugccugagcggcgacggcuggcccuacaucgccagcagaaccagcaucgugggcagagccugggagaacaccaccguggaccuggagagcgacggcaagccccagaaggugggcagcgccggcagcaacaagagccugcagagcgccggcuuccccaccggccugaccuacagccagcugaugacccugaaggacagcaugaugcagcuggaccccagcgccaagaccuggaucgacaucgagggcagacccgaggaccccguggagaucgcccuguaccagcccaugagcggcugcuacauccacuucuucagagagcccaccgaccugaagcaguucaagcaggacgccaaguacagccacggcaucgacguggccgaccuguuccccgcccagcccggccugaccagcgccgugaucgaggcccugcccagaaacauggugcugaccugccagggcagcgacgacaucaagagacugcuggacagccagggcagaagagacaucaagcugaucgacaucgcccugagcaaggccgacagcagaagauucgagaacgccgugugggaccagugcaaggaccugugccacaugcacaccggcguggugguggagaagaagaagagaggcggcaaggaggagaucaccccccacugcgcccugauggacugcaucauguacgacgccgccgugagcggcggccugaacauccccgugcugagagccgugcugcccagagacaugguguucagaaccagcagccccaagguggugcugugaggacuaguuauaagacugacuagcccgaugggccucccaacgggcccuccuccccuccuugcaccgagauuaaucaaaggcucuuuucagagccaccaaaaaaaaaaaaaaaaaaaaaaaaaaaaaaaaaaaaaaaaaaaaaaaaaaaaaaaaaaaaaaaaagaauu

SEQ ID NO: 17715 - RNA, 1892 nt, Artificial Sequence
  mRNA product Design i-3 (hSL-A64-N5) comprising derived and/or modified sequence from LASV(LASV253-NIG-2011;Clade II)__AIT17671__NP (opt4)
aggagaaagcuuaccaugagcgccagcaaggaggugaagagcuuccuguggacccagagccugagaagagagcugagcggcuacugcagcagcaucaagcugcagguggugaaggacgcccaggcccugcugcacggccuggacuucagcgaggugagcaacgugcagagacugaugagaaagcagaagagagacgacagcgaccugaagagacugagagaccugaaccaggccgugaacaaccugguggagcugaagagcacccagcagaagagcgugcugagagugggcacccugaccagcgacgaccugcugacccuggccgccgaccuggagaagcugaagagcaaggugaucagaaccgagagaccccugagcagcggcguguacaugggcaaccugagcacccagcagcuggagcagagaagagcccugcugaacaugaucggcauggugggcggcgcccagggcacccagcccggcagagacggcguggugagagugugggacgugaagaaccccgaccugcugaacaaccaguucggcaccaugcccagccugacccuggccugccugaccaagcagggccagguggaccugaacgacguggugcuggcccugaccgaccugggccugaucuacaccgccaaguaccccaacagcagcgaccuggacagacugagccagagccaccccauccugaacaugguggacaccaagaagagcagccugaacaucagcggcuacaacuucagccugggcgccgccgugaaggccggcgccugcaugcuggacggcggcaacaugcuggagaccaucaaggugaccccccagaccauggacggcauccugaagagcauccugaaggugaagaagagccugggcauguucgugagcgacacccccggcgagagaaaccccuacgagaacauccuguacaagaucugccugagcggcgacggcuggcccuacaucgccagcagaaccagcaucgugggcagagccugggagaacaccaccguggaccuggagagcgacggcaagccccagaaggugggcaccgccggcagcaacaagagccugcagagcgccggcuuccccaccggccugaccuacagccagcugaugacccugaaggacagcaugaugcagcuggaccccagcgccaagaccuggaucgacaucgagggcagacccgaggaccccguggagaucgcccuguaccagcccaugagcggcugcuacauccacuucuucagagagcccaccgaccugaagcaguucaagcaggacgccaaguacagccacggcaucgacgugaccgaccuguuccccgcccagcccggccugaccagcgccgugaucgaggcccugcccagaaacauggugcugaccugccagggcagcgacgacaucaagagacugcuggacagccagggcagaagagacaucaagcugaucgacaucgcccugagcaaggccgacagcagaagauucgagaacgccgugugggaccagugcaaggaccugugccacaugcacaccggcguggugguggagaagaagaagagaggcggcaaggaggagaucaccccccacugcgcccugauggacugcaucauguacgacgccgccgugagcggcggccugaacauccccgugcugagagccgugcugcccagagacaugguguucagaaccagcagccccaagguggugcugugaggacuaguuauaagacugacuagcccgaugggccucccaacgggcccuccuccccuccuugcaccgagauuaaucaaaggcucuuuucagagccaccaaaaaaaaaaaaaaaaaaaaaaaaaaaaaaaaaaaaaaaaaaaaaaaaaaaaaaaaaaaaaaaaagaauu

SEQ ID NO: 17716 - RNA, 1892 nt, Artificial Sequence
  mRNA product Design i-3 (hSL-A64-N5) comprising derived and/or modified sequence from LASV(LASV254-NIG-2011;Clade II)__AIT17675__NP (opt4)
aggagaaagcuuaccaugagcgccagcaaggaggugaagagcuuccuguggacccagagccugagaagagagcugagcggcuacugcagcagcaucaagcugcagguggugaaggacgcccaggcccugcugcacggccuggacuucagcgaggugagcaacgugcagagacugaugagaaagcagaagagagacgacagcgaccugaagagacugagagaccugaaccaggccgugaacaaccugguggagcugaagagcacccagcagaagagcgugcugagagugggcacccugaccagcgacgaccugcugacccuggccgccgaccuggagaagcugaagagcaaggugaucagaaccgagagaccccugagcagcggcguguacaugggcaaccugagcacccagcagcuggagcagagaagagcccugcugaacaugaucggcauggugggcggcgcccagggcacccagcccggcagagacggcguggugagagugugggacgugaagaaccccgaccugcugaacaaccaguucggcaccaugcccagccugacccuggccugccugaccaagcagggccagguggaccugaacgacgccgugcuggcccugaccgaccugggccugaucuacaccgccaaguaccccaacagcagcgaccuggacagacugagccagagccaccccauccugaacaugguggacaccaagaagagcagccugaacaucagcggcuacaacuucagccugggcgccgccgugaaggccggcgccugcaugcuggacggcggcaacaugcuggagaccaucaaggugaccccccagaccauggacggcauccugaagagcauccugaaggugaagaagagccugggcauguucgugagcgacacccccggcgagagaaaccccuacgagaacauccuguacaagaucugccugagcggcgacggcuggcccuacaucgccagcagaaccagcaucgugggcagagccugggagaacaccaucguggaccuggagagcgacggcaagccccagaaggugggcaccgccggcagcaacaagagccugcagagcgccggcuuccccaccggccugaccuacagccagcugaugacccugaaggacagcaugaugcagcuggaccccagcgccaagaccuggaucgacaucgagggcagacccgaggaccccguggagaucgcccuguaccagcccaugagcggcugcuacauccacuucuucagagagcccaccgaccugaagcaguucaagcaggacgccaaguacagccacggcaucgacguggccgaccuguuccccgcccagcccggccugaccagcgccgugaucgaggcccugcccagaaacauggugcugaccugccagggcagcgacgacaucaagagacugcuggacagccagggcagaagagacaucaagcugaucgacaucgcccugagcaaggccgacagcagaagauucgagaacgccgugugggaccagugcaaggaccugugccacaugcacaccggcguggugguggagaagaagaagagaggcggcaaggaggagaucaccccccacugcgcccugauggacugcaucauguacgacgccgccgugagcggcggccugaacauccccgugcugagagccgugcugcccagagacaugguguucagaaccagcagccccaagguggugcugugaggacuaguuauaagacugacuagcccgaugggccucccaacgggcccuccuccccuccuugcaccgagauuaaucaaaggcucuuuucagagccaccaaaaaaaaaaaaaaaaaaaaaaaaaaaaaaaaaaaaaaaaaaaaaaaaaaaaaaaaaaaaaaaaagaauu

SEQ ID NO: 17717 - RNA, 1892 nt, Artificial Sequence
  mRNA product Design i-3 (hSL-A64-N5) comprising derived and/or modified sequence from LASV(Nig08-04;Clade II)__ADU56611__NP (opt4)
aggagaaagcuuaccaugagcgccagcaaggaggugaagagcuuccuguggacccagagccugagaagagagcugagcggcuacugcagcaacaucaagcugcagguggugaaggacgcccaggcccugcugcacggccuggacuucagcgaggugagcaacgugcagagacugaugagaaagcagaagagagacgacggcgaccugaagagacugagagaccugaaccaggccgugaacaaccugguggagcugaagagcacccagcagaagagcgugcugagagugggcacccugaccagcgacgaccugcugacccuggccgccgaccuggagaagcugaagagcaaggugaucagaaccgagagaccccugagcagcggcguguacaugggcaaccugagcacccagcagcuggagcagagaaaggcccugcugagcaugaucggcauggugggcggcgcccagggcacccagcccggcagagacggcguggugagagugugggacgugaagaaccccgaccugcugaacaaccaguucggcaccaugcccagccugacccuggccugccugaccaagcagggccagguggaccugaacgacgccgugcuggcccugaccgaccugggccugaucuacaccgccaaguaccccaacagcagcgaccuggacagacugagccagagccaccccauccugaacaugguggacaccaagaagagcagccugaacaucagcggcuacaacuucagccugggcgccgccgugaaggccggcgccugcaugcuggacggcggcaacaugcuggagaccaucaaggugaccccccagaccauggacggcauccugaagagcauccugaaggugaagagaagccugggcauguucgugagcgacacccccggcgagagaaaccccuacgagaacauccuguacaagaucugccugagcggcgacggcuggcccuacaucgccagcagaaccagcaucgugggcagagccugggagaacaccaccguggaccuggagagcgacggcaagccccagaaggugggcaccgccggcagcaacaagagccugcagagcgccggcuuccccaccggccugaccuacagccagcugaugacccugaaggacagcaugaugcagcuggaccccagcgccaagaccuggaucgacaucgagggcagacccgaggaccccguggagaucgcccuguaccagcccaugagcggcugcuacauccacuucuucagagagcccaccgaccugaagcaguucaagcaggacgccaaguacagccacggcaucgacgugaccgaccuguucagcgcccagcccggccugaccagcgccgugaucgaggcccugcccagaaacauggugcugaccugccagggcagcgacgacaucaagaagcugcuggacagccagggcagaagagacaucaagcugaucgacaucagccugaacaaggccgacagcagaagauucgagaacgccgugugggaccagugcaaggaccugugccacaugcacaccggcguggugguggagaagaagaagagaggcggcaaggaggagaucaccccccacugcgcccugauggacugcaucauguucgacgccgccgugagcggcggccugaacauccccauccugagagccgugcugcccagagacaugguguucagaaccagcagccccaagguggugcugugaggacuaguuauaagacugacuagcccgaugggccucccaacgggcccuccuccccuccuugcaccgagauuaaucaaaggcucuuuucagagccaccaaaaaaaaaaaaaaaaaaaaaaaaaaaaaaaaaaaaaaaaaaaaaaaaaaaaaaaaaaaaaaaaagaauu

SEQ ID NO: 17718 - RNA, 1895 nt, Artificial Sequence
  mRNA product Design i-3 (hSL-A64-N5) comprising derived and/or modified sequence from LASV(GA391;Clade III)__AAA46284__NP (opt4)
aggagaaagcuuaccaugagcgccagcaaggaggugagaagcugccuguggacccagagccugagaagagagcugagcggcuacugcagcaacaucaagcugcagguggugaaggacgcccaggcccugcugcacggccuggacuucagcgaggugagcaacgugcagagacugaugagaaagcagaagagagacgacggcgaccugaagagacugagagaccugaaccaggccgugaacaaccugguggagcugaagagcacccagcagaagagcgugcugagagugggcacccugagcagcgacgaccugcugauccuggccgccgaccuggagaagcugaagagcaaggugaccagaaccgagagaccccugagcagcggcguguacaugggcaaccugagcagccagcagcuggaccagagaagagcccugcugaacaugaucggcaugaccggcgugagcggcggcggcaagggcgccagcaacggcaucgugagagugugggacgugaagaacgccgagcugcugaacaaccaguucggcaccaugcccagccugacccuggccugccugaccaagcagggccagguggaccugaacgacgccgugcaggcccugaccgaccugggccugaucuacaccgccaaguaccccaacagcagcgaccuggacagacugagccagagccaccccauccugaacaugaucgacaccaagaagagcagccugaacaucagcggcuacaacuucagccugggcgccgccgugaaggccggcgccugcaugcuggacggcggcaacaugcuggagaccaucaaggugagcccccagaccauggacggcauccugaagagcauccugaaggugaagaagagccugggcauguucgugagcgacacccccggcgagagaaaccccuacgagaacauccuguacaagaucugccugagcggcgacggcuggagcuacaucgccagcagaaccagcaucgugggcagagccugggagaacaccgugguggaccuggagcaggacaacaagccccagaagaucggcaacggcggcagcaacaagagccugcagagcgccggcuucgccgccggccugaucuacagccagcugaugacccugaaggacuucaagugcuucaaccugauccccaacgccaagaccuggauggacaucgagggcagacccgaggaccccguggagaucgcccuguaccagcccagcagcggcugcuacgugcacuucuucagagagcccaccgaccugaagcaguucaagcaggacgccaaguacagccacggcagagacgugaccgaccuguucgccgcccagcccggccugaccagcgccgugaucgaggcccugcccagaaacauggugaucaccugccagggcagcgaggacaucagaaagcugcuggagagccagggcagaagagacaucaagcugaucgacaucacccugagcaaggccgacagcagaaaguucgagaacgccgugugggaccaguucaaggaccugugccacaugcacaccggcguggugguggagaagaagaagagaggcggcaaggaggagaucaccccccacugcgcccugauggacugcaucauguucgacgccgccgugagcggcggccuggacgccaaggugcugagaguggugcugcccagagacaugguguucagaaccagcacccccaagguggugcugugaggacuaguuauaagacugacuagcccgaugggccucccaacgggcccuccuccccuccuugcaccgagauuaaucaaaggcucuuuucagagccaccaaaaaaaaaaaaaaaaaaaaaaaaaaaaaaaaaaaaaaaaaaaaaaaaaaaaaaaaaaaaaaaaagaauu

SEQ ID NO: 17719 - RNA, 1892 nt, Artificial Sequence
  mRNA product Design i-3 (hSL-A64-N5) comprising derived and/or modified sequence from LASV(Nig08-A19;Clade III)__ADU56619__NP (opt4)
aggagaaagcuuaccaugagcgccagcaaggaggugaagagcuuccuguggacccagagccugagaagagagcugagcggcuacugcagcaacaucaagcugcagguggugaaggacgcccaggcccugcugcacggccuggacuucagcgaggugagcaacgugcagagacugaugagaaagcagaagagagacgacggcgaccugaagagacugagagaccugaaccaggccgugaacaaccugguggagcugaagagcacccagcagaagagcgugcugagagugggcacccugagcagcgacgaccugcuggugcuggccgccgaccuggagaagcugaagagcaagguggugagaaccgagagaccccugagcagcggcaucuacaugggcaaccugagcagccagcagcuggaccagagaaaggcccugcugaacaugaucggcaugaccggcggcaacggcggcagaaacaccaccagcgacggcaucgugagagugugggacgugaagaacgccgagcugcugaacaaccaguucggcaccaugcccagccugacccuggccugccugaccaagcagggccagguggaccugaacgacgccgugcaggcccugaccgaccugggccugaucuacaccgccaaguaccccaacagcagcgaccuggacagacuggcccagagccaccccauccugaacaugaucgacaccaagaagagcagccugaacaucagcggcuacaacuucagccugggcgccgccgugaaggccggcgccugcaugcuggacggcggcaacaugcuggagaccaucaaggugagcccccagaccauggacggcauccugaagagcauccugaaggugaagagaagccugggcauguucaucagcgacacccccggcgagagaaaccccuacgagaacauccuguacaagaucugccugagcggcgacggcuggcccuacaucgccagcagaaccagcaucgugggcagagccugggagaacaccgugguggaccuggagagcgacaacaagccccagaagaccggcaacggcggcagcaacaagagccugcagagcgccggcuucgccgccggccugaccuacagccagcugaugacccugaaggacagcaugcugcagcuggaccccaacgccaagaccuggauggacaucgagggcagacccgaggaccccguggagaucgcccuguaccagcccagcagcggcugcuacauccacuucuucagagagcccaccgaccugaagcaguucaagcaggacgccaaguacagccacggcaucgacgugaccgaccuguucgccgcccagcccggccugaccagcgccgugaucgaggcccugcccagaaacauggugaucaccugccagggcagcgaggacaucagaaagcugcuggagagccagggcagaagagacaucaagcugaucgacaucagccugagcaagguggacagcagaaaguucgagaacgccgugugggaccaguucaaggaccugugccacaugcacaccggcaucgugguggagaagaagaagagaggcggcaaggaggagaucaccccccacugcgcccugauggacugcaucauguucgacgccgccgugagcggcggcguggacgccaaggugcugagagccgugcugcccagagacaugguguucagaaccagcacccccaagguggugcugugaggacuaguuauaagacugacuagcccgaugggccucccaacgggcccuccuccccuccuugcaccgagauuaaucaaaggcucuuuucagagccaccaaaaaaaaaaaaaaaaaaaaaaaaaaaaaaaaaaaaaaaaaaaaaaaaaaaaaaaaaaaaaaaaagaauu

SEQ ID NO: 17720 - RNA, 1892 nt, Artificial Sequence
  mRNA product Design i-3 (hSL-A64-N5) comprising derived and/or modified sequence from LASV(G1180-SLE-2010;Clade IV)__AIT17169__NP (opt4)
aggagaaagcuuaccaugagcgccagcaaggagaucaagagcuuccuguggacccagagccugagaagagagcugagcggcuacugcagcaacaucaagcugcagguggugaaggacgcccaggcccugcugcacggccuggacuucagcgaggugagcaacgugcagagacugaugagaaaggagagaagagacgacaacgaccugaagagacugagagaccugaaccaggccgugaacaaccugguggagcugaagagcacccagcagaagagcauccugagagugggcacccugaccagcgacgaccugcugauccuggccgccgaccuggagaagcugaagagcaaggugaucagaaccgagagaccccugagcgccggcguguacaugggcaaccugagcagccagcagcuggaccagagaagagcccugcugagcaugaucggcaugagcagcggcaaccagagagcccaggccggcagagacggcguggugagagugugggacgugaagaacguggagcugcugaacaaccaguucggcaccaugcccagccugacccuggccugccugaccaagcagggccagguggaccugaacgacgccgugcaggcccugaccgaccugggccugaucuacaccgccaaguaccccaacaccagcgaccuggacagacugacccagagccaccccauccugaacaugaucgacaccaagaagagcagccugaacaucagcggcuacaacuucagccugggcgccgccgugaaggccggcgccugcaugcuggacggcggcaacaugcuggagaccaucaaggugagcccccagaccauggacggcauccugaagagcauccugaaggugaagaaggcccugggcauguucaucagcgacacccccggcgagagaaaccccuacgagaacauccuguacaagaucugccugagcggcgacggcuggcccuacaucgccagcagaaccagcaucaccggcagagccugggagaacaccgugguggaccuggagagcgacggcaagccccagaaggccggcagcaacaacagcaacaagagccugcagagcgugggcuucaccgccggccugaccuacagccagcugaugacccugaaggacgccaugcugcagcuggaccccaacgccaagaccuggauggacaucgagggcagacccgaggaccccguggagaucgcccuguaccagcccagcagcggcugcuacauccacuucuucagagagcccaccgaccugaagcaguucaagcaggacgccaaguacagccacggcaucgacgugaccgaccuguucgccgcccagcccggccugaccagcgccgugaucgacgcccugcccagaaacauggugaucaccugccagggcagcgacgacaucagaaagcugcuggagagccagggcagaaaggacaucaagcugaucgacaucgcccugagcaagaccgacagcagaaaguacgagaacgccgugugggaccaguacaaggaccugugccacaugcacaccggcguggugguggagaagaagaagagaggcggcaaggaggagaucaccccccacugcgcccugauggacugcaucauguucgacgccgccgugagcggcggccugaacaccagcgugcugagagccgugcugcccagagacaugguguucagaaccagcacccccagaguggugcugugaggacuaguuauaagacugacuagcccgaugggccucccaacgggcccuccuccccuccuugcaccgagauuaaucaaaggcucuuuucagagccaccaaaaaaaaaaaaaaaaaaaaaaaaaaaaaaaaaaaaaaaaaaaaaaaaaaaaaaaaaaaaaaaaagaauu

SEQ ID NO: 17721 - RNA, 1892 nt, Artificial Sequence
  mRNA product Design i-3 (hSL-A64-N5) comprising derived and/or modified sequence from LASV(G1442-SLE-2011;Clade IV)__AIT17181__NP (opt4)
aggagaaagcuuaccaugagcgccagcaaggaggugaagagcuuccuguggacccagagccugagaagagagcugagcggcuacugcagcaacaucaagcugcagguggugaaggacgcccaggcccugcugcacggccuggacuucagcgaggugagcaacgugcagagacugaugagaaagcagagaagagacgacaacgaccugaagagacugagagaccugaaccaggccgugaacaaccugguggagcugaagagcacccagcagaagagcgugcugagagugggcacccugaccagcgacgaccugcuggugcuggccgccgaccuggagaagcugaagagcaaggugaucagaaccgagagaccccugagcgccggcguguacaugggcaaccugagcagccagcagcuggaccagagaagagcccugcugaacaugaucggcaugagcggcggcauccagggcaccagaaccggcagagacggcguggugagagugugggacgugaagaacgccgaccugcugaacaaccaguucggcaccaugcccagccugacccuggccugccugaccaagcagggccagguggaccugaacgacguggugcaggcccugaccgaccugggccugaucuacaccgccaaguaccccaacgccagcgaccuggacagacugacccagagccaccccauccugaacaugaucgacaccaagaagagcagccugaacaucagcggcuacaacuucagccugggcgccgccgugaaggccggcgccugcaugcuggacggcggcaacaugcuggagaccaucaaggugagcccccagaccauggacggcauccugaagagcauccugaaggugaagaagacccugggcauguucaucagcgacacccccggcgagagaaaccccuacgagaacauccuguacaagaucugccugagcggcgacggcuggcccuacaucgccagcagaaccagcaucaccggcagagccugggagaacaccgugguggaccuggagagcgacggcaagccccagaaggccggcagcaacaacagcaacaagagccugcagagcgccggcuucgccgccggccugaccuacagccagcugaugacccugaaggacgccaugcugcagcuggaccccaacgccaagaccuggauggacaucgagggcagacccgaggaccccguggagaucgcccuguaccagcccagcagcggcugcuacauccacuucuucagagagcccaccgaccugaagcaguucaagcaggacgccaaguacagccacggcaucgacgugaccgaccuguucgccgcccagcccggccugaccagcgccgugaucgaggcccugcccagaaacauggugaucaccugccagggcagcgacgacaucaagaagcugcuggagagccagggcagaaaggacaucaagcugaucgacaucgcccugagcaagaccgacagcagaaaguacgagaacgccgugugggaccaguacaaggaccugugccacaugcacaccggcguggugguggagaagaagaagagaggcggcaaggaggagaucaccccccacugcgcccugauggacugcaucauguucgacgccgccgugagcggcggccugaacacccuggugcugagagccgugcugcccagagacaugguguucagaaccagcacccccagaguggugcugugaggacuaguuauaagacugacuagcccgaugggccucccaacgggcccuccuccccuccuugcaccgagauuaaucaaaggcucuuuucagagccaccaaaaaaaaaaaaaaaaaaaaaaaaaaaaaaaaaaaaaaaaaaaaaaaaaaaaaaaaaaaaaaaaagaauu

SEQ ID NO: 17722 - RNA, 1892 nt, Artificial Sequence
  mRNA product Design i-3 (hSL-A64-N5) comprising derived and/or modified sequence from LASV(G3010-SLE-2013;Clade IV)__AIT17345__NP (opt4)
aggagaaagcuuaccaugagcgccagcaaggagaucaagagcuuccuguggacccagagccugagaagagagcugagcggcuacugcagcaacaucaagcugcagguggugaaggacgcccaggcccugcugcacggccuggacuucagcgaggugagcaacgugcagagacugaugagaaaggagagaagagacgacaacgaccugaagagacugagagaccugaaccaggccgugaacaaccugguggagcugaagagcacccagcagaagagcauccugagagugggcacccugaccagcgacgaccugcugauccuggccgccgaccuggagaagcugaagagcaaggugaccagaaccgagagaccccugagcgccggcguguacaugggcaaccugagcagccagcagcuggaccagagaagagcccugcugagcaugaucggcaugagcagcggcgugcagggcgccagagccggcagagacggcguggugagagugugggacgugaagaacgccgagcugcugaacaaccaguucggcaccaugcccagccugacccuggccugccugaccaagcagggccagguggaccugaacgacguggugcaggcccugaccgaccugggccugaucuacaccgccaaguaccccaacaccagcgaccuggacagacugacccagagccaccccauccugaacaugaucgacaccaagaagagcagccugaacaucagcggcuacaacuucagccugggcgccgccgugaaggccggcgccugcaugcuggacggcggcaacaugcuggagaccaucaaggugagcccccagaccauggacggcauccugaagagcauccugaaggugaagaaggcccugggcauguucaucagcgagacccccggcgagagaaaccccuacgagaacauccuguacaagaucugccugagcggcgacggcuggcccuacaucgccagcagaaccagcaucaccggcagagccugggagaacaccgugguggaccuggagagcgacggcaagccccagaaggccggcagcaacaacagcaacaagagccugcagagcgccggcuucaccgccggccugaccuacagccagcugaugacccugaaggacgccaugcugcagcuggaccccaacgccaagaccuggauggacaucgagggcagacccgaggaccccguggagguggcccuguaccagcccagcagcggcugcuacauccacuucuucagagagcccaccgaccugaagcaguucaagcaggacgccaaguacagccacggcaucgacgugaccgaccuguucgccgcccagcccggccugaccagcgccgugaucgacgcccugcccagaaacauggugaucaccugccagggcagcgacgacaucaagaagcugcuggagagccagggcagaaaggacaucaagcugaucgacaucgcccugagcaagaccgacagcagaaaguacgagaacgccgugugggaccaguacaaggaccugugccacaugcacaccggcguggugguggagaagaagaagagaggcggcaaggaggagaucaccccccacugcgcccugauggacugcaucauguucgacgccgccgugagcggcggccugaacaccagcgugcugagagccgugcugcccagagacaugguguucagaaccagcacccccagaguggugcugugaggacuaguuauaagacugacuagcccgaugggccucccaacgggcccuccuccccuccuugcaccgagauuaaucaaaggcucuuuucagagccaccaaaaaaaaaaaaaaaaaaaaaaaaaaaaaaaaaaaaaaaaaaaaaaaaaaaaaaaaaaaaaaaaagaauu

SEQ ID NO: 17723 - RNA, 1892 nt, Artificial Sequence
  mRNA product Design i-3 (hSL-A64-N5) comprising derived and/or modified sequence from LASV(G502-SLE-2009;Clade IV)__AIT17127__NP (opt4)
aggagaaagcuuaccaugagcgccagcaaggagaucaagagcuuccuguggacccagagccugagaagagagcugagcggcuacugcagcaacaucaagcugcagguggugaaggacgcccaggcccugcugcacggccuggacuucagcgaggugagcaacgugcagagacugaugagaaaggagagaagagacgacaacgaccugaagagacugagagaccugaaccaggccgugaacaaccugguggagcugaagagcacccagcagaagagcauccugagagugggcacccugaccagcgacgaccugcugauccuggccgccgaccuggagaagcugaagagcaaggugaucagaaccgagagaccccugagcgccggcguguacaugggcaaccugagcagccagcagcuggaccagagaagagcccugcugagcaugaucggcaugagcggcggcaaccagggcgugagagccggcaaggacggcguggugagagugugggacgugaagaacgccgagcugcugaacaaccaguucggcaccaugcccagccugacccuggccugccugaccaagcagggccagguggaccugaacgacgccgugcaggcccugaccgaccugggccugaucuacaccgccaaguaccccaacaccagcgaccuggacagacugacccagagccaccccauccugaacaugaucgacaccaagaagagcagccugaacaucagcggcuacaacuucagccugggcgccgccgugaaggccggcgccugcaugcuggacggcggcaacaugcuggagaccaucaaggugagcccccagaccauggacggcauccugaagagcauccugaaggugaagaaggcccugggcauguucaucagcgacacccccggcgagagaaaccccuacgagaacauccuguacaagaucugccugagcggcgacggcuggcccuacaucgccagcagaaccagcaucaccggcagagccugggagaacaccgugguggaccuggagagcgacggcaagccccagaaggccggcagcaacaacagcaacaagagccugcagagcgccggcuucaccgccggccugaccuacagccagcugaugacccugaaggacgccaugcugcagcuggaccccaacaccaagaccuggauggacaucgagggcagacccgaggaccccguggagaucgcccuguaccagcccagcagcggcugcuacauccacuucuucagagagcccaccgaccugaagcaguucaagcaggacgccaaguacagccacggcaucgacgugaccgaccuguucgccgcccagcccggccugaccagcgccgugaucgacgcccugcccagaaacauggugaucaccugccagggcagcgacgacaucagaaagcugcuggagagccagggcagaaaggacaucaagcugaucgacaucgcccugaacaagaccgacagcagaaaguacgagaacgccgugugggaccaguacaaggaccugugccacaugcacaccggcguggugguggagaagaagaagagaggcggcaaggaggagaucaccccccacugcgcccugauggacugcaucauguucgacgccgccgugagcggcggccugaacaccagcgugcugagagccgugcugcccagagacaugguguucagaaccagcacccccagaguggugcugugaggacuaguuauaagacugacuagcccgaugggccucccaacgggcccuccuccccuccuugcaccgagauuaaucaaaggcucuuuucagagccaccaaaaaaaaaaaaaaaaaaaaaaaaaaaaaaaaaaaaaaaaaaaaaaaaaaaaaaaaaaaaaaaaagaauu

SEQ ID NO: 17724 - RNA, 1892 nt, Artificial Sequence
  mRNA product Design i-3 (hSL-A64-N5) comprising derived and/or modified sequence from LASV(G733-SLE-2010;Clade IV)__AIT17155__NP (opt4)
aggagaaagcuuaccaugagcgccagcaaggagaucaagagcuuccuguggacccagagccugagaagagagcugagcggcuacugcagcaacaucaagcugcagguggugaaggacgcccaggcccugcugcacggccuggacuucagcgaggugagcaacgugcagagacugaugagaaaggagagaagagacgacaacgaccugaagagacugagagaccugaaccaggccgugaacaaccugguggagcugaagagcacccagcagaagagcgugcugagagugggcacccugaccagcgacgagcugcuggugcuggccgccgaccuggagaagcugaagagcaaggugaucagaaccgagagaccccugagcgccggcguguacaugggcaaccugagcagccagcagcuggaccagagaagagcccugcugagcaugaucggcaugagcggcggcaaccagggcgccagaaccggcagagacggcguggugagagugugggacgugaagaacgccgagcugcugaacaaccaguucggcaccaugcccagccugacccuggccugccugaccaagcagggccagguggaccugaacgacgccgugcaggcccugaccgaccugggccugaucuacaccgccaaguaccccaacaccagcgaccuggacagacugacccagagccaccccauccugaacaugaucgacaccaagaagagcagccugaacaucagcggcuacaacuucagccugggcgccgccgugaaggccggcgccugcaugcuggacggcggcaacaugcuggagaccaucaaggugagcccccagaccauggacggcauccugaagagcauccugaaggugaagaaggcccugggcauguucaucagcgacacccccggcgagagaaaccccuacgagaacauccuguacaagaucugccugagcggcgacggcuggcccuacaucgccagcagaaccagcaucaccggcagagccugggagaacaccgugguggaccuggagagcgacggcaagccccagaaggccggcagcaacaacagcaacaagagccugcagagcgccggcuucaccgccggccugaccuacagccagcugaugacccugaaggacgccaugcugcagcuggaccccaacgccaagaccuggauggacaucgagggcagacccgaggaccccguggagaucgcccuguaccagcccagcagcggcugcuacauccacuucuucagagagcccaccgaccugaagcaguucaagcaggacgccaaguacagccacggcaucgacgugaccgaccuguucgccgcccagcccggccugaccagcgccgugaucgacgcccugcccagaaacauggugaucaccugccagggcagcgacgacaucagaaagcugcuggagagccagggcagaaaggacaucaagcugaucgacaucgcccugagcaagaucgacagcagaaaguacgagaacgccgugugggaccaguacaaggaccugugccacaugcacaccggcguggugguggagaagaagaagagaggcggcaaggaggagaucaccccccacugcgcccugauggacugcaucauguucgacgccgccgugagcggcggccugaacagccuggugcugagagccgugcugcccagagacaugguguucagaaccagcacccccagaguggugcugugaggacuaguuauaagacugacuagcccgaugggccucccaacgggcccuccuccccuccuugcaccgagauuaaucaaaggcucuuuucagagccaccaaaaaaaaaaaaaaaaaaaaaaaaaaaaaaaaaaaaaaaaaaaaaaaaaaaaaaaaaaaaaaaaagaauu

SEQ ID NO: 17725 - RNA, 1892 nt, Artificial Sequence
  mRNA product Design i-3 (hSL-A64-N5) comprising derived and/or modified sequence from MOPV/LASV reassortant(IGS-1;Clade IV)__AFY05578__NP (opt4)
aggagaaagcuuaccaugagcgccagcaaggagaucaagagcuuccuguggacccagagccugagaagagagcugagcggcuacugcagcaacaucaagcugcagguggugaaggacgcccaggcccugcugcacggccuggacuucagcgaggugagcaacgugcagagacugaugagaaaggagagaagagacgacaacgaccugaagagacugagagaccugaaccaggccgugaacaaccugguggagcugaagagcacccagcagaagagcauccugagagugggcacccugaccagcgacgaccugcugauccuggccgccgaccuggagaagcugagaagcaaggugaucagaaccgagagaccccugagcgccggcguguacaugggcaaccugagcagccagcagcuggaccagagaagagcccugcugaacaugaucggcaugagcggcggcaaccagggcgccagagccggcagagacggcguggugagagugugggacgugaagaacgccgagcugcugagcaaccaguucggcaccaugcccagccugacccuggccugccugaccaagcagggccagguggaccugaacgacgccgugcaggcccugaccgaccugggccugaucuacaccgccaaguaccccaacaccagcgaccuggacagacugacccagagccaccccauccugaacaugaucgacaccaagaagagcagccugaacaucagcggcuacaacuucagccugggcgccgccgugaaggccggcgccugcaugcuggacggcggcaacaugcuggagaccaucaaggugagcccccagaccauggacggcauccugaagagcauccugaaggugaagaaggcccugggcauguucaucagcgacacccccggcgagagaaaccccuacgagaacauccuguacaagaucugccugagcggcgacggcuggcccuacaucgccagcagaaccagcaucaccggcagagccugggagaacaccgugguggaccuggagagcgacggcaagccccagaaggccgacagcaacaacagcagcaagagccugcagagcgccggcuucaccgccggccugaccuacagccagcugaugacccugaaggacgccaugcugcagcuggaccccaacgccaagaccuggauggacaucgagggcagacccgaggaccccguggagaucgcccuguaccagcccagcagcggcugcuacauccacuucuucagagagcccaccgaccugaagcaguucaagcaggacgccaaguacagccacggcaucgacgugaccgaccuguucgccacccagcccggccugaccagcgccgugaucgacgcccugcccagaaacauggugaucaccugccagggcagcgacgacaucagaaagcugcuggagagccagggcagaaaggacaucaagcugaucgacaucgaccugagcaagaccgacagcagaaaguacgagaacgccgugugggaccaguacaaggaccugugccacaugcacaccggcguggugguggagaagaagaagagaggcggcaaggaggagaucaccccccacugcgcccugauggacugcaucauguucgacgccgccgugagcggcggccugaacaccagcgugcugagagccgugcugcccagagacaugguguucagaaccagcacccccagaguggugcugugaggacuaguuauaagacugacuagcccgaugggccucccaacgggcccuccuccccuccuugcaccgagauuaaucaaaggcucuuuucagagccaccaaaaaaaaaaaaaaaaaaaaaaaaaaaaaaaaaaaaaaaaaaaaaaaaaaaaaaaaaaaaaaaaagaauu

SEQ ID NO: 17726 - RNA, 1892 nt, Artificial Sequence
  mRNA product Design i-3 (hSL-A64-N5) comprising derived and/or modified sequence from LASV(LM765-SLE-2012;Clade IV)__AIT17815__NP (opt4)
aggagaaagcuuaccaugagcgccagcaaggagaucaagagcuuccuguggacccagagccugagaagagagcugagcggcuacugcagcaacaucaagcugcagguggugaaggacgcccaggcccugcugcacggccuggacuucagcgaggugagcaacgugcagagacugaugagaaaggagagaagagacgacaacgaccugaagagacugagagaccugaaccaggccgugaacaaccugguggagcugaagagcacccagcagaagagcauccugagagugggcacccugaccagcgacgaccugcugauccuggccgccgaccuggagaagcugaagagcaaggugaccagaaccgagagaccccugagcgccggcguguacaugggcaaccugagcagccagcagcuggaccagagaagagcccugcuggacaugaucggcaugagcggcagcaaccagggcgccagagccggcagagacggcguggugagagugugggacgugaagaacgccgagcugcugaacaaccaguucggcaccaugcccagccugacccuggccugccugaccaagcagggccagguggaccugaacgacgccgugcaggcccugaccgaccugggccugaucuacaccgccaaguaccccaacaccagcgaccuggacagacugacccagagccaccccauccugaacaugaucgacaccaagaagagcagccugaacaucagcggcuacaacuucagccugggcgccgccgugaaggccggcgccugcaugcuggacggcggcaacaugcuggagaccaucaaggugagcccccagaccauggacggcauccugaagagcauccugaaggugaagaaggcccugggcauguucaucagcgacgcccccggcgagagaaaccccuacgagaacauccuguacaagaucugccugagcggcgacggcuggcccuacaucgccagcagaaccagcaucaccggcagagccugggagaacaccgugguggaccuggagagcgacggcaagccccagaaggccggcagcaacggcagcaacaagagccugcagagcgccggcuucaccgccggccugaccuacagccagcugaugacccugaaggacgccaugcugcagcuggaccccaacgccaagaccuggauggacaucgagggcagacccgaggaccccguggagaucgcccuguaccagcccagcagcggcugcuacauccacuucuucagagagcccaccgaccugaagcaguucaagcaggacgccaaguacagccacggcaucgacgugaccgaccuguucgccgcccagcccggccugaccagcgccgugaucgacgcccugcccagaaacauggugaucaccugccagggcagcgacgacaucagaaagcuguucgagagccagggcagaaaggacaucaagcugaucgacaucgcccugagcaagaccgacagcagaaaguacgagaacgccgugugggaccaguacaaggaccugugccacaugcacaccggcaucgugguggagaagaagaagagaggcggcaaggaggagaucaccccccacugcgcccugauggacugcaucauguucgacgccgccgugagcggcggccugaacaccagcgugcugagagccgugcugcccagagacaugguguucagaaccagcacccccagaguggugcugugaggacuaguuauaagacugacuagcccgaugggccucccaacgggcccuccuccccuccuugcaccgagauuaaucaaaggcucuuuucagagccaccaaaaaaaaaaaaaaaaaaaaaaaaaaaaaaaaaaaaaaaaaaaaaaaaaaaaaaaaaaaaaaaaagaauu

SEQ ID NO: 17727 - RNA, 1892 nt, Artificial Sequence
  mRNA product Design i-3 (hSL-A64-N5) comprising derived and/or modified sequence from LASV(LM776-SLE-2012;Clade IV)__AIT17825__NP (opt4)
aggagaaagcuuaccaugagcgccagcaaggagaucaagagcuuccuguggacccagagccugagaagagagcugagcagcuacugcagcaacaucaagcugcagguggugaaggacgcccaggcccugcugcacggccuggacuucagcgaggugagcaacgugcagagacugaugagaaaggagagaagagacgacaacgaccugaagagacugagagaccugaaccaggccgugaacaaccugguggagcugaagagcacccagcagaagagcauccugagagugggcacccugaccagcgacgaccugcugauccuggccgccgaccuggagaagcugaagagcaaggugaccagaaccgagagaccccugagcgccggcguguacaugggcaaccugagcagccagcagcuggaccagagaagagcccugcugagcaugaucggcaugagcggcagcaaccagggcgccagagccggcagagacggcguggugagagugugggacgugaagaacgccgagcugcugaacaaccaguucggcaccaugcccagccugacccuggccugccugaccaagcagggccagguggaccugaacgacgccgugcaggcccugaccgaccugggccugaucuacaccgccaaguaccccaacaccagcgaccuggacagacugacccagagccaccccauccugaacaugaucgacaccaagaagagcagccugaacaucagcggcuacaacuucagccugggcgccgccgugaaggccggcgccugcaugcuggacggcggcaacaugcuggagaccaucaaggugagcccccagaccauggacggcauccugaagagcauccugaaggugaagaaggcccugggcauguucaucagcgacacccccggcgagagaaaccccuacgagaacauccuguacaagaucugccugagcggcgacggcuggcccuacaucgccagcagaaccagcaucaccggcagagccugggagaacaccgugguggaccuggagagcgacggcaagccccagaaggccggcagcaacaacagcaacaagagccugcagagcgccggcuucaccgccggccugaccuacagccagcugaugacccugaaggacgccaugcugcagcuggaccccaacgccaagaccuggauggacaucgagggcagacccgaggaccccguggagguggcccuguaccagcccagcagcggcugcuacauccacuucuucagagagcccaccgaccugaagcaguucaagcaggacgccaaguacagccacggcaucgacgugaccgaccuguucgccgcccagcccggccugaccagcgccgugaucgacgcccugcccagaaacauggugaucaccugccagggcagcgacgacaucagaaagcugcuggagagccagggcagaaaggacaucaagcugaucgacaucgcccugagcaagaccgacagcagaaaguacgagaacgccgugugggaccaguacaaggaccugugccacaugcacaccggcguggugguggagaagaagaagagaggcggcaaggaggagaucaccccccacugcgcccugauggacugcaucauguucgacgccgccgugagcggcggccugaacaccagcgugcugagagccgugcugcccagagacaugguguucagaaccagcacccccagaguggugcugugaggacuaguuauaagacugacuagcccgaugggccucccaacgggcccuccuccccuccuugcaccgagauuaaucaaaggcucuuuucagagccaccaaaaaaaaaaaaaaaaaaaaaaaaaaaaaaaaaaaaaaaaaaaaaaaaaaaaaaaaaaaaaaaaagaauu

SEQ ID NO: 17728 - RNA, 1892 nt, Artificial Sequence
  mRNA product Design i-3 (hSL-A64-N5) comprising derived and/or modified sequence from LASV(Mad39;Clade IV)__ANH09723__NP (opt4)
aggagaaagcuuaccaugagcgccagcaaggagaucaagagcuuccuguggacccagagccugagaagagagcugagcggcuacugcagcaacaucaagcugcagguggugaaggacgcccaggcccugcugcacggccuggacuucagcgaggugagcaacgugcagagacugaugagaaagcagagaagagacgacaacgaccugaagagacugagagaccugaaccaggccgugaacaaccugguggagcugaagagcacccagcagaagagcgugcugagagugggcacccugaccagcgacgaccugcugacccuggccgccgaccuggagaagcugaagagcaaggugaccagaaccgagagaccccugaccgccggcguguacaugggcaaccugagcagccagcagcuggaccagagaagagcccugcugaacaugaucggcaugagcggcggcaaccagggcgccagaaccggcagagacggcguggugagagugugggacgugaagaacgccgagcugcugaacaaccaguucggcaccaugcccagccugacccuggccugccugaccaagcagggccagguggaccugaacgacguggugcaggcccugaccgaccugggccugaucuacaccgccaaguaccccaacaccagcgaccuggacagacugacccagagccaccccauccugaacaugaucgacaccaacaagagcagccugaacaucagcggcuacaacuucagccugggcgccgccgugaaggccggcgccugcaugcuggacggcggcaacaugcuggagaccaucaaggugagcccccagaccauggacggcauccugaagagcauccugaaggugaagaagagccugggcauguucaucagcgacacccccggcgagagaaaccccuacgagaacauccuguacaagaucugccugagcggcgacggcuggcccuacaucgccagcagaaccagcaucaccggcagagccugggagaacaccgugguggaccuggagagcggcggcaagccccagaaggccggcagcaacaacagcaacaagagccugcagagcgccggcuucgccgccggccugaccuacagccagcugaugacccugaaggacgccaugcugcagcuggaccccaacgccaagaccuggauggacaucgagggcagacccgaggaccccguggagaucgcccuguaccagcccaucagcggcugcuacauccacuucuucagagagcccaccgaccugaagcaguucaagcaggacgccaaguacagccacggcaucgacgugaccgaccuguucgccgcccagcccggccugaccagcgccgugaucgaggcccugcccagaaacauggugaucaccugccagggcagcgacgacaucagaaagcuguucgagagccagggcagaaaggacaucaagcugaucgacaucgcccugagcaagaccgacagcagaaaguacgagaacgccgugugggaccaguacaaggaccugugccacaugcacaccggcguggugguggagaagaagaagaagggcggcaaggaggagaucaccccccacugcgcccugauggacugcaucauguucgacgccgccgugagcggcggccugaacacccuggugcugagagccgugcugcccagagacaugguguucagaaccagcacccccaagguggugcugugaggacuaguuauaagacugacuagcccgaugggccucccaacgggcccuccuccccuccuugcaccgagauuaaucaaaggcucuuuucagagccaccaaaaaaaaaaaaaaaaaaaaaaaaaaaaaaaaaaaaaaaaaaaaaaaaaaaaaaaaaaaaaaaaagaauu

SEQ ID NO: 17729 - RNA, 1892 nt, Artificial Sequence
  mRNA product Design i-3 (hSL-A64-N5) comprising derived and/or modified sequence from LASV(Z0947-SLE-2011;Clade IV)__AIT17841__NP (opt4)
aggagaaagcuuaccaugagcgccagcaaggagaucaagagcuuccuguggacccagagccugagaagagagcugagcggcuacugcagcaacaucaagcugcagguggugaaggacgcccaggcccugcugcacggccuggacuucagcgaggugagcaacgugcagagacugaugagaaaggagagaagagacgacaacgaccugaagagacugagagaccugaaccaggccgugaacaaccugguggagcugaagagcacccagcagaagagcauccugagagugggcacccugaccagcgacgaccugcugauccuggccgccgaccuggagaagcugaagagcaaggugaccagaaccgagagaccccugagcgccggcguguacaugggcaaccugagcagccagcagcuggaccagagaagagcccugcugaacaugaucggcaugagcggcagcaaccagggcgccagaaccggcagagacggcguggugagagugugggacgugaagaacgccgagcugcugaacaaccaguucggcaccaugcccagccugacccuggccugccugaccaagcagggccagguggaccugaacgacgccgugcaggcccugaccgaccugggccugaucuacaccgccaaguaccccaacaccagcgaccuggacagacugacccagagccaccccauccugaacaugaucgacaccaagaagagcagccugaacaucagcggcuacaacuucagccugggcgccgccgugaaggccggcgccugcaugcuggacggcggcaacaugcuggagaccaucaaggugagcccccagaccauggacggcauccugaagagcauccugaaggugaagaaggcccugggcauguucaucagcgacgcccccggcgagagaaaccccuacgagaacauccuguacaagaucugccugagcggcgacggcuggcccuacaucgccagcagaaccagcaucaccggcagagccugggagaacaccgugguggaccuggagagcgacggcaagccccagaaggccggcagcaacggcagcaacaagagccugcagagcgccggcuucaccgccggccugaccuacagccagcugaugacccugaaggacgccaugcugcagcuggaccccaacgccaagaccuggauggacaucgagggcagacccgaggaccccguggagaucgcccuguaccagcccagcagcggcugcuacauccacuucuucagagagcccaccgaccugaagcaguucaagcaggacgccaaguacagccacggcaucgacgugaccgaccuguucgccgcccagcccggccugaccagcgccgugaucgacgcccugcccagaaacauggugaucaccugccagggcagcgacgacaucagaaagcuguucgagagccagggcagaaaggacaucaagcugaucgacaucgcccugagcaagaccgacagcagaaaguacgagaacgccgugugggaccaguacaaggaccugugccacaugcacaccggcaucgugguggagaagaagaagagaggcggcaaggaggagaucaccccccacugcgcccugauggacugcaucauguucgacgccgccgugagcggcggccugaacaccagcgugcugagagccgugcugcccagagacaugguguucagaaccagcacccccagaguggugcugugaggacuaguuauaagacugacuagcccgaugggccucccaacgggcccuccuccccuccuugcaccgagauuaaucaaaggcucuuuucagagccaccaaaaaaaaaaaaaaaaaaaaaaaaaaaaaaaaaaaaaaaaaaaaaaaaaaaaaaaaaaaaaaaaagaauu

SEQ ID NO: 17730 - RNA, 1892 nt, Artificial Sequence
  mRNA product Design i-3 (hSL-A64-N5) comprising derived and/or modified sequence from LASV(Josiah;Clade IV)__NP_694869__NP (opt5)
aggagaaagcuuaccaugagcgccuccaaggagaucaaaucuuuccuguggacccagagccucagacgggaacuguccggcuacugcucuaacauuaagcugcaaguggucaaagacgcucaggcccugcuccacgggcuggauuuuagcgagguuuccaaugugcagcgccuuaugagaaaggaacggcgcgacgauaacgaccugaaaagacuccgggaucugaaucaggcggugaacaaucuggucgagcucaagucuacacaacaaaagagcauccugcgcgugggaacgcuuaccuccgacgaucugcucauucuggcugccgaccuugaaaaacuuaagagcaaaguuaucagaacagagcggccccucucugccggcguguauauggggaaccuguccagccagcagcuggaucagcgcagagcucuccugaauaugauuggaaugucuggcgggaaccagggagcccgggcuggccgcgacggcgucgugagaguuugggaugugaagaaugccgagcuucugaacaaucaguucgggaccaugccuucccucacacuggcgugucuuaccaaacagggacaagucgaccugaacgaugccgugcaggcucucacagaccugggccugaucuacaccgccaaguauccgaauacgagcgaccucgaucggcugacccagucucaucccauccuuaacaugauugacacaaagaaauccagccugaauaucuccggguacaacuuuucucucggagcugccgugaaggcgggcgccugcaugcuggaugggggaaacaugcuugaaaccauuaaagucagcccucaaacaauggacggcauccugaaguccauucucaaaguuaagaaagcucugggcauguucaucagcgauacccccggggagcgcaauccuuaugaaaacauucuguacaagaucugucucucuggagacggcuggcccuauaucgccuccagaacgagcauuacagggcgggcuugggagaauaccgugguggaucuggagucugacggaaagccucagaaagccgauagcaacaauuccucuaagagccuucaguccgccggcuuuacagcugggcugaccuacagccagcucaugacccugaaagacgcgaugcugcaacuugauccgaacgccaagacauggauggacaucgaaggaagacccgaggacccugucgaaauugcucucuaccagcccucuuccggcugcuauauccacuucuuucgcgagccuacggaucugaaacaguucaagcaggacgccaaguacagccauggcauugaugugaccgaccuguuugccacacaacccgggcucaccucugcuguuaucgaugcccugccgcggaauauggugaucacaugucagggauccgacgauauuagaaaacuucuggaaagccagggccgcaaggacaucaaacucauugauaucgcgcuguccaagaccgacucucggaaauaugagaacgcugucugggaucaguacaaggaccugugccacaugcauacgggggugguuguggagaagaaaaagagaggaggcaaagaagagauuacaccucacugugcccuuauggauugcaucauguucgacgccgcugucagcgggggccucaauaccuccgugcugcgcgccguccugccccgggacaugguguuuagaaccucuacaccucgcguugugcucugaggacuaguuauaagacugacuagcccgaugggccucccaacgggcccuccuccccuccuugcaccgagauuaaucaaaggcucuuuucagagccaccaaaaaaaaaaaaaaaaaaaaaaaaaaaaaaaaaaaaaaaaaaaaaaaaaaaaaaaaaaaaaaaaagaauu

SEQ ID NO: 17731 - RNA, 1892 nt, Artificial Sequence
  mRNA product Design i-3 (hSL-A64-N5) comprising derived and/or modified sequence from LASV(LP;Clade I)__AAF86702__NP (opt5)
aggagaaagcuuaccaugagcaacuccaaggagaucaaaucuuuccuguggacccagagccucagacgggaacuguccggcuacugcucuaauauuaagcuccaaguggucaaagacgcccaggcucugcuccacgggcuggauuuuagcgagguuuccaacgugcagcgccuuaugagaaagcagaaacgggacgaugccgaccugaagcgccucagagaucugaaucaagcggugaacaaucuggucgaacucaagucuacacagcagaaaaacgugcugcggguuggaacgcuuagcuccgacgaucugaucacccucgcugccgaccuggagaaacuuaaaagcaaggugauucgcacagaaagaccccugucuuccggcgucuauauggggaaucucagcucucagcaacuggaucagcggcgcgcccugcucuccaugaucggaaugagcggcgggccucagggaaacagaaccggcggcgacggggugguucgggugugggaugucaaaaaugcugagcugcuuaacaaucaguucggaacaaugccgucucugacccucgccugucugacaaagcaaggccagguggaccuuaacgaugcugugcaggcccugaccgaccucgggcugauuuacacggcgaaguaucccaauuccagcgaccuggauaugcucacccaaucccauccuauccugggaauggucgacacaaagaagucuagccuuaacaucuccggcuacaauuuuagccugggggccgcuguuaaagccggagcuugcaugcucgauggcggcaacaugcuggagaccauuaaggugucuccccagacaauggacgggauccuuaaauccauucugaaggugaaacgcagccucggaauguucaucucugauaccccuggcgaaagaaaccccuaugagaauauucuguacaagaucugucugagcggggaaggauggccuuauauugccucccggacgucuaucacaggccgcgcgugggagaacacccucgucgaccuggagagcgauaauaagccgcccaaacuuaacuccgccgggagcaauaagucucugcaggcugccggacucaacgcuggccugacauacucccagcugaugacccuuaaagacugcaugcuccaacuggauccuagcucuaagaccuggaucgacauugaaggcagacccgaggauccuguggaaaucgcccuguuucagcccuccagcggguguuacauucacuucuuucgggagccgacagaccucaaacaguucaagcaggacgccaaguauucccauggaaucgauguuacggaccuguuuucuacccaaccuggccuuacaagcgcugugauugaagcgcugcccagaaauaugguccuuaccugccagggguccgaugacaucaaaaagcugcuggagucucagggacgccgggauaucaaacuuauugacaucagccucuccaaggccgauagcagaaaauucgagaacgcugugugggaccaguacaaggaucugugucacaugcauacaggcguuguggucgaaaagaaaaagcgcgggggcaaagaggaaauuaccccucacugcgcccugcucgacuguaucauguuugaugccgcuacgacaggaucucugaauauuaccacccuucgggccgugcugcccagagacauggucuuccgcacauccacccccaaggugguucucugaggacuaguuauaagacugacuagcccgaugggccucccaacgggcccuccuccccuccuugcaccgagauuaaucaaaggcucuuuucagagccaccaaaaaaaaaaaaaaaaaaaaaaaaaaaaaaaaaaaaaaaaaaaaaaaaaaaaaaaaaaaaaaaaagaauu

SEQ ID NO: 17732 - RNA, 1892 nt, Artificial Sequence
  mRNA product Design i-3 (hSL-A64-N5) comprising derived and/or modified sequence from LASV(803213;Clade II)__AAF86704__NP (opt5)
aggagaaagcuuaccaugagcgccuccaaggaggugaaaucuuuccuguggacccagagccucagacgggaacuguccggcuacugcucuaacaucaaacuucaagucguuaaggacgcucaggcccugcuccacgggcuggauuuuagcgaggugaauaacgugcagcgccuuaugagaaagcagaaacgggacgauggagaccugaagcgccucagagaucugaaucaagcggucaacaaucugguggaacucaaguccacacagcagaaaucuauucugcggguuggcacgcuuaccagcgacgaucugcucacacuggcugccgaccuugagaagcugaaauccaaggugauccgcaccgaaagaccccucagcucuggggucuauaugggaaaccuguccacacagcaacuggagcagcggcgcgcccuccugaauaugauuggcauggugggaggagcucagggcacccagccuggcagagaugggguugugcgggucugggacgugaaaaacccggaucuucugaauaaccaauucggaacaaugcccagccucacccuggccugucuuacgaagcagggccagguggaccugaaugaugcuguccucgcccugaccgaccuggggcucaucuacacagcgaaguauccuaacucuuccgaccuggaucgccuuagccaaucucaucccauucugaauaugguugacaccaaaaaguccagccucaacaucuccggauacaauuuuucucugggcgccgcugugaaagccggggcuugcaugcuugauggaggcaacaugcuggagacaaucaaggugaccccucagacgauggacggcauucucaaaagcauccugaaggucaaaagaucccuggggauguucgugagcgauacacccggagaacggaacccuuaugagaauauucucuacaagaucugucugucuggcgacggguggccguauauugccucccgcaccagcaucguugggagagcgugggaaaacacaaccguggaucuugagucugacggcaagccccagaaagucgggaccgccggaagcaauaagucccugcagucugcuggcuuuccuacaggccucacguacagccaacugaugacccugaaagauuccaugaugcagcuugaccccagcgccaagacauggauugauaucgaggggcggccugaagaccccguggagaucgcucucuaccagccgaugucuggaugcuauauucacuucuuuagagaaccuaccgaccugaaacaguucaagcaagaugccaaguacucccauggcaucgacguugccgaucuguuucccgcucagccugggcucacaagcgcggugauugaggcccugccccgcaacaugguccuuaccugucagggaucugacgauaucaaaaagcugcucgacucccagggccggagagauauuaaacugaucgacaucagccuguccaagguggauucucgcaaauucgaaaaugcugucugggaccaaugcaaggaucuuugucacaugcauacgggggugguuguggagaagaaaaagcggggcggaaaagaggaaauuacaccccacugcgcccucauggacuguaucauguuugaugccgcugucagcggcgggcugaacauuccugugcugagagccguucucccgcgcgacaugguguuccggaccuccucucccaaggucgugcugugaggacuaguuauaagacugacuagcccgaugggccucccaacgggcccuccuccccuccuugcaccgagauuaaucaaaggcucuuuucagagccaccaaaaaaaaaaaaaaaaaaaaaaaaaaaaaaaaaaaaaaaaaaaaaaaaaaaaaaaaaaaaaaaaagaauu

SEQ ID NO: 17733 - RNA, 1895 nt, Artificial Sequence
  mRNA product Design i-3 (hSL-A64-N5) comprising derived and/or modified sequence from LASV(GA391;Clade III)__CAA36646__NP (opt5)
aggagaaagcuuaccaugagcgccuccaaggaggugagaucuuuccuguggacccagagccuccggcgcgaacuguccggcuacugcucuaacaucaaacuucaagucguuaaggacgcucaggcccugcuccacgggcuggauuuuagcgagguguccaaugugcagagacuuaugcggaaacagaagcgcgacgauggagaccugaaaagacuccgggaucugaaccaagcggucaauaaccugguggaacucaagucuacacagcagaaaagcguucugcgcgugggcacgcuuuccagcgacgaucugcucauucuggcugccgaccuugagaaacugaagucuaaagucaccagaacagaacggccccucuccagcgggguguauaugggaaaucugucuucccagcaacuggaucagcgcagagcccuccugaacaugaucggcaugaccgggguuagcggaggcggcaagggggcuucugacggaauugugcgggucugggaugugaaaaaugccgagcuucugaacaaucaguucggcacaaugccuucccucacccuggcuugucuuacaaagcaggggcaaguggaccugaacgaugccguccaggcgcucaccgaccugggacugaucuacacggccaaguauccgaauagcuccgaccucgaucgccugucucagagccaucccauucuuaacaugaucgacaccaaaaaguccagccugaauaucucuggcuacaacuuuucccucggggcugccguuaaagcuggagccugcaugcuggauggcggcaauaugcuugagacaauuaaggugagcccucaaaccauggacgggauccugaaaucuauucucaaggugaaaaagagccugggaauguucgucuccgauacacccggcgaaagaaacccuuaugagaacauccuguacaagauuugucucucuggggacggauggcccuauaucgcgagccggaccuccauugugggccgcgccugggaaaauacgguuguggaucuggagcaggacaacaaaccucagaagaucgggaauggaggcagcaacaaaucucuucaguccgcuggcuuugccgcugggcugacauacagccaacucaugacccugaaggauuucaaaugcuuuaaucugaucccgaacgccaagacauggauggacauugagggaagacccgaagauccugucgagaucgcccuuuaccagcccucuuccggcuguuaugugcacuucuuucgggaaccuaccgaccucaagcaguucaaacaggacgcuaaguacagccaugggauugauguuaccgaccuguuugcggcccaacccggacugacauccgcugugaucgaggcccucccgagaaauauggucauuacgugccagggcucugaagauauccgcaaacugcuugagagccaggggcggagagacaucaagcugauugauaucacccucuccaaagccgacucucgcaaguucgagaacgcugugugggaucaguuuaaggaccugugucacaugcauacaggcgucgugguugaaaagaagaaacggggaggcaaggaggaaauuaccccucacugcgcccugauggauuguaucauguucgacgcggcugugagcgggggacuugaugccaaaguccucagagugguucugccccgcgacaugguguuccggacauccaccccuaaggucgugcugugaggacuaguuauaagacugacuagcccgaugggccucccaacgggcccuccuccccuccuugcaccgagauuaaucaaaggcucuuuucagagccaccaaaaaaaaaaaaaaaaaaaaaaaaaaaaaaaaaaaaaaaaaaaaaaaaaaaaaaaaaaaaaaaaagaauu

SEQ ID NO: 17734 - RNA, 1892 nt, Artificial Sequence
  mRNA product Design i-3 (hSL-A64-N5) comprising derived and/or modified sequence from LASV(AV;Clade V)__CCA30315__NP (opt5)
aggagaaagcuuaccaugagcgccuccaaggaggugaaaucuuuccuguggacccagagccucagacgggaacuguccggcuacugcucuaacaucaaacuucaagucguuaaggacgcucaggcccugcuccacgggcuggauuuuagcgagguguccaaugugcagcgccuuaugagaaagcagcggcgcgacgauucugaccugaaaagacuccgggaucugaaccaagcggucaauaaccugguggaacucaagagcacacagcagaaguccguucugcgcgugggaacgcuuagcucugacgaucugcucacccuggcugccgaccuugagaaacugaaguccaaagucacaagaaccgaacggccccucagcucuggcguguauauggggaaucuguccagccagcaacuggaucagcgcagagcccuccugaaccuuauuggaaugacaaauggcucucaggggucccaggcuggacgggacggcguugugcgcgucugggaugugaagaacgccgagcugcucaauaaccaauucggcaccaugccuagccugacacuugcuugucugaccaaacagggacagguggaccucaaugaugucguucaagcccugacggaccuggggcucaucuacaccgcgaaguauccgaacacauccgaccuggauagacuuacccagucucaucccauucugaauaugaucgacacaaagaaaagcucccucaacauuagcggcuacaauuuuucucugggggccgcugugaaggccggagcuugcaugcuugauggcgggaacaugcuggagaccaucaaaguguccccucagagcauggacggaauccucaagucuauucugaaagucaagcgggcccugggcauguucgugagcgauacgcccggcgaacgcaacccuuaugagaauauccucuacaaaauuugucuguccggggacggauggcccuauaucgcgucuagaacaagcauuguuggccgggccugggaaaacaccguggucgaucuugagacagacgggaagccucagaagaucggauccggcaauagcaacaaaucucugcaauccgcuggguuuagcgccggacucaccuacucucagcugaugacccugaaggaugcuaugcuucagcucgacccgaaugccaaaacauggauggauauugagggcagacccgaagacccuguggagguugcccuguaccagcccaucuccggcugcuauauccacuucuuucgcgaaccuacggaccugaagcaauucaaacaggaugcuaaguacagccaugggauugacaucgcggaucucuuugccgcucagcccggacugaccuccgccgugauugaggcccuuccgcggaacauggucaucacaugucagggcucugaagacauuaagaaacugcucgagagccaagggagaaaggauaucaaacugaucgacauugcucuguccaagaucgauucucgcaaauucgagaaugccgugugggaccaguauaaggaucuuugccacaugcauaccggagucgugguugaaaagaaaaagcggggcgggaaagaggaaauuacaccucacugugcgcucauggacugcaucauguuugaugcugccgugagcggcggacugaacacccugguccucagagccgugcugccccgcgacaugguuuuccggacguccacaccuagagugguccuuugaggacuaguuauaagacugacuagcccgaugggccucccaacgggcccuccuccccuccuugcaccgagauuaaucaaaggcucuuuucagagccaccaaaaaaaaaaaaaaaaaaaaaaaaaaaaaaaaaaaaaaaaaaaaaaaaaaaaaaaaaaaaaaaaagaauu

SEQ ID NO: 17735 - RNA, 1892 nt, Artificial Sequence
  mRNA product Design i-3 (hSL-A64-N5) comprising derived and/or modified sequence from LASV(Togo/2016/7082;Clade VI)__AMR44578__NP (opt5)
aggagaaagcuuaccaugagcaacuccaaggaggugaaaucuuuccuguggacccagagccucagacgggaacuguccggcuacugcucuaauaucaaacuucaagucguuaaagacgcccaggcucugcuccacgggcuggauuuuagcgagguguccaacgugcagcgccuuaugagaaagcagaaacgggacgauggagaccugaagcgccucagagaucugaaucaagccgucaacaaucugguggaacucaagucuguucagcagaaaagcauucugcgggugggcacacuuacguccgacgaucugcucacccuggcggcugaccuugagaagcugaaaagcaaggucacacgcaccgaaagaccccucucuuccgggguguauaugggaaaccugagcucucagcaacuggaucagcggcgcgcccuccuguccaugaucggcaugagcgggggaaaucagaacucucagccuaaaggcgacggcguugugagagucugggaugugaagaaugccgaccuucugaacaaucaauucgggacaaugccgucccucacccuggcuugucuuacaaagcagggacagguggaucugaacgacgccguccaagcucucaccgaccugggccugauuuacacggccaaauaucccaauagcuccgaucucgaccggcugucucagagccauccuauccuuaacaugauugauaccaagaaauccagccugaauaucucuggguacaacuuuucccucggagcggccaucaagacaggcgcuugcaugcuggacgggggaaacaugcuugagaccauuaaaguuacaccccagaccauggauggcauccucaagagcauucugaaagugaagcgcucucugggcauguucaucagcgacacgccuggggagagaaaucccuaugaaaacauucuguacaagaucugucucuccggagauggcuggccuuauauugccucucggacagcuaucaucgggcgcgccugggagaauaccguggucgaccuggaaagcgauuccaaaccgcagaagauuggaagcaacggcucuaauaaaucccuucaaagcgcgggguuugcccccggacugacauacucucagcucaugacccugaaggacuccaugcugcagcuugauccuaacgcuaaaaccuggaucgacauugagggcagacccgaggacccuguggaaguugcccucuuccagcccaucagcggcugcuacauucacuuuuuccgggagccgacagaucugaagcaauuuaagcaggacgcuaaauauucccaugggaucgaugugacggaccuguucgccgcccagccuggacucaccucugcugucaucgaagcgcugcccagaaauauggugcuuacaugucagggcagcgaugacauuaagaaacugcucgauucccaagggcgccgggacaucaagcugauugauguuucucugaacaaaaucgacagcagaaaguuugagaaugccgugugggaucaguacaaggaccuuugccacaugcauaccggagucguggucgaaaagaagaaaaagggcgggaaagaggagauuacaccucacugugcucuccuggauugcaucauguucgacgccgccguguccggcggacugaacgcuaccguucuccgcgccgugcugccccgggacauggucuuuagaacgagcucucccaaggugguucuuugaggacuaguuauaagacugacuagcccgaugggccucccaacgggcccuccuccccuccuugcaccgagauuaaucaaaggcucuuuucagagccaccaaaaaaaaaaaaaaaaaaaaaaaaaaaaaaaaaaaaaaaaaaaaaaaaaaaaaaaaaaaaaaaaagaauu

SEQ ID NO: 17736 - RNA, 1892 nt, Artificial Sequence
  mRNA product Design i-3 (hSL-A64-N5) comprising derived and/or modified sequence from LASV(KAK-428;Clade n.d. (VII))__ANH09741__NP (opt5)
aggagaaagcuuaccaugagcaacuccaaggaggugaaaucuuuccuguggacccagagccucagacgggaacuguccggcuacugcacaaauaucaaacuucaagucguuaaggacgcccaggcucugcuccacgggcuggauuuuucugaggugagcaacgugcagcgccuuaugagaaagcagaaacgggacgauaaugaccugaagcgccucagagaucugaaccaagccgucaauaaccugguggaacucaaguccguucagcagaaaucugugcugaaggucggaacgcuuaauagcgacgaucugcucacccuggcggcugaccuugagaaacugaaguccaaagugguucggacagaacgcccccucagcucuggcguguauauggggaaccuguccagccagcaacuggaucagagacgggcccuccugaauaugauuggaauggccggcgggucucagggaaaccagccuucccgcgacggcgucgugagagugugggaugucaagaaugcugaccuucugaacaaucaauucggcaccaugccgagccucacacuggccugucuuaccaagcaggggcagguugaucugaacgacguggugcucgcucugacagaccugggacucaucuacaccgccaaauaucccaauucuuccgaucuggaccggcuuagccaaaaccauccuguccugaacaugauugaugugaauaaguccucucucaacaucagcggcuacaauuuuucccugggggcggccguuaaagcuggagccugcaugcuugacggcgggaacaugcuggagacgauuaagaucagcccccagaccguggauggaauccucaaaucuauucugaaggucaaacgcgcucugggcauguucguguccgacacaccuggcgagagaaaucccuaugaaaacauccucuacaagguuugucugagcgggaauggauggccuuauauugccucucggaccagcaucgugggccgcgcgugggagaacacagucguggaucuugaauccaauaagaaccagccgaaagucgggaauaacggaucuaauaagaugcugcagagcuccggcuuugccaccgggcucacguacagccaacugaugacacugagagacucuaugcuucagcucgaucccaccgcuaaaacauggauugacaucgagggacggccugaggaucccguggaacuggcccuguuccagccuuccagcggcugcuacauucacuuuuucagagagcccaccgaccucaagcaguuuaaacaagacgcuaaguauucucauggcaucgauguuaacgaccuguucuccgcccagccggggcuuaccagcgccgugcuggaagcucucccucgcaauaugguccugacaugucagggauccgaugacauccggaagcugcuugauucucaggacagaaaagauauuaagcucaucgacauuagccuguccaaagcggaugcccgcaaguuugagaacgacgugugggaucaauucaaagaccugugccacaugcauacgggcaucguuguggaaaagaagaaaaagggagggaaacaggagaugacaccccacugugcucuccuggauugcauuauguuugacgccgccgucucuggcgggcuuaacgugccuacccugcgggcugugcuccccaccgacaugguuuucagaacaaucaccacgaaggucgugcugugaggacuaguuauaagacugacuagcccgaugggccucccaacgggcccuccuccccuccuugcaccgagauuaaucaaaggcucuuuucagagccaccaaaaaaaaaaaaaaaaaaaaaaaaaaaaaaaaaaaaaaaaaaaaaaaaaaaaaaaaaaaaaaaaagaauu

SEQ ID NO: 17737 - RNA, 1892 nt, Artificial Sequence; identical to SEQ ID NO: 17731
  mRNA product Design i-3 (hSL-A64-N5) comprising derived and/or modified sequence from LASV(Pinneo-NIG-1969;Clade I)__AIT17837__NP (opt5)

SEQ ID NO: 17738 - RNA, 1892 nt, Artificial Sequence
  mRNA product Design i-3 (hSL-A64-N5) comprising derived and/or modified sequence from LASV(ISTH0009-NIG-2011;Clade II)__AIT17405__NP (opt5)
aggagaaagcuuaccaugagcguguccaaggaggucaaaucuuuccuguggacccagagccucagacgggaacuguccggcuacugcucuaacaucaaacuucaaguugugaaggacgcccaggcucugcuccacgggcuggauuuuagcgagguguccaauguccagcgccuuaugagaaagcagaaacgggacgauucugaccugaagcgccucagagaucugaaccaagccgugaauaaccugguugaacucaagagcacacagcagaaauccauucugcgggugggaacgcuuaccagcgacgaucugcucacacuggcggcugaccuugagaagcugaaaucuaaggucauccgcaccgaaagaccccucuccagcggcguguauauggggaaucugucuacacagcaacuggagcagcggcgcgcccuccugaacaugauuggaaugguuggcggggcccagggaacccagccuggcagagauggcgugguccgggugugggacgugaaaaauccggaucuucugaacaaucaauucgggacaaugcccucccucacccuggcuugucuuacgaagcagggacaggucgaccugaacgaugccguucucgcucugaccgaccugggccucaucuacacagccaaguauccuaauagcucugaccuggaucgccuuucccaaagccaucccauucugaacaugguggacaucaaaaaguccucucucaauaucagcggguacaacuuuucccugggagcggccgugaaagcuggcgccugcaugcuugaugggggaaauaugcuggagaccauuaaggucacaccucagaccauggacggcauccucaaaagcauucugaaggugaaaagaucucugggcauguucguuuccgauacgcccggggaacggaacccuuaugagaacauccucuacaagauuugucugagcggagacggcuggccguauaucgcuucucgcacaagcauuguggggagagccugggaaaauaccacagucgaucuugaguccgacggaaagccccagaaagugggcucugcggggagcaacaagucccugcagagcgccggauuuccuaccggccucaccuacucucaacugaugacacugaaagauuccaugaugcagcuugaccccagcgcuaagacguggaucgauaucgagggccggccugaagaccccguugagauugcccucuaccagccgaugucugggugcuauauccacuucuuuagagaaccuaccgaccugaaacaguucaagcaagaugcuaaguacucccauggaauugacguggccgaucuguuucccgcccagccuggccucacaagcgcugucaucgaggcgcugccccgcaauauggugcuuaccugucagggguccgacgauauuaaacggcugcucgacucucagggaagacgcgauaucaagcugaucgacauugcccugagcaaagcugauucccggagauucgaaaacgccgucugggaccaaugcaaggaucuuugucacaugcauacaggcgugguuguggagaaaaagaagcgcgggggcaaagaggaaaucacgccccacugcgcccucauggacuguauuauguaugaugcugccgucucuggaggccugaauaucccugugcugcgggcgguucucccgagagacaugguguuucgcaccagcucccccaaggucgugcugugaggacuaguuauaagacugacuagcccgaugggccucccaacgggcccuccuccccuccuugcaccgagauuaaucaaaggcucuuuucagagccaccaaaaaaaaaaaaaaaaaaaaaaaaaaaaaaaaaaaaaaaaaaaaaaaaaaaaaaaaaaaaaaaaagaauu

SEQ ID NO: 17739 - RNA, 1892 nt, Artificial Sequence
  mRNA product Design i-3 (hSL-A64-N5) comprising derived and/or modified sequence from LASV(ISTH2010-NIG-2012;Clade II)__AIT17483__NP (opt5)
aggagaaagcuuaccaugagcgccuccaaggaggugaaaucuuuccuguggacccagagccucagacgggaacuguccggcuacugcucuaacaucaaacuucaagucguuaaggacgcucaggcccugcuccacgggcuggauuuuagcgagguguccaaugugcagcgccuuaugagaaagcagaaacgggacgauucugaccugaagcgccucagagaucugaaccaagcggucaauaaccugguggaacucaagagcacacagcagaaauccauucugcggguuggaacgcuuaccagcgacgaucugcucacacuggcugccgaccuugagaagcugaaaucuaaggugauccgcaccgaaagaccccucuccagcggcgucuauauggggaaucugucuacacagcaacuggagcagcggcgcgcccuccugaaccuuauuggaauggugggcggggcucagggaacccagccuggcagagauggcguugugcgggucugggacgugaaaaauccggaucugcucaacaaucaauucgggacaaugcccucccugacccuugccugucugacgaagcagggacagguggaccucaacgaugcuguccuggcccugaccgaccucggccugaucuacacagcgaaguauccuaauagcucugaccuugaucgccugucccaaagccaucccauucucaacaugguugacaccaaaaaguccucucugaauaucagcggguuuaacuucucccuuggagccgcugugaaagccggcgcuugcaugcuggaugggggaaauaugcucgagacaaucaaggugaccccucagacgauggacggcauucugaaaagcauccugaaggucaaaaagucucucggcauguuuguguccgauacacccggggaaagaaacccuuacgagaacauucuguauaagaucugucuuagcggagacggcuggccguacauugccucucggaccagcaucguugggcgcgcgugggaaaauacaaccguggaucuggaguccgacggaaaaccccacaaggucggcaccgccgggucuaacaaaagccuccaguccgcuggauucccuacaggccugacguauagccagcugaugacccuuaaggauucuaugaugcaacucgaccccuccgccaaaacauggauugauaucgagggcagaccugaagaccccguggagaucgcucuguaccagccgaugagcgggugcuacauucacuuuuuccgggaaccuaccgaccugaagcaguuuaagcaggaugccaaauauucucauggaaucgacguugccgaucucuuccccgcucaaccuggccugacauccgcggugauugaggcccuucccagaaauaugguccugaccugucaggggagcgacgauaucaagcgccuccuggacucccagggacggagagauauuaaacugaucgacaucgcucuuucuaaggccgauagccgccgguuugaaaacgccgugugggaccagugcaaagaucucugucauaugcacacgggcgucgugguugagaagaagaaaagagggggcaaggaggaaauuacaccccacugcgcucugauggacuguaucauguacgaugccgcgguguccggaggccugaauauuccuguccuccgcgcugugcugccgcgggacaugguuuucagaaccucuagccccaaagugguccuuugaggacuaguuauaagacugacuagcccgaugggccucccaacgggcccuccuccccuccuugcaccgagauuaaucaaaggcucuuuucagagccaccaaaaaaaaaaaaaaaaaaaaaaaaaaaaaaaaaaaaaaaaaaaaaaaaaaaaaaaaaaaaaaaaagaauu

SEQ ID NO: 17740 - RNA, 1892 nt, Artificial Sequence
  mRNA product Design i-3 (hSL-A64-N5) comprising derived and/or modified sequence from LASV(Lassa virus/H.sapiens-wt/NGA/2015/ISTH_0543;Clade II)__AVO03640__NP (opt5)
aggagaaagcuuaccaugagcgccuccaaggaggugaaaucuuuccuguggacccagagccucagacgggaacuguccggcuacugcucuaacaucaaacuucaagucguuaaggacgcucaggcccugcuccacgggcuggauuuuagcgagguguccaaugugcagcgccuuaugagaaagcagaaacgggacgauucugaccugaagcgccucagagaucugaaccaagcggucaauaaccugguggaacucaagagcacacagcagaaauccauucugcggguuggaacgcuuaccagcgacgaucugcucacacuggcugccgaccuugagaagcugaaaucuaaggugauccgcaccgaaagaccccucuccagcggcgucuauauggggaaucugucuacacagcaacuggagcagcggcgcgcccuccugaacaugauuggaauggugggcggggcucagggaacccagccuggcagagauggcguugugcgggucugggacgugaaaaauccggaucuucugaacaaucaauucgggacaaugcccucccucacccuggccugucuuacgaagcagggacagguggaccugaacgaugcuguccucgcccugaccgaccugggccucaucuacacagcgaaguauccuaauagcucugaccuggaucgccuuucccaaagccaucccauucugaacaugguugacaccaaaaaguccucucucaauaucagcggguacaacuuuucccugggagccgcugugaaagccggcgcuugcaugcuugaugggggaaauaugcuggagacaaucaaggugaccccucagacgauggacggcauucucaaaagcauccugaaggucaaaaagucucugggcauguucguguccgauacacccggggaaagaaacccuuaugagaacauucucuacaagaucugucugagcggagacggcuggccguauauugccucucggaccagcaucguugggcgcgcgugggaaaauacaaccguggaucuugaguccgacggaaaaccccagaaggucggcucugccgggagcaacaaaucccugcagagcgcuggauuuccuaccggccucacauacucucaacugaugacgcugaaggauuccaugaugcagcuugaccccagcgccaaaaccuggauugauaucgagggcagaccugaagaccccguggagaucgcucucuaccagccgaugucugggugcuauauucacuucuuucgggaaccuacagaccugaagcaguucaagcaagaugccaaauacucccauggaaucgacguugccgaucuguuucccgcucagccuggccucaccagcgcggugauugaggcccugcccagaaauaugguccuuacaugucagggguccgacgauaucaagcgccugcucgacucucagggacggaaagauauuaagcugaucgacaucgcucugagcaaagccgauuccagacgcuucgaaaacgccgugugggaccaaugcaaggaucuuugucacaugcauaccggcgucgugguugagaagaaaaagagagggggcaaagaggaaauuacgccccacugcgcucucauggacuguaucauguaugaugccgcggugucuggaggccugaauauuccuguccugcgggcugugcucccgcgcgacaugguuuuucggacaagcucccccaaggugguccugugaggacuaguuauaagacugacuagcccgaugggccucccaacgggcccuccuccccuccuugcaccgagauuaaucaaaggcucuuuucagagccaccaaaaaaaaaaaaaaaaaaaaaaaaaaaaaaaaaaaaaaaaaaaaaaaaaaaaaaaaaaaaaaaaagaauu

SEQ ID NO: 17741 - RNA, 1892 nt, Artificial Sequence
  mRNA product Design i-3 (hSL-A64-N5) comprising derived and/or modified sequence from LASV(Lassa virus/H.sapiens-wt/NGA/2016/ISTH_0009;Clade II)__AVO03572__NP (opt5)
aggagaaagcuuaccaugagcgccuccaaggaggugaaaucuuuccuguggacccagagccucagacgggaacuguccggcuacugcucuaacaucaaacuucaagucguuaaggacgcucaggcccugcuccacgggcuggauuuuagcgagguguccaaugugcagcgccuuaugagaaagcagaaacgggacgauucugaccugaagcgccucagagaucugaaccaagcggucaauaaccugguggaacucaagagcacacagcagaaauccauucugcggguuggaacgcuuaccagcgacgaucugcucacacuggcugccgaccuugagaagcugaaaucuaaggugauccgcaccgaaagaccccucuccagcggcgucuauauggggaaucugucuacacagcaacuggagcagcggcgcgcccuccugaacaugauuggaauggugggcggggcucagggaacccagccuggcagagauggcguugugcgggucugggacgugaaaaauccggaucuucugaacaaucaauucgggacaaugcccucccucacccuggccugucuuacgaagcagggacagguggaccugaacgaugcuguccucgcccugaccgaccugggccucaucuacacagcgaaguauccuaauagcucugaccuggaucgccuuucccaaagccaucccauucugaacaugguugacaccaaaaaguccucucucaauaucagcggguacaacuuuucccugggagccgcugugaaagccggcgcuugcaugcuugaugggggaaauaugcuggagacaaucaaggugaccccucagacgauggacggcauucucaaaagcauccugaaggucaaaaagucucugggcauguucguguccgauacacccggggaaagaaacccuuaugagaacauucucuacaagaucugucugagcggagacggcuggccguauauugccucucggaccagcaucguugggcgcgcgugggaaaauacaaccguggaucuugaguccgacggaaaaccccagaaggucggcucugccgggagcaacaaaucccugcagagcgcuggauuuccuaccggccucacauacucucaacugaugacgcugaaggauuccaugaugcagcuugaccccagcgccaaaaccuggauugauaucgagggcagaccugaagaccccguggagaucgcucucuaccagccgaugucugggugcuauauucacuucuuucgggaaccuacagaccugaagcaguucaagcaagaugccaaauacucccauggaaucgacguugccgaucuguuucccgcucagccuggccucaccagcgcggugauugaggcccugcccagaaauaugguccuuacaugucagggguccgacgauaucaagcgccugcucgacucucagggacggagagauauuaaacugaucgacaucgcucugagcaaggccgauucccgccgguucgaaaacgccgugugggaccaaugcaaagaucuuugucacaugcauaccggcgucgugguugagaagaagaaaagagggggcaaggaggaaauuacgccccacugcgcucucauggacuguaucauguaugaugccgcggugucuggaggccugaauauuccuguccugcgcgcugugcucccgcgggacaugguuuuuagaacaagcucccccaaagugguccugugaggacuaguuauaagacugacuagcccgaugggccucccaacgggcccuccuccccuccuugcaccgagauuaaucaaaggcucuuuucagagccaccaaaaaaaaaaaaaaaaaaaaaaaaaaaaaaaaaaaaaaaaaaaaaaaaaaaaaaaaaaaaaaaaagaauu

SEQ ID NO: 17742 - RNA, 1892 nt, Artificial Sequence
  mRNA product Design i-3 (hSL-A64-N5) comprising derived and/or modified sequence from LASV(Lassa virus/H.sapiens-wt/NGA/2016/ISTH_0017;Clade II)__AVO03568__NP (opt5)
aggagaaagcuuaccaugagcgccuccaaggaggugaaaucuuuccuguggacccagagccucagacgggaacuguccggcuacugcucuagcaucaaacuucaagucguuaaggacgcucaggcccugcuccacgggcuggauuuuuccgaggugucuaacgugcagcgccuuaugagaaagcagaaacgggacgauagcgaccugaagcgccucagagaucugaaucaagcggucaacaaucugguggaacucaaguccacacagcagaaaagcauucugcggguuggaacgcuuaccucugacgaucugcucacacuggcugccgaccuugagaagcugaaauccaaggugauccgcaccgaaagaccccucagcucuggcgucuauauggggaaccuguccacacagcaacuggagcagcggcgcgcccuccugaauaugauuggaauggcuggcggggcccagggaacccagccuggcagagauggcgugguucgggugugggacgucaaaaacccggaucuucugaauaaccaauucgggacaaugcccagccucacccuggcuugucuuacgaagcagggacagguggaccugaaugaugccgugcucgcgcugaccgaccugggccucaucuacacagccaaguauccuaacucuuccgaccuggaucgccuuagccaaucccaucccauucugaauauggucgacaccaaaaagucuagccucaacaucuccggguacaauuuuagccugggagcugccguuaaagcuggcgccugcaugcuugaugggggaaacaugcuggagacaaucaaggugaccccucagacgauggacggcauucucaaaucuauccugaaggugaaaagaucccugggcauguucgucagcgaugcgcccggggaacggaauccuuaugagaacauucucuacaagaucugucugucuggagacggcuggccguauauugccagccgcacauccaucguggggagagcuugggaaaacaccacaguugaucuugagucugacggaaagccccagaaagugggcgccaccgggagcaauaagucccugcagagcgcuggauuuccuaccggccucacauacucucaacugaugacgcugaaagauuccaugaugcagcuugaccccagcgccaagaccuggauugauaucgagggccggccugaagaccccgucgagguggcccucuaccagccgguuucugggugcuauauccacuucuuuagagaaccuacagaccugaaacaguucaagcaagaugcuaaguacucccauggaauugacguggcggaucuguuucccgcccagccuggccucaccagcgcugucaucgaggcccugccccgcaacauggugcuuacaugucagggguccgacgauauuaaaaagcugcucgacucucagggacggaaagauaucaagcugauugacaucgcccugagcaaagcugauuccagacgcuucgaaaaugccgucugggaccaaugcaaggaucuuugucacaugcauaccggcgugguuguggagaagaaaaagagagggggcaaagaggaaaucacgccccacugcgcgcucauggacuguauuauguaugaugcugccgucucuggaggccugaacaucccugugcugcgggccguucucccgcgcgacaugguguuucggacaagcucccccaaggucgugcugugaggacuaguuauaagacugacuagcccgaugggccucccaacgggcccuccuccccuccuugcaccgagauuaaucaaaggcucuuuucagagccaccaaaaaaaaaaaaaaaaaaaaaaaaaaaaaaaaaaaaaaaaaaaaaaaaaaaaaaaaaaaaaaaaagaauu

SEQ ID NO: 17743 - RNA, 1892 nt, Artificial Sequence
  mRNA product Design i-3 (hSL-A64-N5) comprising derived and/or modified sequence from LASV(Lassa virus/H.sapiens-wt/NGA/2018/ISTH_0959;Clade II)__AVV65100__NP (opt5)
aggagaaagcuuaccaugagcgccuccaaggaggugaaaucuuuccuguggacccagagccucagacgggaacuguccggcuacugcucuaacaucaaacuucaagucguuaaggacgcucaggcccugcuccacgggcuggauuuuagcgagguguccaaugugcagcgccuuaugagaaagcagaaacgggacgauucugaccugaagcgccucagagaucugaaccaagcggucaauaaccugguggaacucaagagcacccagcagaaauccauucugcggguuggaacgcuuaccagcgacgaucugcucacacuggcugccgaccuugagaagcugaaaucuaaggugauccgcaccgaaagaccccucuccagcggcgucuauauggggaaucugucuacacagcaacuggagcagcggcgcgcccuccugaaccuuauuggaauggugggcggggcucagggaacccagccuggcagagauggcguugugcgggucugggacgugaaaaauccggaucugcucaacaaucaauucgggacaaugcccucccugacccuugccugucugacgaagcagggacagguggaccucaacgaugucguucuggcucugaccgaccucggccugaucuacacagccaaguauccuaauagcucugaccuugaucgccugucccaaagccaucccauucucaacaugguggacaccaaaaaguccucucugaauaucagcggguuuaacuucucccuuggagcggccgugaaagcuggcgccugcaugcuggaugggggaaauaugcucgagacaaucaaggucaccccucagacgauggacggcauucugaaaagcauccugaaggugaaaaagucucucggcauguuuguuuccgauacacccggggaaagaaacccuuacgagaacauucuguauaagaucugucuuagcggagacggcuggccguacauugcuucucggaccagcaucguggggcgcgccugggaaaauacaaccgucgaucuggaguccgacggaaaaccccacaaggugggcaccgcggggucuaacaaaagccuccaguccgccggauucccuacaggccugacguauagccagcugaugacccuuaaggauucuaugaugcaacucgaccccuccgcuaaaacauggauugauaucgagggcagaccugaagaccccguugagaucgcccuguaccagccgaugagcgggugcuacauucacuuuuuccgggaaccuaccgaccugaagcaguuuaagcaggaugcuaaauauucucauggaaucgacguggccgaucucuuccccgcccaaccuggccugacauccgcugucauugaggcgcuucccagaaauauggugcugaccugucaggggagcgacgauaucaagcgccuccuggacucccagggacggaaagauauuaagcugaucgacaucgcccuuucuaaaacggauagcagacgcuuugaaaacgcugucugggaccagugcaaggaucucugucauaugcacacaggcgugguuguggagaagaaaaagagagggggcaaagaggaaauuacaccccacugcgcccugauggacuguaucauguacgaugccgcugucuccggaggccugaauauuccugugcuccgggccguucugccgcgcgacaugguguuccggaccucuagccccaaggucgugcuuugaggacuaguuauaagacugacuagcccgaugggccucccaacgggcccuccuccccuccuugcaccgagauuaaucaaaggcucuuuucagagccaccaaaaaaaaaaaaaaaaaaaaaaaaaaaaaaaaaaaaaaaaaaaaaaaaaaaaaaaaaaaaaaaaagaauu

SEQ ID NO: 17744 - RNA, 1892 nt, Artificial Sequence
  mRNA product Design i-3 (hSL-A64-N5) comprising derived and/or modified sequence from LASV(LASV003-NIG-2008;Clade II)__AIT17581__NP (opt5)
aggagaaagcuuaccaugagcgccuccaaggaggugaaaucuuuccuguggacccagagccucagacgggaacuguccggcuacugcucuagcaucaaacuucaagucguuaaggacgcucaggcccugcuccacgggcuggauuuuuccgaggugucuaacgugcagcgccuuaugagaaagcagaaacgggacgauagcgaccugaagcgccucagagaucugaaucaagcggucaacaaucugguggaacucaaguccacccagcagaaaagcguucugcgggugggaacgcuuaccucugacgaucugcucacacuggcugccgaccuugagaagcugaaauccaaggucauucgcaccgaaagaccccucagcucuggcguguauauggggaaccuguccgcccagcaacuggagcagcggcgcacacuccugaauaugaucggaaugguuggcggggcucagggaacccagccuggcagagauggcgugguccgggugugggacgugaaaaacccggaucuucugaauaaccaauucgggacaaugcccagccucacccuggccugucuuacgaagcagggacaggucgaccugaaugauguugugcucgcucugaccgaccugggccucauuuacacagccaaguauccuaacucuuccgaccuggaucgccuuagccaaucccaucccauccugucuaugguggacaccaaaaagagcucccucaauauuagcggguacaacuuuucucugggagcggccgucaaagcuggcgccugcaugcuugaugggggaaauaugcuggagacaaucaaggugaccccucagacgauggacggcauccucaaauccauucugaagguuaaaaagagccugggcauguucgugucugauacacccggggaaagaaacccuuaugagaauauccucuacaagauuugucugagcggagacggcuggccguauaucgcuucccggaccucuauugucgggcgcgccugggaaaacacaaccguggaucuugagagcgacggaaaaccccagaagguuggcaccgcgggguccaacaaaagccugcagucugccggauuuccuacaggccucacguacucccaacugaugacccugaaggauagcaugaugcagcuugaccccucugcuaaaacauggaucgauauugagggcagaccugaagaccccguggagaucgcccucuaccagccgauguccgggugcuauauccacuucuuucgggaaccuaccgaccugaagcaguucaagcaagaugcuaaauacagccauggaauugacgucacagaucuguuucccgcccagccuggccucaccuccgccgugaucgaggcucugcccagaaauaugguccuuacgugucaggggucugacgauauuaagcgccugcucgacagccagggacggagagauaucaaacugauugacaucgcgcuguccaaggccgauucucgccgguucgaaaacgcugugugggaccaaugcaaagaucuuugucacaugcauacaggcguuguggucgagaagaagaaaagagggggcaaggaggaaaucacaccccacugcgcccucauggacuguauuauguaugaugccgcugugagcggaggccugaauaucccuguucugcgcgccgugcucccgcgggacauggucuuuagaaccuccagccccaaaguggugcugugaggacuaguuauaagacugacuagcccgaugggccucccaacgggcccuccuccccuccuugcaccgagauuaaucaaaggcucuuuucagagccaccaaaaaaaaaaaaaaaaaaaaaaaaaaaaaaaaaaaaaaaaaaaaaaaaaaaaaaaaaaaaaaaaagaauu

SEQ ID NO: 17745 - RNA, 1892 nt, Artificial Sequence
  mRNA product Design i-3 (hSL-A64-N5) comprising derived and/or modified sequence from LASV(LASV035-NIG-2009;Clade II)__AIT17589__NP (opt5)
aggagaaagcuuaccaugagcgccuccaaggaggugaaaucuuuccuguggacccagagccucagacgggaacuguccggcuacugcucuagcaucaaacuucaagucguuaaagacgcucaggcccugcuccacgggcuggauuuuuccgaggugucuaacgugcagcgccuuaugagaaagcagaaacgggacgauagcgaccugaagcgccucagagaucugaaucaagcggucaacaaucugguggaacucaaguccacacagcagaaaagcauucugcggguuggaacgcuuaccucugacgaucugcucacacuggcugccgaccuugagaagcugaaauccaaggugauccgcaccgaaagaccccucagcucuggcgucuauauggggaaccuguccgcccagcaacuggagcagcggcgcgcucuccugaauaugauuggaauggugggcggggcccagggaacacagccuggcagagauggcguugugcgggucugggacgugaaaaacccggaucuucugaauaaccaauucgggaccaugcccagccucacacuggcuugucuuaccaagcagggacagguggaccugaaugaugccguccucgcgcugacggaccugggccucaucuacaccgccaaguauccuaacucuuccgaccuggaucgccuuagccaaucccaucccauucugaauaugguugacacaaagaagucuagccucaacaucuccggguacaauuuuagccugggagcugccgugaaagcuggcgccugcaugcuugaugggggaaacaugcuggagaccaucaaggugacaccucagaccauggacggcauucucaaaucuauccugaaggucaaaagaucccugggcauguucgugagcgauacgcccggggaacggaauccuuaugagaacauucucuacaagaucugucugucuggagacggcuggccguauauugcgagccgcacauccaucguugggagagccugggaaaacaccacaguggaucuugagucugacggaaagccccagaaagucggcaccaccgggagcaauaagucccugcagagcgcuggauuuccuacaggccucacguacucucaacugaugacccugaaagauuccaugaugcagcuugaccccagcgccaagacauggauugauaucgagggccggccugaagaccccguggagaucgcucucuaccagccgaugucugggugcuauauucacuucuuuagagaaccuaccgaccugaaacaguucaagcaagaugccaaguacucccauggaaucgacguugccgaucuguuucccgcucagccuggccucacaagcgcggugauugaggcccugccccgcaacaugguccuuaccugucagggguccgacgauaucaaaaagcugcucgacucucagggacggagagauauuaaacugaucgacaucgcucugagcaaggccgauucccgcaaauucgaaaaugccgugugggaccaaugcaaggaucuuugucacaugcauacgggcgucgugguugagaagaaaaagagagggggcaaagaggaaauuacaccccacugcgcucucauggacuguaucauguaugaugccgcggugucuggaggccugaacauuccuguccugcgggcugugcucccgcgcgacaugguuuuucggaccagcucccccaaggugguccugugaggacuaguuauaagacugacuagcccgaugggccucccaacgggcccuccuccccuccuugcaccgagauuaaucaaaggcucuuuucagagccaccaaaaaaaaaaaaaaaaaaaaaaaaaaaaaaaaaaaaaaaaaaaaaaaaaaaaaaaaaaaaaaaaagaauu

SEQ ID NO: 17746 - RNA, 1892 nt, Artificial Sequence
  mRNA product Design i-3 (hSL-A64-N5) comprising derived and/or modified sequence from LASV(LASV1000-NIG-2009;Clade II)__AIT17783__NP (opt5)
aggagaaagcuuaccaugagcgccuccaaggaggugaaaucuuuccuguggacccagagccucagacgggaacuguccggcuacugcucuaacaucaaacuucaagucguuaaggacgcucaggcccugcuccacgggcuggauuuuagcgagguguccaaugugcagcgccuuaugagaaagcagaaacgggacgauucugaccugaagcgccucagagaucugaaccaagcggucaauaaccugguggaacucaagagcacacagcagaaauccauucugcggguuggaacgcuuaccagcgacgaucugcucacacuggcugccgaccuugagaagcugaaaucuaaggugauccgcaccgaaagaccccucuccagcggcgucuauauggggaaucugucuacacagcaacuggagcagcggcgcgcccuccugaacaugauuggaauggugggcggggcucagggaacccagccuggcagagauggcguugugcgggucugggacgugaaaaauccggaucuucugaacaaucaauucgggacaaugcccucccucacccuggccugucuuacgaagcagggacagguggaccugaacgaugucguucucgcucugaccgaccugggccucaucuacacagccaaguauccuaauagcucugaccuggaucgccuuucccaaagccaucccauucugaacaugguggacaccaaaaaguccucucucaauaucagcggguacaacuuuucccugggagcggccgugaaagcuggcgccugcaugcuugaugggggaaauaugcuggagacaaucaaggucaccccucagacgauggacggcauucucaaaagcauccugaaggugaaaaagucucugggcauguucguuuccgauacacccggggaaagaaacccuuaugagaacauucucuacaagaucugucugagcggagacggcuggccguauauugcuucucggaccagcaucguggggcgcgccugggaaaauacaaccgucgaucuugaguccgacggaaaaccccagaaggugggcaccgcggggucuaacaaaagccugcaguccgccggauuuccuacaggccucacguacagccaacugaugacccugaaggauucuaugaugcagcuugaccccuccgcuaaaacauggauugauaucgagggcagaccugaagaccccguugagaucgcccucuaccagccggugagcgggugcuauauucacuucuuucgggaaccuaccgaccugaagcaguucaagcaagaugcuaaauacucucauggaaucgacgucgccgaucuguuucccgcccagccuggccucacauccgcugugauugaggcgcugcccagaaauaugguccuuaccugucaggggagcgacgauaucaagcgccugcucgacucccagggacggagagauauuaaacugaucgacaucgcccugucuaaggcugauagccgccgguucgaaaacgccgugugggaccaaugcaaagaucuuugucacaugcauacgggcguuguggucgagaagaagaaaagagggggcaaggaggaaauuacaccccacugcgcccucauggacuguaucauguaugaugcugccguguccggaggccugaauauuccuguucugcgcgcggugcucccgcgggacauggucuuuagaaccucuagccccaaaguggugcugugaggacuaguuauaagacugacuagcccgaugggccucccaacgggcccuccuccccuccuugcaccgagauuaaucaaaggcucuuuucagagccaccaaaaaaaaaaaaaaaaaaaaaaaaaaaaaaaaaaaaaaaaaaaaaaaaaaaaaaaaaaaaaaaaagaauu

SEQ ID NO: 17747 - RNA, 1892 nt, Artificial Sequence
  mRNA product Design i-3 (hSL-A64-N5) comprising derived and/or modified sequence from LASV(LASV221-NIG-2010;Clade II)__AIT17625__NP (opt5)
aggagaaagcuuaccaugagcgccuccaaggaggugaaaucuuuccuguggacccagagccucagacgggaacuguccggcuacugcucuagcaucaaacuucaagucguuaaggacgcucaggcccugcuccacgggcuggauuuuuccgaggugucuaacgugcagcgccuuaugagaaagcagcggcgcgacgauagcgaccugaaaagacuccgggaucugaaucaagcggucaacaaucugguggaacucaaguccacacagcaaaagagcauucugcgcguuggaacgcuuaccucugacgaucugcucacacuggcugccgaccuugagaaacugaaguccaaagugaucagaaccgaacggccccucagcucuggcgucuauauggggaaccuguccacacagcagcuggagcagcgcagagcccuccugaauaugauuggaauggugggcggggcucagggaacccagccuggccgggauggcguugugcgcgucugggacgugaagaacccggaucuucugaauaaccaauucgggacaaugcccagccucacccuggccugucuuacgaaacagggacagguggaccugaaugaugcuguccucgcccugaccgaccugggccucaucuacacagcgaaguauccuaacucuuccgaccuggauagacuuagccaaucccaucccauucugaauaugguugacaccaagaaaucuagccucaacaucuccggguacaauuuuagccugggagccgcugugaaggccggcgcuugcaugcuugaugggggaaacaugcuggagacaaucaaagugaccccucagacggucgacggcauucucaagucuauccugaaagugaagcggucccugggcauguucguuagcgauacacccggggaacgcaauccuuaugagaacauucucuacaaaaucugucugucuggagacggcuggccguauauugccagcagaaccuccaucguggggcgggcgugggaaaacacaaccgucgaucuugagucugacggaaagccccagaaggugggcaccgccgggagcaauaaaucccugcagagcgcuggauuuccuacaggccucacguacucucaacugaugacccugaaggauuccaugaugcagcuugaccccagcgccaaaacauggauugauaucgagggcagaccugaagaccccguugagaucgcucucuaccagccgaugucugggugcuauauucacuucuuucgcgaaccuaccgaccugaagcaguucaaacaagaugccaaguacucccauggaaucgacguggccgaucuguuucccgcucagccuggccucacaagcgcggucauugaggcccugccccggaacauggugcuuaccugucagggguccgacgauaucaagagacugcucgacucucagggacgccgggauauuaaacugaucgacaucgcucugagcaaggccgauuccagaaaauucgaaaaugccgucugggaccaaugcaaggaucuuugucacaugcauacgggcgugguuguggagaaaaagaagcgcgggggcaaagaggaaauuacaccccacugcgcucucauggacuguaucauguaugaugccgcggucucuggaggccugaacauuccugugcugcgggcuguucucccgagagacaugguguuucgcaccagcucccccaaggucgugcugugaggacuaguuauaagacugacuagcccgaugggccucccaacgggcccuccuccccuccuugcaccgagauuaaucaaaggcucuuuucagagccaccaaaaaaaaaaaaaaaaaaaaaaaaaaaaaaaaaaaaaaaaaaaaaaaaaaaaaaaaaaaaaaaaagaauu

SEQ ID NO: 17748 - RNA, 1892 nt, Artificial Sequence
  mRNA product Design i-3 (hSL-A64-N5) comprising derived and/or modified sequence from LASV(LASV237-NIG-2010;Clade II)__AIT17639__NP (opt5)
aggagaaagcuuaccaugagcgccuccaaggaggugaaaucuuuccuguggacccagagccucagacgggaacuguccggcuacugcucuaacaucaaacuucaagucguuaaggacgcucaggcccugcuccacgggcuggauuuuagcgagguguccaaugugcagcgccuuaugagaaagcagaaacgggacgauucugaccugaagcgccucagagaucugaaccaagcggucaauaaccugguggaacucaagagcacacagcagaaauccauucugcggguuggaacgcuuaccagcgacgaucugcucacacuggcugccgaccuugagaagcugaaaucuaaggugauccgcaccgaaagaccccucuccagcggcgucuauauggggaaucugucuacacagcaacuggagcagcggcgcgcccuccugaacaugauuggaauggugggcggggcucagggaacccagccuggcagagauggcguugugcgggucugggacgugaaaaauccggaucuucugaacaaucaauucgggacaaugcccucccucacccuggccugucuuacgaagcagggacagguggaccugaacgaugcuguccucgcccugaccgaccugggccucaucuacacagcgaaguauccuaauagcucugaccuggaucgccuuucccaaagccaucccauucugaacaugguugacaucaaaaaguccucucucaauaucagcggguacaacuuuucccugggagccgcugugaaagccggcgcuugcaugcuugaugggggaaauaugcuggagaccauuaaggugacaccucagaccauggacggcauccucaaaagcauucugaaggucaaaagaucucugggcauguucguguccgauacgcccggggaacggaacccuuaugagaacauccucuacaagauuugucugagcggagacggcuggccguauaucgccucucgcacaagcauuguugggagagcgugggaaaauaccacaguggaucuugaguccgacggaaagccccagaaagucggcucugccgggagcaacaagucccugcagagcgcuggauuuccuaccggccucaccuacucucaacugaugacacugaaagauuccaugaugcagcuugaccccagcgccaagacguggaucgauaucgagggccggccugaagaccccguggagauugcucucuaccagccgaugucugggugcuauauccacuucuuuagagaaccuaccgaccugaaacaguucaagcaagaugccaaguacucccauggaauugacguugccgaucuguuucccgcucagccuggccucacaagcgcggugaucgaggcccugccccgcaauaugguccuuaccugucagggguccgacgauauuaaacggcugcucgacucucagggaagacgcgauaucaagcugaucgacauugcucugagcaaagccgauucccggagauucgaaaacgccgugugggaccaaugcaaggaucuuugucacaugcauacaggcgucgugguugagaaaaagaagcgcgggggcaaagaggaaaucacgccccacugcgcucucauggacuguauuauguaugaugccgcggugucuggaggccugaauaucccuguccugcgggcugugcucccgagagacaugguuuuucgcaccagcucccccaaggugguccugugaggacuaguuauaagacugacuagcccgaugggccucccaacgggcccuccuccccuccuugcaccgagauuaaucaaaggcucuuuucagagccaccaaaaaaaaaaaaaaaaaaaaaaaaaaaaaaaaaaaaaaaaaaaaaaaaaaaaaaaaaaaaaaaaagaauu

SEQ ID NO: 17749 - RNA, 1892 nt, Artificial Sequence
  mRNA product Design i-3 (hSL-A64-N5) comprising derived and/or modified sequence from LASV(LASV253-NIG-2011;Clade II)__AIT17671__NP (opt5)
aggagaaagcuuaccaugagcgccuccaaggaggugaaaucuuuccuguggacccagagccucagacgggaacuguccggcuacugcucuagcaucaaacuucaagucguuaaggacgcucaggcccugcuccacgggcuggauuuuuccgaggugucuaacgugcagcgccuuaugagaaagcagaaacgggacgauagcgaccugaagcgccucagagaucugaaucaagcggucaacaaucugguggaacucaaguccacccagcagaaaagcguucugcgggugggaacgcuuaccucugacgaucugcucacacuggcugccgaccuugagaagcugaaauccaaggucauucgcaccgaaagaccccucagcucuggcguguauauggggaaccuguccacacagcaacuggagcagcggcgcgcccuccugaauaugaucggaaugguuggcggggcucagggaacccagccuggcagagauggcgugguccgggugugggacgugaaaaacccggaucuucugaauaaccaauucgggacaaugcccagccucacccuggccugucuuacgaagcagggacaggucgaccugaaugauguugugcucgcucugaccgaccugggccucauuuacacagccaaguauccuaacucuuccgaccuggaucgccuuagccaaucccaucccauccugaauaugguggacaccaaaaagucuagccucaacauuuccggguacaauuuuagccugggagcggccgucaaagcuggcgccugcaugcuugaugggggaaacaugcuggagacaaucaaggugaccccucagacgauggacggcauccucaaaucuauucugaagguuaaaaagucccugggcauguucgugagcgauacacccggggaaagaaauccuuaugagaacauccucuacaagauuugucugucuggagacggcuggccguauaucgcuagccggaccuccauugucgggcgcgccugggaaaacacaaccguggaucuugagucugacggaaaaccccagaagguuggcaccgcggggagcaauaaaucccugcagagcgccggauuuccuacaggccucacguacucucaacugaugacccugaaggauuccaugaugcagcuugaccccagcgcuaaaacauggaucgauauugagggcagaccugaagaccccguggagaucgcccucuaccagccgaugucugggugcuauauccacuucuuucgggaaccuaccgaccugaagcaguucaagcaagaugcuaaauacucccauggaauugacgucacagaucuguuucccgcccagccuggccucaccagcgccgugaucgaggcucugcccagaaacaugguccuuacgugucagggguccgacgauauuaagcgccugcucgacucucagggacggagagauaucaaacugauugacaucgcgcugagcaaggccgauucccgccgguucgaaaaugcugugugggaccaaugcaaagaucuuugucacaugcauacaggcguuguggucgagaagaagaaaagagggggcaaggaggaaaucacaccccacugcgcccucauggacuguauuauguaugaugccgcugugucuggaggccugaacaucccuguucugcgcgccgugcucccgcgggacauggucuuuagaaccagcucccccaaaguggugcugugaggacuaguuauaagacugacuagcccgaugggccucccaacgggcccuccuccccuccuugcaccgagauuaaucaaaggcucuuuucagagccaccaaaaaaaaaaaaaaaaaaaaaaaaaaaaaaaaaaaaaaaaaaaaaaaaaaaaaaaaaaaaaaaaagaauu

SEQ ID NO: 17750 - RNA, 1892 nt, Artificial Sequence
  mRNA product Design i-3 (hSL-A64-N5) comprising derived and/or modified sequence from LASV(LASV254-NIG-2011;Clade II)__AIT17675__NP (opt5)
aggagaaagcuuaccaugagcgccuccaaggaggugaaaucuuuccuguggacccagagccucagacgggaacuguccggcuacugcucuagcaucaaacuucaagucguuaaggacgcucaggcccugcuccacgggcuggauuuuuccgaggugucuaacgugcagcgccuuaugagaaagcagaaacgggacgauagcgaccugaagcgccucagagaucugaaucaagcggucaacaaucugguggaacucaaguccacacagcagaaaagcguucugcgggugggaacgcuuaccucugacgaucugcucacacuggcugccgaccuugagaagcugaaauccaaggucauucgcaccgaaagaccccucagcucuggcguguauauggggaaccuguccacacagcaacuggagcagcggcgcgcccuccugaauaugaucggaaugguuggcggggcucagggaacccagccuggcagagauggcgugguccgggugugggacgugaaaaacccggaucuucugaauaaccaauucgggacaaugcccagccucacccuggccugucuuacgaagcagggacaggucgaccugaaugaugcuguucucgcccugaccgaccugggccucauuuacacagcgaaguauccuaacucuuccgaccuggaucgccuuagccaaucccaucccauccugaauaugguggacaccaaaaagucuagccucaacauuuccggguacaauuuuagccugggagccgcugugaaagccggcgcuugcaugcuugaugggggaaacaugcuggagacaaucaaggucaccccucagacgauggacggcauccucaaaucuauucugaaggugaaaaagucccugggcauguucguuagcgauacacccggggaaagaaauccuuaugagaacauccucuacaagauuugucugucuggagacggcuggccguauaucgccagccggaccuccauuguggggcgcgcgugggaaaacacaaucgucgaucuugagucugacggaaaaccccagaaggugggcaccgccgggagcaauaaaucccugcagagcgcuggauuuccuaccggccucacauacucucaacugaugacgcugaaggauuccaugaugcagcuugaccccagcgccaaaaccuggauugauaucgagggcagaccugaagaccccguugagaucgcucucuaccagccgaugucugggugcuauauucacuucuuucgggaaccuacagaccugaagcaguucaagcaagaugccaaauacucccauggaaucgacguggccgaucuguuucccgcucagccuggccucaccagcgcggucauugaggcccugcccagaaacauggugcuuacaugucagggguccgacgauaucaagcgccugcucgacucucagggacggagagauauuaaacugaucgacaucgcucugagcaaggccgauucccgccgguucgaaaaugccgucugggaccaaugcaaagaucuuugucacaugcauaccggcgugguuguggagaagaagaaaagagggggcaaggaggaaauuacgccccacugcgcucucauggacuguaucauguaugaugccgcggucucuggaggccugaacauuccugugcugcgcgcuguucucccgcgggacaugguguuuagaacaagcucccccaaagucgugcugugaggacuaguuauaagacugacuagcccgaugggccucccaacgggcccuccuccccuccuugcaccgagauuaaucaaaggcucuuuucagagccaccaaaaaaaaaaaaaaaaaaaaaaaaaaaaaaaaaaaaaaaaaaaaaaaaaaaaaaaaaaaaaaaaagaauu

SEQ ID NO: 17751 - RNA, 1892 nt, Artificial Sequence
  mRNA product Design i-3 (hSL-A64-N5) comprising derived and/or modified sequence from LASV(Nig08-04;Clade II)__ADU56611__NP (opt5)
aggagaaagcuuaccaugagcgccuccaaggaggugaaaucuuuccuguggacccagagccucagacgggaacuguccggcuacugcucuaacaucaaacuucaagucguuaaggacgcucaggcccugcuccacgggcuggauuuuagcgagguguccaaugugcagcgccuuaugagaaagcagaaacgggacgauggagaccugaagcgccucagagaucugaaccaagcggucaauaaccugguggaacucaagucuacccagcagaaaagcguucugcgggugggcacgcuuaccuccgacgaucugcucacacuggcugccgaccuugagaagcugaaaagcaaggucauucgcaccgaaagaccccucucuuccgggguguauaugggaaaucugagcacacagcaacuggagcagcggaaagcccuccugucuaugaucggcaugguugggggagcucagggcacccagccuggccgcgaugggguggucagagugugggacgugaagaacccggaucuucugaauaaccaauucggaacaaugcccucccucacccuggccugucuuacgaagcagggccaggucgaccugaaugaugcuguucucgcccugaccgaccuggggcucauuuacacagcgaaauauccuaacagcucugaccuggaucggcuuucccaaagccaucccauccugaauaugguggacaccaagaaauccucucucaacauuagcggauacaauuuuucccugggcgccgcugugaaggccggggcuugcaugcuugauggaggcaacaugcuggagacaaucaaagucaccccucagacgauggacggcauccucaagagcauucugaaagugaagcgcucucuggggauguucguuuccgauacacccggagaaagaaauccuuaugagaacauccucuacaagauuugucugagcggcgacggguggccguauaucgccucucggaccagcauugugggacgcgcgugggaaaacacaaccgucgaucuugaguccgacggcaaaccccagaagguggggaccgccggaucuaauaaaagccugcaguccgcuggcuuuccuacaggccucacguacagccaacugaugacccugaaggauucuaugaugcagcuugaccccuccgccaaaacauggaucgauauugaggggagaccugaagaccccguugagaucgcucucuaccagccgaugagcggaugcuauauccacuucuuucgggaaccuaccgaccugaagcaguucaagcaagaugccaaauacucucauggcauugacgugacagaucuguuuuccgcccagcccgggcucaccagcgcugucaucgaggcgcugccuagaaacauggugcuuacgugucagggauccgacgauauuaagaaacugcucgacucucagggccgccgggauaucaagcugauugacaucagccugaauaaagccgauuccagacgcuucgaaaacgcugucugggaccaaugcaaggaucuuugucacaugcauacaggggugguuguggagaagaaaaagcggggcggaaaagaggaaaucacaccccacugcgcccucauggacuguauuauguuugaugccgcugucucuggcgggcugaauauccccauucugagagccgugcucccucgcgacaugguuuuccggaccagcuccccgaaggugguccugugaggacuaguuauaagacugacuagcccgaugggccucccaacgggcccuccuccccuccuugcaccgagauuaaucaaaggcucuuuucagagccaccaaaaaaaaaaaaaaaaaaaaaaaaaaaaaaaaaaaaaaaaaaaaaaaaaaaaaaaaaaaaaaaaagaauu

SEQ ID NO: 17752 - RNA, 1895 nt, Artificial Sequence
  mRNA product Design i-3 (hSL-A64-N5) comprising derived and/or modified sequence from LASV(GA391;Clade III)__AAA46284__NP (opt5)
aggagaaagcuuaccaugagcgccuccaaggaggugagaucuugccuguggacccagagccuccggcgcgaacuguccggcuacuguucuaacaucaaacuucaagucguuaaggacgcucaggcccugcuccacgggcuggauuucagcgagguguccaaugugcagagacuuaugcggaaacagaagcgcgacgauggagaccugaaaagacuccgggaucugaaccaagcggucaauaaccugguggaacucaagucuacacagcagaaaagcguucugcgcgugggcacgcuuuccagcgacgaucugcucauucuggcugccgaccuugagaaacugaagucuaaagucaccagaacagaacggccccucuccagcgggguguauaugggaaaucugucuucccagcaacuggaucagcgcagagcccuccugaacaugaucggcaugaccgggguuagcggaggcggcaagggggcuucuaauggaauugugcgggucugggacgugaaaaacgccgagcuucugaauaaccaguuuggcacaaugccuucccucacccuggcuugccuuacaaagcaggggcaaguggaucugaaugacgccguccaggcgcucaccgaucugggacugaucuacacggccaaguauccgaacagcuccgaccucgaccgccugucucagagccaucccauucuuaauaugaucgauaccaaaaaguccagccugaacaucucuggcuacaauuucucccucggggcugccguuaaagcuggagccuguaugcuggacggcggcaacaugcuugagacaauuaaggugagcccucaaaccauggaugggauccugaaaucuauucucaaggugaaaaagagccugggaauguuugucuccgacacacccggcgaaagaaacccuuaugagaauauccuguacaagauuugccucucuggggauggauggagcuauaucgcgucccggaccagcauugugggccgcgccugggaaaacacgguuguggaccuggagcaggauaauaaaccccagaagaucgggaacggaggcucuaauaaaucccuucagagcgcuggcuucgccgcugggcugaucuacucucaacucaugacacugaaggacuuuaaauguuucaaccugauuccuaaugccaagaccuggauggauaucgagggaagaccggaagaccccgucgagauugcccuuuaccagccuuccagcggcugcuaugugcacuuuuuccgggaacccacagaucucaagcaguuuaaacaggacgcuaaguacucccaugggagagacguuaccgaucuguucgcggcccaaccuggacugaccucugcugugaucgaggcccucccccgcaacauggucauuacaugucagggcagcgaagacauccggaaacugcuugagucccaggggagacgcgauaucaagcugauugacaucacgcucucuaaagccgauagccggaaguuugagaaugcugugugggaccaguucaaggaucugugccacaugcauaccggcgucgugguugaaaagaagaaaagaggaggcaaggaggaaauuacaccgcacugugcccugauggacugcaucauguuugaugcggcuguguccgggggacuugacgccaaaguccuccgcgugguucugccucgggauaugguguucagaaccagcacacccaaggucgugcugugaggacuaguuauaagacugacuagcccgaugggccucccaacgggcccuccuccccuccuugcaccgagauuaaucaaaggcucuuuucagagccaccaaaaaaaaaaaaaaaaaaaaaaaaaaaaaaaaaaaaaaaaaaaaaaaaaaaaaaaaaaaaaaaaagaauu

SEQ ID NO: 17753 - RNA, 1892 nt, Artificial Sequence
  mRNA product Design i-3 (hSL-A64-N5) comprising derived and/or modified sequence from LASV(Nig08-A19;Clade III)__ADU56619__NP (opt5)
aggagaaagcuuaccaugagcgccuccaaggaggugaaaucuuuccuguggacccagagccucagacgggaacuguccggcuacugcucuaacaucaaacuucaagucguuaaggacgcucaggcccugcuccacgggcuggauuuuagcgagguguccaaugugcagcgccuuaugagaaagcagaaacgggacgauggagaccugaagcgccucagagaucugaaccaagcggucaauaaccugguggaacucaagucuacacagcagaaaagcguucugcgggugggcacgcuuuccagcgacgaucugcucguccuggcugccgaccuugagaagcugaaaucuaaggugguucgcaccgaaagaccccucuccagcgggauuuauaugggaaaucugucuucccagcaacuggaucagcggaaagcccuccugaacaugaucggcaugacagggggaaauggcggccgcaacaccacaagcgacgggauugugagagucugggaugugaagaaugcugagcuucugaacaaucaguucggaaccaugccuucucucacacuggccugucuuaccaagcagggccaaguggaccugaacgaugcuguccaggcccucacggaccuggggcugaucuacaccgcgaaauaucccaauuccagcgaccucgaucggcuggcccagucccauccgauucuuaacaugaucgacacaaagaaaucuagccugaauaucuccggauacaacuuuagccucggcgcugccguuaaggcuggggccugcaugcuggauggaggcaacaugcuugagaccauuaaagugucuccucaaacaauggacggcauccugaaguccauucucaaagugaagcgcagccuggggauguucaucucugauacccccggagaaagaaauccuuaugagaacauucuguacaagaucugucucagcggcgacggguggcccuauauugcgucccggacgucuaucgucggacgcgccugggaaaauacagugguugaucuggagagcgacaacaaaccucagaagaccggcaaugggggauccaacaaaagccuucagucugcuggcuuugccgcuggccugacauacucccagcucaugacccugaaggauagcaugcugcaacuugacccgaaugccaaaaccuggauggauaucgaggggagacccgaagacccuguggagauugcccucuaccagcccucuuccggaugcuauauccacuucuuucgggaaccuacagaccugaagcaguucaagcaggaugcuaaauacagccauggcauugacgucacggaucuguuugcggcccaacccgggcucaccuccgcugugaucgaggcccugccgagaaacaugguuauuacaugucagggaucugaagacauccgcaaacuucuggagagccagggccggagagauaucaagcucauugacaucucccugucuaagguggauagccgcaaauucgagaaugccgucugggaccaguuuaaggaucugugccacaugcauaccgggauuguggucgaaaagaaaaagcggggcggaaaagaggaaaucacaccucacugugcucuuauggacugcauuauguucgaugccgcgguguccggcgggguugacgcuaaggugcucagagccguccugccccgcgauaugguguuucggaccagcacgccuaaaguugugcugugaggacuaguuauaagacugacuagcccgaugggccucccaacgggcccuccuccccuccuugcaccgagauuaaucaaaggcucuuuucagagccaccaaaaaaaaaaaaaaaaaaaaaaaaaaaaaaaaaaaaaaaaaaaaaaaaaaaaaaaaaaaaaaaaagaauu

SEQ ID NO: 17754 - RNA, 1892 nt, Artificial Sequence
  mRNA product Design i-3 (hSL-A64-N5) comprising derived and/or modified sequence from LASV(G1180-SLE-2010;Clade IV)__AIT17169__NP (opt5)
aggagaaagcuuaccaugagcgccuccaaggagaucaaaucuuuccuguggacccagagccucagacgggaacuguccggcuacugcucuaacauuaagcugcaaguggucaaagacgcucaggcccugcuccacgggcuggauuuuagcgagguuuccaaugugcagcgccuuaugagaaaggaacggcgcgacgauaacgaccugaaaagacuccgggaucugaaucaggcggugaacaaucuggucgagcucaagucuacacaacaaaagagcauccugcgcgugggaacgcuuaccuccgacgaucugcucauucuggcugccgaccuugaaaaacuuaagagcaaaguuaucagaacagagcggccccucucugccggcguguauauggggaaccuguccagccagcagcuggaucagcgcagagcucuccugucuaugauuggaauguccagcggcaaucagcgggcccaggcugggcgcgacggagucgugagaguuugggaugugaagaacgucgagcuucugaauaaccaguucggcaccaugccuucucucacacuggccugucuuaccaaacaaggccagguggaccugaaugaugcggugcaggcccucacagaccuggggcugaucuacaccgcuaaguauccgaacacguccgaccucgaucggcugacccaaagccaucccauccuuaauaugauugacacaaagaaauccucucugaacaucagcggauacaauuuuucccucggcgccgcugucaaggccggggcgugcaugcuggauggaggcaacaugcuugaaaccauuaaaguuagcccucagacaauggacgggauccugaagucuauucucaaagugaagaaagcccugggaauguucaucuccgauacccccggcgagcgcaacccuuaugaaaauauucuguacaagaucugucucagcggcgacggguggcccuauaucgcuucuagaacgagcauuacaggacgggccugggagaacaccguggucgaucuggaguccgacggcaagccucagaaagcugggucuaauaacagcaauaagucccuucagagcgugggauuuacagccggccugaccuacucucaacucaugacccugaaagaugccaugcugcagcuugacccgaacgcuaagacauggauggauaucgaagggagacccgaggacccuguugaaauugcgcucuaccagcccuccagcggaugcuauauccacuucuuucgcgagccuacggaccugaaacaguucaagcaagaugccaaguacucucauggcauugacgugaccgaucuguuugcugcccagcccggccucacauccgccgucaucgacgcucugccgcggaauauggugaucaccugucaggggagcgaugacauuagaaaacuucuggaaucccagggacgcaaggauaucaaacucauugacaucgcccugucuaagacagauagccggaaauaugagaacgcgguuugggaccaauacaaggaucugugccacaugcauaccggcguggucguggagaagaaaaagagagggggaaaagaagagauuacgccucacugugcucuuauggacugcaucauguucgaugccgccgucuccggcgggcucaauacaucugugcugcgcgcuguucugccccgggacaugguguuuagaaccagcaccccucgcgucgugcucugaggacuaguuauaagacugacuagcccgaugggccucccaacgggcccuccuccccuccuugcaccgagauuaaucaaaggcucuuuucagagccaccaaaaaaaaaaaaaaaaaaaaaaaaaaaaaaaaaaaaaaaaaaaaaaaaaaaaaaaaaaaaaaaaagaauu

SEQ ID NO: 17755 - RNA, 1892 nt, Artificial Sequence
  mRNA product Design i-3 (hSL-A64-N5) comprising derived and/or modified sequence from LASV(G1442-SLE-2011;Clade IV)__AIT17181__NP (opt5)
aggagaaagcuuaccaugagcgccuccaaggaggugaaaucuuuccuguggacccagagccucagacgggaacuguccggcuacugcucuaacaucaaacuucaagucguuaaggacgcucaggcccugcuccacgggcuggauuuuagcgagguguccaaugugcagcgccuuaugagaaagcagcggcgcgacgauaacgaccugaaaagacuccgggaucugaaucaagcggucaacaaucugguggaacucaagucuacacagcaaaagagcguucugcgcgugggaacgcuuaccuccgacgaucugcucguccuggcugccgaccuugagaaacuuaagagcaaagugauuagaacagaacggccccucucugccggcguuuauauggggaaccuguccagccagcagcuggaucagcgcagagcucuccugaauaugaucggaaugucuggcgggauucagggaacccggacaggccgcgacggcguggucagagugugggaugugaagaacgccgaccuucugaauaaccaguucgggaccaugccuucccucacacuggcuugucuuaccaaacaaggacaggucgaucugaaugacguugugcaggcccucacggaccugggccugaucuacaccgcgaaguauccgaacgccagcgaucucgaccggcugacacaaucucaucccauucuuaauaugaucgauaccaagaaauccagccugaacaucuccggguacaauuuuucucucggagcugccgugaaggcuggcgccugcaugcuggacgggggaaacaugcuugagacaauuaaagucagcccucagaccauggauggcauccugaaguccauucucaaagugaagaaaacgcugggcauguucaucagcgacacacccggggagcgcaacccuuaugaaaauauucuguacaagaucugucucucuggagauggcuggcccuauauugcguccagaaccagcaucacagggcgggccugggagaacaccguuguggaccuggaaucugauggaaagccucagaaagcuggcagcaauaacuccaauaagucucuucagagcgccggguuugcugccggacugaccuacucccaacucaugacacugaaagacgccaugcugcagcuugauccgaacgcuaagacguggauggacaucgagggcagacccgaggacccugucgaaauugcgcucuaccagcccagcucuggcugcuauauccacuucuuucgcgagccuaccgaucugaaacaguucaagcaagacgccaaguacucccaugggauugaugugacagaccuguuugcugcccagcccggacucaccagcgccguuaucgaagcucugccgcggaauauggugauuacaugucagggcucugaugacaucaaaaagcugcuggagucccaggggagaaaagauaucaagcucauugacaucgcccugagcaaaaccgauucccgcaaguaugaaaacgcggucugggaccaauacaaggaucugugccacaugcauacgggaguggucguggagaaaaagaaacggggcgggaaggaggaaauuacaccucacugugcucuuauggacugcaucauguucgaugccgccguuucuggcggacucaauacccuggugcugagagcuguccucccccgcgacaugguguuucggaccagcacaccuagaguugugcugugaggacuaguuauaagacugacuagcccgaugggccucccaacgggcccuccuccccuccuugcaccgagauuaaucaaaggcucuuuucagagccaccaaaaaaaaaaaaaaaaaaaaaaaaaaaaaaaaaaaaaaaaaaaaaaaaaaaaaaaaaaaaaaaaagaauu

SEQ ID NO: 17756 - RNA, 1892 nt, Artificial Sequence
  mRNA product Design i-3 (hSL-A64-N5) comprising derived and/or modified sequence from LASV(G3010-SLE-2013;Clade IV)__AIT17345__NP (opt5)
aggagaaagcuuaccaugagcgccuccaaggagaucaaaucuuuccuguggacccagagccucagacgggaacuguccggcuacugcucuaacauuaaacuucaaguggucaaagacgcucaggcccugcuccacgggcuggauuuuagcgagguuuccaaugugcagcgccuuaugagaaaggaacggcgcgacgauaacgaccugaaaagacuccgggaucugaaucaggcggugaacaaucuggucgagcucaagucuacacaacaaaagagcauccugcgcgugggaacgcuuaccuccgacgaucugcucauucuggcugccgaccuugaaaaacuuaagagcaaaguuacaagaaccgagcggccccucucugccggcguguauauggggaaccuguccagccagcagcuggaucagcgcagagcucuccugucuaugaucggaauguccagcggcguccagggggcccgggcuggacgcgacggcgugguuagagugugggaugucaagaaugccgagcuucugaacaaucaguucggcacaaugccuucucucacccuggcgugucuuacaaaacaggggcaaguggaccugaacgaugugguccaggcccucaccgaccugggacugauuuacacggcuaaguauccgaauaccuccgaccucgaucggcugacacagagccaucccauccuuaacaugaucgacaccaagaaauccucucugaauauuagcggcuacaacuuuucccucggggccgcuguuaaggccggagcgugcaugcuggauggcgggaauaugcuugaaacaaucaaagugagcccucaaaccauggacggcauucugaagucuauccucaaagugaagaaagcccugggaauguucauuuccgagacgcccggcgaacgcaacccuuaugagaacauccuguacaagauuugucucagcggggauggauggcccuauaucgcuucuagaacaagcaucaccggccgggccugggagaauacagucguggaccuggaauccgaugggaagccucagaaagcuggaucuaacaauagcaacaagucccuucagagcgccggcuuuaccgccgggcugaccuacucucagcucaugacacugaaagacgcuaugcugcaacuugauccgaaugcgaagacguggauggacauugagggaagacccgaagauccuguugagguggcccucuaccagcccuccagcggcugcuauauccacuucuuucgcgaaccuaccgaccugaaacaguucaagcaggacgcuaaguacucucauggcauugaugucacagaccuguuugccgcccaacccgggcucaccuccgcugugaucgaugcccugccgcggaacaugguuauuacaugucagggaagcgacgauaucaaaaagcugcuggagucccagggcagaaaagacaucaagcucauugauaucgcgcugucuaaaaccgacagccgcaaguaugagaaugcugugugggaucaguacaaggaccugugccacaugcauacgggggucguggucgaaaagaagaaacggggaggcaaggaggaaauuacaccucacugugcccuuauggauugcaucauguucgacgccgcuguguccgggggccucaacaccucuguucugagagccgugcugccccgcgauauggucuuucggaccagcacaccuagagugguucucugaggacuaguuauaagacugacuagcccgaugggccucccaacgggcccuccuccccuccuugcaccgagauuaaucaaaggcucuuuucagagccaccaaaaaaaaaaaaaaaaaaaaaaaaaaaaaaaaaaaaaaaaaaaaaaaaaaaaaaaaaaaaaaaaagaauu

SEQ ID NO: 17757 - RNA, 1892 nt, Artificial Sequence
  mRNA product Design i-3 (hSL-A64-N5) comprising derived and/or modified sequence from LASV(G502-SLE-2009;Clade IV)__AIT17127__NP (opt5)
aggagaaagcuuaccaugagcgccuccaaggagaucaaaucuuuccuguggacccagagccucagacgggaacuguccggcuacugcucuaacauuaagcugcaaguggucaaagacgcucaggcccugcuccacgggcuggauuuuagcgagguuuccaaugugcagcgccuuaugagaaaggaacggcgcgacgauaacgaccugaaaagacuccgggaucugaaucaggcggugaacaaucuggucgagcucaagucuacacaacaaaagagcauccugcgcgugggaacgcuuaccuccgacgaucugcucauucuggcugccgaccuugaaaaacuuaagagcaaaguuaucagaacagagcggccccucucugccggcguguauauggggaaccuguccagccagcagcuggaucagcgcagagcucuccugucuaugauuggaauguccggcgggaaucagggaguccgggccggcaaggacggcgugguucgcgugugggaugucaaaaacgcugagcuucugaauaaccaguucgggaccaugccuagccucacacuggccugucuuaccaagcagggacaaguggaccugaaugaugcggugcaggcccucacagaccugggccugaucuacaccgcuaaguauccgaacacgucugaccucgauagacugacccagucccaucccauccuuaauaugauugacaccaaaaagagcucccugaacaucucuggguacaauuuuagccucggagccgcugucaaagccggcgcgugcaugcuggaugggggaaacaugcuugaaacaauuaagguuuccccucaaacaauggacggcauccugaaaagcauucucaaggugaaaaaggcccugggcauguucaucucugauacccccggggagcggaacccuuaugaaaauauucuguacaagaucugucucuccggagacggcuggcccuauaucgcuagccgcacgucuauuacagggagagccugggagaacaccguggucgaucuggagagcgacggaaaaccucagaaggcuggcuccaauaacucuaauaaaagccuucaguccgccggguuuacagccggacugaccuacagccagcucaugacccugaaggaugcuaugcugcaacuugacccgaacacaaaaacguggauggauaucgaaggccggcccgaggacccuguggaaauugcgcucuaccagcccucuuccggcugcuauauccacuucuuuagagagccuaccgaccugaagcaguucaagcaggaugccaaauacagccaugggauugacguuacagaucuguuugcugcccaacccggacucaccucugccgugaucgacgcucugccgcgcaauauggucaucacaugucagggcuccgaugacauucggaaacuucuggaaagccaggggagaaaggauaucaagcucauugacaucgcccugaacaaaaccgauucccgcaaguaugagaaugcggugugggaccaguacaaggaucugugccacaugcauacgggaguuguggucgagaaaaagaaacggggcgggaaggaagagauuacaccucacugugcucuuauggacugcaucauguucgaugccgccgugucuggcggacucaacaccagcguccugagagcugugcugccccgcgacaugguuuuucggaccuccacaccuagagugguccucugaggacuaguuauaagacugacuagcccgaugggccucccaacgggcccuccuccccuccuugcaccgagauuaaucaaaggcucuuuucagagccaccaaaaaaaaaaaaaaaaaaaaaaaaaaaaaaaaaaaaaaaaaaaaaaaaaaaaaaaaaaaaaaaaagaauu

SEQ ID NO: 17758 - RNA, 1892 nt, Artificial Sequence
  mRNA product Design i-3 (hSL-A64-N5) comprising derived and/or modified sequence from LASV(G733-SLE-2010;Clade IV)__AIT17155__NP (opt5)
aggagaaagcuuaccaugagcgccuccaaggagaucaaaucuuuccuguggacccagagccucagacgggaacuguccggcuacugcucuaacauuaagcugcaaguggucaaagacgcucaggcccugcuccacgggcuggauuuuagcgagguuuccaaugugcagcgccuuaugagaaaggaacggcgcgacgauaacgaccugaaaagacuccgggaucugaaucaggcggugaacaaucuggucgagcucaagucuacacaacaaaagagcgugcugcgcguuggaacgcuuaccuccgacgaacugcucgugcuggcugccgaucuugagaaacuuaagagcaaagucaucagaacagagcggccccucucugccggcguguauauggggaaccuguccagccagcagcuggaccagcgcagagcucuccugucuaugauuggaauguccggcgggaaucagggagcccggaccggccgcgauggcguugugagagucugggacgugaagaacgcugaacuucugaauaaccaguucgggacaaugccuagccucacccuggccugucuuacaaaacagggacaaguggaucugaaugacgcgguccaggcccucaccgaucugggccugaucuacacggcuaaguauccgaacaccucugaccucgaccggcugacacagucccaucccauucuuaauaugaucgauaccaagaaaagcucccugaacaucucuggguacaauuuuagccucggagccgcuguuaaggccggcgcgugcaugcuggacgggggaaacaugcuugagacaauuaaaguguccccucaaaccauggauggcauccucaagagcauucugaaagugaagaaagcccugggcauguucaucucugacacgcccggggaacgcaacccuuaugagaauauucuguacaagaucugucucuccggagauggcuggcccuauauugcuagcagaacaucuaucaccgggcgggccugggagaacacagucguggaccuggaaagcgauggaaagccucagaaagcuggcuccaauaacucuaauaagagccuucaguccgccggguuuaccgccggacugaccuacagccagcucaugacacugaaagacgcuaugcugcaacuugauccgaacgcgaagacguggauggacaucgagggcagacccgaagauccuguugagauugcccucuaccagcccucuuccggcugcuauauccacuucuuucgcgaaccuaccgaccugaaacaguucaagcaggacgcuaaguacagccaugggauugaugugacagaccuguuugccgcccaacccggacucaccucugcugucaucgaugcccugccgcggaauauggugauuacaugucagggcuccgacgauaucagaaaacuucuggagagccaggggcgcaaggacaucaaacucauugauaucgcgcuguccaagauugacucucggaaauaugagaacgcuguuugggaucaguacaaggaccugugccacaugcauaccggaguggucguggaaaagaaaaagagaggcgggaaagaggaaaucacgccucacugugcccuuauggauugcauuauguucgacgccgcugucagcggcggacucaauucccuggugcugcgcgccguucucccccgggauaugguguuuagaacaucuaccccucgcgucgugcugugaggacuaguuauaagacugacuagcccgaugggccucccaacgggcccuccuccccuccuugcaccgagauuaaucaaaggcucuuuucagagccaccaaaaaaaaaaaaaaaaaaaaaaaaaaaaaaaaaaaaaaaaaaaaaaaaaaaaaaaaaaaaaaaaagaauu

SEQ ID NO: 17759 - RNA, 1892 nt, Artificial Sequence
  mRNA product Design i-3 (hSL-A64-N5) comprising derived and/or modified sequence from MOPV/LASV reassortant(IGS-1;Clade IV)__AFY05578__NP (opt5)
aggagaaagcuuaccaugagcgccuccaaggagaucaaaucuuuccuguggacccagagccucagacgggaacuguccggcuacugcucuaacauuaaacuucaaguggucaaggacgcucaggcccugcuccacgggcuggauuuuagcgagguuuccaaugugcagcgccuuaugagaaaggaacggcgcgacgauaacgaccugaaaagacuccgggaucugaaucaggcggugaacaaucuggucgagcucaagucuacacaacaaaagagcauccugcgcgugggaacgcuuaccuccgacgaucugcucauucuggcugccgaccuugaaaaacugagaagcaagguuauccggacagagcgcccccucucugccggcguguauauggggaaccuguccagccagcagcuggaucagagacgggcucuccugaauaugauuggaaugucuggcgggaaccagggagcccgcgcuggcagagacggcgucgugcggguuugggaugugaaaaaugccgagcuucuguccaaccaguucgggaccaugccuagccucacacuggcgugucuuaccaagcagggacaagucgaccugaaugaugccgugcaggcucucacagaccugggccugaucuacaccgccaaauauccgaacacgucugaccucgaucgccugacccagucccaucccauccuuaauaugauugacacaaagaaaagcucccugaacaucucuggguacaauuuuagccucggagcugccgugaaggcgggcgccugcaugcuggaugggggaaacaugcuugaaaccauuaaggucuccccucaaacaauggacggcauccugaaaagcauucucaagguuaaaaaggcucugggcauguucaucucugauacccccggggagagaaacccuuaugaaaauauucuguacaaaaucugucucuccggagacggcuggcccuauaucgccagccggacgucuauuacagggagagcuugggagaacaccgugguggaucuggagagcgacggaaagccucagaaggccgauuccaauaacucuagcaaaucccuucagagcgccggcuuuacagcugggcugaccuacucucagcucaugacccugaaggacgcgaugcugcaacuugauccgaaugccaaaacauggauggacaucgaaggacgccccgaggacccugucgaaauugcucucuaccagcccuccagcggcugcuauauccacuucuuucgggagccuacggaucugaagcaguucaaacaggacgccaaguacucucauggcauugaugugaccgaccuguuugccacacaacccgggcucaccuccgcuguuaucgaugcccugccgagaaacauggugaucacaugucagggaagcgacgauauucgcaaacuucuggaaucccagggccggaaggacaucaagcucauugauaucgaccugucuaaaaccgauagcagaaaguaugagaaugcggucugggaccaguacaaagaucugugccacaugcauacgggggugguuguggagaagaagaaacgcggaggcaaggaagagauuacaccucacugugcucuuauggacugcaucauguucgacgccgccgucuccgggggccucaacaccucugugcugcgggcuguccugcccagagauaugguguuucgcaccagcacaccucggguugugcucugaggacuaguuauaagacugacuagcccgaugggccucccaacgggcccuccuccccuccuugcaccgagauuaaucaaaggcucuuuucagagccaccaaaaaaaaaaaaaaaaaaaaaaaaaaaaaaaaaaaaaaaaaaaaaaaaaaaaaaaaaaaaaaaaagaauu

SEQ ID NO: 17760 - RNA, 1892 nt, Artificial Sequence
  mRNA product Design i-3 (hSL-A64-N5) comprising derived and/or modified sequence from LASV(LM765-SLE-2012;Clade IV)__AIT17815__NP (opt5)
aggagaaagcuuaccaugagcgccuccaaggagaucaaaucuuuccuguggacccagagccucagacgggaacuguccggcuacugcucuaacauuaagcugcaaguggucaaagacgcucaggcccugcuccacgggcuggauuuuagcgagguuuccaaugugcagcgccuuaugagaaaggaacggcgcgacgauaacgaccugaaaagacuccgggaucugaaucaggcggugaacaaucuggucgagcucaagucuacacaacaaaagagcauccugcgcgugggaacgcuuaccuccgacgaucugcucauucuggcugccgaccuugaaaaacuuaagagcaaaguuacaagaaccgagcggccccucucugccggcguguauauggggaaccuguccagccagcagcuggaucagcgcagagcucuccuggacaugaucggaaugucuggcuccaaucagggggcccgggcuggacgcgauggcgucgugagaguuugggacgugaagaacgccgagcuucugaauaaccaguucggcacaaugccuagccucacccuggcgugucuuacaaaacaggggcaagucgaucugaaugacgccgugcaggcucucaccgaccugggacugauuuacacggccaaguauccgaacaccucugaucucgaccggcugacacagucccaucccauccuuaauaugaucgauaccaagaaaagcucccugaacauuucuggcuacaauuuuagccucggggcugccgugaaggcgggagccugcaugcuggacggcgggaacaugcuugaaacaaucaaagucuccccucaaaccauggauggcauucucaagagcauccugaaaguuaagaaagcucugggaauguucauuucugacgcccccggcgagcgcaacccuuaugaaaauauccuguacaagauuugucucuccggggauggauggcccuauaucgcuagcagaacgucuaucacaggccgggccugggagaacaccgugguggaccuggagagcgaugggaagccucagaaagccggauccaauggcucuaacaagagccuucaguccgcuggguuuacagcgggacugaccuacagccagcucaugacccugaaagacgccaugcugcaacuugauccgaaugcuaagacauggauggacauugaaggcagacccgaggacccugucgaaaucgcccucuaccagcccucuuccggcugcuauauucacuucuuucgcgagccuacggaucugaaacaguucaagcaggacgccaaguacagccaugggaucgaugugaccgaccuguuugcugcccaacccggacucacaucugcgguuauugaugcucugccgcggaacauggugaucaccugucagggcuccgacgauaucagaaaacuuuucgaaagccaggggcgcaaggacauuaaacugaucgauauugcccucuccaagacagacucucggaaauaugagaaugccgucugggaucaguacaaggaccugugccacaugcauaccggaaucgugguugagaagaaaaagagaggcgggaaagaagagauuacgccucacugugcucugauggauugcaucauguuugacgccgcugugagcggcggacuuaacacauccguccuccgcgccgugcugccccgggacauggucuucagaaccucuaccccucgcgugguucugugaggacuaguuauaagacugacuagcccgaugggccucccaacgggcccuccuccccuccuugcaccgagauuaaucaaaggcucuuuucagagccaccaaaaaaaaaaaaaaaaaaaaaaaaaaaaaaaaaaaaaaaaaaaaaaaaaaaaaaaaaaaaaaaaagaauu

SEQ ID NO: 17761 - RNA, 1892 nt, Artificial Sequence
  mRNA product Design i-3 (hSL-A64-N5) comprising derived and/or modified sequence from LASV(LM776-SLE-2012;Clade IV)__AIT17825__NP (opt5)
aggagaaagcuuaccaugagcgccuccaaggagaucaaaucuuuccuguggacccagagccucagacgggaacuguccucuuacugcagcaacauuaaacuucaaguggucaaggacgcucaggcccugcuccacggccuggauuuuuccgagguuucuaaugugcagcgccuuaugagaaaggaacggcgcgacgauaacgaccugaaaagacuccgggaucugaaucaggcggugaacaaucuggucgagcucaagagcacacaacagaaguccauccugcgcguggggacgcuuaccagcgacgaucugcucauucuggcugccgaccuugaaaaacugaagucuaaaguuacaagaaccgagcggccccucuccgccggaguguauaugggcaaccugagcucucagcagcuggaucaacgcagagcucuccuguccaugaucgggaugagcggaucuaaucagggcgcccgggcugggcgcgacggagucgugagaguuugggaugugaagaacgccgagcuucugaauaaccaguucggcacaaugccuucccucacccuggcgugucuuacaaaacagggccaagucgaccugaaugaugccgugcaggcucucaccgaccuggggcugauuuacacggccaaguauccgaacaccagcgaccucgaucggcugacacagucccaucccauccuuaauaugaucgacaccaagaaaucuagccugaacauuuccggauacaauuuuagccucggcgcugccgugaaggcgggggccugcaugcuggauggaggcaacaugcuugaaacaaucaaagucucuccucaaaccauggacgggauucugaaguccauccucaaaguuaagaaagcucugggaauguucauuagcgauacgcccggcgagcgcaacccuuaugaaaauauccuguacaagauuugucucucuggcgacggguggcccuauaucgccagcagaacauccaucaccggacgggcuugggagaacacagugguggaucuggagucugacggcaagccucagaaagccgggagcaauaacuccaauaagagccuucagucugccggauuuaccgcuggccugaccuacucccagcucaugacacugaaagaugcgaugcugcaacuugacccgaacgccaagacguggauggauauugaagggagacccgaggacccugucgaaguggcucucuaccagcccagcucuggaugcuauauccacuucuuucgcgagccuaccgaccugaaacaguucaagcaggaugccaaguacucccauggcauugacguuacagaucuguuugccgcucaacccggccucaccagcgccgugaucgacgcgcugccgcggaauauggucauuacaugucagggguccgaugacaucagaaaacuucuggaaucucagggacgcaaggauaucaaacucauugacaucgcucugagcaagaccgauucccggaaauaugagaacgccgugugggaccaguacaaggaucugugccacaugcauacgggcguuguggucgagaagaaaaagagagggggaaaagaagagauuacaccucacugugcccuuauggacugcaucauguucgaugcugccgugucuggcgggcucaauaccagcguccugcgcgcugugcugccccgggacaugguuuuuagaaccuccacaccucgcgugguccucugaggacuaguuauaagacugacuagcccgaugggccucccaacgggcccuccuccccuccuugcaccgagauuaaucaaaggcucuuuucagagccaccaaaaaaaaaaaaaaaaaaaaaaaaaaaaaaaaaaaaaaaaaaaaaaaaaaaaaaaaaaaaaaaaagaauu

SEQ ID NO: 17762 - RNA, 1892 nt, Artificial Sequence
  mRNA product Design i-3 (hSL-A64-N5) comprising derived and/or modified sequence from LASV(Mad39;Clade IV)__ANH09723__NP (opt5)
aggagaaagcuuaccaugagcgccuccaaggagaucaaaucuuuccuguggacccagagccucagacgggaacuguccggcuacugcucuaacauuaagcugcaaguggucaaagacgcucaggcccugcuccacgggcuggauuuuagcgagguuuccaaugugcagcgccuuaugagaaagcagcggcgcgacgauaacgaccugaaaagacuccgggaucugaaucaagcggugaacaaucuggucgaacucaagucuacacagcaaaagagcgugcugcgcguuggaacgcuuaccuccgacgaucugcucacacuggcugccgaccuugagaaacuuaagagcaaagugaccagaacagaacggccccucaccgccggcgucuauauggggaaccugucuucccagcagcuggaucagcgcagagcucuccugaauaugaucggaaugagcggcgggaaccagggagcccggacaggccgcgacggcgugguuagagugugggaugucaagaaugcugagcuucugaacaaucaguucgggaccaugccuucucucacgcuggccugucuuaccaaacaaggacagguggaccugaacgaugugguccaggcgcucacagaccugggccugauuuacaccgccaaguauccgaauacauccgaccucgaucggcugacccaaagccaucccauccuuaacaugauugacacgaauaagucuucccugaacaucagcggguacaacuuuucccucggagcugccguuaaagcuggcgccugcaugcuggaugggggaaauaugcuugagacaaucaaggugucuccucagaccauggacggcauucugaaaagcauccucaaggugaaaaagucccugggcauguucauuagcgauacacccggggaacgcaacccuuaugagaauauccuguacaaaauuugucucucuggagacggcuggcccuauaucgcguccagaaccagcauuaccgggcgggccugggaaaacacagucguggaucuggagucuggaggcaagccucagaaggcugggagcaauaacuccaauaaaucucuucagagcgccggauuugcugccggccugacguacucccaacucaugacccugaaggacgccaugcugcagcuugauccgaacgcuaaaacauggauggacaucgagggcagacccgaagauccuguugagaucgcgcucuaccagcccauuagcgggugcuauauccacuucuuucgcgaaccuaccgaccugaagcaguucaaacaagacgccaaguacucucauggaauugaugugacagaccuguuugcugcccagcccggccucaccuccgccgucaucgaggcucugccgcggaauauggugauuacgugucaggggagcgaugacaucagaaaacuuuucgaaucucagggacgcaaggauaucaagcugauugacaucgcccucuccaaaacagauagccggaaguaugagaacgcgguuugggaccaauacaaagaucugugccacaugcauaccggcguggucguggagaagaagaaaaagggcgggaaagaagagauuaccccucacugugcucugauggacugcaucauguuugaugccgccgucuccggaggccuuaauacacucgugcugagagcuguucugccccgcgacaugguguuccggaccucuacaccuaaggucgugcucugaggacuaguuauaagacugacuagcccgaugggccucccaacgggcccuccuccccuccuugcaccgagauuaaucaaaggcucuuuucagagccaccaaaaaaaaaaaaaaaaaaaaaaaaaaaaaaaaaaaaaaaaaaaaaaaaaaaaaaaaaaaaaaaaagaauu

SEQ ID NO: 17763 - RNA, 1892 nt, Artificial Sequence
  mRNA product Design i-3 (hSL-A64-N5) comprising derived and/or modified sequence from LASV(Z0947-SLE-2011;Clade IV)__AIT17841__NP (opt5)
aggagaaagcuuaccaugagcgccuccaaggagaucaaaucuuuccuguggacccagagccucagacgggaacuguccggcuacugcucuaacauuaagcugcaaguggucaaagacgcucaggcccugcuccacgggcuggauuuuagcgagguuuccaaugugcagcgccuuaugagaaaggaacggcgcgacgauaacgaccugaaaagacuccgggaucugaaucaggcggugaacaaucuggucgagcucaagucuacacaacaaaagagcauccugcgcgugggaacgcuuaccuccgacgaucugcucauucuggcugccgaccuugaaaaacuuaagagcaaaguuacaagaaccgagcggccccucucugccggcguguauauggggaaccuguccagccagcagcuggaucagcgcagagcucuccugaauaugaucggaaugucuggcuccaaccagggggcccggacaggacgcgacggcgucgugagaguuugggaugugaagaaugcugagcuucugaacaaucaguucggcaccaugccuagccucacacuggccugucuuaccaaacaggggcaagucgaccugaacgaugcggugcaggcccucacggaccugggacugauuuacaccgcuaaguauccgaauacaucugaccucgaucggcugacccagucccaucccauccuuaacaugaucgacacaaagaaaagcucccugaauauuucuggcuacaacuuuagccucggggccgcugugaaggccggagcgugcaugcuggauggcgggaacaugcuugaaaccaucaaagucuccccucaaacgauggacggcauucucaagagcauccugaaaguuaagaaagcccugggaauguucauuucugaugcucccggcgagcgcaauccuuaugaaaacauccuguacaagauuugucucuccggggacggauggcccuauaucgccagcagaacaucuaucaccggccgggcuugggagaauacagugguggaucuggagagcgacgggaagccucagaaagccggauccaacggcucuaauaagagccuucaguccgccggguuuaccgcuggacugaccuacagccagcucaugacacugaaagaugcgaugcugcaacuugacccgaacgccaagacguggauggauauugaaggcagacccgaggacccugucgaaaucgcucucuaccagcccucuuccggcugcuauauucacuucuuucgcgagccuaccgaccugaaacaguucaagcaggaugccaaguacagccaugggaucgacgugacagaucuguuugccgcucaacccggacucaccucugccguuauugacgcgcugccgcggaauauggugaucacaugucagggcuccgaugacaucagaaaacuuuucgaaagccaggggcgcaaggauauuaaacugaucgacauugcucucuccaagaccgauucucggaaauaugagaacgccgucugggaccaguacaaggaucugugccacaugcauacgggaaucgugguugagaagaaaaagagaggcgggaaagaagagauuacaccucacugugcccugauggacugcaucauguuugaugcugccgugagcggcggacuuaauaccuccguccuccgcgcugugcugccccgggacauggucuucagaaccucuacaccucgcgugguucugugaggacuaguuauaagacugacuagcccgaugggccucccaacgggcccuccuccccuccuugcaccgagauuaaucaaaggcucuuuucagagccaccaaaaaaaaaaaaaaaaaaaaaaaaaaaaaaaaaaaaaaaaaaaaaaaaaaaaaaaaaaaaaaaaagaauu

SEQ ID NO: 17764 - RNA, 1923 nt, Artificial Sequence
  mRNA product Design i-3 (hSL-A100) comprising derived and/or modified sequence from LASV(Josiah;Clade IV)__NP_694869__NP (opt1)
aggagaaagcuuaccaugagcgccuccaaggagaucaagagcuuccuguggacccagucccuccgccgggagcugagcggcuacugcuccaacaucaagcuccagguggucaaggacgcccaggcgcugcugcacgggcuggacuucagcgagguguccaacgugcagcgccucaugcggaaggagcgccgggacgacaacgaccugaagcgccugcgggaccucaaccaggccgucaacaaccugguggagcucaagagcacccagcagaaguccauccugcgcgugggcacccugaccagcgacgaccugcucauccuggccgccgaccuggagaagcucaaguccaaggucauccggaccgagcgcccccugagcgccgggguguacaugggcaaccuguccagccagcagcucgaccagcggcgcgcgcugcugaacaugaucgggauguccggcggcaaccagggggcccgggccggccgcgacggggugguccgggugugggacgugaagaacgccgagcuccugaacaaccaguucggcaccaugccgagccugacgcucgcgugccugaccaagcaggggcaggucgaccugaacgacgccgugcaggcccucaccgaccugggccugaucuacaccgccaaguaccccaacacguccgaccucgaccgccugacccagagccaccccauccugaacaugaucgacaccaagaaguccagccucaacaucagcggcuacaacuucucccugggggccgcggugaaggccggcgccugcaugcuggacgggggcaacaugcucgagaccaucaaggucagcccccagacgauggacggcauccugaaguccauccugaaggugaagaaggcccucgggauguucaucagcgacaccccgggcgagcggaaccccuacgagaacauccuguacaagaucugccuguccggggacggcuggcccuacaucgccagccgcaccuccaucaccgggcgggcgugggagaacacgguggucgaccucgagagcgacggcaagccccagaaggccgacuccaacaacagcuccaagagccugcaguccgccggcuucaccgccgggcugaccuacagccagcucaugacccugaaggacgccaugcugcagcuggacccgaacgcgaagacguggauggacaucgagggccgccccgaggaccccguggagaucgcccucuaccagcccuccagcgggugcuacauccacuucuuccgggagccgaccgaccugaagcaguucaagcaggacgccaaguacucccacggcaucgacgugaccgaccuguucgccacccagcccgggcucacgagcgccgucaucgacgcgcugccccgcaacauggugaucacgugccagggcuccgacgacauccgcaagcugcucgagagccagggccggaaggacaucaagcugaucgacaucgcccugagcaagaccgacucccgcaaguacgagaacgccgugugggaccaguacaaggaccucugccacaugcacaccggggucguggucgagaagaagaagcggggcgggaaggaggagaucaccccgcacugcgcccugauggacugcaucauguucgacgcggccgugagcggcgggcugaacaccuccgugcuccgcgccguccugccccgggacaugguguuccgcaccagcacgccccgggugguccugugaggacuaguuauaagacugacuagcccgaugggccucccaacgggcccuccuccccuccuugcaccgagauuaaucaaaggcucuuuucagagccaccaaaaaaaaaaaaaaaaaaaaaaaaaaaaaaaaaaaaaaaaaaaaaaaaaaaaaaaaaaaaaaaaaaaaaaaaaaaaaaaaaaaaaaaaaaaaaaaaaaaaa

SEQ ID NO: 17765 - RNA, 1923 nt, Artificial Sequence
  mRNA product Design i-3 (hSL-A100) comprising derived and/or modified sequence from LASV(LP;Clade I)__AAF86702__NP (opt1)
aggagaaagcuuaccaugagcaacuccaaggagaucaagagcuuccuguggacccagucccuccgccgggagcugagcggcuacugcuccaacaucaagcuccagguggucaaggacgcccaggcccugcugcacgggcuggacuucagcgagguguccaacgugcagcgccucaugcggaagcagaagcgcgacgacgcggaccugaagcggcugcgcgaccucaaccaggccgucaacaaccugguggagcucaagagcacccagcagaagaacgugcugcgggucggcacgcuguccagcgacgaccugaucacccucgccgccgaccuggagaagcugaaguccaaggugauccgcaccgagcggccccucagcuccgggguguacaugggcaaccugagcucccagcagcuggaccagcgccgggcccuccugagcaugaucgggauguccggcggcccgcaggggaaccgcaccggcggggacggcgucgugcgggugugggacgucaagaacgcggagcugcucaacaaccaguucgggacgaugcccagccugacccuggccugccucaccaagcagggccagguggaccugaacgacgccgugcaggcccugaccgaccucggccugaucuacacggcgaaguaccccaacuccagcgaccuggacaugcucacccagagccaccccauccuggggauggucgacaccaagaaguccagccugaacaucuccggcuacaacuucagccucggggccgccgugaaggccggcgccugcaugcuggacggcgggaacaugcuggagaccaucaagguguccccgcagacgauggacggcauccucaagagcauccugaaggucaagcgcucccuggggauguucaucagcgacacccccggcgagcggaaccccuacgagaacauccucuacaagaucugccuguccggggagggcuggcccuacaucgcgagccgcaccuccaucaccggccgggccugggagaacacgcugguggaccucgagagcgacaacaagccgcccaagcugaacuccgccgggagcaacaagucccugcaggccgccggccucaacgcggggcugaccuacagccagcugaugacccugaaggacugcaugcuccagcuggaccccuccagcaagaccuggaucgacaucgagggccgccccgaggacccgguggagaucgcccuguuccagcccuccagcgggugcuacauccacuucuuccgggagcccacggaccucaagcaguucaagcaggacgccaaguacagccacggcaucgacgucaccgaccuguucuccacccagcccggccugaccagcgccgugaucgaggcccucccgcgcaacauggugcugacgugccagggguccgacgacaucaagaagcugcucgagagccagggccggcgcgacaucaagcugaucgacaucucccugagcaaggcggacucccgcaaguucgagaacgccgucugggaccaguacaaggaccucugccacaugcacaccgggguggucguggagaagaagaagcggggcgggaaggaggagaucacgccccacugcgcccugcuggacugcaucauguucgacgccgccaccaccggcagccucaacaucaccacccugcgcgcggugcugccccgggacauggucuuccgcaccuccacgcccaagguggugcucugaggacuaguuauaagacugacuagcccgaugggccucccaacgggcccuccuccccuccuugcaccgagauuaaucaaaggcucuuuucagagccaccaaaaaaaaaaaaaaaaaaaaaaaaaaaaaaaaaaaaaaaaaaaaaaaaaaaaaaaaaaaaaaaaaaaaaaaaaaaaaaaaaaaaaaaaaaaaaaaaaaaaa

SEQ ID NO: 17766 - RNA, 1923 nt, Artificial Sequence
  mRNA product Design i-3 (hSL-A100) comprising derived and/or modified sequence from LASV(803213;Clade II)__AAF86704__NP (opt1)
aggagaaagcuuaccaugagcgccuccaaggaggugaaguccuuccuguggacccagagccuccgccgggagcugagcggcuacugcuccaacaucaagcugcaggucgugaaggacgcccaggcgcuccugcacgggcuggacuucagcgaggugaacaacguccagcgccucaugcggaagcagaagcgcgacgacggcgaccugaagcggcugcgcgaccucaaccaggccgugaacaaccugguggagcugaaguccacccagcagaaguccauccuccgggucgggacgcugaccagcgacgaccugcucacccuggccgccgaccuggagaagcucaagagcaaggugauccgcaccgagcggccccuguccagcggcguguacauggggaaccuguccacgcagcagcucgagcagcgccgggcccugcugaacaugaucggcauggucggcggggcgcagggcacccagccggggcgcgacggcguggugcgggucugggacgugaagaaccccgaccuccugaacaaccaguucgggaccaugcccagccugacccucgccugccugacgaagcagggccagguggaccugaacgacgccguccucgcccugaccgaccugggccucaucuacaccgcgaaguaccccaacuccagcgaccuggaccgccugucccagagccacccgauccucaacaugguggacaccaagaaguccagccugaacaucagcggguacaacuucucccugggcgccgccgugaaggccggggccugcaugcucgacggcggcaacaugcuggagacgaucaaggucacgccccagaccauggacgggauccucaagagcauccugaaggugaagcggucccugggcauguucgugagcgacacccccggggagcgcaaccccuacgagaacauccuguacaagaucugccucuccggcgacggguggccguacaucgcgagccggaccuccaucgucggccgcgccugggagaacaccaccguggaccuggagagcgacggcaagccccagaagguggggaccgccggcuccaacaagagccugcaguccgccggguuccccacgggccucaccuacagccagcugaugacccugaaggacuccaugaugcagcuggaccccagcgccaagaccuggaucgacaucgaggggcggccggaggaccccgucgagaucgcgcucuaccagcccauguccggcugcuacauccacuucuuccgcgagcccacggaccugaagcaguucaagcaggacgccaaguacagccacggcaucgacguggccgaccuguucccggcccagcccgggcucaccuccgccgucaucgaggcgcugccccggaacauggugcugaccugccagggcagcgacgacaucaagaagcuccuggacucccaggggcgccgcgacaucaagcugaucgacaucagccucagcaagguggacucccggaaguucgagaacgccgucugggaccagugcaaggaccugugccacaugcacaccggcgugguggucgagaagaagaagcgcgggggcaaggaggagaucacgccccacugcgcccugauggacugcaucauguucgacgccgccgugagcggcgggcucaacaucccggugcugcgggcgguccugccccgcgacaugguguuccggaccuccagccccaaggugguccucugaggacuaguuauaagacugacuagcccgaugggccucccaacgggcccuccuccccuccuugcaccgagauuaaucaaaggcucuuuucagagccaccaaaaaaaaaaaaaaaaaaaaaaaaaaaaaaaaaaaaaaaaaaaaaaaaaaaaaaaaaaaaaaaaaaaaaaaaaaaaaaaaaaaaaaaaaaaaaaaaaaaaa

SEQ ID NO: 17767 - RNA, 1926 nt, Artificial Sequence
  mRNA product Design i-3 (hSL-A100) comprising derived and/or modified sequence from LASV(GA391;Clade III)__CAA36646__NP (opt1)
aggagaaagcuuaccaugagcgccuccaaggaggugcgcagcuuccuguggacccagucccuccggcgcgagcugagcggcuacugcuccaacaucaagcugcaggucgugaaggacgcccaggcgcuccugcacgggcuggacuucagcgagguguccaacguccagcggcucaugcgcaagcagaagcgggacgacggcgaccugaagcgccugcgggaccucaaccaggccgugaacaaccugguggagcucaagagcacccagcagaaguccguccugcgcguggggacccugagcuccgacgaccugcucauccuggccgccgaccuggagaagcucaagagcaaggugacccggaccgagcgcccccuguccagcggcgucuacauggggaaccuguccagccagcagcucgaccagcggcgcgcccugcugaacaugaucggcaugaccggcguguccgggggcgggaagggcgcgagcgacgggaucgugcgggucugggacgugaagaacgccgagcuccugaacaaccaguucggcacgaugccgucccugacccucgccugccugaccaagcagggccagguggaccugaacgacgccguccaggcgcucaccgaccuggggcugaucuacacggccaaguaccccaacagcagcgaccucgaccgccugucccagagccaccccauccugaacaugaucgacaccaagaaguccagccucaacaucuccggcuacaacuucagccugggggccgccgugaaggccggcgcgugcaugcuggacggcgggaacaugcucgagaccaucaaggugagcccccagaccauggacggcauccucaaguccauccugaaggucaagaagucccuggggauguucgugagcgacacgccgggcgagcggaaccccuacgagaacauccuguacaagaucugccuguccggggacggcuggcccuacaucgccagccgcaccuccaucgugggccgggccugggagaacaccgucguggaccucgagcaggacaacaagccccagaagaucgggaacggcgggagcaacaagucccugcagagcgccggcuucgccgcggggcugaccuacucccagcucaugacgcugaaggacuucaagugcuucaaccugaucccgaacgccaagaccuggauggacaucgagggccgccccgaggaccccguggagaucgcccuguaccagcccagcuccggcugcuacguccacuucuuccgggagccgaccgaccucaagcaguucaagcaggacgccaaguacagccacgggaucgacgugaccgaccuguucgccgcgcagcccggccugacgagcgccgucaucgaggcccucccccgcaacauggugaucacgugccagggguccgaggacauccggaagcugcuggagagccagggccgccgcgacaucaagcucaucgacaucacccuguccaaggccgacagccggaaguucgagaacgccgugugggaccaguucaaggaccugugccacaugcacaccggggucgugguggagaagaagaagcgcggcggcaaggaggagaucacgccccacugcgcgcucauggacugcaucauguucgacgccgccgucuccgggggccuggacgccaaggugcugcgggugguccucccgcgcgacaugguguuccggaccagcacccccaaggugguccugugaggacuaguuauaagacugacuagcccgaugggccucccaacgggcccuccuccccuccuugcaccgagauuaaucaaaggcucuuuucagagccaccaaaaaaaaaaaaaaaaaaaaaaaaaaaaaaaaaaaaaaaaaaaaaaaaaaaaaaaaaaaaaaaaaaaaaaaaaaaaaaaaaaaaaaaaaaaaaaaaaaaaa

SEQ ID NO: 17768 - RNA, 1923 nt, Artificial Sequence
  mRNA product Design i-3 (hSL-A100) comprising derived and/or modified sequence from LASV(AV;Clade V)__CCA30315__NP (opt1)
aggagaaagcuuaccaugagcgccuccaaggaggugaaguccuuccuguggacccagagccuccgccgggagcugagcggcuacugcuccaacaucaagcugcaggucgugaaggacgcccaggcgcuccugcacgggcuggacuucagcgagguguccaacguccagcgccucaugcggaagcagcgccgggacgacagcgaccugaagcgccugcgggaccucaaccaggccgugaacaaccugguggagcugaaguccacccagcagaaguccguccuccgcgugggcacgcugagcagcgacgaccugcucacccuggccgccgaccuggagaagcucaaguccaaggugacccggaccgagcgcccccugagcuccggggucuacaugggcaaccugagcucccagcagcucgaccagcggcgcgcccugcugaaccucaucgggaugacgaacggcagccagggcucccaggcggggcgggacggcguggugcgcgucugggacgugaagaacgccgagcugcugaacaaccaguucgggaccaugccgagccucacccuggccugccugaccaagcagggccagguggaccucaacgacgucgugcaggcccugacggaccuggggcucaucuacaccgcgaaguaccccaacaccagcgaccuggaccggcugacccagucccaccccauccucaacaugaucgacacgaagaaguccagccugaacaucagcggcuacaacuucucccugggcgccgccgugaaggccggggccugcaugcucgacggcgggaacaugcuggagaccaucaaggucagcccccaguccauggacggcauccucaagagcauccugaaggugaagcgcgcgcugggcauguucguguccgacaccccgggggagcggaaccccuacgagaacauccuguacaagaucugccucagcggcgacggguggcccuacaucgccucccgcaccagcaucgucggccgggccugggagaacacggugguggaccuggagaccgacgggaagccccagaagaucggcuccggcaacagcaacaagucccugcagagcgccggguucuccgccggccucaccuacagccagcugaugacccugaaggacgcgaugcugcagcucgacccgaacgccaagacguggauggacaucgaggggcgccccgaggaccccgucgagguggcccuguaccagcccaucuccggcugcuacauccacuucuuccgggagccgaccgaccugaagcaguucaagcaggacgccaaguacagccacgggaucgacaucgccgaccucuucgcggcccagcccggccugaccagcgccgucaucgaggcccugccccgcaacauggugaucacgugccagggcuccgaggacaucaagaagcuccuggagagccaggggcgcaaggacaucaagcugaucgacaucgcccucuccaagaucgacagccggaaguucgagaacgcggugugggaccaguacaaggaccugugccacaugcacaccggcgucgugguggagaagaagaagcgcgggggcaaggaggagaucaccccgcacugcgcccugauggacugcaucauguucgacgccgccgucuccgggggccucaacacccuggugcugcgggcggugcucccccgcgacauggucuuccggaccagcacgccccgcguggugcugugaggacuaguuauaagacugacuagcccgaugggccucccaacgggcccuccuccccuccuugcaccgagauuaaucaaaggcucuuuucagagccaccaaaaaaaaaaaaaaaaaaaaaaaaaaaaaaaaaaaaaaaaaaaaaaaaaaaaaaaaaaaaaaaaaaaaaaaaaaaaaaaaaaaaaaaaaaaaaaaaaaaaa

SEQ ID NO: 17769 - RNA, 1923 nt, Artificial Sequence
  mRNA product Design i-3 (hSL-A100) comprising derived and/or modified sequence from LASV(Togo/2016/7082;Clade VI)__AMR44578__NP (opt1)
aggagaaagcuuaccaugagcaacuccaaggaggugaaguccuuccuguggacccagagccuccgccgggagcugagcggcuacugcuccaacaucaagcugcaggucgugaaggacgcccaggcccuccugcacgggcuggacuucagcgagguguccaacguccagcgccucaugcggaagcagaagcgcgacgacggcgaccugaagcggcugcgcgaccucaaccaggcggugaacaaccugguggagcucaagagcguccagcagaaguccauccugcggguggggacccugaccagcgacgaccugcucacccuggccgccgaccuggagaagcucaaguccaaggugacccgcaccgagcggccccugagcuccggcgucuacauggggaaccugagcucccagcagcucgaccagcgccgggcccugcugagcaugaucggcauguccggcgggaaccagaacagccagccgaagggcgacgggguggugcgcgucugggacgugaagaacgccgaccuccugaacaaccaguucggcacgaugcccucccugacccucgcgugccugaccaagcagggccagguggaccugaacgacgccguccaggcccucaccgaccuggggcugaucuacacggccaaguaccccaacagcagcgaccucgaccggcugucccagagccaccccauccugaacaugaucgacaccaagaaguccagccucaacaucuccggcuacaacuucagccugggggcggccaucaagaccggcgccugcaugcuggacgggggcaacaugcucgagaccaucaaggugacgccgcagaccauggacggcauccugaaguccauccugaaggugaagcgcagccucgggauguucaucuccgacacccccggcgagcggaaccccuacgagaacauccuguacaagaucugccugagcggggacggcuggcccuacaucgccucccgcaccgccaucaucgggcgggcgugggagaacacggucguggaccucgagagcgacuccaagccgcagaagaucggcagcaacggcuccaacaagagccugcaguccgccggguucgcccccggccugaccuacagccagcucaugacccugaaggacuccaugcugcagcuggaccccaacgccaagaccuggaucgacaucgaggggcgccccgaggacccgguggaggucgcccucuuccagcccaucagcggcugcuacauccacuucuuccgggagcccacggaccugaagcaguucaagcaggacgcgaaguacagccacgggaucgacgugaccgaccuguucgccgcccagcccggccucaccuccgccgugaucgaggcccugccgcgcaacaugguccugaccugccagggcagcgacgacaucaagaagcuccuggacucccaggggcggcgcgacaucaagcugaucgacgugagccucaacaagaucgacucccgcaaguucgagaacgcggucugggaccaguacaaggaccugugccacaugcacacgggcgugguggucgagaagaagaagaagggcgggaaggaggagaucacgccccacugcgcccugcucgacugcaucauguucgacgccgccgugagcgggggccugaacgccaccgugcugcgggcgguccucccccgcgacaugguguuccggaccuccagccccaaggugguccugugaggacuaguuauaagacugacuagcccgaugggccucccaacgggcccuccuccccuccuugcaccgagauuaaucaaaggcucuuuucagagccaccaaaaaaaaaaaaaaaaaaaaaaaaaaaaaaaaaaaaaaaaaaaaaaaaaaaaaaaaaaaaaaaaaaaaaaaaaaaaaaaaaaaaaaaaaaaaaaaaaaaaa

SEQ ID NO: 17770 - RNA, 1923 nt, Artificial Sequence
  mRNA product Design i-3 (hSL-A100) comprising derived and/or modified sequence from LASV(KAK-428;Clade n.d. (VII))__ANH09741__NP (opt1)
aggagaaagcuuaccaugagcaacuccaaggaggugaaguccuuccuguggacccagagccuccgccgggagcugagcggcuacugcaccaacaucaagcugcaggucgugaaggacgcccaggcccuccugcacgggcuggacuucuccgaggugagcaacguccagcgccucaugcggaagcagaagcgcgacgacaacgaccugaagcggcugcgcgaccucaaccaggcggugaacaaccugguggagcugaaguccguccagcagaaguccgugcucaaggugggcacgcugaacagcgacgaccugcucacccuggccgccgaccuggagaagcucaagagcaaggucgugcggaccgagcgcccccuguccagcgggguguacaugggcaaccuguccagccagcagcucgaccagcggcgcgcccugcugaacaugaucgggauggccggcggcucccaggggaaccagccgagccgggacggcgucgugcgcgugugggacgucaagaacgcggaccuccugaacaaccaguucgggaccaugcccucccugacgcucgccugccugaccaagcagggccagguggaccugaacgacgugguccucgcccugaccgaccuggggcucaucuacaccgccaaguaccccaacagcuccgaccuggaccggcugagccagaaccaccccgugcucaacaugaucgacgugaacaagagcucccugaacaucagcggcuacaacuucucccugggcgcggccgucaaggccggggccugcaugcucgacggcgggaacaugcuggagacgaucaagaucagcccgcagaccguggacggcauccugaaguccauccucaaggugaagcgcgcccugggcauguucgucagcgacacccccggggagcggaaccccuacgagaacauccuguacaaggugugccucuccggcaacggguggcccuacaucgcgagccgcaccuccaucgucggccgggccugggagaacacggugguggaccuggagagcaacaagaaccagccgaaggucgggaacaacggcuccaacaagaugcugcagagcuccggcuucgccaccgggcucaccuacagccagcugaugacccugcgcgacuccaugcugcagcucgaccccacggccaagaccuggaucgacaucgagggccggcccgaggaccccguggagcuggcccuguuccagccgagcuccgggugcuacauccacuucuuccgcgagcccaccgaccucaagcaguucaagcaggacgcgaaguacagccacggcaucgacgugaacgaccuguucuccgcccagcccgggcugaccagcgccguccucgaggcccugccccggaacauggugcugacgugccagggcagcgacgacauccgcaagcuccuggacucccaggaccgcaaggacaucaagcugaucgacaucagccucuccaaggccgacgcgcggaaguucgagaacgacgugugggaccaguucaaggaccugugccacaugcacaccggcaucgucguggagaagaagaagaagggcgggaagcaggagaugaccccgcacugcgcccugcucgacugcaucauguucgacgccgccgugagcgggggccugaacguccccacccugcgcgccgugcuccccacggacaugguguuccggaccaucaccaccaaggucgugcugugaggacuaguuauaagacugacuagcccgaugggccucccaacgggcccuccuccccuccuugcaccgagauuaaucaaaggcucuuuucagagccaccaaaaaaaaaaaaaaaaaaaaaaaaaaaaaaaaaaaaaaaaaaaaaaaaaaaaaaaaaaaaaaaaaaaaaaaaaaaaaaaaaaaaaaaaaaaaaaaaaaaaa

SEQ ID NO: 17771 - RNA, 1923 nt, Artificial Sequence; identical to SEQ ID NO: 17765
  mRNA product Design i-3 (hSL-A100) comprising derived and/or modified sequence from LASV(Pinneo-NIG-1969;Clade I)__AIT17837__NP (opt1)

SEQ ID NO: 17772 - RNA, 1923 nt, Artificial Sequence
  mRNA product Design i-3 (hSL-A100) comprising derived and/or modified sequence from LASV(ISTH0009-NIG-2011;Clade II)__AIT17405__NP (opt1)
aggagaaagcuuaccaugagcguguccaaggaggucaagagcuuccuguggacccagucccuccgccgggagcugagcggcuacugcuccaacaucaagcuccagguggugaaggacgcccaggcccugcugcacgggcuggacuucagcgaggucuccaacgugcagcgccucaugcggaagcagaagcgcgacgacagcgaccugaagcggcugcgcgaccucaaccaggcggugaacaaccuggucgagcugaaguccacccagcagaaguccauccuccgggugggcacccugaccagcgacgaccugcucacccuggccgccgaccuggagaagcucaagagcaaggugauccgcaccgagcggccccuguccagcggggucuacaugggcaaccuguccacgcagcagcucgagcagcgccgggcccugcugaacaugaucgggauggugggcggcgcccaggggacccagccgggccgcgacggggugguccgggugugggacgugaagaaccccgaccuccugaacaaccaguucggcaccaugcccagccugacccucgcgugccugacgaagcaggggcaggucgaccugaacgacgccgugcucgcccugaccgaccugggccucaucuacaccgccaaguaccccaacuccagcgaccuggaccgccugucccagagccacccgauccucaacaugguggacaucaagaaguccagccugaacaucagcggcuacaacuucucccugggggcggccgucaaggccggcgccugcaugcucgacgggggcaacaugcuggagaccaucaaggugacgccccagaccauggacggcauccucaagagcauccugaaggugaagcggucccuggggauguucgucagcgacacccccggcgagcgcaaccccuacgagaacauccuguacaagaucugccucuccggggacggcuggccguacaucgccagccggaccuccaucguggggcgcgcgugggagaacacgaccguggaccuggagagcgacggcaagccccagaaggucggcuccgccgggagcaacaagucccugcagagcgccggcuuccccaccgggcucaccuacucccagcugaugacgcugaaggacagcaugaugcagcuggaccccuccgccaagaccuggaucgacaucgagggccggccggaggaccccguggagaucgcccucuaccagcccaugagcgggugcuacauccacuucuuccgcgagcccaccgaccugaagcaguucaagcaggacgcgaaguacucccacggcaucgacgucgccgaccuguucccggcccagcccggccucaccagcgccgugaucgaggcccugccccggaacauggugcugacgugccaggggagcgacgacaucaagcgccuccuggacucccagggccgccgggacaucaagcugaucgacaucgcgcucagcaaggccgacucccgccgguucgagaacgccgucugggaccagugcaaggaccugugccacaugcacaccggggugguggucgagaagaagaagcgcggcgggaaggaggagaucacgccccacugcgcccugauggacugcaucauguacgacgccgcggugagcggcggccucaacaucccggugcugcgggccguccugccccgcgacaugguguuccggaccuccagccccaaggugguccucugaggacuaguuauaagacugacuagcccgaugggccucccaacgggcccuccuccccuccuugcaccgagauuaaucaaaggcucuuuucagagccaccaaaaaaaaaaaaaaaaaaaaaaaaaaaaaaaaaaaaaaaaaaaaaaaaaaaaaaaaaaaaaaaaaaaaaaaaaaaaaaaaaaaaaaaaaaaaaaaaaaaaa

SEQ ID NO: 17773 - RNA, 1923 nt, Artificial Sequence
  mRNA product Design i-3 (hSL-A100) comprising derived and/or modified sequence from LASV(ISTH2010-NIG-2012;Clade II)__AIT17483__NP (opt1)
aggagaaagcuuaccaugagcgccuccaaggaggugaaguccuuccuguggacccagagccuccgccgggagcugagcggcuacugcuccaacaucaagcugcaggucgugaaggacgcccaggcgcuccugcacgggcuggacuucagcgagguguccaacguccagcgccucaugcggaagcagaagcgcgacgacagcgaccugaagcggcugcgcgaccucaaccaggccgugaacaaccugguggagcugaaguccacccagcagaaguccauccuccgggucggcacgcugaccagcgacgaccugcucacccuggccgccgaccuggagaagcucaagagcaaggugauccgcaccgagcggccccuguccagcgggguguacaugggcaaccuguccacgcagcagcucgagcagcgccgggcccugcugaaccucaucgggauggucggcggcgcgcaggggacccagccgggccgcgacgggguggugcgggucugggacgugaagaaccccgaccugcugaacaaccaguucggcaccaugcccagccucacccuggccugccugacgaagcagggccagguggaccucaacgacgccguccuggcccugaccgaccucgggcugaucuacaccgcgaaguaccccaacuccagcgaccuggaccgccucucccagagccacccgauccugaacaugguggacaccaagaaguccagccugaacaucagcggcuucaacuucucccucggggccgccgugaaggccggcgccugcaugcuggacgggggcaacaugcuggagacgaucaaggucacgccccagaccauggacggcauccucaagagcauccugaaggugaagaagucccuggggauguucgugagcgacacccccggcgagcggaaccccuacgagaacauccucuacaagaucugccuguccggggacggcuggccguacaucgcgagccgcaccuccaucgucgggcgggccugggagaacaccaccguggaccuggagagcgacggcaagccccacaaggugggcaccgccggguccaacaagagccuccaguccgccggcuuccccacggggcugaccuacagccagcugaugacccugaaggacuccaugaugcagcucgaccccagcgccaagaccuggaucgacaucgagggccgcccggaggaccccgucgagaucgcgcuguaccagcccauguccgggugcuacauccacuucuuccgggagcccacggaccugaagcaguucaagcaggacgccaaguacagccacggcaucgacguggccgaccucuucccggcccagcccggccugaccuccgccgucaucgaggcgcugccccgcaacauggugcugaccugccaggggagcgacgacaucaagcggcuccuggacagccagggccgccgcgacaucaagcucaucgacaucgcccuguccaaggccgacagccggcgcuucgagaacgccgugugggaccagugcaaggaccugugccacaugcacaccggggucgugguggagaagaagaagcggggcgggaaggaggagaucacgccccacugcgcccucauggacugcaucauguacgacgcggccgucuccggcggccugaacaucccggugcugcgcgccgugcucccccgggacauggucuuccgcaccagcucccccaagguggugcugugaggacuaguuauaagacugacuagcccgaugggccucccaacgggcccuccuccccuccuugcaccgagauuaaucaaaggcucuuuucagagccaccaaaaaaaaaaaaaaaaaaaaaaaaaaaaaaaaaaaaaaaaaaaaaaaaaaaaaaaaaaaaaaaaaaaaaaaaaaaaaaaaaaaaaaaaaaaaaaaaaaaaa

SEQ ID NO: 17774 - RNA, 1923 nt, Artificial Sequence
  mRNA product Design i-3 (hSL-A100) comprising derived and/or modified sequence from LASV(Lassa virus/H.sapiens-wt/NGA/2015/ISTH_0543;Clade II)__AVO03640__NP (opt1)
aggagaaagcuuaccaugagcgccuccaaggaggugaaguccuuccuguggacccagagccuccgccgggagcugagcggcuacugcuccaacaucaagcugcaggucgugaaggacgcccaggcgcuccugcacgggcuggacuucagcgagguguccaacguccagcgccucaugcggaagcagaagcgcgacgacagcgaccugaagcggcugcgcgaccucaaccaggccgugaacaaccugguggagcugaaguccacccagcagaaguccauccuccgggucggcacgcugaccagcgacgaccugcucacccuggccgccgaccuggagaagcucaagagcaaggugauccgcaccgagcggccccuguccagcgggguguacaugggcaaccuguccacgcagcagcucgagcagcgccgggcccugcugaacaugaucgggauggucggcggcgcgcaggggacccagccgggccgcgacgggguggugcgggucugggacgugaagaaccccgaccuccugaacaaccaguucggcaccaugcccagccugacccucgccugccugacgaagcagggccagguggaccugaacgacgccguccucgcccugaccgaccuggggcucaucuacaccgcgaaguaccccaacuccagcgaccuggaccgccugucccagagccacccgauccucaacaugguggacaccaagaaguccagccugaacaucagcggcuacaacuucucccugggggccgccgugaaggccggcgccugcaugcucgacgggggcaacaugcuggagacgaucaaggucacgccccagaccauggacggcauccucaagagcauccugaaggugaagaagucccuggggauguucgugagcgacacccccggcgagcggaaccccuacgagaacauccuguacaagaucugccucuccggggacggcuggccguacaucgcgagccgcaccuccaucgucgggcgggccugggagaacaccaccguggaccuggagagcgacggcaagccccagaaggugggcuccgccgggagcaacaagucccugcagagcgccggcuuccccaccgggcucacguacucccagcugaugacccugaaggacagcaugaugcagcuggaccccuccgccaagaccuggaucgacaucgagggccgcccggaggaccccgucgagaucgcgcucuaccagcccaugagcgggugcuacauccacuucuuccgggagcccaccgaccugaagcaguucaagcaggacgccaaguacucccacggcaucgacguggccgaccuguucccggcccagcccggccucacgagcgccgucaucgaggcgcugccccgcaacauggugcugaccugccaggggagcgacgacaucaagcggcuccuggacucccagggccgcaaggacaucaagcugaucgacaucgcccucagcaaggccgacucccgccgguucgagaacgccgugugggaccagugcaaggaccugugccacaugcacaccggggucgugguggagaagaagaagcgcggcgggaaggaggagaucacgccccacugcgcccugauggacugcaucauguacgacgcggccgucagcggcggccucaacaucccggugcugcgggccgugcugccccgcgacauggucuuccggaccuccagccccaagguggugcucugaggacuaguuauaagacugacuagcccgaugggccucccaacgggcccuccuccccuccuugcaccgagauuaaucaaaggcucuuuucagagccaccaaaaaaaaaaaaaaaaaaaaaaaaaaaaaaaaaaaaaaaaaaaaaaaaaaaaaaaaaaaaaaaaaaaaaaaaaaaaaaaaaaaaaaaaaaaaaaaaaaaaa

SEQ ID NO: 17775 - RNA, 1923 nt, Artificial Sequence
  mRNA product Design i-3 (hSL-A100) comprising derived and/or modified sequence from LASV(Lassa virus/H.sapiens-wt/NGA/2016/ISTH_0009;Clade II)__AVO03572__NP (opt1)
aggagaaagcuuaccaugagcgccuccaaggaggugaaguccuuccuguggacccagagccuccgccgggagcugagcggcuacugcuccaacaucaagcugcaggucgugaaggacgcccaggcgcuccugcacgggcuggacuucagcgagguguccaacguccagcgccucaugcggaagcagaagcgcgacgacagcgaccugaagcggcugcgcgaccucaaccaggccgugaacaaccugguggagcugaaguccacccagcagaaguccauccuccgggucggcacgcugaccagcgacgaccugcucacccuggccgccgaccuggagaagcucaagagcaaggugauccgcaccgagcggccccuguccagcgggguguacaugggcaaccuguccacgcagcagcucgagcagcgccgggcccugcugaacaugaucgggauggucggcggcgcgcaggggacccagccgggccgcgacgggguggugcgggucugggacgugaagaaccccgaccuccugaacaaccaguucggcaccaugcccagccugacccucgccugccugacgaagcagggccagguggaccugaacgacgccguccucgcccugaccgaccuggggcucaucuacaccgcgaaguaccccaacuccagcgaccuggaccgccugucccagagccacccgauccucaacaugguggacaccaagaaguccagccugaacaucagcggcuacaacuucucccugggggccgccgugaaggccggcgccugcaugcucgacgggggcaacaugcuggagacgaucaaggucacgccccagaccauggacggcauccucaagagcauccugaaggugaagaagucccuggggauguucgugagcgacacccccggcgagcggaaccccuacgagaacauccuguacaagaucugccucuccggggacggcuggccguacaucgcgagccgcaccuccaucgucgggcgggccugggagaacaccaccguggaccuggagagcgacggcaagccccagaaggugggcuccgccgggagcaacaagucccugcagagcgccggcuuccccaccgggcucacguacucccagcugaugacccugaaggacagcaugaugcagcuggaccccuccgccaagaccuggaucgacaucgagggccgcccggaggaccccgucgagaucgcgcucuaccagcccaugagcgggugcuacauccacuucuuccgggagcccaccgaccugaagcaguucaagcaggacgccaaguacucccacggcaucgacguggccgaccuguucccggcccagcccggccucacgagcgccgucaucgaggcgcugccccgcaacauggugcugaccugccaggggagcgacgacaucaagcggcuccuggacucccagggccgccgcgacaucaagcugaucgacaucgcccucagcaaggccgacucccggcgcuucgagaacgccgugugggaccagugcaaggaccugugccacaugcacaccggggucgugguggagaagaagaagcggggcgggaaggaggagaucacgccccacugcgcccugauggacugcaucauguacgacgcggccgucagcggcggccucaacaucccggugcugcgcgccgugcugccccgggacauggucuuccgcaccuccagccccaagguggugcucugaggacuaguuauaagacugacuagcccgaugggccucccaacgggcccuccuccccuccuugcaccgagauuaaucaaaggcucuuuucagagccaccaaaaaaaaaaaaaaaaaaaaaaaaaaaaaaaaaaaaaaaaaaaaaaaaaaaaaaaaaaaaaaaaaaaaaaaaaaaaaaaaaaaaaaaaaaaaaaaaaaaaa

SEQ ID NO: 17776 - RNA, 1923 nt, Artificial Sequence
  mRNA product Design i-3 (hSL-A100) comprising derived and/or modified sequence from LASV(Lassa virus/H.sapiens-wt/NGA/2016/ISTH_0017;Clade II)__AVO03568__NP (opt1)
aggagaaagcuuaccaugagcgccuccaaggaggugaaguccuuccuguggacccagagccuccgccgggagcugagcggcuacugcuccagcaucaagcugcaggucgugaaggacgcccaggcgcuccugcacgggcuggacuucuccgaggugagcaacguccagcgccucaugcggaagcagaagcgcgacgacuccgaccugaagcggcugcgcgaccucaaccaggccgugaacaaccugguggagcucaagagcacccagcagaaguccauccugcgggucggcacgcugaccagcgacgaccugcucacccuggccgccgaccuggagaagcucaaguccaaggugauccgcaccgagcggccccugagcuccgggguguacaugggcaaccugagcacgcagcagcucgagcagcgccgggcccugcugaacaugaucgggauggcgggcggcgcccaggggacccagccgggccgcgacggggucgugcgggugugggacgucaagaaccccgaccuccugaacaaccaguucggcaccaugcccucccugacccucgccugccugacgaagcagggccagguggaccugaacgacgccgugcucgcgcugaccgaccuggggcucaucuacaccgccaaguaccccaacagcuccgaccuggaccgccugagccagagccacccgauccucaacauggucgacaccaagaaguccagccugaacaucuccggcuacaacuucagccugggggccgccgugaaggccggcgcgugcaugcucgacgggggcaacaugcuggagacgaucaaggugacgccccagaccauggacggcauccugaaguccauccucaaggucaagcggagccuggggauguucguguccgacgcccccggcgagcgcaaccccuacgagaacauccuguacaagaucugccucagcggggacggcuggccguacaucgccucccggaccagcaucguggggcgcgccugggagaacaccaccgucgaccuggaguccgacggcaagccccagaaggugggcgccaccgggagcaacaagucccugcagagcgcgggcuuccccaccgggcucacguacucccagcugaugacccugaaggacagcaugaugcagcuggaccccuccgccaagaccuggaucgacaucgagggccggccggaggaccccguggaggucgcccucuaccagcccgugagcgggugcuacauccacuucuuccgcgagcccaccgaccugaagcaguucaagcaggacgccaaguacucccacggcaucgacgucgccgaccuguucccggcgcagcccggccucacgagcgccgugaucgaggcccugccccggaacauggugcugaccugccaggggagcgacgacaucaagaagcuccuggacucccagggccgcaaggacaucaagcugaucgacaucgcccucagcaaggccgacucccgccgguucgagaacgcggucugggaccagugcaaggaccugugccacaugcacaccggggugguggucgagaagaagaagcgcggcgggaaggaggagaucacgccccacugcgcccugauggacugcaucauguacgacgccgccgugagcggcggccucaacaucccggugcugcgggcgguccugccccgcgacaugguguuccggaccuccagccccaaggugguccucugaggacuaguuauaagacugacuagcccgaugggccucccaacgggcccuccuccccuccuugcaccgagauuaaucaaaggcucuuuucagagccaccaaaaaaaaaaaaaaaaaaaaaaaaaaaaaaaaaaaaaaaaaaaaaaaaaaaaaaaaaaaaaaaaaaaaaaaaaaaaaaaaaaaaaaaaaaaaaaaaaaaaa

SEQ ID NO: 17777 - RNA, 1923 nt, Artificial Sequence
  mRNA product Design i-3 (hSL-A100) comprising derived and/or modified sequence from LASV(Lassa virus/H.sapiens-wt/NGA/2018/ISTH_0959;Clade II)__AVV65100__NP (opt1)
aggagaaagcuuaccaugagcgccuccaaggaggugaaguccuuccuguggacccagagccuccgccgggagcugagcggcuacugcuccaacaucaagcugcaggucgugaaggacgcccaggcgcuccugcacgggcuggacuucagcgagguguccaacguccagcgccucaugcggaagcagaagcgcgacgacagcgaccugaagcggcugcgcgaccucaaccaggccgugaacaaccugguggagcugaaguccacccagcagaaguccauccuccgggucggcacccugaccagcgacgaccugcucacccuggccgccgaccuggagaagcucaagagcaaggugauccgcaccgagcggccccuguccagcgggguguacaugggcaaccuguccacgcagcagcucgagcagcgccgggcccugcugaaccucaucgggauggucggcggcgcgcaggggacccagccgggccgcgacgggguggugcgggucugggacgugaagaaccccgaccugcugaacaaccaguucggcaccaugcccagccucacccuggccugccugacgaagcagggccagguggaccucaacgacgucgugcuggcccugaccgaccucgggcugaucuacaccgccaaguaccccaacuccagcgaccuggaccgccucucccagagccacccgauccugaacaugguggacaccaagaaguccagccugaacaucagcggcuucaacuucucccucggggcggccgucaaggccggcgccugcaugcuggacgggggcaacaugcuggagacgaucaaggugacgccccagaccauggacggcauccucaagagcauccugaaggugaagaagucccuggggauguucgucagcgacacccccggcgagcggaaccccuacgagaacauccucuacaagaucugccuguccggggacggcuggccguacaucgccagccgcaccuccaucguggggcgggcgugggagaacaccaccguggaccuggagagcgacggcaagccccacaaggucggcaccgccggguccaacaagagccuccaguccgccggcuuccccacggggcugaccuacagccagcugaugacccugaaggacuccaugaugcagcucgaccccagcgccaagaccuggaucgacaucgagggccgcccggaggaccccguggagaucgcccuguaccagcccauguccgggugcuacauccacuucuuccgggagcccacggaccugaagcaguucaagcaggacgcgaaguacagccacggcaucgacgucgccgaccucuucccggcccagcccggccugaccuccgccgugaucgaggcccugccccgcaacauggugcugaccugccaggggagcgacgacaucaagcggcuccuggacagccagggccgcaaggacaucaagcucaucgacaucgcgcuguccaagaccgacagccgccgguucgagaacgccgucugggaccagugcaaggaccugugccacaugcacacgggggugguggucgagaagaagaagcgcggcgggaaggaggagaucacgccccacugcgcccucauggacugcaucauguacgacgccgccguguccggcggccugaacaucccggugcugcgggcgguccucccccgcgacaugguguuccggaccagcucccccaaggugguccugugaggacuaguuauaagacugacuagcccgaugggccucccaacgggcccuccuccccuccuugcaccgagauuaaucaaaggcucuuuucagagccaccaaaaaaaaaaaaaaaaaaaaaaaaaaaaaaaaaaaaaaaaaaaaaaaaaaaaaaaaaaaaaaaaaaaaaaaaaaaaaaaaaaaaaaaaaaaaaaaaaaaaa

SEQ ID NO: 17778 - RNA, 1923 nt, Artificial Sequence
  mRNA product Design i-3 (hSL-A100) comprising derived and/or modified sequence from LASV(LASV003-NIG-2008;Clade II)__AIT17581__NP (opt1)
aggagaaagcuuaccaugagcgccuccaaggaggugaaguccuuccuguggacccagagccuccgccgggagcugagcggcuacugcuccagcaucaagcugcaggucgugaaggacgcccaggcgcuccugcacgggcuggacuucuccgaggugagcaacguccagcgccucaugcggaagcagaagcgcgacgacuccgaccugaagcggcugcgcgaccucaaccaggccgugaacaaccugguggagcucaagagcacccagcagaaguccguccugcgggugggcacccugaccagcgacgaccugcucacccuggccgccgaccuggagaagcucaaguccaaggugauccgcaccgagcggccccugagcuccggggucuacaugggcaaccugagcgcccagcagcucgagcagcgccggacgcugcugaacaugaucgggauggugggcggcgcgcaggggacccagccgggccgcgacggggugguccgggugugggacgugaagaaccccgaccuccugaacaaccaguucggcaccaugcccucccugacccucgccugccugacgaagcaggggcaggucgaccugaacgacguggugcucgcccugaccgaccugggccucaucuacaccgccaaguaccccaacagcuccgaccuggaccgccugagccagagccacccgauccucuccauggucgacaccaagaaguccagccugaacaucagcggcuacaacuucucccugggggcggccgugaaggccggcgccugcaugcucgacgggggcaacaugcuggagacgaucaaggugacgccccagaccauggacggcauccucaagagcauccugaaggucaagaagucccuggggauguucgugagcgacacccccggcgagcggaaccccuacgagaacauccuguacaagaucugccucuccggggacggcuggccguacaucgccagccgcaccuccaucguggggcgggcgugggagaacaccaccgucgaccuggagagcgacggcaagccccagaaggugggcaccgccggguccaacaagagccugcaguccgccggcuuccccacggggcucaccuacagccagcugaugacccugaaggacuccaugaugcagcuggaccccagcgccaagaccuggaucgacaucgagggccgcccggaggaccccgucgagaucgcccucuaccagcccauguccgggugcuacauccacuucuuccgggagcccacggaccugaagcaguucaagcaggacgcgaaguacagccacggcaucgacgugaccgaccuguucccggcccagcccggccucaccagcgccgugaucgaggcccugccccgcaacaugguccugaccugccagggguccgacgacaucaagcggcuccuggacagccagggccgccgcgacaucaagcugaucgacaucgcccucuccaaggcggacagccggcgcuucgagaacgccgugugggaccagugcaaggaccugugccacaugcacacggggguggucguggagaagaagaagcggggcgggaaggaggagaucacgccccacugcgcccugauggacugcaucauguacgacgccgccguguccggcggccucaacaucccgguccugcgcgcggugcugccccgggacaugguguuccgcaccagcucccccaaggucgugcucugaggacuaguuauaagacugacuagcccgaugggccucccaacgggcccuccuccccuccuugcaccgagauuaaucaaaggcucuuuucagagccaccaaaaaaaaaaaaaaaaaaaaaaaaaaaaaaaaaaaaaaaaaaaaaaaaaaaaaaaaaaaaaaaaaaaaaaaaaaaaaaaaaaaaaaaaaaaaaaaaaaaaa

SEQ ID NO: 17779 - RNA, 1923 nt, Artificial Sequence
  mRNA product Design i-3 (hSL-A100) comprising derived and/or modified sequence from LASV(LASV035-NIG-2009;Clade II)__AIT17589__NP (opt1)
aggagaaagcuuaccaugagcgccuccaaggaggugaaguccuuccuguggacccagagccuccgccgggagcugagcggcuacugcuccagcaucaagcugcaggucgugaaggacgcccaggcgcuccugcacgggcuggacuucuccgaggugagcaacguccagcgccucaugcggaagcagaagcgcgacgacuccgaccugaagcggcugcgcgaccucaaccaggccgugaacaaccugguggagcucaagagcacccagcagaaguccauccugcgggucggcacgcugaccagcgacgaccugcucacccuggccgccgaccuggagaagcucaaguccaaggugauccgcaccgagcggccccugagcuccgggguguacaugggcaaccugagcgcccagcagcucgagcagcgccgggcgcugcugaacaugaucgggauggucggcggcgcccaggggacgcagccgggccgcgacgggguggugcgggucugggacgugaagaaccccgaccuccugaacaaccaguucggcaccaugcccucccugacccucgccugccugaccaagcagggccagguggaccugaacgacgccguccucgcgcugacggaccuggggcucaucuacaccgccaaguaccccaacagcuccgaccuggaccgccugagccagagccacccgauccucaacaugguggacaccaagaaguccagccugaacaucuccggcuacaacuucagccugggggccgccgugaaggccggcgcgugcaugcucgacgggggcaacaugcuggagaccaucaaggucacgccccagaccauggacggcauccugaaguccauccucaaggugaagcggagccuggggauguucguguccgacacccccggcgagcgcaaccccuacgagaacauccuguacaagaucugccucagcggggacggcuggccguacaucgccucccggaccagcaucgucgggcgcgccugggagaacacgaccguggaccuggaguccgacggcaagccccagaaggugggcaccaccgggagcaacaagucccugcagagcgccggcuuccccacggggcucaccuacucccagcugaugacccugaaggacagcaugaugcagcuggaccccuccgccaagaccuggaucgacaucgagggccggccggaggaccccgucgagaucgcgcucuaccagcccaugagcgggugcuacauccacuucuuccgcgagcccacggaccugaagcaguucaagcaggacgccaaguacucccacggcaucgacguggccgaccuguucccggcccagcccggccucaccagcgccgucaucgaggcgcugccccggaacauggugcugaccugccaggggagcgacgacaucaagaagcuccuggacucccagggccgccgcgacaucaagcugaucgacaucgcccucagcaaggccgacucccggaaguucgagaacgccgugugggaccagugcaaggaccugugccacaugcacaccggggucgugguggagaagaagaagcgcggcgggaaggaggagaucacgccccacugcgcccugauggacugcaucauguacgacgcggccgucagcggcggccucaacaucccggugcugcgggccgugcugccccgcgacauggucuuccggaccuccagccccaagguggugcucugaggacuaguuauaagacugacuagcccgaugggccucccaacgggcccuccuccccuccuugcaccgagauuaaucaaaggcucuuuucagagccaccaaaaaaaaaaaaaaaaaaaaaaaaaaaaaaaaaaaaaaaaaaaaaaaaaaaaaaaaaaaaaaaaaaaaaaaaaaaaaaaaaaaaaaaaaaaaaaaaaaaaa

SEQ ID NO: 17780 - RNA, 1923 nt, Artificial Sequence
  mRNA product Design i-3 (hSL-A100) comprising derived and/or modified sequence from LASV(LASV1000-NIG-2009;Clade II)__AIT17783__NP (opt1)
aggagaaagcuuaccaugagcgccuccaaggaggugaaguccuuccuguggacccagagccuccgccgggagcugagcggcuacugcuccaacaucaagcugcaggucgugaaggacgcccaggcgcuccugcacgggcuggacuucagcgagguguccaacguccagcgccucaugcggaagcagaagcgcgacgacagcgaccugaagcggcugcgcgaccucaaccaggccgugaacaaccugguggagcugaaguccacccagcagaaguccauccuccgggucggcacgcugaccagcgacgaccugcucacccuggccgccgaccuggagaagcucaagagcaaggugauccgcaccgagcggccccuguccagcgggguguacaugggcaaccuguccacgcagcagcucgagcagcgccgggcccugcugaacaugaucgggauggucggcggcgcgcaggggacccagccgggccgcgacgggguggugcgggucugggacgugaagaaccccgaccuccugaacaaccaguucggcaccaugcccagccugacccucgccugccugacgaagcagggccagguggaccugaacgacgucgugcucgcccugaccgaccuggggcucaucuacaccgccaaguaccccaacuccagcgaccuggaccgccugucccagagccacccgauccucaacaugguggacaccaagaaguccagccugaacaucagcggcuacaacuucucccugggggcggccgucaaggccggcgccugcaugcucgacgggggcaacaugcuggagacgaucaaggugacgccccagaccauggacggcauccucaagagcauccugaaggugaagaagucccuggggauguucgucagcgacacccccggcgagcggaaccccuacgagaacauccuguacaagaucugccucuccggggacggcuggccguacaucgccagccgcaccuccaucguggggcgggcgugggagaacaccaccguggaccuggagagcgacggcaagccccagaaggucggcaccgccggguccaacaagagccugcaguccgccggcuuccccacggggcucaccuacagccagcugaugacccugaaggacuccaugaugcagcuggaccccagcgccaagaccuggaucgacaucgagggccgcccggaggaccccguggagaucgcccucuaccagcccgucuccgggugcuacauccacuucuuccgggagcccacggaccugaagcaguucaagcaggacgcgaaguacagccacggcaucgacguggccgaccuguucccggcccagcccggccucaccuccgccgugaucgaggcccugccccgcaacaugguccugaccugccaggggagcgacgacaucaagcggcuccuggacagccagggccgccgcgacaucaagcugaucgacaucgcgcucuccaaggccgacagccggcgcuucgagaacgccgugugggaccagugcaaggaccugugccacaugcacaccgggguggucguggagaagaagaagcggggcgggaaggaggagaucacgccccacugcgcccugauggacugcaucauguacgacgccgcgguguccggcggccucaacaucccgguccugcgcgccgugcugccccgggacaugguguuccgcaccagcucccccaaggucgugcucugaggacuaguuauaagacugacuagcccgaugggccucccaacgggcccuccuccccuccuugcaccgagauuaaucaaaggcucuuuucagagccaccaaaaaaaaaaaaaaaaaaaaaaaaaaaaaaaaaaaaaaaaaaaaaaaaaaaaaaaaaaaaaaaaaaaaaaaaaaaaaaaaaaaaaaaaaaaaaaaaaaaaa

SEQ ID NO: 17781 - RNA, 1923 nt, Artificial Sequence
  mRNA product Design i-3 (hSL-A100) comprising derived and/or modified sequence from LASV(LASV221-NIG-2010;Clade II)__AIT17625__NP (opt1)
aggagaaagcuuaccaugagcgccuccaaggaggugaaguccuuccuguggacccagagccuccgccgggagcugagcggcuacugcuccagcaucaagcugcaggucgugaaggacgcccaggcgcuccugcacgggcuggacuucuccgaggugagcaacguccagcgccucaugcggaagcagcgccgggacgacuccgaccugaagcgccugcgggaccucaaccaggccgugaacaaccugguggagcucaagagcacccagcagaaguccauccugcgcgucggcacgcugaccagcgacgaccugcucacccuggccgccgaccuggagaagcucaaguccaaggugauccggaccgagcgcccccugagcuccgggguguacaugggcaaccugagcacgcagcagcucgagcagcggcgcgcccugcugaacaugaucgggauggucggcggcgcgcaggggacccagccgggccgggacgggguggugcgcgucugggacgugaagaaccccgaccuccugaacaaccaguucggcaccaugcccucccugacccucgccugccugacgaagcagggccagguggaccugaacgacgccguccucgcccugaccgaccuggggcucaucuacaccgcgaaguaccccaacagcuccgaccuggaccggcugagccagagccacccgauccucaacaugguggacaccaagaaguccagccugaacaucuccggcuacaacuucagccugggggccgccgugaaggccggcgccugcaugcucgacgggggcaacaugcuggagacgaucaaggucacgccccagaccguggacggcauccugaaguccauccucaaggugaagcgcagccuggggauguucgucuccgacacccccggcgagcggaaccccuacgagaacauccuguacaagaucugccucagcggggacggcuggccguacaucgcgucccgcaccagcaucguggggcgggccugggagaacaccaccguggaccuggaguccgacggcaagccccagaaggucggcaccgccgggagcaacaagucccugcagagcgccggcuuccccacggggcucaccuacucccagcugaugacccugaaggacagcaugaugcagcuggaccccuccgccaagaccuggaucgacaucgagggccgcccggaggaccccguggagaucgcgcucuaccagcccaugagcgggugcuacauccacuucuuccgggagcccacggaccugaagcaguucaagcaggacgccaaguacucccacggcaucgacgucgccgaccuguucccggcccagcccggccucaccagcgccgugaucgaggcgcugccccgcaacauggugcugaccugccaggggagcgacgacaucaagcgccuccuggacucccagggccggcgcgacaucaagcugaucgacaucgcccucagcaaggccgacucccggaaguucgagaacgccgucugggaccagugcaaggaccugugccacaugcacaccggggugguggucgagaagaagaagcgcggcgggaaggaggagaucacgccccacugcgcccugauggacugcaucauguacgacgcggccgugagcggcggccucaacaucccggugcugcgggccguccugccccgcgacaugguguuccggaccuccagccccaaggugguccucugaggacuaguuauaagacugacuagcccgaugggccucccaacgggcccuccuccccuccuugcaccgagauuaaucaaaggcucuuuucagagccaccaaaaaaaaaaaaaaaaaaaaaaaaaaaaaaaaaaaaaaaaaaaaaaaaaaaaaaaaaaaaaaaaaaaaaaaaaaaaaaaaaaaaaaaaaaaaaaaaaaaaa

SEQ ID NO: 17782 - RNA, 1923 nt, Artificial Sequence
  mRNA product Design i-3 (hSL-A100) comprising derived and/or modified sequence from LASV(LASV237-NIG-2010;Clade II)__AIT17639__NP (opt1)
aggagaaagcuuaccaugagcgccuccaaggaggugaaguccuuccuguggacccagagccuccgccgggagcugagcggcuacugcuccaacaucaagcugcaggucgugaaggacgcccaggcgcuccugcacgggcuggacuucagcgagguguccaacguccagcgccucaugcggaagcagaagcgcgacgacagcgaccugaagcggcugcgcgaccucaaccaggccgugaacaaccugguggagcugaaguccacccagcagaaguccauccuccgggucggcacccugaccagcgacgaccugcucacccuggccgccgaccuggagaagcucaagagcaaggugauccgcaccgagcggccccuguccagcgggguguacaugggcaaccuguccacgcagcagcucgagcagcgccgggcccugcugaacaugaucgggauggucggcggcgcgcaggggacccagccgggccgcgacgggguggugcgggucugggacgugaagaaccccgaccuccugaacaaccaguucggcaccaugcccagccugacccucgccugccugacgaagcagggccagguggaccugaacgacgccguccucgcccugaccgaccuggggcucaucuacaccgcgaaguaccccaacuccagcgaccuggaccgccugucccagagccacccgauccucaacaugguggacaucaagaaguccagccugaacaucagcggcuacaacuucucccugggggccgccgugaaggccggcgccugcaugcucgacgggggcaacaugcuggagaccaucaaggucacgccccagaccauggacggcauccucaagagcauccugaaggugaagcggucccuggggauguucgugagcgacacccccggcgagcgcaaccccuacgagaacauccuguacaagaucugccucuccggggacggcuggccguacaucgcgagccggaccuccaucgucgggcgcgccugggagaacacgaccguggaccuggagagcgacggcaagccccagaaggugggcuccgccgggagcaacaagucccugcagagcgccggcuuccccaccgggcucaccuacucccagcugaugacgcugaaggacagcaugaugcagcuggaccccuccgccaagaccuggaucgacaucgagggccggccggaggaccccgucgagaucgcgcucuaccagcccaugagcgggugcuacauccacuucuuccgcgagcccaccgaccugaagcaguucaagcaggacgccaaguacucccacggcaucgacguggccgaccuguucccggcccagcccggccucaccagcgccgucaucgaggcgcugccccggaacauggugcugacgugccaggggagcgacgacaucaagcgccuccuggacucccagggccgccgggacaucaagcugaucgacaucgcccucagcaaggccgacucccgccgguucgagaacgccgugugggaccagugcaaggaccugugccacaugcacaccggggucgugguggagaagaagaagcgcggcgggaaggaggagaucacgccccacugcgcccugauggacugcaucauguacgacgcggccgucagcggcggccucaacaucccggugcugcgggccgugcugccccgcgacauggucuuccggaccuccagccccaagguggugcucugaggacuaguuauaagacugacuagcccgaugggccucccaacgggcccuccuccccuccuugcaccgagauuaaucaaaggcucuuuucagagccaccaaaaaaaaaaaaaaaaaaaaaaaaaaaaaaaaaaaaaaaaaaaaaaaaaaaaaaaaaaaaaaaaaaaaaaaaaaaaaaaaaaaaaaaaaaaaaaaaaaaaa

SEQ ID NO: 17783 - RNA, 1923 nt, Artificial Sequence
  mRNA product Design i-3 (hSL-A100) comprising derived and/or modified sequence from LASV(LASV253-NIG-2011;Clade II)__AIT17671__NP (opt1)
aggagaaagcuuaccaugagcgccuccaaggaggugaaguccuuccuguggacccagagccuccgccgggagcugagcggcuacugcuccagcaucaagcugcaggucgugaaggacgcccaggcgcuccugcacgggcuggacuucuccgaggugagcaacguccagcgccucaugcggaagcagaagcgcgacgacuccgaccugaagcggcugcgcgaccucaaccaggccgugaacaaccugguggagcucaagagcacccagcagaaguccguccugcgggugggcacccugaccagcgacgaccugcucacccuggccgccgaccuggagaagcucaaguccaaggugauccgcaccgagcggccccugagcuccggggucuacaugggcaaccugagcacgcagcagcucgagcagcgccgggcccugcugaacaugaucgggauggugggcggcgcgcaggggacccagccgggccgcgacggggugguccgggugugggacgugaagaaccccgaccuccugaacaaccaguucggcaccaugcccucccugacccucgccugccugacgaagcaggggcaggucgaccugaacgacguggugcucgcccugaccgaccugggccucaucuacaccgccaaguaccccaacagcuccgaccuggaccgccugagccagagccacccgauccucaacauggucgacaccaagaaguccagccugaacaucuccggcuacaacuucagccugggggcggccgugaaggccggcgccugcaugcucgacgggggcaacaugcuggagacgaucaaggugacgccccagaccauggacggcauccugaaguccauccucaaggucaagaagucccuggggauguucgugagcgacacccccggcgagcggaaccccuacgagaacauccuguacaagaucugccucagcggggacggcuggccguacaucgccucccgcaccagcaucguggggcgggcgugggagaacaccaccgucgaccuggaguccgacggcaagccccagaaggugggcaccgccgggagcaacaagucccugcagagcgccggcuuccccacggggcucaccuacucccagcugaugacccugaaggacagcaugaugcagcuggaccccuccgccaagaccuggaucgacaucgagggccgcccggaggaccccgucgagaucgcccucuaccagcccaugagcgggugcuacauccacuucuuccgggagcccacggaccugaagcaguucaagcaggacgcgaaguacucccacggcaucgacgugaccgaccuguucccggcccagcccggccucaccagcgccgugaucgaggcccugccccgcaacaugguccugaccugccaggggagcgacgacaucaagcggcuccuggacucccagggccgccgcgacaucaagcugaucgacaucgcccucagcaaggcggacucccggcgcuucgagaacgccgugugggaccagugcaaggaccugugccacaugcacacggggguggucguggagaagaagaagcggggcgggaaggaggagaucacgccccacugcgcccugauggacugcaucauguacgacgccgccgugagcggcggccucaacaucccgguccugcgcgcggugcugccccgggacaugguguuccgcaccuccagccccaaggucgugcucugaggacuaguuauaagacugacuagcccgaugggccucccaacgggcccuccuccccuccuugcaccgagauuaaucaaaggcucuuuucagagccaccaaaaaaaaaaaaaaaaaaaaaaaaaaaaaaaaaaaaaaaaaaaaaaaaaaaaaaaaaaaaaaaaaaaaaaaaaaaaaaaaaaaaaaaaaaaaaaaaaaaaa

SEQ ID NO: 17784 - RNA, 1923 nt, Artificial Sequence
  mRNA product Design i-3 (hSL-A100) comprising derived and/or modified sequence from LASV(LASV254-NIG-2011;Clade II)__AIT17675__NP (opt1)
aggagaaagcuuaccaugagcgccuccaaggaggugaaguccuuccuguggacccagagccuccgccgggagcugagcggcuacugcuccagcaucaagcugcaggucgugaaggacgcccaggcgcuccugcacgggcuggacuucuccgaggugagcaacguccagcgccucaugcggaagcagaagcgcgacgacuccgaccugaagcggcugcgcgaccucaaccaggccgugaacaaccugguggagcucaagagcacccagcagaaguccguccugcgggugggcacgcugaccagcgacgaccugcucacccuggccgccgaccuggagaagcucaaguccaaggugauccgcaccgagcggccccugagcuccggggucuacaugggcaaccugagcacgcagcagcucgagcagcgccgggcccugcugaacaugaucgggauggugggcggcgcgcaggggacccagccgggccgcgacggggugguccgggugugggacgugaagaaccccgaccuccugaacaaccaguucggcaccaugcccucccugacccucgccugccugacgaagcaggggcaggucgaccugaacgacgccgugcucgcccugaccgaccugggccucaucuacaccgcgaaguaccccaacagcuccgaccuggaccgccugagccagagccacccgauccucaacaugguggacaccaagaaguccagccugaacaucuccggcuacaacuucagccugggggccgccgucaaggccggcgccugcaugcucgacgggggcaacaugcuggagacgaucaaggugacgccccagaccauggacggcauccugaaguccauccucaaggugaagaagucccuggggauguucgucagcgacacccccggcgagcggaaccccuacgagaacauccuguacaagaucugccucagcggggacggcuggccguacaucgcgucccgcaccagcaucguggggcgggccugggagaacaccaucguggaccuggaguccgacggcaagccccagaaggucggcaccgccgggagcaacaagucccugcagagcgccggcuuccccaccgggcucacguacucccagcugaugacccugaaggacagcaugaugcagcuggaccccuccgccaagaccuggaucgacaucgagggccgcccggaggaccccguggagaucgcgcucuaccagcccaugagcgggugcuacauccacuucuuccgggagcccaccgaccugaagcaguucaagcaggacgccaaguacucccacggcaucgacgucgccgaccuguucccggcccagcccggccucacgagcgccgugaucgaggcgcugccccgcaacauggugcugaccugccaggggagcgacgacaucaagcggcuccuggacucccagggccgccgcgacaucaagcugaucgacaucgcccucagcaaggccgacucccggcgcuucgagaacgccgucugggaccagugcaaggaccugugccacaugcacaccggggugguggucgagaagaagaagcggggcgggaaggaggagaucacgccccacugcgcccugauggacugcaucauguacgacgcggccgugagcggcggccucaacaucccggugcugcgcgccguccugccccgggacaugguguuccgcaccuccagccccaaggugguccucugaggacuaguuauaagacugacuagcccgaugggccucccaacgggcccuccuccccuccuugcaccgagauuaaucaaaggcucuuuucagagccaccaaaaaaaaaaaaaaaaaaaaaaaaaaaaaaaaaaaaaaaaaaaaaaaaaaaaaaaaaaaaaaaaaaaaaaaaaaaaaaaaaaaaaaaaaaaaaaaaaaaaa

SEQ ID NO: 17785 - RNA, 1923 nt, Artificial Sequence
  mRNA product Design i-3 (hSL-A100) comprising derived and/or modified sequence from LASV(Nig08-04;Clade II)__ADU56611__NP (opt1)
aggagaaagcuuaccaugagcgccuccaaggaggugaaguccuuccuguggacccagagccuccgccgggagcugagcggcuacugcuccaacaucaagcugcaggucgugaaggacgcccaggcgcuccugcacgggcuggacuucagcgagguguccaacguccagcgccucaugcggaagcagaagcgcgacgacggcgaccugaagcggcugcgcgaccucaaccaggccgugaacaaccugguggagcucaagagcacccagcagaaguccguccugcggguggggacccugaccagcgacgaccugcucacccuggccgccgaccuggagaagcucaaguccaaggugauccgcaccgagcggccccugagcuccggcgucuacauggggaaccugagcacgcagcagcucgagcagcgcaaggcccugcuguccaugaucggcauggugggcggggcgcagggcacccagccggggcgggacggcgugguccgcgugugggacgugaagaaccccgaccuccugaacaaccaguucgggaccaugcccagccugacccucgccugccugacgaagcagggccaggucgaccugaacgacgccgugcucgcccugaccgaccugggccucaucuacaccgcgaaguaccccaacuccagcgaccuggaccggcugucccagagccacccgauccucaacaugguggacaccaagaaguccagccugaacaucagcggguacaacuucucccugggcgccgccgucaaggccggggccugcaugcucgacggcggcaacaugcuggagacgaucaaggugacgccccagaccauggacgggauccucaagagcauccugaaggugaagcgcucccugggcauguucgucagcgacacccccggggagcggaaccccuacgagaacauccuguacaagaucugccucuccggcgacggguggccguacaucgcgagccgcaccuccaucgugggccgggccugggagaacaccaccguggaccuggagagcgacggcaagccccagaaggucgggaccgccggcuccaacaagagccugcaguccgccggguuccccacgggccucaccuacagccagcugaugacccugaaggacuccaugaugcagcuggaccccagcgccaagaccuggaucgacaucgaggggcgcccggaggaccccguggagaucgcgcucuaccagcccauguccggcugcuacauccacuucuuccgggagcccacggaccugaagcaguucaagcaggacgccaaguacagccacggcaucgacgucaccgaccuguucuccgcccagccggggcucaccagcgccgugaucgaggcccugccccgcaacauggugcugaccugccagggcagcgacgacaucaagaagcuccuggacucccaggggcggcgcgacaucaagcugaucgacaucagccucaacaaggcggacucccgccgguucgagaacgccgucugggaccagugcaaggaccugugccacaugcacacgggcgugguggucgagaagaagaagcgcgggggcaaggaggagaucacgccccacugcgcccugauggacugcaucauguucgacgccgccgugagcggcgggcucaacauccccauccugcgggcggugcugccgcgcgacauggucuuccggaccuccagccccaagguggugcucugaggacuaguuauaagacugacuagcccgaugggccucccaacgggcccuccuccccuccuugcaccgagauuaaucaaaggcucuuuucagagccaccaaaaaaaaaaaaaaaaaaaaaaaaaaaaaaaaaaaaaaaaaaaaaaaaaaaaaaaaaaaaaaaaaaaaaaaaaaaaaaaaaaaaaaaaaaaaaaaaaaaaa

SEQ ID NO: 17786 - RNA, 1926 nt, Artificial Sequence
  mRNA product Design i-3 (hSL-A100) comprising derived and/or modified sequence from LASV(GA391;Clade III)__AAA46284__NP (opt1)
aggagaaagcuuaccaugagcgccuccaaggaggugcgcagcugccuguggacccagucccuccggcgcgagcugagcggcuacugcuccaacaucaagcugcaggucgugaaggacgcccaggcgcuccugcacgggcuggacuucagcgagguguccaacguccagcggcucaugcgcaagcagaagcgggacgacggcgaccugaagcgccugcgggaccucaaccaggccgugaacaaccugguggagcugaaguccacccagcagaaguccguccuccgcguggggacgcugagcuccgacgaccugcucauccuggccgccgaccuggagaagcucaagagcaaggugacccggaccgagcgcccccuguccagcggcgucuacauggggaaccuguccagccagcagcucgaccagcggcgcgcccugcugaacaugaucggcaugaccggcguguccgggggcgggaagggcgcgagcaacgggaucgugcgggucugggacgugaagaacgccgagcuccugaacaaccaguucggcacgaugccgucccugacccucgccugccugaccaagcagggccagguggaccugaacgacgccguccaggcgcucaccgaccuggggcugaucuacacggccaaguaccccaacagcagcgaccucgaccgccugucccagagccaccccauccugaacaugaucgacaccaagaaguccagccucaacaucuccggcuacaacuucagccugggggccgccgugaaggccggcgcgugcaugcuggacggcgggaacaugcucgagaccaucaaggugagcccccagaccauggacggcauccucaagagcauccugaaggucaagaagucccuggggauguucgugagcgacacgccgggcgagcggaaccccuacgagaacauccuguacaagaucugccuguccggggacggcuggagcuacaucgccucccgcaccagcaucgugggccgggccugggagaacaccgucguggaccucgagcaggacaacaagccccagaagaucgggaacggcggguccaacaagagccugcaguccgccggcuucgccgcggggcugaucuacagccagcucaugacccugaaggacuucaagugcuucaaccugauccccaacgccaagacguggauggacaucgagggccgcccggaggaccccguggagaucgcccuguaccagcccuccagcggcugcuacguccacuucuuccgggagcccaccgaccucaagcaguucaagcaggacgccaaguacagccacgggcgcgacgugaccgaccuguucgccgcgcagccgggccugaccuccgccgucaucgaggcccucccccggaacauggugaucacgugccaggggagcgaggacauccgcaagcugcuggagucccagggccgccgggacaucaagcucaucgacaucacccugagcaaggccgacucccgcaaguucgagaacgccgugugggaccaguucaaggaccugugccacaugcacaccggggucgugguggagaagaagaagcggggcggcaaggaggagaucacgccccacugcgcgcucauggacugcaucauguucgacgccgccgucagcgggggccuggacgccaaggugcugcgcgugguccucccccgggacaugguguuccgcaccuccaccccgaaggugguccugugaggacuaguuauaagacugacuagcccgaugggccucccaacgggcccuccuccccuccuugcaccgagauuaaucaaaggcucuuuucagagccaccaaaaaaaaaaaaaaaaaaaaaaaaaaaaaaaaaaaaaaaaaaaaaaaaaaaaaaaaaaaaaaaaaaaaaaaaaaaaaaaaaaaaaaaaaaaaaaaaaaaaa

SEQ ID NO: 17787 - RNA, 1923 nt, Artificial Sequence
  mRNA product Design i-3 (hSL-A100) comprising derived and/or modified sequence from LASV(Nig08-A19;Clade III)__ADU56619__NP (opt1)
aggagaaagcuuaccaugagcgccuccaaggaggugaaguccuuccuguggacccagucccuccgccgggagcugagcggcuacugcuccaacaucaagcugcaggucgugaaggacgcccaggcgcuccugcacgggcuggacuucagcgagguguccaacguccagcgccucaugcggaagcagaagcgcgacgacggcgaccugaagcggcugcgcgaccucaaccaggccgugaacaaccugguggagcucaagagcacccagcagaaguccguccugcggguggggacccugagcuccgacgaccugcucgugcuggccgccgaccuggagaagcucaagagcaaggucgugcgcaccgagcggccccuguccagcggcaucuacauggggaaccuguccagccagcagcucgaccagcgcaaggcccugcugaacaugaucggcaugaccggcgggaacggcgggcggaacaccacguccgacggcaucgugcgcgucugggacgugaagaacgcggagcuccugaacaaccaguucgggaccaugccgagccugacccucgccugccugaccaagcagggccagguggaccugaacgacgccguccaggcccucacggaccugggccugaucuacaccgcgaaguaccccaacuccagcgaccucgaccggcuggcccagagccaccccauccugaacaugaucgacaccaagaaguccagccucaacaucuccggguacaacuucagccugggcgccgccgugaaggccggggcgugcaugcuggacggcggcaacaugcucgagaccaucaaggugagcccccagacgauggacgggauccucaagagcauccugaaggucaagcgcucccugggcauguucaucagcgacaccccgggggagcggaaccccuacgagaacauccuguacaagaucugccuguccggcgacggguggcccuacaucgccagccgcaccuccaucgugggccgggccugggagaacaccguggucgaccucgagagcgacaacaagccccagaagacgggcaacgggggcuccaacaagagccugcaguccgccggguucgccgcgggccugaccuacagccagcucaugacccugaaggacuccaugcugcagcuggacccgaacgccaagaccuggauggacaucgaggggcgccccgaggaccccguggagaucgcccucuaccagcccagcuccggcugcuacauccacuucuuccgggagccgacggaccugaagcaguucaagcaggacgccaaguacagccacggcaucgacgugaccgaccuguucgccgcgcagcccgggcucaccagcgccgucaucgaggcccugccccgcaacauggugaucacgugccagggcuccgaggacauccggaagcugcucgagagccaggggcgccgcgacaucaagcugaucgacaucucccugagcaaggucgacucccggaaguucgagaacgccgugugggaccaguucaaggaccucugccacaugcacaccggcaucguggucgagaagaagaagcgcgggggcaaggaggagaucacgccccacugcgcccugauggacugcaucauguucgacgcggccgugagcggcgggguggacgccaagguccugcgggccgugcucccgcgcgacaugguguuccggaccuccacccccaaggucgugcugugaggacuaguuauaagacugacuagcccgaugggccucccaacgggcccuccuccccuccuugcaccgagauuaaucaaaggcucuuuucagagccaccaaaaaaaaaaaaaaaaaaaaaaaaaaaaaaaaaaaaaaaaaaaaaaaaaaaaaaaaaaaaaaaaaaaaaaaaaaaaaaaaaaaaaaaaaaaaaaaaaaaaa

SEQ ID NO: 17788 - RNA, 1923 nt, Artificial Sequence
  mRNA product Design i-3 (hSL-A100) comprising derived and/or modified sequence from LASV(G1180-SLE-2010;Clade IV)__AIT17169__NP (opt1)
aggagaaagcuuaccaugagcgccuccaaggagaucaagagcuuccuguggacccagucccuccgccgggagcugagcggcuacugcuccaacaucaagcuccagguggucaaggacgcccaggcgcugcugcacgggcuggacuucagcgagguguccaacgugcagcgccucaugcggaaggagcgccgggacgacaacgaccugaagcgccugcgggaccucaaccaggccgucaacaaccugguggagcucaagagcacccagcagaaguccauccugcgcgugggcacccugaccagcgacgaccugcucauccuggccgccgaccuggagaagcucaaguccaaggucauccggaccgagcgcccccugagcgccgggguguacaugggcaaccuguccagccagcagcucgaccagcggcgcgcgcugcuguccaugaucgggaugagcuccggcaaccagcgggcccaggccggccgcgacggggugguccgggugugggacgugaagaacgucgagcuccugaacaaccaguucggcaccaugccgagccugacgcucgccugccugaccaagcagggccagguggaccugaacgacgcggugcaggcccucaccgaccuggggcugaucuacaccgccaaguaccccaacacguccgaccucgaccgccugacccagagccaccccauccugaacaugaucgacaccaagaaguccagccucaacaucagcggguacaacuucucccugggcgccgccgucaaggcgggcgccugcaugcuggacgggggcaacaugcucgagaccaucaaggugagcccccagacgauggacgggauccugaaguccauccugaaggugaagaaggcccucggcauguucaucagcgacaccccgggcgagcggaaccccuacgagaacauccuguacaagaucugccuguccggggacggcuggcccuacaucgccagccgcaccuccaucaccgggcgggccugggagaacacggucguggaccucgagagcgacggcaagccccagaaggcgggguccaacaacagcaacaagucccugcagagcgugggcuucaccgccggccugaccuacucccagcucaugacccugaaggacgccaugcugcagcuggacccgaacgccaagacguggauggacaucgaggggcgccccgaggaccccgucgagaucgcccucuaccagcccagcuccggcugcuacauccacuucuuccgggagccgaccgaccugaagcaguucaagcaggacgcgaaguacagccacgggaucgacgugaccgaccuguucgccgcccagcccggccucaccuccgccgugaucgacgcccugccccgcaacauggucaucacgugccaggggagcgacgacauccgcaagcugcucgagagccagggccggaaggacaucaagcugaucgacaucgcgcuguccaagaccgacagccgcaaguacgagaacgccgugugggaccaguacaaggaccucugccacaugcacaccggcgucgugguggagaagaagaagcgcgggggcaaggaggagaucacgccccacugcgcccugauggacugcaucauguucgacgccgcggucuccgggggccugaacaccagcgugcuccgggccgugcugccgcgggacauggucuuccgcaccuccacgccccggguggugcugugaggacuaguuauaagacugacuagcccgaugggccucccaacgggcccuccuccccuccuugcaccgagauuaaucaaaggcucuuuucagagccaccaaaaaaaaaaaaaaaaaaaaaaaaaaaaaaaaaaaaaaaaaaaaaaaaaaaaaaaaaaaaaaaaaaaaaaaaaaaaaaaaaaaaaaaaaaaaaaaaaaaaa

SEQ ID NO: 17789 - RNA, 1923 nt, Artificial Sequence
  mRNA product Design i-3 (hSL-A100) comprising derived and/or modified sequence from LASV(G1442-SLE-2011;Clade IV)__AIT17181__NP (opt1)
aggagaaagcuuaccaugagcgccuccaaggaggugaaguccuuccuguggacccagagccuccgccgggagcugagcggcuacugcuccaacaucaagcugcaggucgugaaggacgcccaggcgcuccugcacgggcuggacuucagcgagguguccaacguccagcgccucaugcggaagcagcgccgggacgacaacgaccugaagcgccugcgggaccucaaccaggccgugaacaaccugguggagcucaagagcacccagcagaaguccguccugcgcgugggcacccugaccagcgacgaccugcucgugcuggccgccgaccuggagaagcucaaguccaaggucauccggaccgagcgcccccugagcgccgggguguacaugggcaaccuguccagccagcagcucgaccagcggcgcgcgcugcugaacaugaucgggauguccggcggcauccaggggacccggacgggccgcgacggggugguccgggugugggacgugaagaacgccgaccuccugaacaaccaguucggcaccaugccgagccugacccucgccugccugaccaagcaggggcaggucgaccugaacgacguggugcaggcccucacggaccugggccugaucuacaccgcgaaguaccccaacgccuccgaccucgaccgccugacccagagccaccccauccugaacaugaucgacaccaagaaguccagccucaacaucagcggcuacaacuucucccugggggccgccgucaaggccggcgcgugcaugcuggacgggggcaacaugcucgagacgaucaaggugagcccccagaccauggacggcauccugaaguccauccugaaggugaagaagacccucgggauguucaucagcgacaccccgggcgagcggaaccccuacgagaacauccuguacaagaucugccuguccggggacggcuggcccuacaucgccagccgcacguccaucaccgggcgggccugggagaacaccgucguggaccucgagagcgacggcaagccccagaaggccggcuccaacaacagcaacaagucccugcagagcgccggguucgcggccggccugaccuacucccagcucaugacgcugaaggacgccaugcugcagcuggacccgaacgccaagaccuggauggacaucgaggggcgccccgaggaccccguggagaucgcccucuaccagcccagcuccggcugcuacauccacuucuuccgggagccgaccgaccugaagcaguucaagcaggacgcgaaguacagccacgggaucgacgucaccgaccuguucgccgcccagcccggccucacguccgccgugaucgaggcccugccccgcaacauggucaucacgugccagggcagcgacgacaucaagaagcugcucgagucccaggggcgcaaggacaucaagcugaucgacaucgcgcugagcaagaccgacagccggaaguacgagaacgccgugugggaccaguacaaggaccucugccacaugcacaccggcguggucguggagaagaagaagcgcgggggcaaggaggagaucaccccgcacugcgcccugauggacugcaucauguucgacgccgcgguguccgggggccugaacacccucguccugcgggccgugcugccccgcgacaugguguuccggaccagcacgccccgcgucgugcucugaggacuaguuauaagacugacuagcccgaugggccucccaacgggcccuccuccccuccuugcaccgagauuaaucaaaggcucuuuucagagccaccaaaaaaaaaaaaaaaaaaaaaaaaaaaaaaaaaaaaaaaaaaaaaaaaaaaaaaaaaaaaaaaaaaaaaaaaaaaaaaaaaaaaaaaaaaaaaaaaaaaaa

SEQ ID NO: 17790 - RNA, 1923 nt, Artificial Sequence
  mRNA product Design i-3 (hSL-A100) comprising derived and/or modified sequence from LASV(G3010-SLE-2013;Clade IV)__AIT17345__NP (opt1)
aggagaaagcuuaccaugagcgccuccaaggagaucaagagcuuccuguggacccagucccuccgccgggagcugagcggcuacugcuccaacaucaagcuccagguggucaaggacgcccaggcgcugcugcacgggcuggacuucagcgagguguccaacgugcagcgccucaugcggaaggagcgccgggacgacaacgaccugaagcgccugcgggaccucaaccaggccgucaacaaccugguggagcucaagagcacccagcagaaguccauccugcgcgugggcacccugaccagcgacgaccugcucauccuggccgccgaccuggagaagcucaaguccaaggucacccggaccgagcgcccccugagcgccgggguguacaugggcaaccuguccagccagcagcucgaccagcggcgcgcgcugcuguccaugaucgggaugagcuccggcgugcagggcgcccgggccgggcgcgacggcgucgugcgggugugggacgucaagaacgccgagcuccugaacaaccaguucgggacgaugccgagccugacccucgcgugccugaccaagcagggccagguggaccugaacgacgugguccaggcccucaccgaccuggggcugaucuacacggccaaguaccccaacaccuccgaccucgaccgccugacccagagccaccccauccugaacaugaucgacaccaagaaguccagccucaacaucagcggcuacaacuucucccugggcgccgccgugaaggcgggggccugcaugcuggacggcgggaacaugcucgagacgaucaaggugagcccccagaccauggacggcauccugaaguccauccugaaggucaagaaggcccucggcauguucaucagcgagaccccgggggagcggaaccccuacgagaacauccuguacaagaucugccuguccggcgacggguggcccuacaucgccagccgcaccuccaucacgggccgggccugggagaacaccgugguggaccucgagagcgacgggaagccccagaaggcgggcuccaacaacagcaacaagucccugcagagcgccggcuucaccgccgggcugaccuacucccagcucaugacgcugaaggacgccaugcugcagcuggacccgaacgccaagaccuggauggacaucgagggccgccccgaggaccccgucgagguggcgcucuaccagcccagcuccgggugcuacauccacuucuuccgggagccgaccgaccugaagcaguucaagcaggacgccaaguacagccacggcaucgacgugaccgaccuguucgccgcccagcccgggcucacguccgccgucaucgacgcgcugccccgcaacauggugaucacgugccagggcagcgacgacaucaagaagcugcucgagagccagggccgcaaggacaucaagcugaucgacaucgcccuguccaagaccgacagccggaaguacgagaacgccgucugggaccaguacaaggaccucugccacaugcacaccggggugguggucgagaagaagaagcgcggcgggaaggaggagaucaccccgcacugcgcccugauggacugcaucauguucgacgcggccguguccggcgggcugaacaccagcgugcuccgggccguccugccccgcgacaugguguuccggaccuccacgccccgcgugguccugugaggacuaguuauaagacugacuagcccgaugggccucccaacgggcccuccuccccuccuugcaccgagauuaaucaaaggcucuuuucagagccaccaaaaaaaaaaaaaaaaaaaaaaaaaaaaaaaaaaaaaaaaaaaaaaaaaaaaaaaaaaaaaaaaaaaaaaaaaaaaaaaaaaaaaaaaaaaaaaaaaaaaa

SEQ ID NO: 17791 - RNA, 1923 nt, Artificial Sequence
  mRNA product Design i-3 (hSL-A100) comprising derived and/or modified sequence from LASV(G502-SLE-2009;Clade IV)__AIT17127__NP (opt1)
aggagaaagcuuaccaugagcgccuccaaggagaucaagagcuuccuguggacccagucccuccgccgggagcugagcggcuacugcuccaacaucaagcuccagguggucaaggacgcccaggcgcugcugcacgggcuggacuucagcgagguguccaacgugcagcgccucaugcggaaggagcgccgggacgacaacgaccugaagcgccugcgggaccucaaccaggccgucaacaaccugguggagcucaagagcacccagcagaaguccauccugcgcgugggcacccugaccagcgacgaccugcucauccuggccgccgaccuggagaagcucaaguccaaggucauccggaccgagcgcccccugagcgccgggguguacaugggcaaccuguccagccagcagcucgaccagcggcgcgcgcugcuguccaugaucgggaugagcggcggcaaccagggggugcgggccggcaaggacggggucgugcgcgugugggacgucaagaacgccgagcuccugaacaaccaguucggcaccaugccgucccugacgcucgccugccugaccaagcagggccagguggaccugaacgacgcggugcaggcccucaccgaccuggggcugaucuacaccgccaaguaccccaacacgagcgaccucgaccggcugacccagucccaccccauccugaacaugaucgacaccaagaaguccagccucaacaucuccggcuacaacuucagccugggggccgccgucaaggcgggcgccugcaugcuggacgggggcaacaugcucgagaccaucaaggugagcccccagacgauggacggcauccucaagagcauccugaaggugaagaaggcccuggggauguucaucuccgacaccccgggcgagcgcaaccccuacgagaacauccuguacaagaucugccugagcggggacggcuggcccuacaucgccucccggaccagcaucaccgggcgcgccugggagaacacggucguggaccucgaguccgacggcaagccccagaaggcgggcagcaacaacuccaacaagagccugcaguccgccggguucaccgccggccugaccuacagccagcucaugacccugaaggacgccaugcugcagcuggacccgaacacgaagaccuggauggacaucgaggggcggcccgaggaccccguggagaucgcccucuaccagcccuccagcggcugcuacauccacuucuuccgcgagccgaccgaccugaagcaguucaagcaggacgcgaaguacucccacgggaucgacgucaccgaccuguucgccgcccagcccggccucacgagcgccgugaucgacgcccugccccggaacauggugaucacgugccagggcuccgacgacauccgcaagcugcucgagagccaggggcgcaaggacaucaagcugaucgacaucgcgcugaacaagaccgacagccggaaguacgagaacgccgucugggaccaguacaaggaccucugccacaugcacaccggcguggucguggagaagaagaagcgcgggggcaaggaggagaucaccccgcacugcgcccugauggacugcaucauguucgacgccgcgguguccgggggccugaacaccagcguccuccgggccgugcugccccgcgacaugguguuccggaccuccacgccccgcgucgugcugugaggacuaguuauaagacugacuagcccgaugggccucccaacgggcccuccuccccuccuugcaccgagauuaaucaaaggcucuuuucagagccaccaaaaaaaaaaaaaaaaaaaaaaaaaaaaaaaaaaaaaaaaaaaaaaaaaaaaaaaaaaaaaaaaaaaaaaaaaaaaaaaaaaaaaaaaaaaaaaaaaaaaa

SEQ ID NO: 17792 - RNA, 1923 nt, Artificial Sequence
  mRNA product Design i-3 (hSL-A100) comprising derived and/or modified sequence from LASV(G733-SLE-2010;Clade IV)__AIT17155__NP (opt1)
aggagaaagcuuaccaugagcgccuccaaggagaucaagagcuuccuguggacccagucccuccgccgggagcugagcggcuacugcuccaacaucaagcuccagguggucaaggacgcccaggcgcugcugcacgggcuggacuucagcgagguguccaacgugcagcgccucaugcggaaggagcgccgggacgacaacgaccugaagcgccugcgggaccucaaccaggccgucaacaaccugguggagcucaagagcacccagcagaaguccgugcugcgcgucggcacccugaccagcgacgagcugcucgugcuggccgccgaccuggagaagcucaaguccaaggugauccggaccgagcgcccccugagcgccggggucuacaugggcaaccuguccagccagcagcucgaccagcggcgcgcgcugcuguccaugaucgggaugagcggcggcaaccagggggcccggaccggccgcgacgggguggugcgggucugggacgugaagaacgccgagcuccugaacaaccaguucggcaccaugccgucccugacccucgccugccugaccaagcagggccagguggaccugaacgacgcgguccaggcccucaccgaccuggggcugaucuacacggccaaguaccccaacaccagcgaccucgaccgccugacccagucccaccccauccugaacaugaucgacaccaagaaguccagccucaacaucuccggcuacaacuucagccugggggccgccgugaaggcgggcgccugcaugcuggacgggggcaacaugcucgagacgaucaaggugagcccccagaccauggacggcauccucaagagcauccugaaggucaagaaggcccuggggauguucaucuccgacaccccgggcgagcggaaccccuacgagaacauccuguacaagaucugccugagcggggacggcuggcccuacaucgccucccgcaccagcaucacggggcgggccugggagaacaccgugguggaccucgaguccgacggcaagccccagaaggcgggcagcaacaacuccaacaagagccugcaguccgccggguucaccgccggccugaccuacagccagcucaugacgcugaaggacgccaugcugcagcuggacccgaacgccaagaccuggauggacaucgaggggcgccccgaggaccccgucgagaucgcgcucuaccagcccuccagcggcugcuacauccacuucuuccgggagccgaccgaccugaagcaguucaagcaggacgccaaguacucccacgggaucgacgugaccgaccuguucgccgcccagcccggccucacgagcgccgugaucgacgcgcugccccgcaacauggucaucacgugccagggcuccgacgacauccgcaagcugcucgagagccaggggcggaaggacaucaagcugaucgacaucgcccugagcaagaucgacucccgcaaguacgagaacgccgugugggaccaguacaaggaccucugccacaugcacaccggcgucgugguggagaagaagaagcgcgggggcaaggaggagaucacgccccacugcgcccugauggacugcaucauguucgacgcggccgucagcgggggccugaacucccucgugcugcgggccgugcugccgcgggacauggucuuccgcaccagcacgccccggguggugcucugaggacuaguuauaagacugacuagcccgaugggccucccaacgggcccuccuccccuccuugcaccgagauuaaucaaaggcucuuuucagagccaccaaaaaaaaaaaaaaaaaaaaaaaaaaaaaaaaaaaaaaaaaaaaaaaaaaaaaaaaaaaaaaaaaaaaaaaaaaaaaaaaaaaaaaaaaaaaaaaaaaaaa

SEQ ID NO: 17793 - RNA, 1923 nt, Artificial Sequence
  mRNA product Design i-3 (hSL-A100) comprising derived and/or modified sequence from MOPV/LASV reassortant(IGS-1;Clade IV)__AFY05578__NP (opt1)
aggagaaagcuuaccaugagcgccuccaaggagaucaagagcuuccuguggacccagucccuccgccgggagcugagcggcuacugcuccaacaucaagcuccagguggucaaggacgcccaggcgcugcugcacgggcuggacuucagcgagguguccaacgugcagcgccucaugcggaaggagcgccgggacgacaacgaccugaagcgccugcgggaccucaaccaggccgucaacaaccugguggagcucaagagcacccagcagaaguccauccugcgcgugggcacccugaccagcgacgaccugcucauccuggccgccgaccuggagaagcuccgguccaaggucauccgcaccgagcggccccugagcgccgggguguacaugggcaaccuguccagccagcagcucgaccagcgccgggcgcugcugaacaugaucgggauguccggcggcaaccagggggcccgcgccggccgggacggggugguccgcgugugggacgugaagaacgccgagcuccugagcaaccaguucggcaccaugccgucccugacgcucgcgugccugaccaagcaggggcaggucgaccugaacgacgccgugcaggcccucaccgaccugggccugaucuacaccgccaaguaccccaacacgagcgaccucgaccggcugacccagucccaccccauccugaacaugaucgacaccaagaaguccagccucaacaucuccggcuacaacuucagccugggggccgcggugaaggccggcgccugcaugcuggacgggggcaacaugcucgagaccaucaaggucagcccccagacgauggacggcauccucaagagcauccugaaggugaagaaggcccuggggauguucaucuccgacaccccgggcgagcgcaaccccuacgagaacauccuguacaagaucugccugagcggggacggcuggcccuacaucgccucccggaccagcaucaccgggcgcgcgugggagaacacgguggucgaccucgaguccgacggcaagccccagaaggccgacagcaacaacuccagcaagucccugcagagcgccggcuucaccgccgggcugaccuacucccagcucaugacccugaaggacgccaugcugcagcuggacccgaacgcgaagacguggauggacaucgagggccggcccgaggaccccguggagaucgcccucuaccagcccagcuccgggugcuacauccacuucuuccgcgagccgaccgaccugaagcaguucaagcaggacgccaaguacagccacggcaucgacgugaccgaccuguucgccacccagcccgggcucacguccgccgucaucgacgcgcugccccgcaacauggugaucacgugccagggcagcgacgacauccggaagcugcucgagagccagggccgcaaggacaucaagcugaucgacaucgaccuguccaagaccgacagccggaaguacgagaacgccgugugggaccaguacaaggaccucugccacaugcacaccggggucguggucgagaagaagaagcgcggcgggaaggaggagaucaccccgcacugcgcccugauggacugcaucauguucgacgccgcgguguccggcgggcugaacaccagcgugcuccgggccguccugccccgcgacaugguguuccggaccuccacgccccgcgugguccugugaggacuaguuauaagacugacuagcccgaugggccucccaacgggcccuccuccccuccuugcaccgagauuaaucaaaggcucuuuucagagccaccaaaaaaaaaaaaaaaaaaaaaaaaaaaaaaaaaaaaaaaaaaaaaaaaaaaaaaaaaaaaaaaaaaaaaaaaaaaaaaaaaaaaaaaaaaaaaaaaaaaaa

SEQ ID NO: 17794 - RNA, 1923 nt, Artificial Sequence
  mRNA product Design i-3 (hSL-A100) comprising derived and/or modified sequence from LASV(LM765-SLE-2012;Clade IV)__AIT17815__NP (opt1)
aggagaaagcuuaccaugagcgccuccaaggagaucaagagcuuccuguggacccagucccuccgccgggagcugagcggcuacugcuccaacaucaagcuccagguggucaaggacgcccaggcgcugcugcacgggcuggacuucagcgagguguccaacgugcagcgccucaugcggaaggagcgccgggacgacaacgaccugaagcgccugcgggaccucaaccaggccgucaacaaccugguggagcucaagagcacccagcagaaguccauccugcgcgugggcacccugaccagcgacgaccugcucauccuggccgccgaccuggagaagcucaaguccaaggucacccggaccgagcgcccccugagcgccgggguguacaugggcaaccuguccagccagcagcucgaccagcggcgcgcgcugcuggacaugaucgggauguccggcagcaaccagggcgcccgggccgggcgcgacggcgugguccgggugugggacgugaagaacgccgagcuccugaacaaccaguucgggacgaugccgucccugacccucgcgugccugaccaagcagggccaggucgaccugaacgacgccgugcaggcccucaccgaccuggggcugaucuacacggccaaguaccccaacaccagcgaccucgaccgccugacccagucccaccccauccugaacaugaucgacaccaagaaguccagccucaacaucuccggcuacaacuucagccugggcgccgcggugaaggccggggccugcaugcuggacggcgggaacaugcucgagacgaucaaggucagcccccagaccauggacggcauccucaagagcauccugaaggugaagaaggcccugggcauguucaucuccgacgccccgggggagcggaaccccuacgagaacauccuguacaagaucugccugagcggcgacggguggcccuacaucgcgucccgcaccagcaucaccggccgggccugggagaacacgguggucgaccucgaguccgacgggaagccccagaaggccggcagcaacggcuccaacaagagccugcaguccgccggguucaccgccggccugaccuacagccagcucaugacccugaaggacgcgaugcugcagcuggacccgaacgccaagacguggauggacaucgaggggcgccccgaggaccccguggagaucgcccucuaccagcccuccagcggcugcuacauccacuucuuccgggagccgaccgaccugaagcaguucaagcaggacgccaaguacucccacgggaucgacgugaccgaccuguucgccgcgcagcccggccucaccagcgccgucaucgacgcccugccccgcaacauggugaucacgugccagggcuccgacgacauccgcaagcuguucgagagccaggggcggaaggacaucaagcucaucgacaucgcccugagcaagaccgacucccgcaaguacgagaacgcggugugggaccaguacaaggaccugugccacaugcacaccggcaucgucguggagaagaagaagcgcgggggcaaggaggagaucacgccccacugcgcccucauggacugcaucauguucgacgccgccgucagcgggggccugaacaccuccgugcugcgggccgugcucccgcgggacauggucuuccgcaccagcacgccccggguggugcugugaggacuaguuauaagacugacuagcccgaugggccucccaacgggcccuccuccccuccuugcaccgagauuaaucaaaggcucuuuucagagccaccaaaaaaaaaaaaaaaaaaaaaaaaaaaaaaaaaaaaaaaaaaaaaaaaaaaaaaaaaaaaaaaaaaaaaaaaaaaaaaaaaaaaaaaaaaaaaaaaaaaaa

SEQ ID NO: 17795 - RNA, 1923 nt, Artificial Sequence
  mRNA product Design i-3 (hSL-A100) comprising derived and/or modified sequence from LASV(LM776-SLE-2012;Clade IV)__AIT17825__NP (opt1)
aggagaaagcuuaccaugagcgccuccaaggagaucaagagcuuccuguggacccagucccuccgccgggagcugagcuccuacugcagcaacaucaagcuccagguggucaaggacgcccaggcgcugcugcacggccuggacuucuccgaggugagcaacgugcagcgccucaugcggaaggagcgccgggacgacaacgaccugaagcgccugcgggaccucaaccaggccgucaacaaccugguggagcugaaguccacccagcagaaguccauccuccgcguggggacccugaccuccgacgaccugcucauccuggccgccgaccuggagaagcucaagagcaaggucacccggaccgagcgcccccuguccgccggcguguacauggggaaccugagcucccagcagcucgaccagcggcgcgcgcugcugagcaugaucggcauguccgggagcaaccagggcgcccgggccggccgcgacggggugguccgggugugggacgugaagaacgccgagcuccugaacaaccaguucggcacgaugccgucccugacccucgcgugccugaccaagcaggggcaggucgaccugaacgacgccgugcaggcccucaccgaccugggccugaucuacacggccaaguaccccaacaccagcgaccucgaccgccugacccagagccaccccauccugaacaugaucgacaccaagaaguccagccucaacaucuccggguacaacuucagccugggcgccgcggugaaggccggcgccugcaugcuggacgggggcaacaugcucgagacgaucaaggucagcccccagaccauggacgggauccucaagagcauccugaaggugaagaaggcccugggcauguucaucuccgacaccccgggcgagcggaaccccuacgagaacauccuguacaagaucugccugagcggggacggcuggcccuacaucgccucccgcaccagcaucacggggcgggcgugggagaacaccguggucgaccucgaguccgacggcaagccccagaaggccgggagcaacaacuccaacaagagccugcaguccgccggcuucaccgccggccugaccuacagccagcucaugacgcugaaggacgccaugcugcagcuggacccgaacgcgaagaccuggauggacaucgaggggcgccccgaggaccccguggagguggcccucuaccagcccuccagcggcugcuacauccacuucuuccgggagccgaccgaccugaagcaguucaagcaggacgccaaguacucccacgggaucgacgucaccgaccuguucgccgcccagcccggccucacgagcgcggugaucgacgcccugccccgcaacauggugaucacgugccaggggagcgacgacauccgcaagcugcucgagucccagggccggaaggacaucaagcugaucgacaucgcccugagcaagaccgacucccgcaaguacgagaacgccgucugggaccaguacaaggaccucugccacaugcacaccggcguggucguggagaagaagaagcgcgggggcaaggaggagaucaccccgcacugcgcgcugauggacugcaucauguucgacgccgccgugagcgggggccugaacaccuccguccuccgggccgugcugccccgggacaugguguuccgcaccagcacgccccgggucgugcugugaggacuaguuauaagacugacuagcccgaugggccucccaacgggcccuccuccccuccuugcaccgagauuaaucaaaggcucuuuucagagccaccaaaaaaaaaaaaaaaaaaaaaaaaaaaaaaaaaaaaaaaaaaaaaaaaaaaaaaaaaaaaaaaaaaaaaaaaaaaaaaaaaaaaaaaaaaaaaaaaaaaaa

SEQ ID NO: 17796 - RNA, 1923 nt, Artificial Sequence
  mRNA product Design i-3 (hSL-A100) comprising derived and/or modified sequence from LASV(Mad39;Clade IV)__ANH09723__NP (opt1)
aggagaaagcuuaccaugagcgccuccaaggagaucaagagcuuccuguggacccagucccuccgccgggagcugagcggcuacugcuccaacaucaagcuccagguggucaaggacgcccaggcgcugcugcacgggcuggacuucagcgagguguccaacgugcagcgccucaugcggaagcagcgccgggacgacaacgaccugaagcgccugcgggaccucaaccaggccgucaacaaccugguggagcugaaguccacccagcagaaguccgugcuccgcgucggcacgcugaccagcgacgaccugcucacccuggccgccgaccuggagaagcucaaguccaaggugacccggacggagcgcccccugaccgccgggguguacaugggcaaccugagcucccagcagcucgaccagcggcgcgcgcugcugaacaugaucgggaugagcggcggcaaccagggggcccggaccggccgcgacggggucgugcgggugugggacgucaagaacgccgagcuccugaacaaccaguucggcaccaugccgucccugacgcucgccugccugaccaagcagggccagguggaccugaacgacgugguccaggcgcucaccgaccuggggcugaucuacaccgccaaguaccccaacacgagcgaccucgaccgccugacccagucccaccccauccugaacaugaucgacaccaacaagagcucccucaacaucagcggcuacaacuucagccugggggccgccgugaaggccggcgcgugcaugcuggacgggggcaacaugcucgagaccaucaaggugagcccccagacgauggacggcauccucaagagcauccugaaggucaagaagucccuggggauguucaucagcgacaccccgggcgagcggaaccccuacgagaacauccuguacaagaucugccuguccggggacggcuggcccuacaucgccagccgcaccuccaucaccgggcgggccugggagaacacggugguggaccucgagagcggcggcaagccccagaaggccggguccaacaacagcaacaagucccugcagagcgccggcuucgcggccgggcugaccuacucccagcucaugacccugaaggacgccaugcugcagcuggacccgaacgccaagaccuggauggacaucgagggccgccccgaggaccccgucgagaucgcccucuaccagcccaucagcgggugcuacauccacuucuuccgggagccgacggaccugaagcaguucaagcaggacgcgaaguacucccacggcaucgacgugaccgaccuguucgccgcccagcccggccucaccagcgccgugaucgaggcccugccccgcaacauggucaucacgugccagggguccgacgacauccgcaagcuguucgagagccagggccggaaggacaucaagcucaucgacaucgcgcuguccaagaccgacagccgcaaguacgagaacgccgugugggaccaguacaaggaccugugccacaugcacaccggggucgugguggagaagaagaagaagggcgggaaggaggagaucacgccccacugcgcccucauggacugcaucauguucgacgccgcggucagcggcggccugaacacccuggugcuccgggccgugcugccgcgcgacauggucuuccggaccuccacccccaagguggugcugugaggacuaguuauaagacugacuagcccgaugggccucccaacgggcccuccuccccuccuugcaccgagauuaaucaaaggcucuuuucagagccaccaaaaaaaaaaaaaaaaaaaaaaaaaaaaaaaaaaaaaaaaaaaaaaaaaaaaaaaaaaaaaaaaaaaaaaaaaaaaaaaaaaaaaaaaaaaaaaaaaaaaa

SEQ ID NO: 17797 - RNA, 1923 nt, Artificial Sequence
  mRNA product Design i-3 (hSL-A100) comprising derived and/or modified sequence from LASV(Z0947-SLE-2011;Clade IV)__AIT17841__NP (opt1)
aggagaaagcuuaccaugagcgccuccaaggagaucaagagcuuccuguggacccagucccuccgccgggagcugagcggcuacugcuccaacaucaagcuccagguggucaaggacgcccaggcgcugcugcacgggcuggacuucagcgagguguccaacgugcagcgccucaugcggaaggagcgccgggacgacaacgaccugaagcgccugcgggaccucaaccaggccgucaacaaccugguggagcucaagagcacccagcagaaguccauccugcgcgugggcacccugaccagcgacgaccugcucauccuggccgccgaccuggagaagcucaaguccaaggucacccggaccgagcgcccccugagcgccgggguguacaugggcaaccuguccagccagcagcucgaccagcggcgcgcgcugcugaacaugaucgggauguccggcagcaaccagggcgcccggacggggcgcgacggcgugguccgggugugggacgugaagaacgccgagcuccugaacaaccaguucgggaccaugccgucccugacccucgccugccugaccaagcagggccaggucgaccugaacgacgcggugcaggcccucacggaccuggggcugaucuacaccgccaaguaccccaacaccagcgaccucgaccgccugacccagucccaccccauccugaacaugaucgacacgaagaaguccagccucaacaucuccggcuacaacuucagccugggcgccgccgugaaggcgggggccugcaugcuggacggcgggaacaugcucgagaccaucaaggucagcccccagaccauggacggcauccucaagagcauccugaaggugaagaaggcccugggcauguucaucuccgacgccccgggggagcggaaccccuacgagaacauccuguacaagaucugccugagcggcgacggguggcccuacaucgccucccgcaccagcaucacgggccgggcgugggagaacaccguggucgaccucgaguccgacgggaagccccagaaggccggcagcaacggcuccaacaagagccugcaguccgccggguucaccgccggccugaccuacagccagcucaugacgcugaaggacgccaugcugcagcuggacccgaacgcgaagaccuggauggacaucgaggggcgccccgaggaccccguggagaucgcccucuaccagcccuccagcggcugcuacauccacuucuuccgggagccgaccgaccugaagcaguucaagcaggacgccaaguacucccacgggaucgacgugaccgaccuguucgccgcccagcccggccucacgagcgcggucaucgacgcccugccccgcaacauggugaucacgugccagggcuccgacgacauccgcaagcuguucgagagccaggggcggaaggacaucaagcucaucgacaucgcccugagcaagaccgacucccgcaaguacgagaacgccgugugggaccaguacaaggaccugugccacaugcacaccggcaucgucguggagaagaagaagcgcgggggcaaggaggagaucaccccgcacugcgcgcucauggacugcaucauguucgacgccgccgucagcgggggccugaacaccuccgugcugcgggccgugcucccccgggacauggucuuccgcaccagcacgccccggguggugcugugaggacuaguuauaagacugacuagcccgaugggccucccaacgggcccuccuccccuccuugcaccgagauuaaucaaaggcucuuuucagagccaccaaaaaaaaaaaaaaaaaaaaaaaaaaaaaaaaaaaaaaaaaaaaaaaaaaaaaaaaaaaaaaaaaaaaaaaaaaaaaaaaaaaaaaaaaaaaaaaaaaaaa

SEQ ID NO: 17798 - RNA, 1923 nt, Artificial Sequence
  mRNA product Design i-3 (hSL-A100) comprising derived and/or modified sequence from LASV(Josiah;Clade IV)__NP_694869__NP (opt4)
aggagaaagcuuaccaugagcgccagcaaggagaucaagagcuuccuguggacccagagccugagaagagagcugagcggcuacugcagcaacaucaagcugcagguggugaaggacgcccaggcccugcugcacggccuggacuucagcgaggugagcaacgugcagagacugaugagaaaggagagaagagacgacaacgaccugaagagacugagagaccugaaccaggccgugaacaaccugguggagcugaagagcacccagcagaagagcauccugagagugggcacccugaccagcgacgaccugcugauccuggccgccgaccuggagaagcugaagagcaaggugaucagaaccgagagaccccugagcgccggcguguacaugggcaaccugagcagccagcagcuggaccagagaagagcccugcugaacaugaucggcaugagcggcggcaaccagggcgccagagccggcagagacggcguggugagagugugggacgugaagaacgccgagcugcugaacaaccaguucggcaccaugcccagccugacccuggccugccugaccaagcagggccagguggaccugaacgacgccgugcaggcccugaccgaccugggccugaucuacaccgccaaguaccccaacaccagcgaccuggacagacugacccagagccaccccauccugaacaugaucgacaccaagaagagcagccugaacaucagcggcuacaacuucagccugggcgccgccgugaaggccggcgccugcaugcuggacggcggcaacaugcuggagaccaucaaggugagcccccagaccauggacggcauccugaagagcauccugaaggugaagaaggcccugggcauguucaucagcgacacccccggcgagagaaaccccuacgagaacauccuguacaagaucugccugagcggcgacggcuggcccuacaucgccagcagaaccagcaucaccggcagagccugggagaacaccgugguggaccuggagagcgacggcaagccccagaaggccgacagcaacaacagcagcaagagccugcagagcgccggcuucaccgccggccugaccuacagccagcugaugacccugaaggacgccaugcugcagcuggaccccaacgccaagaccuggauggacaucgagggcagacccgaggaccccguggagaucgcccuguaccagcccagcagcggcugcuacauccacuucuucagagagcccaccgaccugaagcaguucaagcaggacgccaaguacagccacggcaucgacgugaccgaccuguucgccacccagcccggccugaccagcgccgugaucgacgcccugcccagaaacauggugaucaccugccagggcagcgacgacaucagaaagcugcuggagagccagggcagaaaggacaucaagcugaucgacaucgcccugagcaagaccgacagcagaaaguacgagaacgccgugugggaccaguacaaggaccugugccacaugcacaccggcguggugguggagaagaagaagagaggcggcaaggaggagaucaccccccacugcgcccugauggacugcaucauguucgacgccgccgugagcggcggccugaacaccagcgugcugagagccgugcugcccagagacaugguguucagaaccagcacccccagaguggugcugugaggacuaguuauaagacugacuagcccgaugggccucccaacgggcccuccuccccuccuugcaccgagauuaaucaaaggcucuuuucagagccaccaaaaaaaaaaaaaaaaaaaaaaaaaaaaaaaaaaaaaaaaaaaaaaaaaaaaaaaaaaaaaaaaaaaaaaaaaaaaaaaaaaaaaaaaaaaaaaaaaaaaa

SEQ ID NO: 17799 - RNA, 1923 nt, Artificial Sequence
  mRNA product Design i-3 (hSL-A100) comprising derived and/or modified sequence from LASV(LP;Clade I)__AAF86702__NP (opt4)
aggagaaagcuuaccaugagcaacagcaaggagaucaagagcuuccuguggacccagagccugagaagagagcugagcggcuacugcagcaacaucaagcugcagguggugaaggacgcccaggcccugcugcacggccuggacuucagcgaggugagcaacgugcagagacugaugagaaagcagaagagagacgacgccgaccugaagagacugagagaccugaaccaggccgugaacaaccugguggagcugaagagcacccagcagaagaacgugcugagagugggcacccugagcagcgacgaccugaucacccuggccgccgaccuggagaagcugaagagcaaggugaucagaaccgagagaccccugagcagcggcguguacaugggcaaccugagcagccagcagcuggaccagagaagagcccugcugagcaugaucggcaugagcggcggcccccagggcaacagaaccggcggcgacggcguggugagagugugggacgugaagaacgccgagcugcugaacaaccaguucggcaccaugcccagccugacccuggccugccugaccaagcagggccagguggaccugaacgacgccgugcaggcccugaccgaccugggccugaucuacaccgccaaguaccccaacagcagcgaccuggacaugcugacccagagccaccccauccugggcaugguggacaccaagaagagcagccugaacaucagcggcuacaacuucagccugggcgccgccgugaaggccggcgccugcaugcuggacggcggcaacaugcuggagaccaucaaggugagcccccagaccauggacggcauccugaagagcauccugaaggugaagagaagccugggcauguucaucagcgacacccccggcgagagaaaccccuacgagaacauccuguacaagaucugccugagcggcgagggcuggcccuacaucgccagcagaaccagcaucaccggcagagccugggagaacacccugguggaccuggagagcgacaacaagccccccaagcugaacagcgccggcagcaacaagagccugcaggccgccggccugaacgccggccugaccuacagccagcugaugacccugaaggacugcaugcugcagcuggaccccagcagcaagaccuggaucgacaucgagggcagacccgaggaccccguggagaucgcccuguuccagcccagcagcggcugcuacauccacuucuucagagagcccaccgaccugaagcaguucaagcaggacgccaaguacagccacggcaucgacgugaccgaccuguucagcacccagcccggccugaccagcgccgugaucgaggcccugcccagaaacauggugcugaccugccagggcagcgacgacaucaagaagcugcuggagagccagggcagaagagacaucaagcugaucgacaucagccugagcaaggccgacagcagaaaguucgagaacgccgugugggaccaguacaaggaccugugccacaugcacaccggcguggugguggagaagaagaagagaggcggcaaggaggagaucaccccccacugcgcccugcuggacugcaucauguucgacgccgccaccaccggcagccugaacaucaccacccugagagccgugcugcccagagacaugguguucagaaccagcacccccaagguggugcugugaggacuaguuauaagacugacuagcccgaugggccucccaacgggcccuccuccccuccuugcaccgagauuaaucaaaggcucuuuucagagccaccaaaaaaaaaaaaaaaaaaaaaaaaaaaaaaaaaaaaaaaaaaaaaaaaaaaaaaaaaaaaaaaaaaaaaaaaaaaaaaaaaaaaaaaaaaaaaaaaaaaaa

SEQ ID NO: 17800 - RNA, 1923 nt, Artificial Sequence
  mRNA product Design i-3 (hSL-A100) comprising derived and/or modified sequence from LASV(803213;Clade II)__AAF86704__NP (opt4)
aggagaaagcuuaccaugagcgccagcaaggaggugaagagcuuccuguggacccagagccugagaagagagcugagcggcuacugcagcaacaucaagcugcagguggugaaggacgcccaggcccugcugcacggccuggacuucagcgaggugaacaacgugcagagacugaugagaaagcagaagagagacgacggcgaccugaagagacugagagaccugaaccaggccgugaacaaccugguggagcugaagagcacccagcagaagagcauccugagagugggcacccugaccagcgacgaccugcugacccuggccgccgaccuggagaagcugaagagcaaggugaucagaaccgagagaccccugagcagcggcguguacaugggcaaccugagcacccagcagcuggagcagagaagagcccugcugaacaugaucggcauggugggcggcgcccagggcacccagcccggcagagacggcguggugagagugugggacgugaagaaccccgaccugcugaacaaccaguucggcaccaugcccagccugacccuggccugccugaccaagcagggccagguggaccugaacgacgccgugcuggcccugaccgaccugggccugaucuacaccgccaaguaccccaacagcagcgaccuggacagacugagccagagccaccccauccugaacaugguggacaccaagaagagcagccugaacaucagcggcuacaacuucagccugggcgccgccgugaaggccggcgccugcaugcuggacggcggcaacaugcuggagaccaucaaggugaccccccagaccauggacggcauccugaagagcauccugaaggugaagagaagccugggcauguucgugagcgacacccccggcgagagaaaccccuacgagaacauccuguacaagaucugccugagcggcgacggcuggcccuacaucgccagcagaaccagcaucgugggcagagccugggagaacaccaccguggaccuggagagcgacggcaagccccagaaggugggcaccgccggcagcaacaagagccugcagagcgccggcuuccccaccggccugaccuacagccagcugaugacccugaaggacagcaugaugcagcuggaccccagcgccaagaccuggaucgacaucgagggcagacccgaggaccccguggagaucgcccuguaccagcccaugagcggcugcuacauccacuucuucagagagcccaccgaccugaagcaguucaagcaggacgccaaguacagccacggcaucgacguggccgaccuguuccccgcccagcccggccugaccagcgccgugaucgaggcccugcccagaaacauggugcugaccugccagggcagcgacgacaucaagaagcugcuggacagccagggcagaagagacaucaagcugaucgacaucagccugagcaagguggacagcagaaaguucgagaacgccgugugggaccagugcaaggaccugugccacaugcacaccggcguggugguggagaagaagaagagaggcggcaaggaggagaucaccccccacugcgcccugauggacugcaucauguucgacgccgccgugagcggcggccugaacauccccgugcugagagccgugcugcccagagacaugguguucagaaccagcagccccaagguggugcugugaggacuaguuauaagacugacuagcccgaugggccucccaacgggcccuccuccccuccuugcaccgagauuaaucaaaggcucuuuucagagccaccaaaaaaaaaaaaaaaaaaaaaaaaaaaaaaaaaaaaaaaaaaaaaaaaaaaaaaaaaaaaaaaaaaaaaaaaaaaaaaaaaaaaaaaaaaaaaaaaaaaaa

SEQ ID NO: 17801 - RNA, 1926 nt, Artificial Sequence
  mRNA product Design i-3 (hSL-A100) comprising derived and/or modified sequence from LASV(GA391;Clade III)__CAA36646__NP (opt4)
aggagaaagcuuaccaugagcgccagcaaggaggugagaagcuuccuguggacccagagccugagaagagagcugagcggcuacugcagcaacaucaagcugcagguggugaaggacgcccaggcccugcugcacggccuggacuucagcgaggugagcaacgugcagagacugaugagaaagcagaagagagacgacggcgaccugaagagacugagagaccugaaccaggccgugaacaaccugguggagcugaagagcacccagcagaagagcgugcugagagugggcacccugagcagcgacgaccugcugauccuggccgccgaccuggagaagcugaagagcaaggugaccagaaccgagagaccccugagcagcggcguguacaugggcaaccugagcagccagcagcuggaccagagaagagcccugcugaacaugaucggcaugaccggcgugagcggcggcggcaagggcgccagcgacggcaucgugagagugugggacgugaagaacgccgagcugcugaacaaccaguucggcaccaugcccagccugacccuggccugccugaccaagcagggccagguggaccugaacgacgccgugcaggcccugaccgaccugggccugaucuacaccgccaaguaccccaacagcagcgaccuggacagacugagccagagccaccccauccugaacaugaucgacaccaagaagagcagccugaacaucagcggcuacaacuucagccugggcgccgccgugaaggccggcgccugcaugcuggacggcggcaacaugcuggagaccaucaaggugagcccccagaccauggacggcauccugaagagcauccugaaggugaagaagagccugggcauguucgugagcgacacccccggcgagagaaaccccuacgagaacauccuguacaagaucugccugagcggcgacggcuggcccuacaucgccagcagaaccagcaucgugggcagagccugggagaacaccgugguggaccuggagcaggacaacaagccccagaagaucggcaacggcggcagcaacaagagccugcagagcgccggcuucgccgccggccugaccuacagccagcugaugacccugaaggacuucaagugcuucaaccugauccccaacgccaagaccuggauggacaucgagggcagacccgaggaccccguggagaucgcccuguaccagcccagcagcggcugcuacgugcacuucuucagagagcccaccgaccugaagcaguucaagcaggacgccaaguacagccacggcaucgacgugaccgaccuguucgccgcccagcccggccugaccagcgccgugaucgaggcccugcccagaaacauggugaucaccugccagggcagcgaggacaucagaaagcugcuggagagccagggcagaagagacaucaagcugaucgacaucacccugagcaaggccgacagcagaaaguucgagaacgccgugugggaccaguucaaggaccugugccacaugcacaccggcguggugguggagaagaagaagagaggcggcaaggaggagaucaccccccacugcgcccugauggacugcaucauguucgacgccgccgugagcggcggccuggacgccaaggugcugagaguggugcugcccagagacaugguguucagaaccagcacccccaagguggugcugugaggacuaguuauaagacugacuagcccgaugggccucccaacgggcccuccuccccuccuugcaccgagauuaaucaaaggcucuuuucagagccaccaaaaaaaaaaaaaaaaaaaaaaaaaaaaaaaaaaaaaaaaaaaaaaaaaaaaaaaaaaaaaaaaaaaaaaaaaaaaaaaaaaaaaaaaaaaaaaaaaaaaa

SEQ ID NO: 17802 - RNA, 1923 nt, Artificial Sequence
  mRNA product Design i-3 (hSL-A100) comprising derived and/or modified sequence from LASV(AV;Clade V)__CCA30315__NP (opt4)
aggagaaagcuuaccaugagcgccagcaaggaggugaagagcuuccuguggacccagagccugagaagagagcugagcggcuacugcagcaacaucaagcugcagguggugaaggacgcccaggcccugcugcacggccuggacuucagcgaggugagcaacgugcagagacugaugagaaagcagagaagagacgacagcgaccugaagagacugagagaccugaaccaggccgugaacaaccugguggagcugaagagcacccagcagaagagcgugcugagagugggcacccugagcagcgacgaccugcugacccuggccgccgaccuggagaagcugaagagcaaggugaccagaaccgagagaccccugagcagcggcguguacaugggcaaccugagcagccagcagcuggaccagagaagagcccugcugaaccugaucggcaugaccaacggcagccagggcagccaggccggcagagacggcguggugagagugugggacgugaagaacgccgagcugcugaacaaccaguucggcaccaugcccagccugacccuggccugccugaccaagcagggccagguggaccugaacgacguggugcaggcccugaccgaccugggccugaucuacaccgccaaguaccccaacaccagcgaccuggacagacugacccagagccaccccauccugaacaugaucgacaccaagaagagcagccugaacaucagcggcuacaacuucagccugggcgccgccgugaaggccggcgccugcaugcuggacggcggcaacaugcuggagaccaucaaggugagcccccagagcauggacggcauccugaagagcauccugaaggugaagagagcccugggcauguucgugagcgacacccccggcgagagaaaccccuacgagaacauccuguacaagaucugccugagcggcgacggcuggcccuacaucgccagcagaaccagcaucgugggcagagccugggagaacaccgugguggaccuggagaccgacggcaagccccagaagaucggcagcggcaacagcaacaagagccugcagagcgccggcuucagcgccggccugaccuacagccagcugaugacccugaaggacgccaugcugcagcuggaccccaacgccaagaccuggauggacaucgagggcagacccgaggaccccguggagguggcccuguaccagcccaucagcggcugcuacauccacuucuucagagagcccaccgaccugaagcaguucaagcaggacgccaaguacagccacggcaucgacaucgccgaccuguucgccgcccagcccggccugaccagcgccgugaucgaggcccugcccagaaacauggugaucaccugccagggcagcgaggacaucaagaagcugcuggagagccagggcagaaaggacaucaagcugaucgacaucgcccugagcaagaucgacagcagaaaguucgagaacgccgugugggaccaguacaaggaccugugccacaugcacaccggcguggugguggagaagaagaagagaggcggcaaggaggagaucaccccccacugcgcccugauggacugcaucauguucgacgccgccgugagcggcggccugaacacccuggugcugagagccgugcugcccagagacaugguguucagaaccagcacccccagaguggugcugugaggacuaguuauaagacugacuagcccgaugggccucccaacgggcccuccuccccuccuugcaccgagauuaaucaaaggcucuuuucagagccaccaaaaaaaaaaaaaaaaaaaaaaaaaaaaaaaaaaaaaaaaaaaaaaaaaaaaaaaaaaaaaaaaaaaaaaaaaaaaaaaaaaaaaaaaaaaaaaaaaaaaa

SEQ ID NO: 17803 - RNA, 1923 nt, Artificial Sequence
  mRNA product Design i-3 (hSL-A100) comprising derived and/or modified sequence from LASV(Togo/2016/7082;Clade VI)__AMR44578__NP (opt4)
aggagaaagcuuaccaugagcaacagcaaggaggugaagagcuuccuguggacccagagccugagaagagagcugagcggcuacugcagcaacaucaagcugcagguggugaaggacgcccaggcccugcugcacggccuggacuucagcgaggugagcaacgugcagagacugaugagaaagcagaagagagacgacggcgaccugaagagacugagagaccugaaccaggccgugaacaaccugguggagcugaagagcgugcagcagaagagcauccugagagugggcacccugaccagcgacgaccugcugacccuggccgccgaccuggagaagcugaagagcaaggugaccagaaccgagagaccccugagcagcggcguguacaugggcaaccugagcagccagcagcuggaccagagaagagcccugcugagcaugaucggcaugagcggcggcaaccagaacagccagcccaagggcgacggcguggugagagugugggacgugaagaacgccgaccugcugaacaaccaguucggcaccaugcccagccugacccuggccugccugaccaagcagggccagguggaccugaacgacgccgugcaggcccugaccgaccugggccugaucuacaccgccaaguaccccaacagcagcgaccuggacagacugagccagagccaccccauccugaacaugaucgacaccaagaagagcagccugaacaucagcggcuacaacuucagccugggcgccgccaucaagaccggcgccugcaugcuggacggcggcaacaugcuggagaccaucaaggugaccccccagaccauggacggcauccugaagagcauccugaaggugaagagaagccugggcauguucaucagcgacacccccggcgagagaaaccccuacgagaacauccuguacaagaucugccugagcggcgacggcuggcccuacaucgccagcagaaccgccaucaucggcagagccugggagaacaccgugguggaccuggagagcgacagcaagccccagaagaucggcagcaacggcagcaacaagagccugcagagcgccggcuucgcccccggccugaccuacagccagcugaugacccugaaggacagcaugcugcagcuggaccccaacgccaagaccuggaucgacaucgagggcagacccgaggaccccguggagguggcccuguuccagcccaucagcggcugcuacauccacuucuucagagagcccaccgaccugaagcaguucaagcaggacgccaaguacagccacggcaucgacgugaccgaccuguucgccgcccagcccggccugaccagcgccgugaucgaggcccugcccagaaacauggugcugaccugccagggcagcgacgacaucaagaagcugcuggacagccagggcagaagagacaucaagcugaucgacgugagccugaacaagaucgacagcagaaaguucgagaacgccgugugggaccaguacaaggaccugugccacaugcacaccggcguggugguggagaagaagaagaagggcggcaaggaggagaucaccccccacugcgcccugcuggacugcaucauguucgacgccgccgugagcggcggccugaacgccaccgugcugagagccgugcugcccagagacaugguguucagaaccagcagccccaagguggugcugugaggacuaguuauaagacugacuagcccgaugggccucccaacgggcccuccuccccuccuugcaccgagauuaaucaaaggcucuuuucagagccaccaaaaaaaaaaaaaaaaaaaaaaaaaaaaaaaaaaaaaaaaaaaaaaaaaaaaaaaaaaaaaaaaaaaaaaaaaaaaaaaaaaaaaaaaaaaaaaaaaaaaa

SEQ ID NO: 17804 - RNA, 1923 nt, Artificial Sequence
  mRNA product Design i-3 (hSL-A100) comprising derived and/or modified sequence from LASV(KAK-428;Clade n.d. (VII))__ANH09741__NP (opt4)
aggagaaagcuuaccaugagcaacagcaaggaggugaagagcuuccuguggacccagagccugagaagagagcugagcggcuacugcaccaacaucaagcugcagguggugaaggacgcccaggcccugcugcacggccuggacuucagcgaggugagcaacgugcagagacugaugagaaagcagaagagagacgacaacgaccugaagagacugagagaccugaaccaggccgugaacaaccugguggagcugaagagcgugcagcagaagagcgugcugaaggugggcacccugaacagcgacgaccugcugacccuggccgccgaccuggagaagcugaagagcaagguggugagaaccgagagaccccugagcagcggcguguacaugggcaaccugagcagccagcagcuggaccagagaagagcccugcugaacaugaucggcauggccggcggcagccagggcaaccagcccagcagagacggcguggugagagugugggacgugaagaacgccgaccugcugaacaaccaguucggcaccaugcccagccugacccuggccugccugaccaagcagggccagguggaccugaacgacguggugcuggcccugaccgaccugggccugaucuacaccgccaaguaccccaacagcagcgaccuggacagacugagccagaaccaccccgugcugaacaugaucgacgugaacaagagcagccugaacaucagcggcuacaacuucagccugggcgccgccgugaaggccggcgccugcaugcuggacggcggcaacaugcuggagaccaucaagaucagcccccagaccguggacggcauccugaagagcauccugaaggugaagagagcccugggcauguucgugagcgacacccccggcgagagaaaccccuacgagaacauccuguacaaggugugccugagcggcaacggcuggcccuacaucgccagcagaaccagcaucgugggcagagccugggagaacaccgugguggaccuggagagcaacaagaaccagcccaaggugggcaacaacggcagcaacaagaugcugcagagcagcggcuucgccaccggccugaccuacagccagcugaugacccugagagacagcaugcugcagcuggaccccaccgccaagaccuggaucgacaucgagggcagacccgaggaccccguggagcuggcccuguuccagcccagcagcggcugcuacauccacuucuucagagagcccaccgaccugaagcaguucaagcaggacgccaaguacagccacggcaucgacgugaacgaccuguucagcgcccagcccggccugaccagcgccgugcuggaggcccugcccagaaacauggugcugaccugccagggcagcgacgacaucagaaagcugcuggacagccaggacagaaaggacaucaagcugaucgacaucagccugagcaaggccgacgccagaaaguucgagaacgacgugugggaccaguucaaggaccugugccacaugcacaccggcaucgugguggagaagaagaagaagggcggcaagcaggagaugaccccccacugcgcccugcuggacugcaucauguucgacgccgccgugagcggcggccugaacgugcccacccugagagccgugcugcccaccgacaugguguucagaaccaucaccaccaagguggugcugugaggacuaguuauaagacugacuagcccgaugggccucccaacgggcccuccuccccuccuugcaccgagauuaaucaaaggcucuuuucagagccaccaaaaaaaaaaaaaaaaaaaaaaaaaaaaaaaaaaaaaaaaaaaaaaaaaaaaaaaaaaaaaaaaaaaaaaaaaaaaaaaaaaaaaaaaaaaaaaaaaaaaa

SEQ ID NO: 17805 - RNA, 1923 nt, Artificial Sequence; identical to SEQ ID NO: 17799
  mRNA product Design i-3 (hSL-A100) comprising derived and/or modified sequence from LASV(Pinneo-NIG-1969;Clade I)__AIT17837__NP (opt4)

SEQ ID NO: 17806 - RNA, 1923 nt, Artificial Sequence
  mRNA product Design i-3 (hSL-A100) comprising derived and/or modified sequence from LASV(ISTH0009-NIG-2011;Clade II)__AIT17405__NP (opt4)
aggagaaagcuuaccaugagcgugagcaaggaggugaagagcuuccuguggacccagagccugagaagagagcugagcggcuacugcagcaacaucaagcugcagguggugaaggacgcccaggcccugcugcacggccuggacuucagcgaggugagcaacgugcagagacugaugagaaagcagaagagagacgacagcgaccugaagagacugagagaccugaaccaggccgugaacaaccugguggagcugaagagcacccagcagaagagcauccugagagugggcacccugaccagcgacgaccugcugacccuggccgccgaccuggagaagcugaagagcaaggugaucagaaccgagagaccccugagcagcggcguguacaugggcaaccugagcacccagcagcuggagcagagaagagcccugcugaacaugaucggcauggugggcggcgcccagggcacccagcccggcagagacggcguggugagagugugggacgugaagaaccccgaccugcugaacaaccaguucggcaccaugcccagccugacccuggccugccugaccaagcagggccagguggaccugaacgacgccgugcuggcccugaccgaccugggccugaucuacaccgccaaguaccccaacagcagcgaccuggacagacugagccagagccaccccauccugaacaugguggacaucaagaagagcagccugaacaucagcggcuacaacuucagccugggcgccgccgugaaggccggcgccugcaugcuggacggcggcaacaugcuggagaccaucaaggugaccccccagaccauggacggcauccugaagagcauccugaaggugaagagaagccugggcauguucgugagcgacacccccggcgagagaaaccccuacgagaacauccuguacaagaucugccugagcggcgacggcuggcccuacaucgccagcagaaccagcaucgugggcagagccugggagaacaccaccguggaccuggagagcgacggcaagccccagaaggugggcagcgccggcagcaacaagagccugcagagcgccggcuuccccaccggccugaccuacagccagcugaugacccugaaggacagcaugaugcagcuggaccccagcgccaagaccuggaucgacaucgagggcagacccgaggaccccguggagaucgcccuguaccagcccaugagcggcugcuacauccacuucuucagagagcccaccgaccugaagcaguucaagcaggacgccaaguacagccacggcaucgacguggccgaccuguuccccgcccagcccggccugaccagcgccgugaucgaggcccugcccagaaacauggugcugaccugccagggcagcgacgacaucaagagacugcuggacagccagggcagaagagacaucaagcugaucgacaucgcccugagcaaggccgacagcagaagauucgagaacgccgugugggaccagugcaaggaccugugccacaugcacaccggcguggugguggagaagaagaagagaggcggcaaggaggagaucaccccccacugcgcccugauggacugcaucauguacgacgccgccgugagcggcggccugaacauccccgugcugagagccgugcugcccagagacaugguguucagaaccagcagccccaagguggugcugugaggacuaguuauaagacugacuagcccgaugggccucccaacgggcccuccuccccuccuugcaccgagauuaaucaaaggcucuuuucagagccaccaaaaaaaaaaaaaaaaaaaaaaaaaaaaaaaaaaaaaaaaaaaaaaaaaaaaaaaaaaaaaaaaaaaaaaaaaaaaaaaaaaaaaaaaaaaaaaaaaaaaa

SEQ ID NO: 17807 - RNA, 1923 nt, Artificial Sequence
  mRNA product Design i-3 (hSL-A100) comprising derived and/or modified sequence from LASV(ISTH2010-NIG-2012;Clade II)__AIT17483__NP (opt4)
aggagaaagcuuaccaugagcgccagcaaggaggugaagagcuuccuguggacccagagccugagaagagagcugagcggcuacugcagcaacaucaagcugcagguggugaaggacgcccaggcccugcugcacggccuggacuucagcgaggugagcaacgugcagagacugaugagaaagcagaagagagacgacagcgaccugaagagacugagagaccugaaccaggccgugaacaaccugguggagcugaagagcacccagcagaagagcauccugagagugggcacccugaccagcgacgaccugcugacccuggccgccgaccuggagaagcugaagagcaaggugaucagaaccgagagaccccugagcagcggcguguacaugggcaaccugagcacccagcagcuggagcagagaagagcccugcugaaccugaucggcauggugggcggcgcccagggcacccagcccggcagagacggcguggugagagugugggacgugaagaaccccgaccugcugaacaaccaguucggcaccaugcccagccugacccuggccugccugaccaagcagggccagguggaccugaacgacgccgugcuggcccugaccgaccugggccugaucuacaccgccaaguaccccaacagcagcgaccuggacagacugagccagagccaccccauccugaacaugguggacaccaagaagagcagccugaacaucagcggcuucaacuucagccugggcgccgccgugaaggccggcgccugcaugcuggacggcggcaacaugcuggagaccaucaaggugaccccccagaccauggacggcauccugaagagcauccugaaggugaagaagagccugggcauguucgugagcgacacccccggcgagagaaaccccuacgagaacauccuguacaagaucugccugagcggcgacggcuggcccuacaucgccagcagaaccagcaucgugggcagagccugggagaacaccaccguggaccuggagagcgacggcaagccccacaaggugggcaccgccggcagcaacaagagccugcagagcgccggcuuccccaccggccugaccuacagccagcugaugacccugaaggacagcaugaugcagcuggaccccagcgccaagaccuggaucgacaucgagggcagacccgaggaccccguggagaucgcccuguaccagcccaugagcggcugcuacauccacuucuucagagagcccaccgaccugaagcaguucaagcaggacgccaaguacagccacggcaucgacguggccgaccuguuccccgcccagcccggccugaccagcgccgugaucgaggcccugcccagaaacauggugcugaccugccagggcagcgacgacaucaagagacugcuggacagccagggcagaagagacaucaagcugaucgacaucgcccugagcaaggccgacagcagaagauucgagaacgccgugugggaccagugcaaggaccugugccacaugcacaccggcguggugguggagaagaagaagagaggcggcaaggaggagaucaccccccacugcgcccugauggacugcaucauguacgacgccgccgugagcggcggccugaacauccccgugcugagagccgugcugcccagagacaugguguucagaaccagcagccccaagguggugcugugaggacuaguuauaagacugacuagcccgaugggccucccaacgggcccuccuccccuccuugcaccgagauuaaucaaaggcucuuuucagagccaccaaaaaaaaaaaaaaaaaaaaaaaaaaaaaaaaaaaaaaaaaaaaaaaaaaaaaaaaaaaaaaaaaaaaaaaaaaaaaaaaaaaaaaaaaaaaaaaaaaaaa

SEQ ID NO: 17808 - RNA, 1923 nt, Artificial Sequence
  mRNA product Design i-3 (hSL-A100) comprising derived and/or modified sequence from LASV(Lassa virus/H.sapiens-wt/NGA/2015/ISTH_0543;Clade II)__AVO03640__NP (opt4)
aggagaaagcuuaccaugagcgccagcaaggaggugaagagcuuccuguggacccagagccugagaagagagcugagcggcuacugcagcaacaucaagcugcagguggugaaggacgcccaggcccugcugcacggccuggacuucagcgaggugagcaacgugcagagacugaugagaaagcagaagagagacgacagcgaccugaagagacugagagaccugaaccaggccgugaacaaccugguggagcugaagagcacccagcagaagagcauccugagagugggcacccugaccagcgacgaccugcugacccuggccgccgaccuggagaagcugaagagcaaggugaucagaaccgagagaccccugagcagcggcguguacaugggcaaccugagcacccagcagcuggagcagagaagagcccugcugaacaugaucggcauggugggcggcgcccagggcacccagcccggcagagacggcguggugagagugugggacgugaagaaccccgaccugcugaacaaccaguucggcaccaugcccagccugacccuggccugccugaccaagcagggccagguggaccugaacgacgccgugcuggcccugaccgaccugggccugaucuacaccgccaaguaccccaacagcagcgaccuggacagacugagccagagccaccccauccugaacaugguggacaccaagaagagcagccugaacaucagcggcuacaacuucagccugggcgccgccgugaaggccggcgccugcaugcuggacggcggcaacaugcuggagaccaucaaggugaccccccagaccauggacggcauccugaagagcauccugaaggugaagaagagccugggcauguucgugagcgacacccccggcgagagaaaccccuacgagaacauccuguacaagaucugccugagcggcgacggcuggcccuacaucgccagcagaaccagcaucgugggcagagccugggagaacaccaccguggaccuggagagcgacggcaagccccagaaggugggcagcgccggcagcaacaagagccugcagagcgccggcuuccccaccggccugaccuacagccagcugaugacccugaaggacagcaugaugcagcuggaccccagcgccaagaccuggaucgacaucgagggcagacccgaggaccccguggagaucgcccuguaccagcccaugagcggcugcuacauccacuucuucagagagcccaccgaccugaagcaguucaagcaggacgccaaguacagccacggcaucgacguggccgaccuguuccccgcccagcccggccugaccagcgccgugaucgaggcccugcccagaaacauggugcugaccugccagggcagcgacgacaucaagagacugcuggacagccagggcagaaaggacaucaagcugaucgacaucgcccugagcaaggccgacagcagaagauucgagaacgccgugugggaccagugcaaggaccugugccacaugcacaccggcguggugguggagaagaagaagagaggcggcaaggaggagaucaccccccacugcgcccugauggacugcaucauguacgacgccgccgugagcggcggccugaacauccccgugcugagagccgugcugcccagagacaugguguucagaaccagcagccccaagguggugcugugaggacuaguuauaagacugacuagcccgaugggccucccaacgggcccuccuccccuccuugcaccgagauuaaucaaaggcucuuuucagagccaccaaaaaaaaaaaaaaaaaaaaaaaaaaaaaaaaaaaaaaaaaaaaaaaaaaaaaaaaaaaaaaaaaaaaaaaaaaaaaaaaaaaaaaaaaaaaaaaaaaaaa

SEQ ID NO: 17809 - RNA, 1923 nt, Artificial Sequence
  mRNA product Design i-3 (hSL-A100) comprising derived and/or modified sequence from LASV(Lassa virus/H.sapiens-wt/NGA/2016/ISTH_0009;Clade II)__AVO03572__NP (opt4)
aggagaaagcuuaccaugagcgccagcaaggaggugaagagcuuccuguggacccagagccugagaagagagcugagcggcuacugcagcaacaucaagcugcagguggugaaggacgcccaggcccugcugcacggccuggacuucagcgaggugagcaacgugcagagacugaugagaaagcagaagagagacgacagcgaccugaagagacugagagaccugaaccaggccgugaacaaccugguggagcugaagagcacccagcagaagagcauccugagagugggcacccugaccagcgacgaccugcugacccuggccgccgaccuggagaagcugaagagcaaggugaucagaaccgagagaccccugagcagcggcguguacaugggcaaccugagcacccagcagcuggagcagagaagagcccugcugaacaugaucggcauggugggcggcgcccagggcacccagcccggcagagacggcguggugagagugugggacgugaagaaccccgaccugcugaacaaccaguucggcaccaugcccagccugacccuggccugccugaccaagcagggccagguggaccugaacgacgccgugcuggcccugaccgaccugggccugaucuacaccgccaaguaccccaacagcagcgaccuggacagacugagccagagccaccccauccugaacaugguggacaccaagaagagcagccugaacaucagcggcuacaacuucagccugggcgccgccgugaaggccggcgccugcaugcuggacggcggcaacaugcuggagaccaucaaggugaccccccagaccauggacggcauccugaagagcauccugaaggugaagaagagccugggcauguucgugagcgacacccccggcgagagaaaccccuacgagaacauccuguacaagaucugccugagcggcgacggcuggcccuacaucgccagcagaaccagcaucgugggcagagccugggagaacaccaccguggaccuggagagcgacggcaagccccagaaggugggcagcgccggcagcaacaagagccugcagagcgccggcuuccccaccggccugaccuacagccagcugaugacccugaaggacagcaugaugcagcuggaccccagcgccaagaccuggaucgacaucgagggcagacccgaggaccccguggagaucgcccuguaccagcccaugagcggcugcuacauccacuucuucagagagcccaccgaccugaagcaguucaagcaggacgccaaguacagccacggcaucgacguggccgaccuguuccccgcccagcccggccugaccagcgccgugaucgaggcccugcccagaaacauggugcugaccugccagggcagcgacgacaucaagagacugcuggacagccagggcagaagagacaucaagcugaucgacaucgcccugagcaaggccgacagcagaagauucgagaacgccgugugggaccagugcaaggaccugugccacaugcacaccggcguggugguggagaagaagaagagaggcggcaaggaggagaucaccccccacugcgcccugauggacugcaucauguacgacgccgccgugagcggcggccugaacauccccgugcugagagccgugcugcccagagacaugguguucagaaccagcagccccaagguggugcugugaggacuaguuauaagacugacuagcccgaugggccucccaacgggcccuccuccccuccuugcaccgagauuaaucaaaggcucuuuucagagccaccaaaaaaaaaaaaaaaaaaaaaaaaaaaaaaaaaaaaaaaaaaaaaaaaaaaaaaaaaaaaaaaaaaaaaaaaaaaaaaaaaaaaaaaaaaaaaaaaaaaaa

SEQ ID NO: 17810 - RNA, 1923 nt, Artificial Sequence
  mRNA product Design i-3 (hSL-A100) comprising derived and/or modified sequence from LASV(Lassa virus/H.sapiens-wt/NGA/2016/ISTH_0017;Clade II)__AVO03568__NP (opt4)
aggagaaagcuuaccaugagcgccagcaaggaggugaagagcuuccuguggacccagagccugagaagagagcugagcggcuacugcagcagcaucaagcugcagguggugaaggacgcccaggcccugcugcacggccuggacuucagcgaggugagcaacgugcagagacugaugagaaagcagaagagagacgacagcgaccugaagagacugagagaccugaaccaggccgugaacaaccugguggagcugaagagcacccagcagaagagcauccugagagugggcacccugaccagcgacgaccugcugacccuggccgccgaccuggagaagcugaagagcaaggugaucagaaccgagagaccccugagcagcggcguguacaugggcaaccugagcacccagcagcuggagcagagaagagcccugcugaacaugaucggcauggccggcggcgcccagggcacccagcccggcagagacggcguggugagagugugggacgugaagaaccccgaccugcugaacaaccaguucggcaccaugcccagccugacccuggccugccugaccaagcagggccagguggaccugaacgacgccgugcuggcccugaccgaccugggccugaucuacaccgccaaguaccccaacagcagcgaccuggacagacugagccagagccaccccauccugaacaugguggacaccaagaagagcagccugaacaucagcggcuacaacuucagccugggcgccgccgugaaggccggcgccugcaugcuggacggcggcaacaugcuggagaccaucaaggugaccccccagaccauggacggcauccugaagagcauccugaaggugaagagaagccugggcauguucgugagcgacgcccccggcgagagaaaccccuacgagaacauccuguacaagaucugccugagcggcgacggcuggcccuacaucgccagcagaaccagcaucgugggcagagccugggagaacaccaccguggaccuggagagcgacggcaagccccagaaggugggcgccaccggcagcaacaagagccugcagagcgccggcuuccccaccggccugaccuacagccagcugaugacccugaaggacagcaugaugcagcuggaccccagcgccaagaccuggaucgacaucgagggcagacccgaggaccccguggagguggcccuguaccagcccgugagcggcugcuacauccacuucuucagagagcccaccgaccugaagcaguucaagcaggacgccaaguacagccacggcaucgacguggccgaccuguuccccgcccagcccggccugaccagcgccgugaucgaggcccugcccagaaacauggugcugaccugccagggcagcgacgacaucaagaagcugcuggacagccagggcagaaaggacaucaagcugaucgacaucgcccugagcaaggccgacagcagaagauucgagaacgccgugugggaccagugcaaggaccugugccacaugcacaccggcguggugguggagaagaagaagagaggcggcaaggaggagaucaccccccacugcgcccugauggacugcaucauguacgacgccgccgugagcggcggccugaacauccccgugcugagagccgugcugcccagagacaugguguucagaaccagcagccccaagguggugcugugaggacuaguuauaagacugacuagcccgaugggccucccaacgggcccuccuccccuccuugcaccgagauuaaucaaaggcucuuuucagagccaccaaaaaaaaaaaaaaaaaaaaaaaaaaaaaaaaaaaaaaaaaaaaaaaaaaaaaaaaaaaaaaaaaaaaaaaaaaaaaaaaaaaaaaaaaaaaaaaaaaaaa

SEQ ID NO: 17811 - RNA, 1923 nt, Artificial Sequence
  mRNA product Design i-3 (hSL-A100) comprising derived and/or modified sequence from LASV(Lassa virus/H.sapiens-wt/NGA/2018/ISTH_0959;Clade II)__AVV65100__NP (opt4)
aggagaaagcuuaccaugagcgccagcaaggaggugaagagcuuccuguggacccagagccugagaagagagcugagcggcuacugcagcaacaucaagcugcagguggugaaggacgcccaggcccugcugcacggccuggacuucagcgaggugagcaacgugcagagacugaugagaaagcagaagagagacgacagcgaccugaagagacugagagaccugaaccaggccgugaacaaccugguggagcugaagagcacccagcagaagagcauccugagagugggcacccugaccagcgacgaccugcugacccuggccgccgaccuggagaagcugaagagcaaggugaucagaaccgagagaccccugagcagcggcguguacaugggcaaccugagcacccagcagcuggagcagagaagagcccugcugaaccugaucggcauggugggcggcgcccagggcacccagcccggcagagacggcguggugagagugugggacgugaagaaccccgaccugcugaacaaccaguucggcaccaugcccagccugacccuggccugccugaccaagcagggccagguggaccugaacgacguggugcuggcccugaccgaccugggccugaucuacaccgccaaguaccccaacagcagcgaccuggacagacugagccagagccaccccauccugaacaugguggacaccaagaagagcagccugaacaucagcggcuucaacuucagccugggcgccgccgugaaggccggcgccugcaugcuggacggcggcaacaugcuggagaccaucaaggugaccccccagaccauggacggcauccugaagagcauccugaaggugaagaagagccugggcauguucgugagcgacacccccggcgagagaaaccccuacgagaacauccuguacaagaucugccugagcggcgacggcuggcccuacaucgccagcagaaccagcaucgugggcagagccugggagaacaccaccguggaccuggagagcgacggcaagccccacaaggugggcaccgccggcagcaacaagagccugcagagcgccggcuuccccaccggccugaccuacagccagcugaugacccugaaggacagcaugaugcagcuggaccccagcgccaagaccuggaucgacaucgagggcagacccgaggaccccguggagaucgcccuguaccagcccaugagcggcugcuacauccacuucuucagagagcccaccgaccugaagcaguucaagcaggacgccaaguacagccacggcaucgacguggccgaccuguuccccgcccagcccggccugaccagcgccgugaucgaggcccugcccagaaacauggugcugaccugccagggcagcgacgacaucaagagacugcuggacagccagggcagaaaggacaucaagcugaucgacaucgcccugagcaagaccgacagcagaagauucgagaacgccgugugggaccagugcaaggaccugugccacaugcacaccggcguggugguggagaagaagaagagaggcggcaaggaggagaucaccccccacugcgcccugauggacugcaucauguacgacgccgccgugagcggcggccugaacauccccgugcugagagccgugcugcccagagacaugguguucagaaccagcagccccaagguggugcugugaggacuaguuauaagacugacuagcccgaugggccucccaacgggcccuccuccccuccuugcaccgagauuaaucaaaggcucuuuucagagccaccaaaaaaaaaaaaaaaaaaaaaaaaaaaaaaaaaaaaaaaaaaaaaaaaaaaaaaaaaaaaaaaaaaaaaaaaaaaaaaaaaaaaaaaaaaaaaaaaaaaaa

SEQ ID NO: 17812 - RNA, 1923 nt, Artificial Sequence
  mRNA product Design i-3 (hSL-A100) comprising derived and/or modified sequence from LASV(LASV003-NIG-2008;Clade II)__AIT17581__NP (opt4)
aggagaaagcuuaccaugagcgccagcaaggaggugaagagcuuccuguggacccagagccugagaagagagcugagcggcuacugcagcagcaucaagcugcagguggugaaggacgcccaggcccugcugcacggccuggacuucagcgaggugagcaacgugcagagacugaugagaaagcagaagagagacgacagcgaccugaagagacugagagaccugaaccaggccgugaacaaccugguggagcugaagagcacccagcagaagagcgugcugagagugggcacccugaccagcgacgaccugcugacccuggccgccgaccuggagaagcugaagagcaaggugaucagaaccgagagaccccugagcagcggcguguacaugggcaaccugagcgcccagcagcuggagcagagaagaacccugcugaacaugaucggcauggugggcggcgcccagggcacccagcccggcagagacggcguggugagagugugggacgugaagaaccccgaccugcugaacaaccaguucggcaccaugcccagccugacccuggccugccugaccaagcagggccagguggaccugaacgacguggugcuggcccugaccgaccugggccugaucuacaccgccaaguaccccaacagcagcgaccuggacagacugagccagagccaccccauccugagcaugguggacaccaagaagagcagccugaacaucagcggcuacaacuucagccugggcgccgccgugaaggccggcgccugcaugcuggacggcggcaacaugcuggagaccaucaaggugaccccccagaccauggacggcauccugaagagcauccugaaggugaagaagagccugggcauguucgugagcgacacccccggcgagagaaaccccuacgagaacauccuguacaagaucugccugagcggcgacggcuggcccuacaucgccagcagaaccagcaucgugggcagagccugggagaacaccaccguggaccuggagagcgacggcaagccccagaaggugggcaccgccggcagcaacaagagccugcagagcgccggcuuccccaccggccugaccuacagccagcugaugacccugaaggacagcaugaugcagcuggaccccagcgccaagaccuggaucgacaucgagggcagacccgaggaccccguggagaucgcccuguaccagcccaugagcggcugcuacauccacuucuucagagagcccaccgaccugaagcaguucaagcaggacgccaaguacagccacggcaucgacgugaccgaccuguuccccgcccagcccggccugaccagcgccgugaucgaggcccugcccagaaacauggugcugaccugccagggcagcgacgacaucaagagacugcuggacagccagggcagaagagacaucaagcugaucgacaucgcccugagcaaggccgacagcagaagauucgagaacgccgugugggaccagugcaaggaccugugccacaugcacaccggcguggugguggagaagaagaagagaggcggcaaggaggagaucaccccccacugcgcccugauggacugcaucauguacgacgccgccgugagcggcggccugaacauccccgugcugagagccgugcugcccagagacaugguguucagaaccagcagccccaagguggugcugugaggacuaguuauaagacugacuagcccgaugggccucccaacgggcccuccuccccuccuugcaccgagauuaaucaaaggcucuuuucagagccaccaaaaaaaaaaaaaaaaaaaaaaaaaaaaaaaaaaaaaaaaaaaaaaaaaaaaaaaaaaaaaaaaaaaaaaaaaaaaaaaaaaaaaaaaaaaaaaaaaaaaa

SEQ ID NO: 17813 - RNA, 1923 nt, Artificial Sequence
  mRNA product Design i-3 (hSL-A100) comprising derived and/or modified sequence from LASV(LASV035-NIG-2009;Clade II)__AIT17589__NP (opt4)
aggagaaagcuuaccaugagcgccagcaaggaggugaagagcuuccuguggacccagagccugagaagagagcugagcggcuacugcagcagcaucaagcugcagguggugaaggacgcccaggcccugcugcacggccuggacuucagcgaggugagcaacgugcagagacugaugagaaagcagaagagagacgacagcgaccugaagagacugagagaccugaaccaggccgugaacaaccugguggagcugaagagcacccagcagaagagcauccugagagugggcacccugaccagcgacgaccugcugacccuggccgccgaccuggagaagcugaagagcaaggugaucagaaccgagagaccccugagcagcggcguguacaugggcaaccugagcgcccagcagcuggagcagagaagagcccugcugaacaugaucggcauggugggcggcgcccagggcacccagcccggcagagacggcguggugagagugugggacgugaagaaccccgaccugcugaacaaccaguucggcaccaugcccagccugacccuggccugccugaccaagcagggccagguggaccugaacgacgccgugcuggcccugaccgaccugggccugaucuacaccgccaaguaccccaacagcagcgaccuggacagacugagccagagccaccccauccugaacaugguggacaccaagaagagcagccugaacaucagcggcuacaacuucagccugggcgccgccgugaaggccggcgccugcaugcuggacggcggcaacaugcuggagaccaucaaggugaccccccagaccauggacggcauccugaagagcauccugaaggugaagagaagccugggcauguucgugagcgacacccccggcgagagaaaccccuacgagaacauccuguacaagaucugccugagcggcgacggcuggcccuacaucgccagcagaaccagcaucgugggcagagccugggagaacaccaccguggaccuggagagcgacggcaagccccagaaggugggcaccaccggcagcaacaagagccugcagagcgccggcuuccccaccggccugaccuacagccagcugaugacccugaaggacagcaugaugcagcuggaccccagcgccaagaccuggaucgacaucgagggcagacccgaggaccccguggagaucgcccuguaccagcccaugagcggcugcuacauccacuucuucagagagcccaccgaccugaagcaguucaagcaggacgccaaguacagccacggcaucgacguggccgaccuguuccccgcccagcccggccugaccagcgccgugaucgaggcccugcccagaaacauggugcugaccugccagggcagcgacgacaucaagaagcugcuggacagccagggcagaagagacaucaagcugaucgacaucgcccugagcaaggccgacagcagaaaguucgagaacgccgugugggaccagugcaaggaccugugccacaugcacaccggcguggugguggagaagaagaagagaggcggcaaggaggagaucaccccccacugcgcccugauggacugcaucauguacgacgccgccgugagcggcggccugaacauccccgugcugagagccgugcugcccagagacaugguguucagaaccagcagccccaagguggugcugugaggacuaguuauaagacugacuagcccgaugggccucccaacgggcccuccuccccuccuugcaccgagauuaaucaaaggcucuuuucagagccaccaaaaaaaaaaaaaaaaaaaaaaaaaaaaaaaaaaaaaaaaaaaaaaaaaaaaaaaaaaaaaaaaaaaaaaaaaaaaaaaaaaaaaaaaaaaaaaaaaaaaa

SEQ ID NO: 17814 - RNA, 1923 nt, Artificial Sequence
  mRNA product Design i-3 (hSL-A100) comprising derived and/or modified sequence from LASV(LASV1000-NIG-2009;Clade II)__AIT17783__NP (opt4)
aggagaaagcuuaccaugagcgccagcaaggaggugaagagcuuccuguggacccagagccugagaagagagcugagcggcuacugcagcaacaucaagcugcagguggugaaggacgcccaggcccugcugcacggccuggacuucagcgaggugagcaacgugcagagacugaugagaaagcagaagagagacgacagcgaccugaagagacugagagaccugaaccaggccgugaacaaccugguggagcugaagagcacccagcagaagagcauccugagagugggcacccugaccagcgacgaccugcugacccuggccgccgaccuggagaagcugaagagcaaggugaucagaaccgagagaccccugagcagcggcguguacaugggcaaccugagcacccagcagcuggagcagagaagagcccugcugaacaugaucggcauggugggcggcgcccagggcacccagcccggcagagacggcguggugagagugugggacgugaagaaccccgaccugcugaacaaccaguucggcaccaugcccagccugacccuggccugccugaccaagcagggccagguggaccugaacgacguggugcuggcccugaccgaccugggccugaucuacaccgccaaguaccccaacagcagcgaccuggacagacugagccagagccaccccauccugaacaugguggacaccaagaagagcagccugaacaucagcggcuacaacuucagccugggcgccgccgugaaggccggcgccugcaugcuggacggcggcaacaugcuggagaccaucaaggugaccccccagaccauggacggcauccugaagagcauccugaaggugaagaagagccugggcauguucgugagcgacacccccggcgagagaaaccccuacgagaacauccuguacaagaucugccugagcggcgacggcuggcccuacaucgccagcagaaccagcaucgugggcagagccugggagaacaccaccguggaccuggagagcgacggcaagccccagaaggugggcaccgccggcagcaacaagagccugcagagcgccggcuuccccaccggccugaccuacagccagcugaugacccugaaggacagcaugaugcagcuggaccccagcgccaagaccuggaucgacaucgagggcagacccgaggaccccguggagaucgcccuguaccagcccgugagcggcugcuacauccacuucuucagagagcccaccgaccugaagcaguucaagcaggacgccaaguacagccacggcaucgacguggccgaccuguuccccgcccagcccggccugaccagcgccgugaucgaggcccugcccagaaacauggugcugaccugccagggcagcgacgacaucaagagacugcuggacagccagggcagaagagacaucaagcugaucgacaucgcccugagcaaggccgacagcagaagauucgagaacgccgugugggaccagugcaaggaccugugccacaugcacaccggcguggugguggagaagaagaagagaggcggcaaggaggagaucaccccccacugcgcccugauggacugcaucauguacgacgccgccgugagcggcggccugaacauccccgugcugagagccgugcugcccagagacaugguguucagaaccagcagccccaagguggugcugugaggacuaguuauaagacugacuagcccgaugggccucccaacgggcccuccuccccuccuugcaccgagauuaaucaaaggcucuuuucagagccaccaaaaaaaaaaaaaaaaaaaaaaaaaaaaaaaaaaaaaaaaaaaaaaaaaaaaaaaaaaaaaaaaaaaaaaaaaaaaaaaaaaaaaaaaaaaaaaaaaaaaa

SEQ ID NO: 17815 - RNA, 1923 nt, Artificial Sequence
  mRNA product Design i-3 (hSL-A100) comprising derived and/or modified sequence from LASV(LASV221-NIG-2010;Clade II)__AIT17625__NP (opt4)
aggagaaagcuuaccaugagcgccagcaaggaggugaagagcuuccuguggacccagagccugagaagagagcugagcggcuacugcagcagcaucaagcugcagguggugaaggacgcccaggcccugcugcacggccuggacuucagcgaggugagcaacgugcagagacugaugagaaagcagagaagagacgacagcgaccugaagagacugagagaccugaaccaggccgugaacaaccugguggagcugaagagcacccagcagaagagcauccugagagugggcacccugaccagcgacgaccugcugacccuggccgccgaccuggagaagcugaagagcaaggugaucagaaccgagagaccccugagcagcggcguguacaugggcaaccugagcacccagcagcuggagcagagaagagcccugcugaacaugaucggcauggugggcggcgcccagggcacccagcccggcagagacggcguggugagagugugggacgugaagaaccccgaccugcugaacaaccaguucggcaccaugcccagccugacccuggccugccugaccaagcagggccagguggaccugaacgacgccgugcuggcccugaccgaccugggccugaucuacaccgccaaguaccccaacagcagcgaccuggacagacugagccagagccaccccauccugaacaugguggacaccaagaagagcagccugaacaucagcggcuacaacuucagccugggcgccgccgugaaggccggcgccugcaugcuggacggcggcaacaugcuggagaccaucaaggugaccccccagaccguggacggcauccugaagagcauccugaaggugaagagaagccugggcauguucgugagcgacacccccggcgagagaaaccccuacgagaacauccuguacaagaucugccugagcggcgacggcuggcccuacaucgccagcagaaccagcaucgugggcagagccugggagaacaccaccguggaccuggagagcgacggcaagccccagaaggugggcaccgccggcagcaacaagagccugcagagcgccggcuuccccaccggccugaccuacagccagcugaugacccugaaggacagcaugaugcagcuggaccccagcgccaagaccuggaucgacaucgagggcagacccgaggaccccguggagaucgcccuguaccagcccaugagcggcugcuacauccacuucuucagagagcccaccgaccugaagcaguucaagcaggacgccaaguacagccacggcaucgacguggccgaccuguuccccgcccagcccggccugaccagcgccgugaucgaggcccugcccagaaacauggugcugaccugccagggcagcgacgacaucaagagacugcuggacagccagggcagaagagacaucaagcugaucgacaucgcccugagcaaggccgacagcagaaaguucgagaacgccgugugggaccagugcaaggaccugugccacaugcacaccggcguggugguggagaagaagaagagaggcggcaaggaggagaucaccccccacugcgcccugauggacugcaucauguacgacgccgccgugagcggcggccugaacauccccgugcugagagccgugcugcccagagacaugguguucagaaccagcagccccaagguggugcugugaggacuaguuauaagacugacuagcccgaugggccucccaacgggcccuccuccccuccuugcaccgagauuaaucaaaggcucuuuucagagccaccaaaaaaaaaaaaaaaaaaaaaaaaaaaaaaaaaaaaaaaaaaaaaaaaaaaaaaaaaaaaaaaaaaaaaaaaaaaaaaaaaaaaaaaaaaaaaaaaaaaaa

SEQ ID NO: 17816 - RNA, 1923 nt, Artificial Sequence
  mRNA product Design i-3 (hSL-A100) comprising derived and/or modified sequence from LASV(LASV237-NIG-2010;Clade II)__AIT17639__NP (opt4)
aggagaaagcuuaccaugagcgccagcaaggaggugaagagcuuccuguggacccagagccugagaagagagcugagcggcuacugcagcaacaucaagcugcagguggugaaggacgcccaggcccugcugcacggccuggacuucagcgaggugagcaacgugcagagacugaugagaaagcagaagagagacgacagcgaccugaagagacugagagaccugaaccaggccgugaacaaccugguggagcugaagagcacccagcagaagagcauccugagagugggcacccugaccagcgacgaccugcugacccuggccgccgaccuggagaagcugaagagcaaggugaucagaaccgagagaccccugagcagcggcguguacaugggcaaccugagcacccagcagcuggagcagagaagagcccugcugaacaugaucggcauggugggcggcgcccagggcacccagcccggcagagacggcguggugagagugugggacgugaagaaccccgaccugcugaacaaccaguucggcaccaugcccagccugacccuggccugccugaccaagcagggccagguggaccugaacgacgccgugcuggcccugaccgaccugggccugaucuacaccgccaaguaccccaacagcagcgaccuggacagacugagccagagccaccccauccugaacaugguggacaucaagaagagcagccugaacaucagcggcuacaacuucagccugggcgccgccgugaaggccggcgccugcaugcuggacggcggcaacaugcuggagaccaucaaggugaccccccagaccauggacggcauccugaagagcauccugaaggugaagagaagccugggcauguucgugagcgacacccccggcgagagaaaccccuacgagaacauccuguacaagaucugccugagcggcgacggcuggcccuacaucgccagcagaaccagcaucgugggcagagccugggagaacaccaccguggaccuggagagcgacggcaagccccagaaggugggcagcgccggcagcaacaagagccugcagagcgccggcuuccccaccggccugaccuacagccagcugaugacccugaaggacagcaugaugcagcuggaccccagcgccaagaccuggaucgacaucgagggcagacccgaggaccccguggagaucgcccuguaccagcccaugagcggcugcuacauccacuucuucagagagcccaccgaccugaagcaguucaagcaggacgccaaguacagccacggcaucgacguggccgaccuguuccccgcccagcccggccugaccagcgccgugaucgaggcccugcccagaaacauggugcugaccugccagggcagcgacgacaucaagagacugcuggacagccagggcagaagagacaucaagcugaucgacaucgcccugagcaaggccgacagcagaagauucgagaacgccgugugggaccagugcaaggaccugugccacaugcacaccggcguggugguggagaagaagaagagaggcggcaaggaggagaucaccccccacugcgcccugauggacugcaucauguacgacgccgccgugagcggcggccugaacauccccgugcugagagccgugcugcccagagacaugguguucagaaccagcagccccaagguggugcugugaggacuaguuauaagacugacuagcccgaugggccucccaacgggcccuccuccccuccuugcaccgagauuaaucaaaggcucuuuucagagccaccaaaaaaaaaaaaaaaaaaaaaaaaaaaaaaaaaaaaaaaaaaaaaaaaaaaaaaaaaaaaaaaaaaaaaaaaaaaaaaaaaaaaaaaaaaaaaaaaaaaaa

SEQ ID NO: 17817 - RNA, 1923 nt, Artificial Sequence
  mRNA product Design i-3 (hSL-A100) comprising derived and/or modified sequence from LASV(LASV253-NIG-2011;Clade II)__AIT17671__NP (opt4)
aggagaaagcuuaccaugagcgccagcaaggaggugaagagcuuccuguggacccagagccugagaagagagcugagcggcuacugcagcagcaucaagcugcagguggugaaggacgcccaggcccugcugcacggccuggacuucagcgaggugagcaacgugcagagacugaugagaaagcagaagagagacgacagcgaccugaagagacugagagaccugaaccaggccgugaacaaccugguggagcugaagagcacccagcagaagagcgugcugagagugggcacccugaccagcgacgaccugcugacccuggccgccgaccuggagaagcugaagagcaaggugaucagaaccgagagaccccugagcagcggcguguacaugggcaaccugagcacccagcagcuggagcagagaagagcccugcugaacaugaucggcauggugggcggcgcccagggcacccagcccggcagagacggcguggugagagugugggacgugaagaaccccgaccugcugaacaaccaguucggcaccaugcccagccugacccuggccugccugaccaagcagggccagguggaccugaacgacguggugcuggcccugaccgaccugggccugaucuacaccgccaaguaccccaacagcagcgaccuggacagacugagccagagccaccccauccugaacaugguggacaccaagaagagcagccugaacaucagcggcuacaacuucagccugggcgccgccgugaaggccggcgccugcaugcuggacggcggcaacaugcuggagaccaucaaggugaccccccagaccauggacggcauccugaagagcauccugaaggugaagaagagccugggcauguucgugagcgacacccccggcgagagaaaccccuacgagaacauccuguacaagaucugccugagcggcgacggcuggcccuacaucgccagcagaaccagcaucgugggcagagccugggagaacaccaccguggaccuggagagcgacggcaagccccagaaggugggcaccgccggcagcaacaagagccugcagagcgccggcuuccccaccggccugaccuacagccagcugaugacccugaaggacagcaugaugcagcuggaccccagcgccaagaccuggaucgacaucgagggcagacccgaggaccccguggagaucgcccuguaccagcccaugagcggcugcuacauccacuucuucagagagcccaccgaccugaagcaguucaagcaggacgccaaguacagccacggcaucgacgugaccgaccuguuccccgcccagcccggccugaccagcgccgugaucgaggcccugcccagaaacauggugcugaccugccagggcagcgacgacaucaagagacugcuggacagccagggcagaagagacaucaagcugaucgacaucgcccugagcaaggccgacagcagaagauucgagaacgccgugugggaccagugcaaggaccugugccacaugcacaccggcguggugguggagaagaagaagagaggcggcaaggaggagaucaccccccacugcgcccugauggacugcaucauguacgacgccgccgugagcggcggccugaacauccccgugcugagagccgugcugcccagagacaugguguucagaaccagcagccccaagguggugcugugaggacuaguuauaagacugacuagcccgaugggccucccaacgggcccuccuccccuccuugcaccgagauuaaucaaaggcucuuuucagagccaccaaaaaaaaaaaaaaaaaaaaaaaaaaaaaaaaaaaaaaaaaaaaaaaaaaaaaaaaaaaaaaaaaaaaaaaaaaaaaaaaaaaaaaaaaaaaaaaaaaaaa

SEQ ID NO: 17818 - RNA, 1923 nt, Artificial Sequence
  mRNA product Design i-3 (hSL-A100) comprising derived and/or modified sequence from LASV(LASV254-NIG-2011;Clade II)__AIT17675__NP (opt4)
aggagaaagcuuaccaugagcgccagcaaggaggugaagagcuuccuguggacccagagccugagaagagagcugagcggcuacugcagcagcaucaagcugcagguggugaaggacgcccaggcccugcugcacggccuggacuucagcgaggugagcaacgugcagagacugaugagaaagcagaagagagacgacagcgaccugaagagacugagagaccugaaccaggccgugaacaaccugguggagcugaagagcacccagcagaagagcgugcugagagugggcacccugaccagcgacgaccugcugacccuggccgccgaccuggagaagcugaagagcaaggugaucagaaccgagagaccccugagcagcggcguguacaugggcaaccugagcacccagcagcuggagcagagaagagcccugcugaacaugaucggcauggugggcggcgcccagggcacccagcccggcagagacggcguggugagagugugggacgugaagaaccccgaccugcugaacaaccaguucggcaccaugcccagccugacccuggccugccugaccaagcagggccagguggaccugaacgacgccgugcuggcccugaccgaccugggccugaucuacaccgccaaguaccccaacagcagcgaccuggacagacugagccagagccaccccauccugaacaugguggacaccaagaagagcagccugaacaucagcggcuacaacuucagccugggcgccgccgugaaggccggcgccugcaugcuggacggcggcaacaugcuggagaccaucaaggugaccccccagaccauggacggcauccugaagagcauccugaaggugaagaagagccugggcauguucgugagcgacacccccggcgagagaaaccccuacgagaacauccuguacaagaucugccugagcggcgacggcuggcccuacaucgccagcagaaccagcaucgugggcagagccugggagaacaccaucguggaccuggagagcgacggcaagccccagaaggugggcaccgccggcagcaacaagagccugcagagcgccggcuuccccaccggccugaccuacagccagcugaugacccugaaggacagcaugaugcagcuggaccccagcgccaagaccuggaucgacaucgagggcagacccgaggaccccguggagaucgcccuguaccagcccaugagcggcugcuacauccacuucuucagagagcccaccgaccugaagcaguucaagcaggacgccaaguacagccacggcaucgacguggccgaccuguuccccgcccagcccggccugaccagcgccgugaucgaggcccugcccagaaacauggugcugaccugccagggcagcgacgacaucaagagacugcuggacagccagggcagaagagacaucaagcugaucgacaucgcccugagcaaggccgacagcagaagauucgagaacgccgugugggaccagugcaaggaccugugccacaugcacaccggcguggugguggagaagaagaagagaggcggcaaggaggagaucaccccccacugcgcccugauggacugcaucauguacgacgccgccgugagcggcggccugaacauccccgugcugagagccgugcugcccagagacaugguguucagaaccagcagccccaagguggugcugugaggacuaguuauaagacugacuagcccgaugggccucccaacgggcccuccuccccuccuugcaccgagauuaaucaaaggcucuuuucagagccaccaaaaaaaaaaaaaaaaaaaaaaaaaaaaaaaaaaaaaaaaaaaaaaaaaaaaaaaaaaaaaaaaaaaaaaaaaaaaaaaaaaaaaaaaaaaaaaaaaaaaa

SEQ ID NO: 17819 - RNA, 1923 nt, Artificial Sequence
  mRNA product Design i-3 (hSL-A100) comprising derived and/or modified sequence from LASV(Nig08-04;Clade II)__ADU56611__NP (opt4)
aggagaaagcuuaccaugagcgccagcaaggaggugaagagcuuccuguggacccagagccugagaagagagcugagcggcuacugcagcaacaucaagcugcagguggugaaggacgcccaggcccugcugcacggccuggacuucagcgaggugagcaacgugcagagacugaugagaaagcagaagagagacgacggcgaccugaagagacugagagaccugaaccaggccgugaacaaccugguggagcugaagagcacccagcagaagagcgugcugagagugggcacccugaccagcgacgaccugcugacccuggccgccgaccuggagaagcugaagagcaaggugaucagaaccgagagaccccugagcagcggcguguacaugggcaaccugagcacccagcagcuggagcagagaaaggcccugcugagcaugaucggcauggugggcggcgcccagggcacccagcccggcagagacggcguggugagagugugggacgugaagaaccccgaccugcugaacaaccaguucggcaccaugcccagccugacccuggccugccugaccaagcagggccagguggaccugaacgacgccgugcuggcccugaccgaccugggccugaucuacaccgccaaguaccccaacagcagcgaccuggacagacugagccagagccaccccauccugaacaugguggacaccaagaagagcagccugaacaucagcggcuacaacuucagccugggcgccgccgugaaggccggcgccugcaugcuggacggcggcaacaugcuggagaccaucaaggugaccccccagaccauggacggcauccugaagagcauccugaaggugaagagaagccugggcauguucgugagcgacacccccggcgagagaaaccccuacgagaacauccuguacaagaucugccugagcggcgacggcuggcccuacaucgccagcagaaccagcaucgugggcagagccugggagaacaccaccguggaccuggagagcgacggcaagccccagaaggugggcaccgccggcagcaacaagagccugcagagcgccggcuuccccaccggccugaccuacagccagcugaugacccugaaggacagcaugaugcagcuggaccccagcgccaagaccuggaucgacaucgagggcagacccgaggaccccguggagaucgcccuguaccagcccaugagcggcugcuacauccacuucuucagagagcccaccgaccugaagcaguucaagcaggacgccaaguacagccacggcaucgacgugaccgaccuguucagcgcccagcccggccugaccagcgccgugaucgaggcccugcccagaaacauggugcugaccugccagggcagcgacgacaucaagaagcugcuggacagccagggcagaagagacaucaagcugaucgacaucagccugaacaaggccgacagcagaagauucgagaacgccgugugggaccagugcaaggaccugugccacaugcacaccggcguggugguggagaagaagaagagaggcggcaaggaggagaucaccccccacugcgcccugauggacugcaucauguucgacgccgccgugagcggcggccugaacauccccauccugagagccgugcugcccagagacaugguguucagaaccagcagccccaagguggugcugugaggacuaguuauaagacugacuagcccgaugggccucccaacgggcccuccuccccuccuugcaccgagauuaaucaaaggcucuuuucagagccaccaaaaaaaaaaaaaaaaaaaaaaaaaaaaaaaaaaaaaaaaaaaaaaaaaaaaaaaaaaaaaaaaaaaaaaaaaaaaaaaaaaaaaaaaaaaaaaaaaaaaa

SEQ ID NO: 17820 - RNA, 1926 nt, Artificial Sequence
  mRNA product Design i-3 (hSL-A100) comprising derived and/or modified sequence from LASV(GA391;Clade III)__AAA46284__NP (opt4)
aggagaaagcuuaccaugagcgccagcaaggaggugagaagcugccuguggacccagagccugagaagagagcugagcggcuacugcagcaacaucaagcugcagguggugaaggacgcccaggcccugcugcacggccuggacuucagcgaggugagcaacgugcagagacugaugagaaagcagaagagagacgacggcgaccugaagagacugagagaccugaaccaggccgugaacaaccugguggagcugaagagcacccagcagaagagcgugcugagagugggcacccugagcagcgacgaccugcugauccuggccgccgaccuggagaagcugaagagcaaggugaccagaaccgagagaccccugagcagcggcguguacaugggcaaccugagcagccagcagcuggaccagagaagagcccugcugaacaugaucggcaugaccggcgugagcggcggcggcaagggcgccagcaacggcaucgugagagugugggacgugaagaacgccgagcugcugaacaaccaguucggcaccaugcccagccugacccuggccugccugaccaagcagggccagguggaccugaacgacgccgugcaggcccugaccgaccugggccugaucuacaccgccaaguaccccaacagcagcgaccuggacagacugagccagagccaccccauccugaacaugaucgacaccaagaagagcagccugaacaucagcggcuacaacuucagccugggcgccgccgugaaggccggcgccugcaugcuggacggcggcaacaugcuggagaccaucaaggugagcccccagaccauggacggcauccugaagagcauccugaaggugaagaagagccugggcauguucgugagcgacacccccggcgagagaaaccccuacgagaacauccuguacaagaucugccugagcggcgacggcuggagcuacaucgccagcagaaccagcaucgugggcagagccugggagaacaccgugguggaccuggagcaggacaacaagccccagaagaucggcaacggcggcagcaacaagagccugcagagcgccggcuucgccgccggccugaucuacagccagcugaugacccugaaggacuucaagugcuucaaccugauccccaacgccaagaccuggauggacaucgagggcagacccgaggaccccguggagaucgcccuguaccagcccagcagcggcugcuacgugcacuucuucagagagcccaccgaccugaagcaguucaagcaggacgccaaguacagccacggcagagacgugaccgaccuguucgccgcccagcccggccugaccagcgccgugaucgaggcccugcccagaaacauggugaucaccugccagggcagcgaggacaucagaaagcugcuggagagccagggcagaagagacaucaagcugaucgacaucacccugagcaaggccgacagcagaaaguucgagaacgccgugugggaccaguucaaggaccugugccacaugcacaccggcguggugguggagaagaagaagagaggcggcaaggaggagaucaccccccacugcgcccugauggacugcaucauguucgacgccgccgugagcggcggccuggacgccaaggugcugagaguggugcugcccagagacaugguguucagaaccagcacccccaagguggugcugugaggacuaguuauaagacugacuagcccgaugggccucccaacgggcccuccuccccuccuugcaccgagauuaaucaaaggcucuuuucagagccaccaaaaaaaaaaaaaaaaaaaaaaaaaaaaaaaaaaaaaaaaaaaaaaaaaaaaaaaaaaaaaaaaaaaaaaaaaaaaaaaaaaaaaaaaaaaaaaaaaaaaa

SEQ ID NO: 17821 - RNA, 1923 nt, Artificial Sequence
  mRNA product Design i-3 (hSL-A100) comprising derived and/or modified sequence from LASV(Nig08-A19;Clade III)__ADU56619__NP (opt4)
aggagaaagcuuaccaugagcgccagcaaggaggugaagagcuuccuguggacccagagccugagaagagagcugagcggcuacugcagcaacaucaagcugcagguggugaaggacgcccaggcccugcugcacggccuggacuucagcgaggugagcaacgugcagagacugaugagaaagcagaagagagacgacggcgaccugaagagacugagagaccugaaccaggccgugaacaaccugguggagcugaagagcacccagcagaagagcgugcugagagugggcacccugagcagcgacgaccugcuggugcuggccgccgaccuggagaagcugaagagcaagguggugagaaccgagagaccccugagcagcggcaucuacaugggcaaccugagcagccagcagcuggaccagagaaaggcccugcugaacaugaucggcaugaccggcggcaacggcggcagaaacaccaccagcgacggcaucgugagagugugggacgugaagaacgccgagcugcugaacaaccaguucggcaccaugcccagccugacccuggccugccugaccaagcagggccagguggaccugaacgacgccgugcaggcccugaccgaccugggccugaucuacaccgccaaguaccccaacagcagcgaccuggacagacuggcccagagccaccccauccugaacaugaucgacaccaagaagagcagccugaacaucagcggcuacaacuucagccugggcgccgccgugaaggccggcgccugcaugcuggacggcggcaacaugcuggagaccaucaaggugagcccccagaccauggacggcauccugaagagcauccugaaggugaagagaagccugggcauguucaucagcgacacccccggcgagagaaaccccuacgagaacauccuguacaagaucugccugagcggcgacggcuggcccuacaucgccagcagaaccagcaucgugggcagagccugggagaacaccgugguggaccuggagagcgacaacaagccccagaagaccggcaacggcggcagcaacaagagccugcagagcgccggcuucgccgccggccugaccuacagccagcugaugacccugaaggacagcaugcugcagcuggaccccaacgccaagaccuggauggacaucgagggcagacccgaggaccccguggagaucgcccuguaccagcccagcagcggcugcuacauccacuucuucagagagcccaccgaccugaagcaguucaagcaggacgccaaguacagccacggcaucgacgugaccgaccuguucgccgcccagcccggccugaccagcgccgugaucgaggcccugcccagaaacauggugaucaccugccagggcagcgaggacaucagaaagcugcuggagagccagggcagaagagacaucaagcugaucgacaucagccugagcaagguggacagcagaaaguucgagaacgccgugugggaccaguucaaggaccugugccacaugcacaccggcaucgugguggagaagaagaagagaggcggcaaggaggagaucaccccccacugcgcccugauggacugcaucauguucgacgccgccgugagcggcggcguggacgccaaggugcugagagccgugcugcccagagacaugguguucagaaccagcacccccaagguggugcugugaggacuaguuauaagacugacuagcccgaugggccucccaacgggcccuccuccccuccuugcaccgagauuaaucaaaggcucuuuucagagccaccaaaaaaaaaaaaaaaaaaaaaaaaaaaaaaaaaaaaaaaaaaaaaaaaaaaaaaaaaaaaaaaaaaaaaaaaaaaaaaaaaaaaaaaaaaaaaaaaaaaaa

SEQ ID NO: 17822 - RNA, 1923 nt, Artificial Sequence
  mRNA product Design i-3 (hSL-A100) comprising derived and/or modified sequence from LASV(G1180-SLE-2010;Clade IV)__AIT17169__NP (opt4)
aggagaaagcuuaccaugagcgccagcaaggagaucaagagcuuccuguggacccagagccugagaagagagcugagcggcuacugcagcaacaucaagcugcagguggugaaggacgcccaggcccugcugcacggccuggacuucagcgaggugagcaacgugcagagacugaugagaaaggagagaagagacgacaacgaccugaagagacugagagaccugaaccaggccgugaacaaccugguggagcugaagagcacccagcagaagagcauccugagagugggcacccugaccagcgacgaccugcugauccuggccgccgaccuggagaagcugaagagcaaggugaucagaaccgagagaccccugagcgccggcguguacaugggcaaccugagcagccagcagcuggaccagagaagagcccugcugagcaugaucggcaugagcagcggcaaccagagagcccaggccggcagagacggcguggugagagugugggacgugaagaacguggagcugcugaacaaccaguucggcaccaugcccagccugacccuggccugccugaccaagcagggccagguggaccugaacgacgccgugcaggcccugaccgaccugggccugaucuacaccgccaaguaccccaacaccagcgaccuggacagacugacccagagccaccccauccugaacaugaucgacaccaagaagagcagccugaacaucagcggcuacaacuucagccugggcgccgccgugaaggccggcgccugcaugcuggacggcggcaacaugcuggagaccaucaaggugagcccccagaccauggacggcauccugaagagcauccugaaggugaagaaggcccugggcauguucaucagcgacacccccggcgagagaaaccccuacgagaacauccuguacaagaucugccugagcggcgacggcuggcccuacaucgccagcagaaccagcaucaccggcagagccugggagaacaccgugguggaccuggagagcgacggcaagccccagaaggccggcagcaacaacagcaacaagagccugcagagcgugggcuucaccgccggccugaccuacagccagcugaugacccugaaggacgccaugcugcagcuggaccccaacgccaagaccuggauggacaucgagggcagacccgaggaccccguggagaucgcccuguaccagcccagcagcggcugcuacauccacuucuucagagagcccaccgaccugaagcaguucaagcaggacgccaaguacagccacggcaucgacgugaccgaccuguucgccgcccagcccggccugaccagcgccgugaucgacgcccugcccagaaacauggugaucaccugccagggcagcgacgacaucagaaagcugcuggagagccagggcagaaaggacaucaagcugaucgacaucgcccugagcaagaccgacagcagaaaguacgagaacgccgugugggaccaguacaaggaccugugccacaugcacaccggcguggugguggagaagaagaagagaggcggcaaggaggagaucaccccccacugcgcccugauggacugcaucauguucgacgccgccgugagcggcggccugaacaccagcgugcugagagccgugcugcccagagacaugguguucagaaccagcacccccagaguggugcugugaggacuaguuauaagacugacuagcccgaugggccucccaacgggcccuccuccccuccuugcaccgagauuaaucaaaggcucuuuucagagccaccaaaaaaaaaaaaaaaaaaaaaaaaaaaaaaaaaaaaaaaaaaaaaaaaaaaaaaaaaaaaaaaaaaaaaaaaaaaaaaaaaaaaaaaaaaaaaaaaaaaaa

SEQ ID NO: 17823 - RNA, 1923 nt, Artificial Sequence
  mRNA product Design i-3 (hSL-A100) comprising derived and/or modified sequence from LASV(G1442-SLE-2011;Clade IV)__AIT17181__NP (opt4)
aggagaaagcuuaccaugagcgccagcaaggaggugaagagcuuccuguggacccagagccugagaagagagcugagcggcuacugcagcaacaucaagcugcagguggugaaggacgcccaggcccugcugcacggccuggacuucagcgaggugagcaacgugcagagacugaugagaaagcagagaagagacgacaacgaccugaagagacugagagaccugaaccaggccgugaacaaccugguggagcugaagagcacccagcagaagagcgugcugagagugggcacccugaccagcgacgaccugcuggugcuggccgccgaccuggagaagcugaagagcaaggugaucagaaccgagagaccccugagcgccggcguguacaugggcaaccugagcagccagcagcuggaccagagaagagcccugcugaacaugaucggcaugagcggcggcauccagggcaccagaaccggcagagacggcguggugagagugugggacgugaagaacgccgaccugcugaacaaccaguucggcaccaugcccagccugacccuggccugccugaccaagcagggccagguggaccugaacgacguggugcaggcccugaccgaccugggccugaucuacaccgccaaguaccccaacgccagcgaccuggacagacugacccagagccaccccauccugaacaugaucgacaccaagaagagcagccugaacaucagcggcuacaacuucagccugggcgccgccgugaaggccggcgccugcaugcuggacggcggcaacaugcuggagaccaucaaggugagcccccagaccauggacggcauccugaagagcauccugaaggugaagaagacccugggcauguucaucagcgacacccccggcgagagaaaccccuacgagaacauccuguacaagaucugccugagcggcgacggcuggcccuacaucgccagcagaaccagcaucaccggcagagccugggagaacaccgugguggaccuggagagcgacggcaagccccagaaggccggcagcaacaacagcaacaagagccugcagagcgccggcuucgccgccggccugaccuacagccagcugaugacccugaaggacgccaugcugcagcuggaccccaacgccaagaccuggauggacaucgagggcagacccgaggaccccguggagaucgcccuguaccagcccagcagcggcugcuacauccacuucuucagagagcccaccgaccugaagcaguucaagcaggacgccaaguacagccacggcaucgacgugaccgaccuguucgccgcccagcccggccugaccagcgccgugaucgaggcccugcccagaaacauggugaucaccugccagggcagcgacgacaucaagaagcugcuggagagccagggcagaaaggacaucaagcugaucgacaucgcccugagcaagaccgacagcagaaaguacgagaacgccgugugggaccaguacaaggaccugugccacaugcacaccggcguggugguggagaagaagaagagaggcggcaaggaggagaucaccccccacugcgcccugauggacugcaucauguucgacgccgccgugagcggcggccugaacacccuggugcugagagccgugcugcccagagacaugguguucagaaccagcacccccagaguggugcugugaggacuaguuauaagacugacuagcccgaugggccucccaacgggcccuccuccccuccuugcaccgagauuaaucaaaggcucuuuucagagccaccaaaaaaaaaaaaaaaaaaaaaaaaaaaaaaaaaaaaaaaaaaaaaaaaaaaaaaaaaaaaaaaaaaaaaaaaaaaaaaaaaaaaaaaaaaaaaaaaaaaaa

SEQ ID NO: 17824 - RNA, 1923 nt, Artificial Sequence
  mRNA product Design i-3 (hSL-A100) comprising derived and/or modified sequence from LASV(G3010-SLE-2013;Clade IV)__AIT17345__NP (opt4)
aggagaaagcuuaccaugagcgccagcaaggagaucaagagcuuccuguggacccagagccugagaagagagcugagcggcuacugcagcaacaucaagcugcagguggugaaggacgcccaggcccugcugcacggccuggacuucagcgaggugagcaacgugcagagacugaugagaaaggagagaagagacgacaacgaccugaagagacugagagaccugaaccaggccgugaacaaccugguggagcugaagagcacccagcagaagagcauccugagagugggcacccugaccagcgacgaccugcugauccuggccgccgaccuggagaagcugaagagcaaggugaccagaaccgagagaccccugagcgccggcguguacaugggcaaccugagcagccagcagcuggaccagagaagagcccugcugagcaugaucggcaugagcagcggcgugcagggcgccagagccggcagagacggcguggugagagugugggacgugaagaacgccgagcugcugaacaaccaguucggcaccaugcccagccugacccuggccugccugaccaagcagggccagguggaccugaacgacguggugcaggcccugaccgaccugggccugaucuacaccgccaaguaccccaacaccagcgaccuggacagacugacccagagccaccccauccugaacaugaucgacaccaagaagagcagccugaacaucagcggcuacaacuucagccugggcgccgccgugaaggccggcgccugcaugcuggacggcggcaacaugcuggagaccaucaaggugagcccccagaccauggacggcauccugaagagcauccugaaggugaagaaggcccugggcauguucaucagcgagacccccggcgagagaaaccccuacgagaacauccuguacaagaucugccugagcggcgacggcuggcccuacaucgccagcagaaccagcaucaccggcagagccugggagaacaccgugguggaccuggagagcgacggcaagccccagaaggccggcagcaacaacagcaacaagagccugcagagcgccggcuucaccgccggccugaccuacagccagcugaugacccugaaggacgccaugcugcagcuggaccccaacgccaagaccuggauggacaucgagggcagacccgaggaccccguggagguggcccuguaccagcccagcagcggcugcuacauccacuucuucagagagcccaccgaccugaagcaguucaagcaggacgccaaguacagccacggcaucgacgugaccgaccuguucgccgcccagcccggccugaccagcgccgugaucgacgcccugcccagaaacauggugaucaccugccagggcagcgacgacaucaagaagcugcuggagagccagggcagaaaggacaucaagcugaucgacaucgcccugagcaagaccgacagcagaaaguacgagaacgccgugugggaccaguacaaggaccugugccacaugcacaccggcguggugguggagaagaagaagagaggcggcaaggaggagaucaccccccacugcgcccugauggacugcaucauguucgacgccgccgugagcggcggccugaacaccagcgugcugagagccgugcugcccagagacaugguguucagaaccagcacccccagaguggugcugugaggacuaguuauaagacugacuagcccgaugggccucccaacgggcccuccuccccuccuugcaccgagauuaaucaaaggcucuuuucagagccaccaaaaaaaaaaaaaaaaaaaaaaaaaaaaaaaaaaaaaaaaaaaaaaaaaaaaaaaaaaaaaaaaaaaaaaaaaaaaaaaaaaaaaaaaaaaaaaaaaaaaa

SEQ ID NO: 17825 - RNA, 1923 nt, Artificial Sequence
  mRNA product Design i-3 (hSL-A100) comprising derived and/or modified sequence from LASV(G502-SLE-2009;Clade IV)__AIT17127__NP (opt4)
aggagaaagcuuaccaugagcgccagcaaggagaucaagagcuuccuguggacccagagccugagaagagagcugagcggcuacugcagcaacaucaagcugcagguggugaaggacgcccaggcccugcugcacggccuggacuucagcgaggugagcaacgugcagagacugaugagaaaggagagaagagacgacaacgaccugaagagacugagagaccugaaccaggccgugaacaaccugguggagcugaagagcacccagcagaagagcauccugagagugggcacccugaccagcgacgaccugcugauccuggccgccgaccuggagaagcugaagagcaaggugaucagaaccgagagaccccugagcgccggcguguacaugggcaaccugagcagccagcagcuggaccagagaagagcccugcugagcaugaucggcaugagcggcggcaaccagggcgugagagccggcaaggacggcguggugagagugugggacgugaagaacgccgagcugcugaacaaccaguucggcaccaugcccagccugacccuggccugccugaccaagcagggccagguggaccugaacgacgccgugcaggcccugaccgaccugggccugaucuacaccgccaaguaccccaacaccagcgaccuggacagacugacccagagccaccccauccugaacaugaucgacaccaagaagagcagccugaacaucagcggcuacaacuucagccugggcgccgccgugaaggccggcgccugcaugcuggacggcggcaacaugcuggagaccaucaaggugagcccccagaccauggacggcauccugaagagcauccugaaggugaagaaggcccugggcauguucaucagcgacacccccggcgagagaaaccccuacgagaacauccuguacaagaucugccugagcggcgacggcuggcccuacaucgccagcagaaccagcaucaccggcagagccugggagaacaccgugguggaccuggagagcgacggcaagccccagaaggccggcagcaacaacagcaacaagagccugcagagcgccggcuucaccgccggccugaccuacagccagcugaugacccugaaggacgccaugcugcagcuggaccccaacaccaagaccuggauggacaucgagggcagacccgaggaccccguggagaucgcccuguaccagcccagcagcggcugcuacauccacuucuucagagagcccaccgaccugaagcaguucaagcaggacgccaaguacagccacggcaucgacgugaccgaccuguucgccgcccagcccggccugaccagcgccgugaucgacgcccugcccagaaacauggugaucaccugccagggcagcgacgacaucagaaagcugcuggagagccagggcagaaaggacaucaagcugaucgacaucgcccugaacaagaccgacagcagaaaguacgagaacgccgugugggaccaguacaaggaccugugccacaugcacaccggcguggugguggagaagaagaagagaggcggcaaggaggagaucaccccccacugcgcccugauggacugcaucauguucgacgccgccgugagcggcggccugaacaccagcgugcugagagccgugcugcccagagacaugguguucagaaccagcacccccagaguggugcugugaggacuaguuauaagacugacuagcccgaugggccucccaacgggcccuccuccccuccuugcaccgagauuaaucaaaggcucuuuucagagccaccaaaaaaaaaaaaaaaaaaaaaaaaaaaaaaaaaaaaaaaaaaaaaaaaaaaaaaaaaaaaaaaaaaaaaaaaaaaaaaaaaaaaaaaaaaaaaaaaaaaaa

SEQ ID NO: 17826 - RNA, 1923 nt, Artificial Sequence
  mRNA product Design i-3 (hSL-A100) comprising derived and/or modified sequence from LASV(G733-SLE-2010;Clade IV)__AIT17155__NP (opt4)
aggagaaagcuuaccaugagcgccagcaaggagaucaagagcuuccuguggacccagagccugagaagagagcugagcggcuacugcagcaacaucaagcugcagguggugaaggacgcccaggcccugcugcacggccuggacuucagcgaggugagcaacgugcagagacugaugagaaaggagagaagagacgacaacgaccugaagagacugagagaccugaaccaggccgugaacaaccugguggagcugaagagcacccagcagaagagcgugcugagagugggcacccugaccagcgacgagcugcuggugcuggccgccgaccuggagaagcugaagagcaaggugaucagaaccgagagaccccugagcgccggcguguacaugggcaaccugagcagccagcagcuggaccagagaagagcccugcugagcaugaucggcaugagcggcggcaaccagggcgccagaaccggcagagacggcguggugagagugugggacgugaagaacgccgagcugcugaacaaccaguucggcaccaugcccagccugacccuggccugccugaccaagcagggccagguggaccugaacgacgccgugcaggcccugaccgaccugggccugaucuacaccgccaaguaccccaacaccagcgaccuggacagacugacccagagccaccccauccugaacaugaucgacaccaagaagagcagccugaacaucagcggcuacaacuucagccugggcgccgccgugaaggccggcgccugcaugcuggacggcggcaacaugcuggagaccaucaaggugagcccccagaccauggacggcauccugaagagcauccugaaggugaagaaggcccugggcauguucaucagcgacacccccggcgagagaaaccccuacgagaacauccuguacaagaucugccugagcggcgacggcuggcccuacaucgccagcagaaccagcaucaccggcagagccugggagaacaccgugguggaccuggagagcgacggcaagccccagaaggccggcagcaacaacagcaacaagagccugcagagcgccggcuucaccgccggccugaccuacagccagcugaugacccugaaggacgccaugcugcagcuggaccccaacgccaagaccuggauggacaucgagggcagacccgaggaccccguggagaucgcccuguaccagcccagcagcggcugcuacauccacuucuucagagagcccaccgaccugaagcaguucaagcaggacgccaaguacagccacggcaucgacgugaccgaccuguucgccgcccagcccggccugaccagcgccgugaucgacgcccugcccagaaacauggugaucaccugccagggcagcgacgacaucagaaagcugcuggagagccagggcagaaaggacaucaagcugaucgacaucgcccugagcaagaucgacagcagaaaguacgagaacgccgugugggaccaguacaaggaccugugccacaugcacaccggcguggugguggagaagaagaagagaggcggcaaggaggagaucaccccccacugcgcccugauggacugcaucauguucgacgccgccgugagcggcggccugaacagccuggugcugagagccgugcugcccagagacaugguguucagaaccagcacccccagaguggugcugugaggacuaguuauaagacugacuagcccgaugggccucccaacgggcccuccuccccuccuugcaccgagauuaaucaaaggcucuuuucagagccaccaaaaaaaaaaaaaaaaaaaaaaaaaaaaaaaaaaaaaaaaaaaaaaaaaaaaaaaaaaaaaaaaaaaaaaaaaaaaaaaaaaaaaaaaaaaaaaaaaaaaa

SEQ ID NO: 17827 - RNA, 1923 nt, Artificial Sequence
  mRNA product Design i-3 (hSL-A100) comprising derived and/or modified sequence from MOPV/LASV reassortant(IGS-1;Clade IV)__AFY05578__NP (opt4)
aggagaaagcuuaccaugagcgccagcaaggagaucaagagcuuccuguggacccagagccugagaagagagcugagcggcuacugcagcaacaucaagcugcagguggugaaggacgcccaggcccugcugcacggccuggacuucagcgaggugagcaacgugcagagacugaugagaaaggagagaagagacgacaacgaccugaagagacugagagaccugaaccaggccgugaacaaccugguggagcugaagagcacccagcagaagagcauccugagagugggcacccugaccagcgacgaccugcugauccuggccgccgaccuggagaagcugagaagcaaggugaucagaaccgagagaccccugagcgccggcguguacaugggcaaccugagcagccagcagcuggaccagagaagagcccugcugaacaugaucggcaugagcggcggcaaccagggcgccagagccggcagagacggcguggugagagugugggacgugaagaacgccgagcugcugagcaaccaguucggcaccaugcccagccugacccuggccugccugaccaagcagggccagguggaccugaacgacgccgugcaggcccugaccgaccugggccugaucuacaccgccaaguaccccaacaccagcgaccuggacagacugacccagagccaccccauccugaacaugaucgacaccaagaagagcagccugaacaucagcggcuacaacuucagccugggcgccgccgugaaggccggcgccugcaugcuggacggcggcaacaugcuggagaccaucaaggugagcccccagaccauggacggcauccugaagagcauccugaaggugaagaaggcccugggcauguucaucagcgacacccccggcgagagaaaccccuacgagaacauccuguacaagaucugccugagcggcgacggcuggcccuacaucgccagcagaaccagcaucaccggcagagccugggagaacaccgugguggaccuggagagcgacggcaagccccagaaggccgacagcaacaacagcagcaagagccugcagagcgccggcuucaccgccggccugaccuacagccagcugaugacccugaaggacgccaugcugcagcuggaccccaacgccaagaccuggauggacaucgagggcagacccgaggaccccguggagaucgcccuguaccagcccagcagcggcugcuacauccacuucuucagagagcccaccgaccugaagcaguucaagcaggacgccaaguacagccacggcaucgacgugaccgaccuguucgccacccagcccggccugaccagcgccgugaucgacgcccugcccagaaacauggugaucaccugccagggcagcgacgacaucagaaagcugcuggagagccagggcagaaaggacaucaagcugaucgacaucgaccugagcaagaccgacagcagaaaguacgagaacgccgugugggaccaguacaaggaccugugccacaugcacaccggcguggugguggagaagaagaagagaggcggcaaggaggagaucaccccccacugcgcccugauggacugcaucauguucgacgccgccgugagcggcggccugaacaccagcgugcugagagccgugcugcccagagacaugguguucagaaccagcacccccagaguggugcugugaggacuaguuauaagacugacuagcccgaugggccucccaacgggcccuccuccccuccuugcaccgagauuaaucaaaggcucuuuucagagccaccaaaaaaaaaaaaaaaaaaaaaaaaaaaaaaaaaaaaaaaaaaaaaaaaaaaaaaaaaaaaaaaaaaaaaaaaaaaaaaaaaaaaaaaaaaaaaaaaaaaaa

SEQ ID NO: 17828 - RNA, 1923 nt, Artificial Sequence
  mRNA product Design i-3 (hSL-A100) comprising derived and/or modified sequence from LASV(LM765-SLE-2012;Clade IV)__AIT17815__NP (opt4)
aggagaaagcuuaccaugagcgccagcaaggagaucaagagcuuccuguggacccagagccugagaagagagcugagcggcuacugcagcaacaucaagcugcagguggugaaggacgcccaggcccugcugcacggccuggacuucagcgaggugagcaacgugcagagacugaugagaaaggagagaagagacgacaacgaccugaagagacugagagaccugaaccaggccgugaacaaccugguggagcugaagagcacccagcagaagagcauccugagagugggcacccugaccagcgacgaccugcugauccuggccgccgaccuggagaagcugaagagcaaggugaccagaaccgagagaccccugagcgccggcguguacaugggcaaccugagcagccagcagcuggaccagagaagagcccugcuggacaugaucggcaugagcggcagcaaccagggcgccagagccggcagagacggcguggugagagugugggacgugaagaacgccgagcugcugaacaaccaguucggcaccaugcccagccugacccuggccugccugaccaagcagggccagguggaccugaacgacgccgugcaggcccugaccgaccugggccugaucuacaccgccaaguaccccaacaccagcgaccuggacagacugacccagagccaccccauccugaacaugaucgacaccaagaagagcagccugaacaucagcggcuacaacuucagccugggcgccgccgugaaggccggcgccugcaugcuggacggcggcaacaugcuggagaccaucaaggugagcccccagaccauggacggcauccugaagagcauccugaaggugaagaaggcccugggcauguucaucagcgacgcccccggcgagagaaaccccuacgagaacauccuguacaagaucugccugagcggcgacggcuggcccuacaucgccagcagaaccagcaucaccggcagagccugggagaacaccgugguggaccuggagagcgacggcaagccccagaaggccggcagcaacggcagcaacaagagccugcagagcgccggcuucaccgccggccugaccuacagccagcugaugacccugaaggacgccaugcugcagcuggaccccaacgccaagaccuggauggacaucgagggcagacccgaggaccccguggagaucgcccuguaccagcccagcagcggcugcuacauccacuucuucagagagcccaccgaccugaagcaguucaagcaggacgccaaguacagccacggcaucgacgugaccgaccuguucgccgcccagcccggccugaccagcgccgugaucgacgcccugcccagaaacauggugaucaccugccagggcagcgacgacaucagaaagcuguucgagagccagggcagaaaggacaucaagcugaucgacaucgcccugagcaagaccgacagcagaaaguacgagaacgccgugugggaccaguacaaggaccugugccacaugcacaccggcaucgugguggagaagaagaagagaggcggcaaggaggagaucaccccccacugcgcccugauggacugcaucauguucgacgccgccgugagcggcggccugaacaccagcgugcugagagccgugcugcccagagacaugguguucagaaccagcacccccagaguggugcugugaggacuaguuauaagacugacuagcccgaugggccucccaacgggcccuccuccccuccuugcaccgagauuaaucaaaggcucuuuucagagccaccaaaaaaaaaaaaaaaaaaaaaaaaaaaaaaaaaaaaaaaaaaaaaaaaaaaaaaaaaaaaaaaaaaaaaaaaaaaaaaaaaaaaaaaaaaaaaaaaaaaaa

SEQ ID NO: 17829 - RNA, 1923 nt, Artificial Sequence
  mRNA product Design i-3 (hSL-A100) comprising derived and/or modified sequence from LASV(LM776-SLE-2012;Clade IV)__AIT17825__NP (opt4)
aggagaaagcuuaccaugagcgccagcaaggagaucaagagcuuccuguggacccagagccugagaagagagcugagcagcuacugcagcaacaucaagcugcagguggugaaggacgcccaggcccugcugcacggccuggacuucagcgaggugagcaacgugcagagacugaugagaaaggagagaagagacgacaacgaccugaagagacugagagaccugaaccaggccgugaacaaccugguggagcugaagagcacccagcagaagagcauccugagagugggcacccugaccagcgacgaccugcugauccuggccgccgaccuggagaagcugaagagcaaggugaccagaaccgagagaccccugagcgccggcguguacaugggcaaccugagcagccagcagcuggaccagagaagagcccugcugagcaugaucggcaugagcggcagcaaccagggcgccagagccggcagagacggcguggugagagugugggacgugaagaacgccgagcugcugaacaaccaguucggcaccaugcccagccugacccuggccugccugaccaagcagggccagguggaccugaacgacgccgugcaggcccugaccgaccugggccugaucuacaccgccaaguaccccaacaccagcgaccuggacagacugacccagagccaccccauccugaacaugaucgacaccaagaagagcagccugaacaucagcggcuacaacuucagccugggcgccgccgugaaggccggcgccugcaugcuggacggcggcaacaugcuggagaccaucaaggugagcccccagaccauggacggcauccugaagagcauccugaaggugaagaaggcccugggcauguucaucagcgacacccccggcgagagaaaccccuacgagaacauccuguacaagaucugccugagcggcgacggcuggcccuacaucgccagcagaaccagcaucaccggcagagccugggagaacaccgugguggaccuggagagcgacggcaagccccagaaggccggcagcaacaacagcaacaagagccugcagagcgccggcuucaccgccggccugaccuacagccagcugaugacccugaaggacgccaugcugcagcuggaccccaacgccaagaccuggauggacaucgagggcagacccgaggaccccguggagguggcccuguaccagcccagcagcggcugcuacauccacuucuucagagagcccaccgaccugaagcaguucaagcaggacgccaaguacagccacggcaucgacgugaccgaccuguucgccgcccagcccggccugaccagcgccgugaucgacgcccugcccagaaacauggugaucaccugccagggcagcgacgacaucagaaagcugcuggagagccagggcagaaaggacaucaagcugaucgacaucgcccugagcaagaccgacagcagaaaguacgagaacgccgugugggaccaguacaaggaccugugccacaugcacaccggcguggugguggagaagaagaagagaggcggcaaggaggagaucaccccccacugcgcccugauggacugcaucauguucgacgccgccgugagcggcggccugaacaccagcgugcugagagccgugcugcccagagacaugguguucagaaccagcacccccagaguggugcugugaggacuaguuauaagacugacuagcccgaugggccucccaacgggcccuccuccccuccuugcaccgagauuaaucaaaggcucuuuucagagccaccaaaaaaaaaaaaaaaaaaaaaaaaaaaaaaaaaaaaaaaaaaaaaaaaaaaaaaaaaaaaaaaaaaaaaaaaaaaaaaaaaaaaaaaaaaaaaaaaaaaaa

SEQ ID NO: 17830 - RNA, 1923 nt, Artificial Sequence
  mRNA product Design i-3 (hSL-A100) comprising derived and/or modified sequence from LASV(Mad39;Clade IV)__ANH09723__NP (opt4)
aggagaaagcuuaccaugagcgccagcaaggagaucaagagcuuccuguggacccagagccugagaagagagcugagcggcuacugcagcaacaucaagcugcagguggugaaggacgcccaggcccugcugcacggccuggacuucagcgaggugagcaacgugcagagacugaugagaaagcagagaagagacgacaacgaccugaagagacugagagaccugaaccaggccgugaacaaccugguggagcugaagagcacccagcagaagagcgugcugagagugggcacccugaccagcgacgaccugcugacccuggccgccgaccuggagaagcugaagagcaaggugaccagaaccgagagaccccugaccgccggcguguacaugggcaaccugagcagccagcagcuggaccagagaagagcccugcugaacaugaucggcaugagcggcggcaaccagggcgccagaaccggcagagacggcguggugagagugugggacgugaagaacgccgagcugcugaacaaccaguucggcaccaugcccagccugacccuggccugccugaccaagcagggccagguggaccugaacgacguggugcaggcccugaccgaccugggccugaucuacaccgccaaguaccccaacaccagcgaccuggacagacugacccagagccaccccauccugaacaugaucgacaccaacaagagcagccugaacaucagcggcuacaacuucagccugggcgccgccgugaaggccggcgccugcaugcuggacggcggcaacaugcuggagaccaucaaggugagcccccagaccauggacggcauccugaagagcauccugaaggugaagaagagccugggcauguucaucagcgacacccccggcgagagaaaccccuacgagaacauccuguacaagaucugccugagcggcgacggcuggcccuacaucgccagcagaaccagcaucaccggcagagccugggagaacaccgugguggaccuggagagcggcggcaagccccagaaggccggcagcaacaacagcaacaagagccugcagagcgccggcuucgccgccggccugaccuacagccagcugaugacccugaaggacgccaugcugcagcuggaccccaacgccaagaccuggauggacaucgagggcagacccgaggaccccguggagaucgcccuguaccagcccaucagcggcugcuacauccacuucuucagagagcccaccgaccugaagcaguucaagcaggacgccaaguacagccacggcaucgacgugaccgaccuguucgccgcccagcccggccugaccagcgccgugaucgaggcccugcccagaaacauggugaucaccugccagggcagcgacgacaucagaaagcuguucgagagccagggcagaaaggacaucaagcugaucgacaucgcccugagcaagaccgacagcagaaaguacgagaacgccgugugggaccaguacaaggaccugugccacaugcacaccggcguggugguggagaagaagaagaagggcggcaaggaggagaucaccccccacugcgcccugauggacugcaucauguucgacgccgccgugagcggcggccugaacacccuggugcugagagccgugcugcccagagacaugguguucagaaccagcacccccaagguggugcugugaggacuaguuauaagacugacuagcccgaugggccucccaacgggcccuccuccccuccuugcaccgagauuaaucaaaggcucuuuucagagccaccaaaaaaaaaaaaaaaaaaaaaaaaaaaaaaaaaaaaaaaaaaaaaaaaaaaaaaaaaaaaaaaaaaaaaaaaaaaaaaaaaaaaaaaaaaaaaaaaaaaaa

SEQ ID NO: 17831 - RNA, 1923 nt, Artificial Sequence
  mRNA product Design i-3 (hSL-A100) comprising derived and/or modified sequence from LASV(Z0947-SLE-2011;Clade IV)__AIT17841__NP (opt4)
aggagaaagcuuaccaugagcgccagcaaggagaucaagagcuuccuguggacccagagccugagaagagagcugagcggcuacugcagcaacaucaagcugcagguggugaaggacgcccaggcccugcugcacggccuggacuucagcgaggugagcaacgugcagagacugaugagaaaggagagaagagacgacaacgaccugaagagacugagagaccugaaccaggccgugaacaaccugguggagcugaagagcacccagcagaagagcauccugagagugggcacccugaccagcgacgaccugcugauccuggccgccgaccuggagaagcugaagagcaaggugaccagaaccgagagaccccugagcgccggcguguacaugggcaaccugagcagccagcagcuggaccagagaagagcccugcugaacaugaucggcaugagcggcagcaaccagggcgccagaaccggcagagacggcguggugagagugugggacgugaagaacgccgagcugcugaacaaccaguucggcaccaugcccagccugacccuggccugccugaccaagcagggccagguggaccugaacgacgccgugcaggcccugaccgaccugggccugaucuacaccgccaaguaccccaacaccagcgaccuggacagacugacccagagccaccccauccugaacaugaucgacaccaagaagagcagccugaacaucagcggcuacaacuucagccugggcgccgccgugaaggccggcgccugcaugcuggacggcggcaacaugcuggagaccaucaaggugagcccccagaccauggacggcauccugaagagcauccugaaggugaagaaggcccugggcauguucaucagcgacgcccccggcgagagaaaccccuacgagaacauccuguacaagaucugccugagcggcgacggcuggcccuacaucgccagcagaaccagcaucaccggcagagccugggagaacaccgugguggaccuggagagcgacggcaagccccagaaggccggcagcaacggcagcaacaagagccugcagagcgccggcuucaccgccggccugaccuacagccagcugaugacccugaaggacgccaugcugcagcuggaccccaacgccaagaccuggauggacaucgagggcagacccgaggaccccguggagaucgcccuguaccagcccagcagcggcugcuacauccacuucuucagagagcccaccgaccugaagcaguucaagcaggacgccaaguacagccacggcaucgacgugaccgaccuguucgccgcccagcccggccugaccagcgccgugaucgacgcccugcccagaaacauggugaucaccugccagggcagcgacgacaucagaaagcuguucgagagccagggcagaaaggacaucaagcugaucgacaucgcccugagcaagaccgacagcagaaaguacgagaacgccgugugggaccaguacaaggaccugugccacaugcacaccggcaucgugguggagaagaagaagagaggcggcaaggaggagaucaccccccacugcgcccugauggacugcaucauguucgacgccgccgugagcggcggccugaacaccagcgugcugagagccgugcugcccagagacaugguguucagaaccagcacccccagaguggugcugugaggacuaguuauaagacugacuagcccgaugggccucccaacgggcccuccuccccuccuugcaccgagauuaaucaaaggcucuuuucagagccaccaaaaaaaaaaaaaaaaaaaaaaaaaaaaaaaaaaaaaaaaaaaaaaaaaaaaaaaaaaaaaaaaaaaaaaaaaaaaaaaaaaaaaaaaaaaaaaaaaaaaa

SEQ ID NO: 17832 - RNA, 1923 nt, Artificial Sequence
  mRNA product Design i-3 (hSL-A100) comprising derived and/or modified sequence from LASV(Josiah;Clade IV)__NP_694869__NP (opt5)
aggagaaagcuuaccaugagcgccuccaaggagaucaaaucuuuccuguggacccagagccucagacgggaacuguccggcuacugcucuaacauuaagcugcaaguggucaaagacgcucaggcccugcuccacgggcuggauuuuagcgagguuuccaaugugcagcgccuuaugagaaaggaacggcgcgacgauaacgaccugaaaagacuccgggaucugaaucaggcggugaacaaucuggucgagcucaagucuacacaacaaaagagcauccugcgcgugggaacgcuuaccuccgacgaucugcucauucuggcugccgaccuugaaaaacuuaagagcaaaguuaucagaacagagcggccccucucugccggcguguauauggggaaccuguccagccagcagcuggaucagcgcagagcucuccugaauaugauuggaaugucuggcgggaaccagggagcccgggcuggccgcgacggcgucgugagaguuugggaugugaagaaugccgagcuucugaacaaucaguucgggaccaugccuucccucacacuggcgugucuuaccaaacagggacaagucgaccugaacgaugccgugcaggcucucacagaccugggccugaucuacaccgccaaguauccgaauacgagcgaccucgaucggcugacccagucucaucccauccuuaacaugauugacacaaagaaauccagccugaauaucuccggguacaacuuuucucucggagcugccgugaaggcgggcgccugcaugcuggaugggggaaacaugcuugaaaccauuaaagucagcccucaaacaauggacggcauccugaaguccauucucaaaguuaagaaagcucugggcauguucaucagcgauacccccggggagcgcaauccuuaugaaaacauucuguacaagaucugucucucuggagacggcuggcccuauaucgccuccagaacgagcauuacagggcgggcuugggagaauaccgugguggaucuggagucugacggaaagccucagaaagccgauagcaacaauuccucuaagagccuucaguccgccggcuuuacagcugggcugaccuacagccagcucaugacccugaaagacgcgaugcugcaacuugauccgaacgccaagacauggauggacaucgaaggaagacccgaggacccugucgaaauugcucucuaccagcccucuuccggcugcuauauccacuucuuucgcgagccuacggaucugaaacaguucaagcaggacgccaaguacagccauggcauugaugugaccgaccuguuugccacacaacccgggcucaccucugcuguuaucgaugcccugccgcggaauauggugaucacaugucagggauccgacgauauuagaaaacuucuggaaagccagggccgcaaggacaucaaacucauugauaucgcgcuguccaagaccgacucucggaaauaugagaacgcugucugggaucaguacaaggaccugugccacaugcauacgggggugguuguggagaagaaaaagagaggaggcaaagaagagauuacaccucacugugcccuuauggauugcaucauguucgacgccgcugucagcgggggccucaauaccuccgugcugcgcgccguccugccccgggacaugguguuuagaaccucuacaccucgcguugugcucugaggacuaguuauaagacugacuagcccgaugggccucccaacgggcccuccuccccuccuugcaccgagauuaaucaaaggcucuuuucagagccaccaaaaaaaaaaaaaaaaaaaaaaaaaaaaaaaaaaaaaaaaaaaaaaaaaaaaaaaaaaaaaaaaaaaaaaaaaaaaaaaaaaaaaaaaaaaaaaaaaaaaa

SEQ ID NO: 17833 - RNA, 1923 nt, Artificial Sequence
  mRNA product Design i-3 (hSL-A100) comprising derived and/or modified sequence from LASV(LP;Clade I)__AAF86702__NP (opt5)
aggagaaagcuuaccaugagcaacuccaaggagaucaaaucuuuccuguggacccagagccucagacgggaacuguccggcuacugcucuaauauuaagcuccaaguggucaaagacgcccaggcucugcuccacgggcuggauuuuagcgagguuuccaacgugcagcgccuuaugagaaagcagaaacgggacgaugccgaccugaagcgccucagagaucugaaucaagcggugaacaaucuggucgaacucaagucuacacagcagaaaaacgugcugcggguuggaacgcuuagcuccgacgaucugaucacccucgcugccgaccuggagaaacuuaaaagcaaggugauucgcacagaaagaccccugucuuccggcgucuauauggggaaucucagcucucagcaacuggaucagcggcgcgcccugcucuccaugaucggaaugagcggcgggccucagggaaacagaaccggcggcgacggggugguucgggugugggaugucaaaaaugcugagcugcuuaacaaucaguucggaacaaugccgucucugacccucgccugucugacaaagcaaggccagguggaccuuaacgaugcugugcaggcccugaccgaccucgggcugauuuacacggcgaaguaucccaauuccagcgaccuggauaugcucacccaaucccauccuauccugggaauggucgacacaaagaagucuagccuuaacaucuccggcuacaauuuuagccugggggccgcuguuaaagccggagcuugcaugcucgauggcggcaacaugcuggagaccauuaaggugucuccccagacaauggacgggauccuuaaauccauucugaaggugaaacgcagccucggaauguucaucucugauaccccuggcgaaagaaaccccuaugagaauauucuguacaagaucugucugagcggggaaggauggccuuauauugccucccggacgucuaucacaggccgcgcgugggagaacacccucgucgaccuggagagcgauaauaagccgcccaaacuuaacuccgccgggagcaauaagucucugcaggcugccggacucaacgcuggccugacauacucccagcugaugacccuuaaagacugcaugcuccaacuggauccuagcucuaagaccuggaucgacauugaaggcagacccgaggauccuguggaaaucgcccuguuucagcccuccagcggguguuacauucacuucuuucgggagccgacagaccucaaacaguucaagcaggacgccaaguauucccauggaaucgauguuacggaccuguuuucuacccaaccuggccuuacaagcgcugugauugaagcgcugcccagaaauaugguccuuaccugccagggguccgaugacaucaaaaagcugcuggagucucagggacgccgggauaucaaacuuauugacaucagccucuccaaggccgauagcagaaaauucgagaacgcugugugggaccaguacaaggaucugugucacaugcauacaggcguuguggucgaaaagaaaaagcgcgggggcaaagaggaaauuaccccucacugcgcccugcucgacuguaucauguuugaugccgcuacgacaggaucucugaauauuaccacccuucgggccgugcugcccagagacauggucuuccgcacauccacccccaaggugguucucugaggacuaguuauaagacugacuagcccgaugggccucccaacgggcccuccuccccuccuugcaccgagauuaaucaaaggcucuuuucagagccaccaaaaaaaaaaaaaaaaaaaaaaaaaaaaaaaaaaaaaaaaaaaaaaaaaaaaaaaaaaaaaaaaaaaaaaaaaaaaaaaaaaaaaaaaaaaaaaaaaaaaa

SEQ ID NO: 17834 - RNA, 1923 nt, Artificial Sequence
  mRNA product Design i-3 (hSL-A100) comprising derived and/or modified sequence from LASV(803213;Clade II)__AAF86704__NP (opt5)
aggagaaagcuuaccaugagcgccuccaaggaggugaaaucuuuccuguggacccagagccucagacgggaacuguccggcuacugcucuaacaucaaacuucaagucguuaaggacgcucaggcccugcuccacgggcuggauuuuagcgaggugaauaacgugcagcgccuuaugagaaagcagaaacgggacgauggagaccugaagcgccucagagaucugaaucaagcggucaacaaucugguggaacucaaguccacacagcagaaaucuauucugcggguuggcacgcuuaccagcgacgaucugcucacacuggcugccgaccuugagaagcugaaauccaaggugauccgcaccgaaagaccccucagcucuggggucuauaugggaaaccuguccacacagcaacuggagcagcggcgcgcccuccugaauaugauuggcauggugggaggagcucagggcacccagccuggcagagaugggguugugcgggucugggacgugaaaaacccggaucuucugaauaaccaauucggaacaaugcccagccucacccuggccugucuuacgaagcagggccagguggaccugaaugaugcuguccucgcccugaccgaccuggggcucaucuacacagcgaaguauccuaacucuuccgaccuggaucgccuuagccaaucucaucccauucugaauaugguugacaccaaaaaguccagccucaacaucuccggauacaauuuuucucugggcgccgcugugaaagccggggcuugcaugcuugauggaggcaacaugcuggagacaaucaaggugaccccucagacgauggacggcauucucaaaagcauccugaaggucaaaagaucccuggggauguucgugagcgauacacccggagaacggaacccuuaugagaauauucucuacaagaucugucugucuggcgacggguggccguauauugccucccgcaccagcaucguugggagagcgugggaaaacacaaccguggaucuugagucugacggcaagccccagaaagucgggaccgccggaagcaauaagucccugcagucugcuggcuuuccuacaggccucacguacagccaacugaugacccugaaagauuccaugaugcagcuugaccccagcgccaagacauggauugauaucgaggggcggccugaagaccccguggagaucgcucucuaccagccgaugucuggaugcuauauucacuucuuuagagaaccuaccgaccugaaacaguucaagcaagaugccaaguacucccauggcaucgacguugccgaucuguuucccgcucagccugggcucacaagcgcggugauugaggcccugccccgcaacaugguccuuaccugucagggaucugacgauaucaaaaagcugcucgacucccagggccggagagauauuaaacugaucgacaucagccuguccaagguggauucucgcaaauucgaaaaugcugucugggaccaaugcaaggaucuuugucacaugcauacgggggugguuguggagaagaaaaagcggggcggaaaagaggaaauuacaccccacugcgcccucauggacuguaucauguuugaugccgcugucagcggcgggcugaacauuccugugcugagagccguucucccgcgcgacaugguguuccggaccuccucucccaaggucgugcugugaggacuaguuauaagacugacuagcccgaugggccucccaacgggcccuccuccccuccuugcaccgagauuaaucaaaggcucuuuucagagccaccaaaaaaaaaaaaaaaaaaaaaaaaaaaaaaaaaaaaaaaaaaaaaaaaaaaaaaaaaaaaaaaaaaaaaaaaaaaaaaaaaaaaaaaaaaaaaaaaaaaaa

SEQ ID NO: 17835 - RNA, 1926 nt, Artificial Sequence
  mRNA product Design i-3 (hSL-A100) comprising derived and/or modified sequence from LASV(GA391;Clade III)__CAA36646__NP (opt5)
aggagaaagcuuaccaugagcgccuccaaggaggugagaucuuuccuguggacccagagccuccggcgcgaacuguccggcuacugcucuaacaucaaacuucaagucguuaaggacgcucaggcccugcuccacgggcuggauuuuagcgagguguccaaugugcagagacuuaugcggaaacagaagcgcgacgauggagaccugaaaagacuccgggaucugaaccaagcggucaauaaccugguggaacucaagucuacacagcagaaaagcguucugcgcgugggcacgcuuuccagcgacgaucugcucauucuggcugccgaccuugagaaacugaagucuaaagucaccagaacagaacggccccucuccagcgggguguauaugggaaaucugucuucccagcaacuggaucagcgcagagcccuccugaacaugaucggcaugaccgggguuagcggaggcggcaagggggcuucugacggaauugugcgggucugggaugugaaaaaugccgagcuucugaacaaucaguucggcacaaugccuucccucacccuggcuugucuuacaaagcaggggcaaguggaccugaacgaugccguccaggcgcucaccgaccugggacugaucuacacggccaaguauccgaauagcuccgaccucgaucgccugucucagagccaucccauucuuaacaugaucgacaccaaaaaguccagccugaauaucucuggcuacaacuuuucccucggggcugccguuaaagcuggagccugcaugcuggauggcggcaauaugcuugagacaauuaaggugagcccucaaaccauggacgggauccugaaaucuauucucaaggugaaaaagagccugggaauguucgucuccgauacacccggcgaaagaaacccuuaugagaacauccuguacaagauuugucucucuggggacggauggcccuauaucgcgagccggaccuccauugugggccgcgccugggaaaauacgguuguggaucuggagcaggacaacaaaccucagaagaucgggaauggaggcagcaacaaaucucuucaguccgcuggcuuugccgcugggcugacauacagccaacucaugacccugaaggauuucaaaugcuuuaaucugaucccgaacgccaagacauggauggacauugagggaagacccgaagauccugucgagaucgcccuuuaccagcccucuuccggcuguuaugugcacuucuuucgggaaccuaccgaccucaagcaguucaaacaggacgcuaaguacagccaugggauugauguuaccgaccuguuugcggcccaacccggacugacauccgcugugaucgaggcccucccgagaaauauggucauuacgugccagggcucugaagauauccgcaaacugcuugagagccaggggcggagagacaucaagcugauugauaucacccucuccaaagccgacucucgcaaguucgagaacgcugugugggaucaguuuaaggaccugugucacaugcauacaggcgucgugguugaaaagaagaaacggggaggcaaggaggaaauuaccccucacugcgcccugauggauuguaucauguucgacgcggcugugagcgggggacuugaugccaaaguccucagagugguucugccccgcgacaugguguuccggacauccaccccuaaggucgugcugugaggacuaguuauaagacugacuagcccgaugggccucccaacgggcccuccuccccuccuugcaccgagauuaaucaaaggcucuuuucagagccaccaaaaaaaaaaaaaaaaaaaaaaaaaaaaaaaaaaaaaaaaaaaaaaaaaaaaaaaaaaaaaaaaaaaaaaaaaaaaaaaaaaaaaaaaaaaaaaaaaaaaa

SEQ ID NO: 17836 - RNA, 1923 nt, Artificial Sequence
  mRNA product Design i-3 (hSL-A100) comprising derived and/or modified sequence from LASV(AV;Clade V)__CCA30315__NP (opt5)
aggagaaagcuuaccaugagcgccuccaaggaggugaaaucuuuccuguggacccagagccucagacgggaacuguccggcuacugcucuaacaucaaacuucaagucguuaaggacgcucaggcccugcuccacgggcuggauuuuagcgagguguccaaugugcagcgccuuaugagaaagcagcggcgcgacgauucugaccugaaaagacuccgggaucugaaccaagcggucaauaaccugguggaacucaagagcacacagcagaaguccguucugcgcgugggaacgcuuagcucugacgaucugcucacccuggcugccgaccuugagaaacugaaguccaaagucacaagaaccgaacggccccucagcucuggcguguauauggggaaucuguccagccagcaacuggaucagcgcagagcccuccugaaccuuauuggaaugacaaauggcucucaggggucccaggcuggacgggacggcguugugcgcgucugggaugugaagaacgccgagcugcucaauaaccaauucggcaccaugccuagccugacacuugcuugucugaccaaacagggacagguggaccucaaugaugucguucaagcccugacggaccuggggcucaucuacaccgcgaaguauccgaacacauccgaccuggauagacuuacccagucucaucccauucugaauaugaucgacacaaagaaaagcucccucaacauuagcggcuacaauuuuucucugggggccgcugugaaggccggagcuugcaugcuugauggcgggaacaugcuggagaccaucaaaguguccccucagagcauggacggaauccucaagucuauucugaaagucaagcgggcccugggcauguucgugagcgauacgcccggcgaacgcaacccuuaugagaauauccucuacaaaauuugucuguccggggacggauggcccuauaucgcgucuagaacaagcauuguuggccgggccugggaaaacaccguggucgaucuugagacagacgggaagccucagaagaucggauccggcaauagcaacaaaucucugcaauccgcuggguuuagcgccggacucaccuacucucagcugaugacccugaaggaugcuaugcuucagcucgacccgaaugccaaaacauggauggauauugagggcagacccgaagacccuguggagguugcccuguaccagcccaucuccggcugcuauauccacuucuuucgcgaaccuacggaccugaagcaauucaaacaggaugcuaaguacagccaugggauugacaucgcggaucucuuugccgcucagcccggacugaccuccgccgugauugaggcccuuccgcggaacauggucaucacaugucagggcucugaagacauuaagaaacugcucgagagccaagggagaaaggauaucaaacugaucgacauugcucuguccaagaucgauucucgcaaauucgagaaugccgugugggaccaguauaaggaucuuugccacaugcauaccggagucgugguugaaaagaaaaagcggggcgggaaagaggaaauuacaccucacugugcgcucauggacugcaucauguuugaugcugccgugagcggcggacugaacacccugguccucagagccgugcugccccgcgacaugguuuuccggacguccacaccuagagugguccuuugaggacuaguuauaagacugacuagcccgaugggccucccaacgggcccuccuccccuccuugcaccgagauuaaucaaaggcucuuuucagagccaccaaaaaaaaaaaaaaaaaaaaaaaaaaaaaaaaaaaaaaaaaaaaaaaaaaaaaaaaaaaaaaaaaaaaaaaaaaaaaaaaaaaaaaaaaaaaaaaaaaaaa

SEQ ID NO: 17837 - RNA, 1923 nt, Artificial Sequence
  mRNA product Design i-3 (hSL-A100) comprising derived and/or modified sequence from LASV(Togo/2016/7082;Clade VI)__AMR44578__NP (opt5)
aggagaaagcuuaccaugagcaacuccaaggaggugaaaucuuuccuguggacccagagccucagacgggaacuguccggcuacugcucuaauaucaaacuucaagucguuaaagacgcccaggcucugcuccacgggcuggauuuuagcgagguguccaacgugcagcgccuuaugagaaagcagaaacgggacgauggagaccugaagcgccucagagaucugaaucaagccgucaacaaucugguggaacucaagucuguucagcagaaaagcauucugcgggugggcacacuuacguccgacgaucugcucacccuggcggcugaccuugagaagcugaaaagcaaggucacacgcaccgaaagaccccucucuuccgggguguauaugggaaaccugagcucucagcaacuggaucagcggcgcgcccuccuguccaugaucggcaugagcgggggaaaucagaacucucagccuaaaggcgacggcguugugagagucugggaugugaagaaugccgaccuucugaacaaucaauucgggacaaugccgucccucacccuggcuugucuuacaaagcagggacagguggaucugaacgacgccguccaagcucucaccgaccugggccugauuuacacggccaaauaucccaauagcuccgaucucgaccggcugucucagagccauccuauccuuaacaugauugauaccaagaaauccagccugaauaucucuggguacaacuuuucccucggagcggccaucaagacaggcgcuugcaugcuggacgggggaaacaugcuugagaccauuaaaguuacaccccagaccauggauggcauccucaagagcauucugaaagugaagcgcucucugggcauguucaucagcgacacgccuggggagagaaaucccuaugaaaacauucuguacaagaucugucucuccggagauggcuggccuuauauugccucucggacagcuaucaucgggcgcgccugggagaauaccguggucgaccuggaaagcgauuccaaaccgcagaagauuggaagcaacggcucuaauaaaucccuucaaagcgcgggguuugcccccggacugacauacucucagcucaugacccugaaggacuccaugcugcagcuugauccuaacgcuaaaaccuggaucgacauugagggcagacccgaggacccuguggaaguugcccucuuccagcccaucagcggcugcuacauucacuuuuuccgggagccgacagaucugaagcaauuuaagcaggacgcuaaauauucccaugggaucgaugugacggaccuguucgccgcccagccuggacucaccucugcugucaucgaagcgcugcccagaaauauggugcuuacaugucagggcagcgaugacauuaagaaacugcucgauucccaagggcgccgggacaucaagcugauugauguuucucugaacaaaaucgacagcagaaaguuugagaaugccgugugggaucaguacaaggaccuuugccacaugcauaccggagucguggucgaaaagaagaaaaagggcgggaaagaggagauuacaccucacugugcucuccuggauugcaucauguucgacgccgccguguccggcggacugaacgcuaccguucuccgcgccgugcugccccgggacauggucuuuagaacgagcucucccaaggugguucuuugaggacuaguuauaagacugacuagcccgaugggccucccaacgggcccuccuccccuccuugcaccgagauuaaucaaaggcucuuuucagagccaccaaaaaaaaaaaaaaaaaaaaaaaaaaaaaaaaaaaaaaaaaaaaaaaaaaaaaaaaaaaaaaaaaaaaaaaaaaaaaaaaaaaaaaaaaaaaaaaaaaaaa

SEQ ID NO: 17838 - RNA, 1923 nt, Artificial Sequence
  mRNA product Design i-3 (hSL-A100) comprising derived and/or modified sequence from LASV(KAK-428;Clade n.d. (VII))__ANH09741__NP (opt5)
aggagaaagcuuaccaugagcaacuccaaggaggugaaaucuuuccuguggacccagagccucagacgggaacuguccggcuacugcacaaauaucaaacuucaagucguuaaggacgcccaggcucugcuccacgggcuggauuuuucugaggugagcaacgugcagcgccuuaugagaaagcagaaacgggacgauaaugaccugaagcgccucagagaucugaaccaagccgucaauaaccugguggaacucaaguccguucagcagaaaucugugcugaaggucggaacgcuuaauagcgacgaucugcucacccuggcggcugaccuugagaaacugaaguccaaagugguucggacagaacgcccccucagcucuggcguguauauggggaaccuguccagccagcaacuggaucagagacgggcccuccugaauaugauuggaauggccggcgggucucagggaaaccagccuucccgcgacggcgucgugagagugugggaugucaagaaugcugaccuucugaacaaucaauucggcaccaugccgagccucacacuggccugucuuaccaagcaggggcagguugaucugaacgacguggugcucgcucugacagaccugggacucaucuacaccgccaaauaucccaauucuuccgaucuggaccggcuuagccaaaaccauccuguccugaacaugauugaugugaauaaguccucucucaacaucagcggcuacaauuuuucccugggggcggccguuaaagcuggagccugcaugcuugacggcgggaacaugcuggagacgauuaagaucagcccccagaccguggauggaauccucaaaucuauucugaaggucaaacgcgcucugggcauguucguguccgacacaccuggcgagagaaaucccuaugaaaacauccucuacaagguuugucugagcgggaauggauggccuuauauugccucucggaccagcaucgugggccgcgcgugggagaacacagucguggaucuugaauccaauaagaaccagccgaaagucgggaauaacggaucuaauaagaugcugcagagcuccggcuuugccaccgggcucacguacagccaacugaugacacugagagacucuaugcuucagcucgaucccaccgcuaaaacauggauugacaucgagggacggccugaggaucccguggaacuggcccuguuccagccuuccagcggcugcuacauucacuuuuucagagagcccaccgaccucaagcaguuuaaacaagacgcuaaguauucucauggcaucgauguuaacgaccuguucuccgcccagccggggcuuaccagcgccgugcuggaagcucucccucgcaauaugguccugacaugucagggauccgaugacauccggaagcugcuugauucucaggacagaaaagauauuaagcucaucgacauuagccuguccaaagcggaugcccgcaaguuugagaacgacgugugggaucaauucaaagaccugugccacaugcauacgggcaucguuguggaaaagaagaaaaagggagggaaacaggagaugacaccccacugugcucuccuggauugcauuauguuugacgccgccgucucuggcgggcuuaacgugccuacccugcgggcugugcuccccaccgacaugguuuucagaacaaucaccacgaaggucgugcugugaggacuaguuauaagacugacuagcccgaugggccucccaacgggcccuccuccccuccuugcaccgagauuaaucaaaggcucuuuucagagccaccaaaaaaaaaaaaaaaaaaaaaaaaaaaaaaaaaaaaaaaaaaaaaaaaaaaaaaaaaaaaaaaaaaaaaaaaaaaaaaaaaaaaaaaaaaaaaaaaaaaaa

SEQ ID NO: 17839 - RNA, 1923 nt, Artificial Sequence; identical to SEQ ID NO: 17833
  mRNA product Design i-3 (hSL-A100) comprising derived and/or modified sequence from LASV(Pinneo-NIG-1969;Clade I)__AIT17837__NP (opt5)

SEQ ID NO: 17840 - RNA, 1923 nt, Artificial Sequence
  mRNA product Design i-3 (hSL-A100) comprising derived and/or modified sequence from LASV(ISTH0009-NIG-2011;Clade II)__AIT17405__NP (opt5)
aggagaaagcuuaccaugagcguguccaaggaggucaaaucuuuccuguggacccagagccucagacgggaacuguccggcuacugcucuaacaucaaacuucaaguugugaaggacgcccaggcucugcuccacgggcuggauuuuagcgagguguccaauguccagcgccuuaugagaaagcagaaacgggacgauucugaccugaagcgccucagagaucugaaccaagccgugaauaaccugguugaacucaagagcacacagcagaaauccauucugcgggugggaacgcuuaccagcgacgaucugcucacacuggcggcugaccuugagaagcugaaaucuaaggucauccgcaccgaaagaccccucuccagcggcguguauauggggaaucugucuacacagcaacuggagcagcggcgcgcccuccugaacaugauuggaaugguuggcggggcccagggaacccagccuggcagagauggcgugguccgggugugggacgugaaaaauccggaucuucugaacaaucaauucgggacaaugcccucccucacccuggcuugucuuacgaagcagggacaggucgaccugaacgaugccguucucgcucugaccgaccugggccucaucuacacagccaaguauccuaauagcucugaccuggaucgccuuucccaaagccaucccauucugaacaugguggacaucaaaaaguccucucucaauaucagcggguacaacuuuucccugggagcggccgugaaagcuggcgccugcaugcuugaugggggaaauaugcuggagaccauuaaggucacaccucagaccauggacggcauccucaaaagcauucugaaggugaaaagaucucugggcauguucguuuccgauacgcccggggaacggaacccuuaugagaacauccucuacaagauuugucugagcggagacggcuggccguauaucgcuucucgcacaagcauuguggggagagccugggaaaauaccacagucgaucuugaguccgacggaaagccccagaaagugggcucugcggggagcaacaagucccugcagagcgccggauuuccuaccggccucaccuacucucaacugaugacacugaaagauuccaugaugcagcuugaccccagcgcuaagacguggaucgauaucgagggccggccugaagaccccguugagauugcccucuaccagccgaugucugggugcuauauccacuucuuuagagaaccuaccgaccugaaacaguucaagcaagaugcuaaguacucccauggaauugacguggccgaucuguuucccgcccagccuggccucacaagcgcugucaucgaggcgcugccccgcaauauggugcuuaccugucagggguccgacgauauuaaacggcugcucgacucucagggaagacgcgauaucaagcugaucgacauugcccugagcaaagcugauucccggagauucgaaaacgccgucugggaccaaugcaaggaucuuugucacaugcauacaggcgugguuguggagaaaaagaagcgcgggggcaaagaggaaaucacgccccacugcgcccucauggacuguauuauguaugaugcugccgucucuggaggccugaauaucccugugcugcgggcgguucucccgagagacaugguguuucgcaccagcucccccaaggucgugcugugaggacuaguuauaagacugacuagcccgaugggccucccaacgggcccuccuccccuccuugcaccgagauuaaucaaaggcucuuuucagagccaccaaaaaaaaaaaaaaaaaaaaaaaaaaaaaaaaaaaaaaaaaaaaaaaaaaaaaaaaaaaaaaaaaaaaaaaaaaaaaaaaaaaaaaaaaaaaaaaaaaaaa

SEQ ID NO: 17841 - RNA, 1923 nt, Artificial Sequence
  mRNA product Design i-3 (hSL-A100) comprising derived and/or modified sequence from LASV(ISTH2010-NIG-2012;Clade II)__AIT17483__NP (opt5)
aggagaaagcuuaccaugagcgccuccaaggaggugaaaucuuuccuguggacccagagccucagacgggaacuguccggcuacugcucuaacaucaaacuucaagucguuaaggacgcucaggcccugcuccacgggcuggauuuuagcgagguguccaaugugcagcgccuuaugagaaagcagaaacgggacgauucugaccugaagcgccucagagaucugaaccaagcggucaauaaccugguggaacucaagagcacacagcagaaauccauucugcggguuggaacgcuuaccagcgacgaucugcucacacuggcugccgaccuugagaagcugaaaucuaaggugauccgcaccgaaagaccccucuccagcggcgucuauauggggaaucugucuacacagcaacuggagcagcggcgcgcccuccugaaccuuauuggaauggugggcggggcucagggaacccagccuggcagagauggcguugugcgggucugggacgugaaaaauccggaucugcucaacaaucaauucgggacaaugcccucccugacccuugccugucugacgaagcagggacagguggaccucaacgaugcuguccuggcccugaccgaccucggccugaucuacacagcgaaguauccuaauagcucugaccuugaucgccugucccaaagccaucccauucucaacaugguugacaccaaaaaguccucucugaauaucagcggguuuaacuucucccuuggagccgcugugaaagccggcgcuugcaugcuggaugggggaaauaugcucgagacaaucaaggugaccccucagacgauggacggcauucugaaaagcauccugaaggucaaaaagucucucggcauguuuguguccgauacacccggggaaagaaacccuuacgagaacauucuguauaagaucugucuuagcggagacggcuggccguacauugccucucggaccagcaucguugggcgcgcgugggaaaauacaaccguggaucuggaguccgacggaaaaccccacaaggucggcaccgccgggucuaacaaaagccuccaguccgcuggauucccuacaggccugacguauagccagcugaugacccuuaaggauucuaugaugcaacucgaccccuccgccaaaacauggauugauaucgagggcagaccugaagaccccguggagaucgcucuguaccagccgaugagcgggugcuacauucacuuuuuccgggaaccuaccgaccugaagcaguuuaagcaggaugccaaauauucucauggaaucgacguugccgaucucuuccccgcucaaccuggccugacauccgcggugauugaggcccuucccagaaauaugguccugaccugucaggggagcgacgauaucaagcgccuccuggacucccagggacggagagauauuaaacugaucgacaucgcucuuucuaaggccgauagccgccgguuugaaaacgccgugugggaccagugcaaagaucucugucauaugcacacgggcgucgugguugagaagaagaaaagagggggcaaggaggaaauuacaccccacugcgcucugauggacuguaucauguacgaugccgcgguguccggaggccugaauauuccuguccuccgcgcugugcugccgcgggacaugguuuucagaaccucuagccccaaagugguccuuugaggacuaguuauaagacugacuagcccgaugggccucccaacgggcccuccuccccuccuugcaccgagauuaaucaaaggcucuuuucagagccaccaaaaaaaaaaaaaaaaaaaaaaaaaaaaaaaaaaaaaaaaaaaaaaaaaaaaaaaaaaaaaaaaaaaaaaaaaaaaaaaaaaaaaaaaaaaaaaaaaaaaa

SEQ ID NO: 17842 - RNA, 1923 nt, Artificial Sequence
  mRNA product Design i-3 (hSL-A100) comprising derived and/or modified sequence from LASV(Lassa virus/H.sapiens-wt/NGA/2015/ISTH_0543;Clade II)__AVO03640__NP (opt5)
aggagaaagcuuaccaugagcgccuccaaggaggugaaaucuuuccuguggacccagagccucagacgggaacuguccggcuacugcucuaacaucaaacuucaagucguuaaggacgcucaggcccugcuccacgggcuggauuuuagcgagguguccaaugugcagcgccuuaugagaaagcagaaacgggacgauucugaccugaagcgccucagagaucugaaccaagcggucaauaaccugguggaacucaagagcacacagcagaaauccauucugcggguuggaacgcuuaccagcgacgaucugcucacacuggcugccgaccuugagaagcugaaaucuaaggugauccgcaccgaaagaccccucuccagcggcgucuauauggggaaucugucuacacagcaacuggagcagcggcgcgcccuccugaacaugauuggaauggugggcggggcucagggaacccagccuggcagagauggcguugugcgggucugggacgugaaaaauccggaucuucugaacaaucaauucgggacaaugcccucccucacccuggccugucuuacgaagcagggacagguggaccugaacgaugcuguccucgcccugaccgaccugggccucaucuacacagcgaaguauccuaauagcucugaccuggaucgccuuucccaaagccaucccauucugaacaugguugacaccaaaaaguccucucucaauaucagcggguacaacuuuucccugggagccgcugugaaagccggcgcuugcaugcuugaugggggaaauaugcuggagacaaucaaggugaccccucagacgauggacggcauucucaaaagcauccugaaggucaaaaagucucugggcauguucguguccgauacacccggggaaagaaacccuuaugagaacauucucuacaagaucugucugagcggagacggcuggccguauauugccucucggaccagcaucguugggcgcgcgugggaaaauacaaccguggaucuugaguccgacggaaaaccccagaaggucggcucugccgggagcaacaaaucccugcagagcgcuggauuuccuaccggccucacauacucucaacugaugacgcugaaggauuccaugaugcagcuugaccccagcgccaaaaccuggauugauaucgagggcagaccugaagaccccguggagaucgcucucuaccagccgaugucugggugcuauauucacuucuuucgggaaccuacagaccugaagcaguucaagcaagaugccaaauacucccauggaaucgacguugccgaucuguuucccgcucagccuggccucaccagcgcggugauugaggcccugcccagaaauaugguccuuacaugucagggguccgacgauaucaagcgccugcucgacucucagggacggaaagauauuaagcugaucgacaucgcucugagcaaagccgauuccagacgcuucgaaaacgccgugugggaccaaugcaaggaucuuugucacaugcauaccggcgucgugguugagaagaaaaagagagggggcaaagaggaaauuacgccccacugcgcucucauggacuguaucauguaugaugccgcggugucuggaggccugaauauuccuguccugcgggcugugcucccgcgcgacaugguuuuucggacaagcucccccaaggugguccugugaggacuaguuauaagacugacuagcccgaugggccucccaacgggcccuccuccccuccuugcaccgagauuaaucaaaggcucuuuucagagccaccaaaaaaaaaaaaaaaaaaaaaaaaaaaaaaaaaaaaaaaaaaaaaaaaaaaaaaaaaaaaaaaaaaaaaaaaaaaaaaaaaaaaaaaaaaaaaaaaaaaaa

SEQ ID NO: 17843 - RNA, 1923 nt, Artificial Sequence
  mRNA product Design i-3 (hSL-A100) comprising derived and/or modified sequence from LASV(Lassa virus/H.sapiens-wt/NGA/2016/ISTH_0009;Clade II)__AVO03572__NP (opt5)
aggagaaagcuuaccaugagcgccuccaaggaggugaaaucuuuccuguggacccagagccucagacgggaacuguccggcuacugcucuaacaucaaacuucaagucguuaaggacgcucaggcccugcuccacgggcuggauuuuagcgagguguccaaugugcagcgccuuaugagaaagcagaaacgggacgauucugaccugaagcgccucagagaucugaaccaagcggucaauaaccugguggaacucaagagcacacagcagaaauccauucugcggguuggaacgcuuaccagcgacgaucugcucacacuggcugccgaccuugagaagcugaaaucuaaggugauccgcaccgaaagaccccucuccagcggcgucuauauggggaaucugucuacacagcaacuggagcagcggcgcgcccuccugaacaugauuggaauggugggcggggcucagggaacccagccuggcagagauggcguugugcgggucugggacgugaaaaauccggaucuucugaacaaucaauucgggacaaugcccucccucacccuggccugucuuacgaagcagggacagguggaccugaacgaugcuguccucgcccugaccgaccugggccucaucuacacagcgaaguauccuaauagcucugaccuggaucgccuuucccaaagccaucccauucugaacaugguugacaccaaaaaguccucucucaauaucagcggguacaacuuuucccugggagccgcugugaaagccggcgcuugcaugcuugaugggggaaauaugcuggagacaaucaaggugaccccucagacgauggacggcauucucaaaagcauccugaaggucaaaaagucucugggcauguucguguccgauacacccggggaaagaaacccuuaugagaacauucucuacaagaucugucugagcggagacggcuggccguauauugccucucggaccagcaucguugggcgcgcgugggaaaauacaaccguggaucuugaguccgacggaaaaccccagaaggucggcucugccgggagcaacaaaucccugcagagcgcuggauuuccuaccggccucacauacucucaacugaugacgcugaaggauuccaugaugcagcuugaccccagcgccaaaaccuggauugauaucgagggcagaccugaagaccccguggagaucgcucucuaccagccgaugucugggugcuauauucacuucuuucgggaaccuacagaccugaagcaguucaagcaagaugccaaauacucccauggaaucgacguugccgaucuguuucccgcucagccuggccucaccagcgcggugauugaggcccugcccagaaauaugguccuuacaugucagggguccgacgauaucaagcgccugcucgacucucagggacggagagauauuaaacugaucgacaucgcucugagcaaggccgauucccgccgguucgaaaacgccgugugggaccaaugcaaagaucuuugucacaugcauaccggcgucgugguugagaagaagaaaagagggggcaaggaggaaauuacgccccacugcgcucucauggacuguaucauguaugaugccgcggugucuggaggccugaauauuccuguccugcgcgcugugcucccgcgggacaugguuuuuagaacaagcucccccaaagugguccugugaggacuaguuauaagacugacuagcccgaugggccucccaacgggcccuccuccccuccuugcaccgagauuaaucaaaggcucuuuucagagccaccaaaaaaaaaaaaaaaaaaaaaaaaaaaaaaaaaaaaaaaaaaaaaaaaaaaaaaaaaaaaaaaaaaaaaaaaaaaaaaaaaaaaaaaaaaaaaaaaaaaaa

SEQ ID NO: 17844 - RNA, 1923 nt, Artificial Sequence
  mRNA product Design i-3 (hSL-A100) comprising derived and/or modified sequence from LASV(Lassa virus/H.sapiens-wt/NGA/2016/ISTH_0017;Clade II)__AVO03568__NP (opt5)
aggagaaagcuuaccaugagcgccuccaaggaggugaaaucuuuccuguggacccagagccucagacgggaacuguccggcuacugcucuagcaucaaacuucaagucguuaaggacgcucaggcccugcuccacgggcuggauuuuuccgaggugucuaacgugcagcgccuuaugagaaagcagaaacgggacgauagcgaccugaagcgccucagagaucugaaucaagcggucaacaaucugguggaacucaaguccacacagcagaaaagcauucugcggguuggaacgcuuaccucugacgaucugcucacacuggcugccgaccuugagaagcugaaauccaaggugauccgcaccgaaagaccccucagcucuggcgucuauauggggaaccuguccacacagcaacuggagcagcggcgcgcccuccugaauaugauuggaauggcuggcggggcccagggaacccagccuggcagagauggcgugguucgggugugggacgucaaaaacccggaucuucugaauaaccaauucgggacaaugcccagccucacccuggcuugucuuacgaagcagggacagguggaccugaaugaugccgugcucgcgcugaccgaccugggccucaucuacacagccaaguauccuaacucuuccgaccuggaucgccuuagccaaucccaucccauucugaauauggucgacaccaaaaagucuagccucaacaucuccggguacaauuuuagccugggagcugccguuaaagcuggcgccugcaugcuugaugggggaaacaugcuggagacaaucaaggugaccccucagacgauggacggcauucucaaaucuauccugaaggugaaaagaucccugggcauguucgucagcgaugcgcccggggaacggaauccuuaugagaacauucucuacaagaucugucugucuggagacggcuggccguauauugccagccgcacauccaucguggggagagcuugggaaaacaccacaguugaucuugagucugacggaaagccccagaaagugggcgccaccgggagcaauaagucccugcagagcgcuggauuuccuaccggccucacauacucucaacugaugacgcugaaagauuccaugaugcagcuugaccccagcgccaagaccuggauugauaucgagggccggccugaagaccccgucgagguggcccucuaccagccgguuucugggugcuauauccacuucuuuagagaaccuacagaccugaaacaguucaagcaagaugcuaaguacucccauggaauugacguggcggaucuguuucccgcccagccuggccucaccagcgcugucaucgaggcccugccccgcaacauggugcuuacaugucagggguccgacgauauuaaaaagcugcucgacucucagggacggaaagauaucaagcugauugacaucgcccugagcaaagcugauuccagacgcuucgaaaaugccgucugggaccaaugcaaggaucuuugucacaugcauaccggcgugguuguggagaagaaaaagagagggggcaaagaggaaaucacgccccacugcgcgcucauggacuguauuauguaugaugcugccgucucuggaggccugaacaucccugugcugcgggccguucucccgcgcgacaugguguuucggacaagcucccccaaggucgugcugugaggacuaguuauaagacugacuagcccgaugggccucccaacgggcccuccuccccuccuugcaccgagauuaaucaaaggcucuuuucagagccaccaaaaaaaaaaaaaaaaaaaaaaaaaaaaaaaaaaaaaaaaaaaaaaaaaaaaaaaaaaaaaaaaaaaaaaaaaaaaaaaaaaaaaaaaaaaaaaaaaaaaa

SEQ ID NO: 17845 - RNA, 1923 nt, Artificial Sequence
  mRNA product Design i-3 (hSL-A100) comprising derived and/or modified sequence from LASV(Lassa virus/H.sapiens-wt/NGA/2018/ISTH_0959;Clade II)__AVV65100__NP (opt5)
aggagaaagcuuaccaugagcgccuccaaggaggugaaaucuuuccuguggacccagagccucagacgggaacuguccggcuacugcucuaacaucaaacuucaagucguuaaggacgcucaggcccugcuccacgggcuggauuuuagcgagguguccaaugugcagcgccuuaugagaaagcagaaacgggacgauucugaccugaagcgccucagagaucugaaccaagcggucaauaaccugguggaacucaagagcacccagcagaaauccauucugcggguuggaacgcuuaccagcgacgaucugcucacacuggcugccgaccuugagaagcugaaaucuaaggugauccgcaccgaaagaccccucuccagcggcgucuauauggggaaucugucuacacagcaacuggagcagcggcgcgcccuccugaaccuuauuggaauggugggcggggcucagggaacccagccuggcagagauggcguugugcgggucugggacgugaaaaauccggaucugcucaacaaucaauucgggacaaugcccucccugacccuugccugucugacgaagcagggacagguggaccucaacgaugucguucuggcucugaccgaccucggccugaucuacacagccaaguauccuaauagcucugaccuugaucgccugucccaaagccaucccauucucaacaugguggacaccaaaaaguccucucugaauaucagcggguuuaacuucucccuuggagcggccgugaaagcuggcgccugcaugcuggaugggggaaauaugcucgagacaaucaaggucaccccucagacgauggacggcauucugaaaagcauccugaaggugaaaaagucucucggcauguuuguuuccgauacacccggggaaagaaacccuuacgagaacauucuguauaagaucugucuuagcggagacggcuggccguacauugcuucucggaccagcaucguggggcgcgccugggaaaauacaaccgucgaucuggaguccgacggaaaaccccacaaggugggcaccgcggggucuaacaaaagccuccaguccgccggauucccuacaggccugacguauagccagcugaugacccuuaaggauucuaugaugcaacucgaccccuccgcuaaaacauggauugauaucgagggcagaccugaagaccccguugagaucgcccuguaccagccgaugagcgggugcuacauucacuuuuuccgggaaccuaccgaccugaagcaguuuaagcaggaugcuaaauauucucauggaaucgacguggccgaucucuuccccgcccaaccuggccugacauccgcugucauugaggcgcuucccagaaauauggugcugaccugucaggggagcgacgauaucaagcgccuccuggacucccagggacggaaagauauuaagcugaucgacaucgcccuuucuaaaacggauagcagacgcuuugaaaacgcugucugggaccagugcaaggaucucugucauaugcacacaggcgugguuguggagaagaaaaagagagggggcaaagaggaaauuacaccccacugcgcccugauggacuguaucauguacgaugccgcugucuccggaggccugaauauuccugugcuccgggccguucugccgcgcgacaugguguuccggaccucuagccccaaggucgugcuuugaggacuaguuauaagacugacuagcccgaugggccucccaacgggcccuccuccccuccuugcaccgagauuaaucaaaggcucuuuucagagccaccaaaaaaaaaaaaaaaaaaaaaaaaaaaaaaaaaaaaaaaaaaaaaaaaaaaaaaaaaaaaaaaaaaaaaaaaaaaaaaaaaaaaaaaaaaaaaaaaaaaaa

SEQ ID NO: 17846 - RNA, 1923 nt, Artificial Sequence
  mRNA product Design i-3 (hSL-A100) comprising derived and/or modified sequence from LASV(LASV003-NIG-2008;Clade II)__AIT17581__NP (opt5)
aggagaaagcuuaccaugagcgccuccaaggaggugaaaucuuuccuguggacccagagccucagacgggaacuguccggcuacugcucuagcaucaaacuucaagucguuaaggacgcucaggcccugcuccacgggcuggauuuuuccgaggugucuaacgugcagcgccuuaugagaaagcagaaacgggacgauagcgaccugaagcgccucagagaucugaaucaagcggucaacaaucugguggaacucaaguccacccagcagaaaagcguucugcgggugggaacgcuuaccucugacgaucugcucacacuggcugccgaccuugagaagcugaaauccaaggucauucgcaccgaaagaccccucagcucuggcguguauauggggaaccuguccgcccagcaacuggagcagcggcgcacacuccugaauaugaucggaaugguuggcggggcucagggaacccagccuggcagagauggcgugguccgggugugggacgugaaaaacccggaucuucugaauaaccaauucgggacaaugcccagccucacccuggccugucuuacgaagcagggacaggucgaccugaaugauguugugcucgcucugaccgaccugggccucauuuacacagccaaguauccuaacucuuccgaccuggaucgccuuagccaaucccaucccauccugucuaugguggacaccaaaaagagcucccucaauauuagcggguacaacuuuucucugggagcggccgucaaagcuggcgccugcaugcuugaugggggaaauaugcuggagacaaucaaggugaccccucagacgauggacggcauccucaaauccauucugaagguuaaaaagagccugggcauguucgugucugauacacccggggaaagaaacccuuaugagaauauccucuacaagauuugucugagcggagacggcuggccguauaucgcuucccggaccucuauugucgggcgcgccugggaaaacacaaccguggaucuugagagcgacggaaaaccccagaagguuggcaccgcgggguccaacaaaagccugcagucugccggauuuccuacaggccucacguacucccaacugaugacccugaaggauagcaugaugcagcuugaccccucugcuaaaacauggaucgauauugagggcagaccugaagaccccguggagaucgcccucuaccagccgauguccgggugcuauauccacuucuuucgggaaccuaccgaccugaagcaguucaagcaagaugcuaaauacagccauggaauugacgucacagaucuguuucccgcccagccuggccucaccuccgccgugaucgaggcucugcccagaaauaugguccuuacgugucaggggucugacgauauuaagcgccugcucgacagccagggacggagagauaucaaacugauugacaucgcgcuguccaaggccgauucucgccgguucgaaaacgcugugugggaccaaugcaaagaucuuugucacaugcauacaggcguuguggucgagaagaagaaaagagggggcaaggaggaaaucacaccccacugcgcccucauggacuguauuauguaugaugccgcugugagcggaggccugaauaucccuguucugcgcgccgugcucccgcgggacauggucuuuagaaccuccagccccaaaguggugcugugaggacuaguuauaagacugacuagcccgaugggccucccaacgggcccuccuccccuccuugcaccgagauuaaucaaaggcucuuuucagagccaccaaaaaaaaaaaaaaaaaaaaaaaaaaaaaaaaaaaaaaaaaaaaaaaaaaaaaaaaaaaaaaaaaaaaaaaaaaaaaaaaaaaaaaaaaaaaaaaaaaaaa

SEQ ID NO: 17847 - RNA, 1923 nt, Artificial Sequence
  mRNA product Design i-3 (hSL-A100) comprising derived and/or modified sequence from LASV(LASV035-NIG-2009;Clade II)__AIT17589__NP (opt5)
aggagaaagcuuaccaugagcgccuccaaggaggugaaaucuuuccuguggacccagagccucagacgggaacuguccggcuacugcucuagcaucaaacuucaagucguuaaagacgcucaggcccugcuccacgggcuggauuuuuccgaggugucuaacgugcagcgccuuaugagaaagcagaaacgggacgauagcgaccugaagcgccucagagaucugaaucaagcggucaacaaucugguggaacucaaguccacacagcagaaaagcauucugcggguuggaacgcuuaccucugacgaucugcucacacuggcugccgaccuugagaagcugaaauccaaggugauccgcaccgaaagaccccucagcucuggcgucuauauggggaaccuguccgcccagcaacuggagcagcggcgcgcucuccugaauaugauuggaauggugggcggggcccagggaacacagccuggcagagauggcguugugcgggucugggacgugaaaaacccggaucuucugaauaaccaauucgggaccaugcccagccucacacuggcuugucuuaccaagcagggacagguggaccugaaugaugccguccucgcgcugacggaccugggccucaucuacaccgccaaguauccuaacucuuccgaccuggaucgccuuagccaaucccaucccauucugaauaugguugacacaaagaagucuagccucaacaucuccggguacaauuuuagccugggagcugccgugaaagcuggcgccugcaugcuugaugggggaaacaugcuggagaccaucaaggugacaccucagaccauggacggcauucucaaaucuauccugaaggucaaaagaucccugggcauguucgugagcgauacgcccggggaacggaauccuuaugagaacauucucuacaagaucugucugucuggagacggcuggccguauauugcgagccgcacauccaucguugggagagccugggaaaacaccacaguggaucuugagucugacggaaagccccagaaagucggcaccaccgggagcaauaagucccugcagagcgcuggauuuccuacaggccucacguacucucaacugaugacccugaaagauuccaugaugcagcuugaccccagcgccaagacauggauugauaucgagggccggccugaagaccccguggagaucgcucucuaccagccgaugucugggugcuauauucacuucuuuagagaaccuaccgaccugaaacaguucaagcaagaugccaaguacucccauggaaucgacguugccgaucuguuucccgcucagccuggccucacaagcgcggugauugaggcccugccccgcaacaugguccuuaccugucagggguccgacgauaucaaaaagcugcucgacucucagggacggagagauauuaaacugaucgacaucgcucugagcaaggccgauucccgcaaauucgaaaaugccgugugggaccaaugcaaggaucuuugucacaugcauacgggcgucgugguugagaagaaaaagagagggggcaaagaggaaauuacaccccacugcgcucucauggacuguaucauguaugaugccgcggugucuggaggccugaacauuccuguccugcgggcugugcucccgcgcgacaugguuuuucggaccagcucccccaaggugguccugugaggacuaguuauaagacugacuagcccgaugggccucccaacgggcccuccuccccuccuugcaccgagauuaaucaaaggcucuuuucagagccaccaaaaaaaaaaaaaaaaaaaaaaaaaaaaaaaaaaaaaaaaaaaaaaaaaaaaaaaaaaaaaaaaaaaaaaaaaaaaaaaaaaaaaaaaaaaaaaaaaaaaa

SEQ ID NO: 17848 - RNA, 1923 nt, Artificial Sequence
  mRNA product Design i-3 (hSL-A100) comprising derived and/or modified sequence from LASV(LASV1000-NIG-2009;Clade II)__AIT17783__NP (opt5)
aggagaaagcuuaccaugagcgccuccaaggaggugaaaucuuuccuguggacccagagccucagacgggaacuguccggcuacugcucuaacaucaaacuucaagucguuaaggacgcucaggcccugcuccacgggcuggauuuuagcgagguguccaaugugcagcgccuuaugagaaagcagaaacgggacgauucugaccugaagcgccucagagaucugaaccaagcggucaauaaccugguggaacucaagagcacacagcagaaauccauucugcggguuggaacgcuuaccagcgacgaucugcucacacuggcugccgaccuugagaagcugaaaucuaaggugauccgcaccgaaagaccccucuccagcggcgucuauauggggaaucugucuacacagcaacuggagcagcggcgcgcccuccugaacaugauuggaauggugggcggggcucagggaacccagccuggcagagauggcguugugcgggucugggacgugaaaaauccggaucuucugaacaaucaauucgggacaaugcccucccucacccuggccugucuuacgaagcagggacagguggaccugaacgaugucguucucgcucugaccgaccugggccucaucuacacagccaaguauccuaauagcucugaccuggaucgccuuucccaaagccaucccauucugaacaugguggacaccaaaaaguccucucucaauaucagcggguacaacuuuucccugggagcggccgugaaagcuggcgccugcaugcuugaugggggaaauaugcuggagacaaucaaggucaccccucagacgauggacggcauucucaaaagcauccugaaggugaaaaagucucugggcauguucguuuccgauacacccggggaaagaaacccuuaugagaacauucucuacaagaucugucugagcggagacggcuggccguauauugcuucucggaccagcaucguggggcgcgccugggaaaauacaaccgucgaucuugaguccgacggaaaaccccagaaggugggcaccgcggggucuaacaaaagccugcaguccgccggauuuccuacaggccucacguacagccaacugaugacccugaaggauucuaugaugcagcuugaccccuccgcuaaaacauggauugauaucgagggcagaccugaagaccccguugagaucgcccucuaccagccggugagcgggugcuauauucacuucuuucgggaaccuaccgaccugaagcaguucaagcaagaugcuaaauacucucauggaaucgacgucgccgaucuguuucccgcccagccuggccucacauccgcugugauugaggcgcugcccagaaauaugguccuuaccugucaggggagcgacgauaucaagcgccugcucgacucccagggacggagagauauuaaacugaucgacaucgcccugucuaaggcugauagccgccgguucgaaaacgccgugugggaccaaugcaaagaucuuugucacaugcauacgggcguuguggucgagaagaagaaaagagggggcaaggaggaaauuacaccccacugcgcccucauggacuguaucauguaugaugcugccguguccggaggccugaauauuccuguucugcgcgcggugcucccgcgggacauggucuuuagaaccucuagccccaaaguggugcugugaggacuaguuauaagacugacuagcccgaugggccucccaacgggcccuccuccccuccuugcaccgagauuaaucaaaggcucuuuucagagccaccaaaaaaaaaaaaaaaaaaaaaaaaaaaaaaaaaaaaaaaaaaaaaaaaaaaaaaaaaaaaaaaaaaaaaaaaaaaaaaaaaaaaaaaaaaaaaaaaaaaaa

SEQ ID NO: 17849 - RNA, 1923 nt, Artificial Sequence
  mRNA product Design i-3 (hSL-A100) comprising derived and/or modified sequence from LASV(LASV221-NIG-2010;Clade II)__AIT17625__NP (opt5)
aggagaaagcuuaccaugagcgccuccaaggaggugaaaucuuuccuguggacccagagccucagacgggaacuguccggcuacugcucuagcaucaaacuucaagucguuaaggacgcucaggcccugcuccacgggcuggauuuuuccgaggugucuaacgugcagcgccuuaugagaaagcagcggcgcgacgauagcgaccugaaaagacuccgggaucugaaucaagcggucaacaaucugguggaacucaaguccacacagcaaaagagcauucugcgcguuggaacgcuuaccucugacgaucugcucacacuggcugccgaccuugagaaacugaaguccaaagugaucagaaccgaacggccccucagcucuggcgucuauauggggaaccuguccacacagcagcuggagcagcgcagagcccuccugaauaugauuggaauggugggcggggcucagggaacccagccuggccgggauggcguugugcgcgucugggacgugaagaacccggaucuucugaauaaccaauucgggacaaugcccagccucacccuggccugucuuacgaaacagggacagguggaccugaaugaugcuguccucgcccugaccgaccugggccucaucuacacagcgaaguauccuaacucuuccgaccuggauagacuuagccaaucccaucccauucugaauaugguugacaccaagaaaucuagccucaacaucuccggguacaauuuuagccugggagccgcugugaaggccggcgcuugcaugcuugaugggggaaacaugcuggagacaaucaaagugaccccucagacggucgacggcauucucaagucuauccugaaagugaagcggucccugggcauguucguuagcgauacacccggggaacgcaauccuuaugagaacauucucuacaaaaucugucugucuggagacggcuggccguauauugccagcagaaccuccaucguggggcgggcgugggaaaacacaaccgucgaucuugagucugacggaaagccccagaaggugggcaccgccgggagcaauaaaucccugcagagcgcuggauuuccuacaggccucacguacucucaacugaugacccugaaggauuccaugaugcagcuugaccccagcgccaaaacauggauugauaucgagggcagaccugaagaccccguugagaucgcucucuaccagccgaugucugggugcuauauucacuucuuucgcgaaccuaccgaccugaagcaguucaaacaagaugccaaguacucccauggaaucgacguggccgaucuguuucccgcucagccuggccucacaagcgcggucauugaggcccugccccggaacauggugcuuaccugucagggguccgacgauaucaagagacugcucgacucucagggacgccgggauauuaaacugaucgacaucgcucugagcaaggccgauuccagaaaauucgaaaaugccgucugggaccaaugcaaggaucuuugucacaugcauacgggcgugguuguggagaaaaagaagcgcgggggcaaagaggaaauuacaccccacugcgcucucauggacuguaucauguaugaugccgcggucucuggaggccugaacauuccugugcugcgggcuguucucccgagagacaugguguuucgcaccagcucccccaaggucgugcugugaggacuaguuauaagacugacuagcccgaugggccucccaacgggcccuccuccccuccuugcaccgagauuaaucaaaggcucuuuucagagccaccaaaaaaaaaaaaaaaaaaaaaaaaaaaaaaaaaaaaaaaaaaaaaaaaaaaaaaaaaaaaaaaaaaaaaaaaaaaaaaaaaaaaaaaaaaaaaaaaaaaaa

SEQ ID NO: 17850 - RNA, 1923 nt, Artificial Sequence
  mRNA product Design i-3 (hSL-A100) comprising derived and/or modified sequence from LASV(LASV237-NIG-2010;Clade II)__AIT17639__NP (opt5)
aggagaaagcuuaccaugagcgccuccaaggaggugaaaucuuuccuguggacccagagccucagacgggaacuguccggcuacugcucuaacaucaaacuucaagucguuaaggacgcucaggcccugcuccacgggcuggauuuuagcgagguguccaaugugcagcgccuuaugagaaagcagaaacgggacgauucugaccugaagcgccucagagaucugaaccaagcggucaauaaccugguggaacucaagagcacacagcagaaauccauucugcggguuggaacgcuuaccagcgacgaucugcucacacuggcugccgaccuugagaagcugaaaucuaaggugauccgcaccgaaagaccccucuccagcggcgucuauauggggaaucugucuacacagcaacuggagcagcggcgcgcccuccugaacaugauuggaauggugggcggggcucagggaacccagccuggcagagauggcguugugcgggucugggacgugaaaaauccggaucuucugaacaaucaauucgggacaaugcccucccucacccuggccugucuuacgaagcagggacagguggaccugaacgaugcuguccucgcccugaccgaccugggccucaucuacacagcgaaguauccuaauagcucugaccuggaucgccuuucccaaagccaucccauucugaacaugguugacaucaaaaaguccucucucaauaucagcggguacaacuuuucccugggagccgcugugaaagccggcgcuugcaugcuugaugggggaaauaugcuggagaccauuaaggugacaccucagaccauggacggcauccucaaaagcauucugaaggucaaaagaucucugggcauguucguguccgauacgcccggggaacggaacccuuaugagaacauccucuacaagauuugucugagcggagacggcuggccguauaucgccucucgcacaagcauuguugggagagcgugggaaaauaccacaguggaucuugaguccgacggaaagccccagaaagucggcucugccgggagcaacaagucccugcagagcgcuggauuuccuaccggccucaccuacucucaacugaugacacugaaagauuccaugaugcagcuugaccccagcgccaagacguggaucgauaucgagggccggccugaagaccccguggagauugcucucuaccagccgaugucugggugcuauauccacuucuuuagagaaccuaccgaccugaaacaguucaagcaagaugccaaguacucccauggaauugacguugccgaucuguuucccgcucagccuggccucacaagcgcggugaucgaggcccugccccgcaauaugguccuuaccugucagggguccgacgauauuaaacggcugcucgacucucagggaagacgcgauaucaagcugaucgacauugcucugagcaaagccgauucccggagauucgaaaacgccgugugggaccaaugcaaggaucuuugucacaugcauacaggcgucgugguugagaaaaagaagcgcgggggcaaagaggaaaucacgccccacugcgcucucauggacuguauuauguaugaugccgcggugucuggaggccugaauaucccuguccugcgggcugugcucccgagagacaugguuuuucgcaccagcucccccaaggugguccugugaggacuaguuauaagacugacuagcccgaugggccucccaacgggcccuccuccccuccuugcaccgagauuaaucaaaggcucuuuucagagccaccaaaaaaaaaaaaaaaaaaaaaaaaaaaaaaaaaaaaaaaaaaaaaaaaaaaaaaaaaaaaaaaaaaaaaaaaaaaaaaaaaaaaaaaaaaaaaaaaaaaaa

SEQ ID NO: 17851 - RNA, 1923 nt, Artificial Sequence
  mRNA product Design i-3 (hSL-A100) comprising derived and/or modified sequence from LASV(LASV253-NIG-2011;Clade II)__AIT17671__NP (opt5)
aggagaaagcuuaccaugagcgccuccaaggaggugaaaucuuuccuguggacccagagccucagacgggaacuguccggcuacugcucuagcaucaaacuucaagucguuaaggacgcucaggcccugcuccacgggcuggauuuuuccgaggugucuaacgugcagcgccuuaugagaaagcagaaacgggacgauagcgaccugaagcgccucagagaucugaaucaagcggucaacaaucugguggaacucaaguccacccagcagaaaagcguucugcgggugggaacgcuuaccucugacgaucugcucacacuggcugccgaccuugagaagcugaaauccaaggucauucgcaccgaaagaccccucagcucuggcguguauauggggaaccuguccacacagcaacuggagcagcggcgcgcccuccugaauaugaucggaaugguuggcggggcucagggaacccagccuggcagagauggcgugguccgggugugggacgugaaaaacccggaucuucugaauaaccaauucgggacaaugcccagccucacccuggccugucuuacgaagcagggacaggucgaccugaaugauguugugcucgcucugaccgaccugggccucauuuacacagccaaguauccuaacucuuccgaccuggaucgccuuagccaaucccaucccauccugaauaugguggacaccaaaaagucuagccucaacauuuccggguacaauuuuagccugggagcggccgucaaagcuggcgccugcaugcuugaugggggaaacaugcuggagacaaucaaggugaccccucagacgauggacggcauccucaaaucuauucugaagguuaaaaagucccugggcauguucgugagcgauacacccggggaaagaaauccuuaugagaacauccucuacaagauuugucugucuggagacggcuggccguauaucgcuagccggaccuccauugucgggcgcgccugggaaaacacaaccguggaucuugagucugacggaaaaccccagaagguuggcaccgcggggagcaauaaaucccugcagagcgccggauuuccuacaggccucacguacucucaacugaugacccugaaggauuccaugaugcagcuugaccccagcgcuaaaacauggaucgauauugagggcagaccugaagaccccguggagaucgcccucuaccagccgaugucugggugcuauauccacuucuuucgggaaccuaccgaccugaagcaguucaagcaagaugcuaaauacucccauggaauugacgucacagaucuguuucccgcccagccuggccucaccagcgccgugaucgaggcucugcccagaaacaugguccuuacgugucagggguccgacgauauuaagcgccugcucgacucucagggacggagagauaucaaacugauugacaucgcgcugagcaaggccgauucccgccgguucgaaaaugcugugugggaccaaugcaaagaucuuugucacaugcauacaggcguuguggucgagaagaagaaaagagggggcaaggaggaaaucacaccccacugcgcccucauggacuguauuauguaugaugccgcugugucuggaggccugaacaucccuguucugcgcgccgugcucccgcgggacauggucuuuagaaccagcucccccaaaguggugcugugaggacuaguuauaagacugacuagcccgaugggccucccaacgggcccuccuccccuccuugcaccgagauuaaucaaaggcucuuuucagagccaccaaaaaaaaaaaaaaaaaaaaaaaaaaaaaaaaaaaaaaaaaaaaaaaaaaaaaaaaaaaaaaaaaaaaaaaaaaaaaaaaaaaaaaaaaaaaaaaaaaaaa

SEQ ID NO: 17852 - RNA, 1923 nt, Artificial Sequence
  mRNA product Design i-3 (hSL-A100) comprising derived and/or modified sequence from LASV(LASV254-NIG-2011;Clade II)__AIT17675__NP (opt5)
aggagaaagcuuaccaugagcgccuccaaggaggugaaaucuuuccuguggacccagagccucagacgggaacuguccggcuacugcucuagcaucaaacuucaagucguuaaggacgcucaggcccugcuccacgggcuggauuuuuccgaggugucuaacgugcagcgccuuaugagaaagcagaaacgggacgauagcgaccugaagcgccucagagaucugaaucaagcggucaacaaucugguggaacucaaguccacacagcagaaaagcguucugcgggugggaacgcuuaccucugacgaucugcucacacuggcugccgaccuugagaagcugaaauccaaggucauucgcaccgaaagaccccucagcucuggcguguauauggggaaccuguccacacagcaacuggagcagcggcgcgcccuccugaauaugaucggaaugguuggcggggcucagggaacccagccuggcagagauggcgugguccgggugugggacgugaaaaacccggaucuucugaauaaccaauucgggacaaugcccagccucacccuggccugucuuacgaagcagggacaggucgaccugaaugaugcuguucucgcccugaccgaccugggccucauuuacacagcgaaguauccuaacucuuccgaccuggaucgccuuagccaaucccaucccauccugaauaugguggacaccaaaaagucuagccucaacauuuccggguacaauuuuagccugggagccgcugugaaagccggcgcuugcaugcuugaugggggaaacaugcuggagacaaucaaggucaccccucagacgauggacggcauccucaaaucuauucugaaggugaaaaagucccugggcauguucguuagcgauacacccggggaaagaaauccuuaugagaacauccucuacaagauuugucugucuggagacggcuggccguauaucgccagccggaccuccauuguggggcgcgcgugggaaaacacaaucgucgaucuugagucugacggaaaaccccagaaggugggcaccgccgggagcaauaaaucccugcagagcgcuggauuuccuaccggccucacauacucucaacugaugacgcugaaggauuccaugaugcagcuugaccccagcgccaaaaccuggauugauaucgagggcagaccugaagaccccguugagaucgcucucuaccagccgaugucugggugcuauauucacuucuuucgggaaccuacagaccugaagcaguucaagcaagaugccaaauacucccauggaaucgacguggccgaucuguuucccgcucagccuggccucaccagcgcggucauugaggcccugcccagaaacauggugcuuacaugucagggguccgacgauaucaagcgccugcucgacucucagggacggagagauauuaaacugaucgacaucgcucugagcaaggccgauucccgccgguucgaaaaugccgucugggaccaaugcaaagaucuuugucacaugcauaccggcgugguuguggagaagaagaaaagagggggcaaggaggaaauuacgccccacugcgcucucauggacuguaucauguaugaugccgcggucucuggaggccugaacauuccugugcugcgcgcuguucucccgcgggacaugguguuuagaacaagcucccccaaagucgugcugugaggacuaguuauaagacugacuagcccgaugggccucccaacgggcccuccuccccuccuugcaccgagauuaaucaaaggcucuuuucagagccaccaaaaaaaaaaaaaaaaaaaaaaaaaaaaaaaaaaaaaaaaaaaaaaaaaaaaaaaaaaaaaaaaaaaaaaaaaaaaaaaaaaaaaaaaaaaaaaaaaaaaa

SEQ ID NO: 17853 - RNA, 1923 nt, Artificial Sequence
  mRNA product Design i-3 (hSL-A100) comprising derived and/or modified sequence from LASV(Nig08-04;Clade II)__ADU56611__NP (opt5)
aggagaaagcuuaccaugagcgccuccaaggaggugaaaucuuuccuguggacccagagccucagacgggaacuguccggcuacugcucuaacaucaaacuucaagucguuaaggacgcucaggcccugcuccacgggcuggauuuuagcgagguguccaaugugcagcgccuuaugagaaagcagaaacgggacgauggagaccugaagcgccucagagaucugaaccaagcggucaauaaccugguggaacucaagucuacccagcagaaaagcguucugcgggugggcacgcuuaccuccgacgaucugcucacacuggcugccgaccuugagaagcugaaaagcaaggucauucgcaccgaaagaccccucucuuccgggguguauaugggaaaucugagcacacagcaacuggagcagcggaaagcccuccugucuaugaucggcaugguugggggagcucagggcacccagccuggccgcgaugggguggucagagugugggacgugaagaacccggaucuucugaauaaccaauucggaacaaugcccucccucacccuggccugucuuacgaagcagggccaggucgaccugaaugaugcuguucucgcccugaccgaccuggggcucauuuacacagcgaaauauccuaacagcucugaccuggaucggcuuucccaaagccaucccauccugaauaugguggacaccaagaaauccucucucaacauuagcggauacaauuuuucccugggcgccgcugugaaggccggggcuugcaugcuugauggaggcaacaugcuggagacaaucaaagucaccccucagacgauggacggcauccucaagagcauucugaaagugaagcgcucucuggggauguucguuuccgauacacccggagaaagaaauccuuaugagaacauccucuacaagauuugucugagcggcgacggguggccguauaucgccucucggaccagcauugugggacgcgcgugggaaaacacaaccgucgaucuugaguccgacggcaaaccccagaagguggggaccgccggaucuaauaaaagccugcaguccgcuggcuuuccuacaggccucacguacagccaacugaugacccugaaggauucuaugaugcagcuugaccccuccgccaaaacauggaucgauauugaggggagaccugaagaccccguugagaucgcucucuaccagccgaugagcggaugcuauauccacuucuuucgggaaccuaccgaccugaagcaguucaagcaagaugccaaauacucucauggcauugacgugacagaucuguuuuccgcccagcccgggcucaccagcgcugucaucgaggcgcugccuagaaacauggugcuuacgugucagggauccgacgauauuaagaaacugcucgacucucagggccgccgggauaucaagcugauugacaucagccugaauaaagccgauuccagacgcuucgaaaacgcugucugggaccaaugcaaggaucuuugucacaugcauacaggggugguuguggagaagaaaaagcggggcggaaaagaggaaaucacaccccacugcgcccucauggacuguauuauguuugaugccgcugucucuggcgggcugaauauccccauucugagagccgugcucccucgcgacaugguuuuccggaccagcuccccgaaggugguccugugaggacuaguuauaagacugacuagcccgaugggccucccaacgggcccuccuccccuccuugcaccgagauuaaucaaaggcucuuuucagagccaccaaaaaaaaaaaaaaaaaaaaaaaaaaaaaaaaaaaaaaaaaaaaaaaaaaaaaaaaaaaaaaaaaaaaaaaaaaaaaaaaaaaaaaaaaaaaaaaaaaaaa

SEQ ID NO: 17854 - RNA, 1926 nt, Artificial Sequence
  mRNA product Design i-3 (hSL-A100) comprising derived and/or modified sequence from LASV(GA391;Clade III)__AAA46284__NP (opt5)
aggagaaagcuuaccaugagcgccuccaaggaggugagaucuugccuguggacccagagccuccggcgcgaacuguccggcuacuguucuaacaucaaacuucaagucguuaaggacgcucaggcccugcuccacgggcuggauuucagcgagguguccaaugugcagagacuuaugcggaaacagaagcgcgacgauggagaccugaaaagacuccgggaucugaaccaagcggucaauaaccugguggaacucaagucuacacagcagaaaagcguucugcgcgugggcacgcuuuccagcgacgaucugcucauucuggcugccgaccuugagaaacugaagucuaaagucaccagaacagaacggccccucuccagcgggguguauaugggaaaucugucuucccagcaacuggaucagcgcagagcccuccugaacaugaucggcaugaccgggguuagcggaggcggcaagggggcuucuaauggaauugugcgggucugggacgugaaaaacgccgagcuucugaauaaccaguuuggcacaaugccuucccucacccuggcuugccuuacaaagcaggggcaaguggaucugaaugacgccguccaggcgcucaccgaucugggacugaucuacacggccaaguauccgaacagcuccgaccucgaccgccugucucagagccaucccauucuuaauaugaucgauaccaaaaaguccagccugaacaucucuggcuacaauuucucccucggggcugccguuaaagcuggagccuguaugcuggacggcggcaacaugcuugagacaauuaaggugagcccucaaaccauggaugggauccugaaaucuauucucaaggugaaaaagagccugggaauguuugucuccgacacacccggcgaaagaaacccuuaugagaauauccuguacaagauuugccucucuggggauggauggagcuauaucgcgucccggaccagcauugugggccgcgccugggaaaacacgguuguggaccuggagcaggauaauaaaccccagaagaucgggaacggaggcucuaauaaaucccuucagagcgcuggcuucgccgcugggcugaucuacucucaacucaugacacugaaggacuuuaaauguuucaaccugauuccuaaugccaagaccuggauggauaucgagggaagaccggaagaccccgucgagauugcccuuuaccagccuuccagcggcugcuaugugcacuuuuuccgggaacccacagaucucaagcaguuuaaacaggacgcuaaguacucccaugggagagacguuaccgaucuguucgcggcccaaccuggacugaccucugcugugaucgaggcccucccccgcaacauggucauuacaugucagggcagcgaagacauccggaaacugcuugagucccaggggagacgcgauaucaagcugauugacaucacgcucucuaaagccgauagccggaaguuugagaaugcugugugggaccaguucaaggaucugugccacaugcauaccggcgucgugguugaaaagaagaaaagaggaggcaaggaggaaauuacaccgcacugugcccugauggacugcaucauguuugaugcggcuguguccgggggacuugacgccaaaguccuccgcgugguucugccucgggauaugguguucagaaccagcacacccaaggucgugcugugaggacuaguuauaagacugacuagcccgaugggccucccaacgggcccuccuccccuccuugcaccgagauuaaucaaaggcucuuuucagagccaccaaaaaaaaaaaaaaaaaaaaaaaaaaaaaaaaaaaaaaaaaaaaaaaaaaaaaaaaaaaaaaaaaaaaaaaaaaaaaaaaaaaaaaaaaaaaaaaaaaaaa

SEQ ID NO: 17855 - RNA, 1923 nt, Artificial Sequence
  mRNA product Design i-3 (hSL-A100) comprising derived and/or modified sequence from LASV(Nig08-A19;Clade III)__ADU56619__NP (opt5)
aggagaaagcuuaccaugagcgccuccaaggaggugaaaucuuuccuguggacccagagccucagacgggaacuguccggcuacugcucuaacaucaaacuucaagucguuaaggacgcucaggcccugcuccacgggcuggauuuuagcgagguguccaaugugcagcgccuuaugagaaagcagaaacgggacgauggagaccugaagcgccucagagaucugaaccaagcggucaauaaccugguggaacucaagucuacacagcagaaaagcguucugcgggugggcacgcuuuccagcgacgaucugcucguccuggcugccgaccuugagaagcugaaaucuaaggugguucgcaccgaaagaccccucuccagcgggauuuauaugggaaaucugucuucccagcaacuggaucagcggaaagcccuccugaacaugaucggcaugacagggggaaauggcggccgcaacaccacaagcgacgggauugugagagucugggaugugaagaaugcugagcuucugaacaaucaguucggaaccaugccuucucucacacuggccugucuuaccaagcagggccaaguggaccugaacgaugcuguccaggcccucacggaccuggggcugaucuacaccgcgaaauaucccaauuccagcgaccucgaucggcuggcccagucccauccgauucuuaacaugaucgacacaaagaaaucuagccugaauaucuccggauacaacuuuagccucggcgcugccguuaaggcuggggccugcaugcuggauggaggcaacaugcuugagaccauuaaagugucuccucaaacaauggacggcauccugaaguccauucucaaagugaagcgcagccuggggauguucaucucugauacccccggagaaagaaauccuuaugagaacauucuguacaagaucugucucagcggcgacggguggcccuauauugcgucccggacgucuaucgucggacgcgccugggaaaauacagugguugaucuggagagcgacaacaaaccucagaagaccggcaaugggggauccaacaaaagccuucagucugcuggcuuugccgcuggccugacauacucccagcucaugacccugaaggauagcaugcugcaacuugacccgaaugccaaaaccuggauggauaucgaggggagacccgaagacccuguggagauugcccucuaccagcccucuuccggaugcuauauccacuucuuucgggaaccuacagaccugaagcaguucaagcaggaugcuaaauacagccauggcauugacgucacggaucuguuugcggcccaacccgggcucaccuccgcugugaucgaggcccugccgagaaacaugguuauuacaugucagggaucugaagacauccgcaaacuucuggagagccagggccggagagauaucaagcucauugacaucucccugucuaagguggauagccgcaaauucgagaaugccgucugggaccaguuuaaggaucugugccacaugcauaccgggauuguggucgaaaagaaaaagcggggcggaaaagaggaaaucacaccucacugugcucuuauggacugcauuauguucgaugccgcgguguccggcgggguugacgcuaaggugcucagagccguccugccccgcgauaugguguuucggaccagcacgccuaaaguugugcugugaggacuaguuauaagacugacuagcccgaugggccucccaacgggcccuccuccccuccuugcaccgagauuaaucaaaggcucuuuucagagccaccaaaaaaaaaaaaaaaaaaaaaaaaaaaaaaaaaaaaaaaaaaaaaaaaaaaaaaaaaaaaaaaaaaaaaaaaaaaaaaaaaaaaaaaaaaaaaaaaaaaaa

SEQ ID NO: 17856 - RNA, 1923 nt, Artificial Sequence
  mRNA product Design i-3 (hSL-A100) comprising derived and/or modified sequence from LASV(G1180-SLE-2010;Clade IV)__AIT17169__NP (opt5)
aggagaaagcuuaccaugagcgccuccaaggagaucaaaucuuuccuguggacccagagccucagacgggaacuguccggcuacugcucuaacauuaagcugcaaguggucaaagacgcucaggcccugcuccacgggcuggauuuuagcgagguuuccaaugugcagcgccuuaugagaaaggaacggcgcgacgauaacgaccugaaaagacuccgggaucugaaucaggcggugaacaaucuggucgagcucaagucuacacaacaaaagagcauccugcgcgugggaacgcuuaccuccgacgaucugcucauucuggcugccgaccuugaaaaacuuaagagcaaaguuaucagaacagagcggccccucucugccggcguguauauggggaaccuguccagccagcagcuggaucagcgcagagcucuccugucuaugauuggaauguccagcggcaaucagcgggcccaggcugggcgcgacggagucgugagaguuugggaugugaagaacgucgagcuucugaauaaccaguucggcaccaugccuucucucacacuggccugucuuaccaaacaaggccagguggaccugaaugaugcggugcaggcccucacagaccuggggcugaucuacaccgcuaaguauccgaacacguccgaccucgaucggcugacccaaagccaucccauccuuaauaugauugacacaaagaaauccucucugaacaucagcggauacaauuuuucccucggcgccgcugucaaggccggggcgugcaugcuggauggaggcaacaugcuugaaaccauuaaaguuagcccucagacaauggacgggauccugaagucuauucucaaagugaagaaagcccugggaauguucaucuccgauacccccggcgagcgcaacccuuaugaaaauauucuguacaagaucugucucagcggcgacggguggcccuauaucgcuucuagaacgagcauuacaggacgggccugggagaacaccguggucgaucuggaguccgacggcaagccucagaaagcugggucuaauaacagcaauaagucccuucagagcgugggauuuacagccggccugaccuacucucaacucaugacccugaaagaugccaugcugcagcuugacccgaacgcuaagacauggauggauaucgaagggagacccgaggacccuguugaaauugcgcucuaccagcccuccagcggaugcuauauccacuucuuucgcgagccuacggaccugaaacaguucaagcaagaugccaaguacucucauggcauugacgugaccgaucuguuugcugcccagcccggccucacauccgccgucaucgacgcucugccgcggaauauggugaucaccugucaggggagcgaugacauuagaaaacuucuggaaucccagggacgcaaggauaucaaacucauugacaucgcccugucuaagacagauagccggaaauaugagaacgcgguuugggaccaauacaaggaucugugccacaugcauaccggcguggucguggagaagaaaaagagagggggaaaagaagagauuacgccucacugugcucuuauggacugcaucauguucgaugccgccgucuccggcgggcucaauacaucugugcugcgcgcuguucugccccgggacaugguguuuagaaccagcaccccucgcgucgugcucugaggacuaguuauaagacugacuagcccgaugggccucccaacgggcccuccuccccuccuugcaccgagauuaaucaaaggcucuuuucagagccaccaaaaaaaaaaaaaaaaaaaaaaaaaaaaaaaaaaaaaaaaaaaaaaaaaaaaaaaaaaaaaaaaaaaaaaaaaaaaaaaaaaaaaaaaaaaaaaaaaaaaa

SEQ ID NO: 17857 - RNA, 1923 nt, Artificial Sequence
  mRNA product Design i-3 (hSL-A100) comprising derived and/or modified sequence from LASV(G1442-SLE-2011;Clade IV)__AIT17181__NP (opt5)
aggagaaagcuuaccaugagcgccuccaaggaggugaaaucuuuccuguggacccagagccucagacgggaacuguccggcuacugcucuaacaucaaacuucaagucguuaaggacgcucaggcccugcuccacgggcuggauuuuagcgagguguccaaugugcagcgccuuaugagaaagcagcggcgcgacgauaacgaccugaaaagacuccgggaucugaaucaagcggucaacaaucugguggaacucaagucuacacagcaaaagagcguucugcgcgugggaacgcuuaccuccgacgaucugcucguccuggcugccgaccuugagaaacuuaagagcaaagugauuagaacagaacggccccucucugccggcguuuauauggggaaccuguccagccagcagcuggaucagcgcagagcucuccugaauaugaucggaaugucuggcgggauucagggaacccggacaggccgcgacggcguggucagagugugggaugugaagaacgccgaccuucugaauaaccaguucgggaccaugccuucccucacacuggcuugucuuaccaaacaaggacaggucgaucugaaugacguugugcaggcccucacggaccugggccugaucuacaccgcgaaguauccgaacgccagcgaucucgaccggcugacacaaucucaucccauucuuaauaugaucgauaccaagaaauccagccugaacaucuccggguacaauuuuucucucggagcugccgugaaggcuggcgccugcaugcuggacgggggaaacaugcuugagacaauuaaagucagcccucagaccauggauggcauccugaaguccauucucaaagugaagaaaacgcugggcauguucaucagcgacacacccggggagcgcaacccuuaugaaaauauucuguacaagaucugucucucuggagauggcuggcccuauauugcguccagaaccagcaucacagggcgggccugggagaacaccguuguggaccuggaaucugauggaaagccucagaaagcuggcagcaauaacuccaauaagucucuucagagcgccggguuugcugccggacugaccuacucccaacucaugacacugaaagacgccaugcugcagcuugauccgaacgcuaagacguggauggacaucgagggcagacccgaggacccugucgaaauugcgcucuaccagcccagcucuggcugcuauauccacuucuuucgcgagccuaccgaucugaaacaguucaagcaagacgccaaguacucccaugggauugaugugacagaccuguuugcugcccagcccggacucaccagcgccguuaucgaagcucugccgcggaauauggugauuacaugucagggcucugaugacaucaaaaagcugcuggagucccaggggagaaaagauaucaagcucauugacaucgcccugagcaaaaccgauucccgcaaguaugaaaacgcggucugggaccaauacaaggaucugugccacaugcauacgggaguggucguggagaaaaagaaacggggcgggaaggaggaaauuacaccucacugugcucuuauggacugcaucauguucgaugccgccguuucuggcggacucaauacccuggugcugagagcuguccucccccgcgacaugguguuucggaccagcacaccuagaguugugcugugaggacuaguuauaagacugacuagcccgaugggccucccaacgggcccuccuccccuccuugcaccgagauuaaucaaaggcucuuuucagagccaccaaaaaaaaaaaaaaaaaaaaaaaaaaaaaaaaaaaaaaaaaaaaaaaaaaaaaaaaaaaaaaaaaaaaaaaaaaaaaaaaaaaaaaaaaaaaaaaaaaaaa

SEQ ID NO: 17858 - RNA, 1923 nt, Artificial Sequence
  mRNA product Design i-3 (hSL-A100) comprising derived and/or modified sequence from LASV(G3010-SLE-2013;Clade IV)__AIT17345__NP (opt5)
aggagaaagcuuaccaugagcgccuccaaggagaucaaaucuuuccuguggacccagagccucagacgggaacuguccggcuacugcucuaacauuaaacuucaaguggucaaagacgcucaggcccugcuccacgggcuggauuuuagcgagguuuccaaugugcagcgccuuaugagaaaggaacggcgcgacgauaacgaccugaaaagacuccgggaucugaaucaggcggugaacaaucuggucgagcucaagucuacacaacaaaagagcauccugcgcgugggaacgcuuaccuccgacgaucugcucauucuggcugccgaccuugaaaaacuuaagagcaaaguuacaagaaccgagcggccccucucugccggcguguauauggggaaccuguccagccagcagcuggaucagcgcagagcucuccugucuaugaucggaauguccagcggcguccagggggcccgggcuggacgcgacggcgugguuagagugugggaugucaagaaugccgagcuucugaacaaucaguucggcacaaugccuucucucacccuggcgugucuuacaaaacaggggcaaguggaccugaacgaugugguccaggcccucaccgaccugggacugauuuacacggcuaaguauccgaauaccuccgaccucgaucggcugacacagagccaucccauccuuaacaugaucgacaccaagaaauccucucugaauauuagcggcuacaacuuuucccucggggccgcuguuaaggccggagcgugcaugcuggauggcgggaauaugcuugaaacaaucaaagugagcccucaaaccauggacggcauucugaagucuauccucaaagugaagaaagcccugggaauguucauuuccgagacgcccggcgaacgcaacccuuaugagaacauccuguacaagauuugucucagcggggauggauggcccuauaucgcuucuagaacaagcaucaccggccgggccugggagaauacagucguggaccuggaauccgaugggaagccucagaaagcuggaucuaacaauagcaacaagucccuucagagcgccggcuuuaccgccgggcugaccuacucucagcucaugacacugaaagacgcuaugcugcaacuugauccgaaugcgaagacguggauggacauugagggaagacccgaagauccuguugagguggcccucuaccagcccuccagcggcugcuauauccacuucuuucgcgaaccuaccgaccugaaacaguucaagcaggacgcuaaguacucucauggcauugaugucacagaccuguuugccgcccaacccgggcucaccuccgcugugaucgaugcccugccgcggaacaugguuauuacaugucagggaagcgacgauaucaaaaagcugcuggagucccagggcagaaaagacaucaagcucauugauaucgcgcugucuaaaaccgacagccgcaaguaugagaaugcugugugggaucaguacaaggaccugugccacaugcauacgggggucguggucgaaaagaagaaacggggaggcaaggaggaaauuacaccucacugugcccuuauggauugcaucauguucgacgccgcuguguccgggggccucaacaccucuguucugagagccgugcugccccgcgauauggucuuucggaccagcacaccuagagugguucucugaggacuaguuauaagacugacuagcccgaugggccucccaacgggcccuccuccccuccuugcaccgagauuaaucaaaggcucuuuucagagccaccaaaaaaaaaaaaaaaaaaaaaaaaaaaaaaaaaaaaaaaaaaaaaaaaaaaaaaaaaaaaaaaaaaaaaaaaaaaaaaaaaaaaaaaaaaaaaaaaaaaaa

SEQ ID NO: 17859 - RNA, 1923 nt, Artificial Sequence
  mRNA product Design i-3 (hSL-A100) comprising derived and/or modified sequence from LASV(G502-SLE-2009;Clade IV)__AIT17127__NP (opt5)
aggagaaagcuuaccaugagcgccuccaaggagaucaaaucuuuccuguggacccagagccucagacgggaacuguccggcuacugcucuaacauuaagcugcaaguggucaaagacgcucaggcccugcuccacgggcuggauuuuagcgagguuuccaaugugcagcgccuuaugagaaaggaacggcgcgacgauaacgaccugaaaagacuccgggaucugaaucaggcggugaacaaucuggucgagcucaagucuacacaacaaaagagcauccugcgcgugggaacgcuuaccuccgacgaucugcucauucuggcugccgaccuugaaaaacuuaagagcaaaguuaucagaacagagcggccccucucugccggcguguauauggggaaccuguccagccagcagcuggaucagcgcagagcucuccugucuaugauuggaauguccggcgggaaucagggaguccgggccggcaaggacggcgugguucgcgugugggaugucaaaaacgcugagcuucugaauaaccaguucgggaccaugccuagccucacacuggccugucuuaccaagcagggacaaguggaccugaaugaugcggugcaggcccucacagaccugggccugaucuacaccgcuaaguauccgaacacgucugaccucgauagacugacccagucccaucccauccuuaauaugauugacaccaaaaagagcucccugaacaucucuggguacaauuuuagccucggagccgcugucaaagccggcgcgugcaugcuggaugggggaaacaugcuugaaacaauuaagguuuccccucaaacaauggacggcauccugaaaagcauucucaaggugaaaaaggcccugggcauguucaucucugauacccccggggagcggaacccuuaugaaaauauucuguacaagaucugucucuccggagacggcuggcccuauaucgcuagccgcacgucuauuacagggagagccugggagaacaccguggucgaucuggagagcgacggaaaaccucagaaggcuggcuccaauaacucuaauaaaagccuucaguccgccggguuuacagccggacugaccuacagccagcucaugacccugaaggaugcuaugcugcaacuugacccgaacacaaaaacguggauggauaucgaaggccggcccgaggacccuguggaaauugcgcucuaccagcccucuuccggcugcuauauccacuucuuuagagagccuaccgaccugaagcaguucaagcaggaugccaaauacagccaugggauugacguuacagaucuguuugcugcccaacccggacucaccucugccgugaucgacgcucugccgcgcaauauggucaucacaugucagggcuccgaugacauucggaaacuucuggaaagccaggggagaaaggauaucaagcucauugacaucgcccugaacaaaaccgauucccgcaaguaugagaaugcggugugggaccaguacaaggaucugugccacaugcauacgggaguuguggucgagaaaaagaaacggggcgggaaggaagagauuacaccucacugugcucuuauggacugcaucauguucgaugccgccgugucuggcggacucaacaccagcguccugagagcugugcugccccgcgacaugguuuuucggaccuccacaccuagagugguccucugaggacuaguuauaagacugacuagcccgaugggccucccaacgggcccuccuccccuccuugcaccgagauuaaucaaaggcucuuuucagagccaccaaaaaaaaaaaaaaaaaaaaaaaaaaaaaaaaaaaaaaaaaaaaaaaaaaaaaaaaaaaaaaaaaaaaaaaaaaaaaaaaaaaaaaaaaaaaaaaaaaaaa

SEQ ID NO: 17860 - RNA, 1923 nt, Artificial Sequence
  mRNA product Design i-3 (hSL-A100) comprising derived and/or modified sequence from LASV(G733-SLE-2010;Clade IV)__AIT17155__NP (opt5)
aggagaaagcuuaccaugagcgccuccaaggagaucaaaucuuuccuguggacccagagccucagacgggaacuguccggcuacugcucuaacauuaagcugcaaguggucaaagacgcucaggcccugcuccacgggcuggauuuuagcgagguuuccaaugugcagcgccuuaugagaaaggaacggcgcgacgauaacgaccugaaaagacuccgggaucugaaucaggcggugaacaaucuggucgagcucaagucuacacaacaaaagagcgugcugcgcguuggaacgcuuaccuccgacgaacugcucgugcuggcugccgaucuugagaaacuuaagagcaaagucaucagaacagagcggccccucucugccggcguguauauggggaaccuguccagccagcagcuggaccagcgcagagcucuccugucuaugauuggaauguccggcgggaaucagggagcccggaccggccgcgauggcguugugagagucugggacgugaagaacgcugaacuucugaauaaccaguucgggacaaugccuagccucacccuggccugucuuacaaaacagggacaaguggaucugaaugacgcgguccaggcccucaccgaucugggccugaucuacacggcuaaguauccgaacaccucugaccucgaccggcugacacagucccaucccauucuuaauaugaucgauaccaagaaaagcucccugaacaucucuggguacaauuuuagccucggagccgcuguuaaggccggcgcgugcaugcuggacgggggaaacaugcuugagacaauuaaaguguccccucaaaccauggauggcauccucaagagcauucugaaagugaagaaagcccugggcauguucaucucugacacgcccggggaacgcaacccuuaugagaauauucuguacaagaucugucucuccggagauggcuggcccuauauugcuagcagaacaucuaucaccgggcgggccugggagaacacagucguggaccuggaaagcgauggaaagccucagaaagcuggcuccaauaacucuaauaagagccuucaguccgccggguuuaccgccggacugaccuacagccagcucaugacacugaaagacgcuaugcugcaacuugauccgaacgcgaagacguggauggacaucgagggcagacccgaagauccuguugagauugcccucuaccagcccucuuccggcugcuauauccacuucuuucgcgaaccuaccgaccugaaacaguucaagcaggacgcuaaguacagccaugggauugaugugacagaccuguuugccgcccaacccggacucaccucugcugucaucgaugcccugccgcggaauauggugauuacaugucagggcuccgacgauaucagaaaacuucuggagagccaggggcgcaaggacaucaaacucauugauaucgcgcuguccaagauugacucucggaaauaugagaacgcuguuugggaucaguacaaggaccugugccacaugcauaccggaguggucguggaaaagaaaaagagaggcgggaaagaggaaaucacgccucacugugcccuuauggauugcauuauguucgacgccgcugucagcggcggacucaauucccuggugcugcgcgccguucucccccgggauaugguguuuagaacaucuaccccucgcgucgugcugugaggacuaguuauaagacugacuagcccgaugggccucccaacgggcccuccuccccuccuugcaccgagauuaaucaaaggcucuuuucagagccaccaaaaaaaaaaaaaaaaaaaaaaaaaaaaaaaaaaaaaaaaaaaaaaaaaaaaaaaaaaaaaaaaaaaaaaaaaaaaaaaaaaaaaaaaaaaaaaaaaaaaa

SEQ ID NO: 17861 - RNA, 1923 nt, Artificial Sequence
  mRNA product Design i-3 (hSL-A100) comprising derived and/or modified sequence from MOPV/LASV reassortant(IGS-1;Clade IV)__AFY05578__NP (opt5)
aggagaaagcuuaccaugagcgccuccaaggagaucaaaucuuuccuguggacccagagccucagacgggaacuguccggcuacugcucuaacauuaaacuucaaguggucaaggacgcucaggcccugcuccacgggcuggauuuuagcgagguuuccaaugugcagcgccuuaugagaaaggaacggcgcgacgauaacgaccugaaaagacuccgggaucugaaucaggcggugaacaaucuggucgagcucaagucuacacaacaaaagagcauccugcgcgugggaacgcuuaccuccgacgaucugcucauucuggcugccgaccuugaaaaacugagaagcaagguuauccggacagagcgcccccucucugccggcguguauauggggaaccuguccagccagcagcuggaucagagacgggcucuccugaauaugauuggaaugucuggcgggaaccagggagcccgcgcuggcagagacggcgucgugcggguuugggaugugaaaaaugccgagcuucuguccaaccaguucgggaccaugccuagccucacacuggcgugucuuaccaagcagggacaagucgaccugaaugaugccgugcaggcucucacagaccugggccugaucuacaccgccaaauauccgaacacgucugaccucgaucgccugacccagucccaucccauccuuaauaugauugacacaaagaaaagcucccugaacaucucuggguacaauuuuagccucggagcugccgugaaggcgggcgccugcaugcuggaugggggaaacaugcuugaaaccauuaaggucuccccucaaacaauggacggcauccugaaaagcauucucaagguuaaaaaggcucugggcauguucaucucugauacccccggggagagaaacccuuaugaaaauauucuguacaaaaucugucucuccggagacggcuggcccuauaucgccagccggacgucuauuacagggagagcuugggagaacaccgugguggaucuggagagcgacggaaagccucagaaggccgauuccaauaacucuagcaaaucccuucagagcgccggcuuuacagcugggcugaccuacucucagcucaugacccugaaggacgcgaugcugcaacuugauccgaaugccaaaacauggauggacaucgaaggacgccccgaggacccugucgaaauugcucucuaccagcccuccagcggcugcuauauccacuucuuucgggagccuacggaucugaagcaguucaaacaggacgccaaguacucucauggcauugaugugaccgaccuguuugccacacaacccgggcucaccuccgcuguuaucgaugcccugccgagaaacauggugaucacaugucagggaagcgacgauauucgcaaacuucuggaaucccagggccggaaggacaucaagcucauugauaucgaccugucuaaaaccgauagcagaaaguaugagaaugcggucugggaccaguacaaagaucugugccacaugcauacgggggugguuguggagaagaagaaacgcggaggcaaggaagagauuacaccucacugugcucuuauggacugcaucauguucgacgccgccgucuccgggggccucaacaccucugugcugcgggcuguccugcccagagauaugguguuucgcaccagcacaccucggguugugcucugaggacuaguuauaagacugacuagcccgaugggccucccaacgggcccuccuccccuccuugcaccgagauuaaucaaaggcucuuuucagagccaccaaaaaaaaaaaaaaaaaaaaaaaaaaaaaaaaaaaaaaaaaaaaaaaaaaaaaaaaaaaaaaaaaaaaaaaaaaaaaaaaaaaaaaaaaaaaaaaaaaaaa

SEQ ID NO: 17862 - RNA, 1923 nt, Artificial Sequence
  mRNA product Design i-3 (hSL-A100) comprising derived and/or modified sequence from LASV(LM765-SLE-2012;Clade IV)__AIT17815__NP (opt5)
aggagaaagcuuaccaugagcgccuccaaggagaucaaaucuuuccuguggacccagagccucagacgggaacuguccggcuacugcucuaacauuaagcugcaaguggucaaagacgcucaggcccugcuccacgggcuggauuuuagcgagguuuccaaugugcagcgccuuaugagaaaggaacggcgcgacgauaacgaccugaaaagacuccgggaucugaaucaggcggugaacaaucuggucgagcucaagucuacacaacaaaagagcauccugcgcgugggaacgcuuaccuccgacgaucugcucauucuggcugccgaccuugaaaaacuuaagagcaaaguuacaagaaccgagcggccccucucugccggcguguauauggggaaccuguccagccagcagcuggaucagcgcagagcucuccuggacaugaucggaaugucuggcuccaaucagggggcccgggcuggacgcgauggcgucgugagaguuugggacgugaagaacgccgagcuucugaauaaccaguucggcacaaugccuagccucacccuggcgugucuuacaaaacaggggcaagucgaucugaaugacgccgugcaggcucucaccgaccugggacugauuuacacggccaaguauccgaacaccucugaucucgaccggcugacacagucccaucccauccuuaauaugaucgauaccaagaaaagcucccugaacauuucuggcuacaauuuuagccucggggcugccgugaaggcgggagccugcaugcuggacggcgggaacaugcuugaaacaaucaaagucuccccucaaaccauggauggcauucucaagagcauccugaaaguuaagaaagcucugggaauguucauuucugacgcccccggcgagcgcaacccuuaugaaaauauccuguacaagauuugucucuccggggauggauggcccuauaucgcuagcagaacgucuaucacaggccgggccugggagaacaccgugguggaccuggagagcgaugggaagccucagaaagccggauccaauggcucuaacaagagccuucaguccgcuggguuuacagcgggacugaccuacagccagcucaugacccugaaagacgccaugcugcaacuugauccgaaugcuaagacauggauggacauugaaggcagacccgaggacccugucgaaaucgcccucuaccagcccucuuccggcugcuauauucacuucuuucgcgagccuacggaucugaaacaguucaagcaggacgccaaguacagccaugggaucgaugugaccgaccuguuugcugcccaacccggacucacaucugcgguuauugaugcucugccgcggaacauggugaucaccugucagggcuccgacgauaucagaaaacuuuucgaaagccaggggcgcaaggacauuaaacugaucgauauugcccucuccaagacagacucucggaaauaugagaaugccgucugggaucaguacaaggaccugugccacaugcauaccggaaucgugguugagaagaaaaagagaggcgggaaagaagagauuacgccucacugugcucugauggauugcaucauguuugacgccgcugugagcggcggacuuaacacauccguccuccgcgccgugcugccccgggacauggucuucagaaccucuaccccucgcgugguucugugaggacuaguuauaagacugacuagcccgaugggccucccaacgggcccuccuccccuccuugcaccgagauuaaucaaaggcucuuuucagagccaccaaaaaaaaaaaaaaaaaaaaaaaaaaaaaaaaaaaaaaaaaaaaaaaaaaaaaaaaaaaaaaaaaaaaaaaaaaaaaaaaaaaaaaaaaaaaaaaaaaaaa

SEQ ID NO: 17863 - RNA, 1923 nt, Artificial Sequence
  mRNA product Design i-3 (hSL-A100) comprising derived and/or modified sequence from LASV(LM776-SLE-2012;Clade IV)__AIT17825__NP (opt5)
aggagaaagcuuaccaugagcgccuccaaggagaucaaaucuuuccuguggacccagagccucagacgggaacuguccucuuacugcagcaacauuaaacuucaaguggucaaggacgcucaggcccugcuccacggccuggauuuuuccgagguuucuaaugugcagcgccuuaugagaaaggaacggcgcgacgauaacgaccugaaaagacuccgggaucugaaucaggcggugaacaaucuggucgagcucaagagcacacaacagaaguccauccugcgcguggggacgcuuaccagcgacgaucugcucauucuggcugccgaccuugaaaaacugaagucuaaaguuacaagaaccgagcggccccucuccgccggaguguauaugggcaaccugagcucucagcagcuggaucaacgcagagcucuccuguccaugaucgggaugagcggaucuaaucagggcgcccgggcugggcgcgacggagucgugagaguuugggaugugaagaacgccgagcuucugaauaaccaguucggcacaaugccuucccucacccuggcgugucuuacaaaacagggccaagucgaccugaaugaugccgugcaggcucucaccgaccuggggcugauuuacacggccaaguauccgaacaccagcgaccucgaucggcugacacagucccaucccauccuuaauaugaucgacaccaagaaaucuagccugaacauuuccggauacaauuuuagccucggcgcugccgugaaggcgggggccugcaugcuggauggaggcaacaugcuugaaacaaucaaagucucuccucaaaccauggacgggauucugaaguccauccucaaaguuaagaaagcucugggaauguucauuagcgauacgcccggcgagcgcaacccuuaugaaaauauccuguacaagauuugucucucuggcgacggguggcccuauaucgccagcagaacauccaucaccggacgggcuugggagaacacagugguggaucuggagucugacggcaagccucagaaagccgggagcaauaacuccaauaagagccuucagucugccggauuuaccgcuggccugaccuacucccagcucaugacacugaaagaugcgaugcugcaacuugacccgaacgccaagacguggauggauauugaagggagacccgaggacccugucgaaguggcucucuaccagcccagcucuggaugcuauauccacuucuuucgcgagccuaccgaccugaaacaguucaagcaggaugccaaguacucccauggcauugacguuacagaucuguuugccgcucaacccggccucaccagcgccgugaucgacgcgcugccgcggaauauggucauuacaugucagggguccgaugacaucagaaaacuucuggaaucucagggacgcaaggauaucaaacucauugacaucgcucugagcaagaccgauucccggaaauaugagaacgccgugugggaccaguacaaggaucugugccacaugcauacgggcguuguggucgagaagaaaaagagagggggaaaagaagagauuacaccucacugugcccuuauggacugcaucauguucgaugcugccgugucuggcgggcucaauaccagcguccugcgcgcugugcugccccgggacaugguuuuuagaaccuccacaccucgcgugguccucugaggacuaguuauaagacugacuagcccgaugggccucccaacgggcccuccuccccuccuugcaccgagauuaaucaaaggcucuuuucagagccaccaaaaaaaaaaaaaaaaaaaaaaaaaaaaaaaaaaaaaaaaaaaaaaaaaaaaaaaaaaaaaaaaaaaaaaaaaaaaaaaaaaaaaaaaaaaaaaaaaaaaa

SEQ ID NO: 17864 - RNA, 1923 nt, Artificial Sequence
  mRNA product Design i-3 (hSL-A100) comprising derived and/or modified sequence from LASV(Mad39;Clade IV)__ANH09723__NP (opt5)
aggagaaagcuuaccaugagcgccuccaaggagaucaaaucuuuccuguggacccagagccucagacgggaacuguccggcuacugcucuaacauuaagcugcaaguggucaaagacgcucaggcccugcuccacgggcuggauuuuagcgagguuuccaaugugcagcgccuuaugagaaagcagcggcgcgacgauaacgaccugaaaagacuccgggaucugaaucaagcggugaacaaucuggucgaacucaagucuacacagcaaaagagcgugcugcgcguuggaacgcuuaccuccgacgaucugcucacacuggcugccgaccuugagaaacuuaagagcaaagugaccagaacagaacggccccucaccgccggcgucuauauggggaaccugucuucccagcagcuggaucagcgcagagcucuccugaauaugaucggaaugagcggcgggaaccagggagcccggacaggccgcgacggcgugguuagagugugggaugucaagaaugcugagcuucugaacaaucaguucgggaccaugccuucucucacgcuggccugucuuaccaaacaaggacagguggaccugaacgaugugguccaggcgcucacagaccugggccugauuuacaccgccaaguauccgaauacauccgaccucgaucggcugacccaaagccaucccauccuuaacaugauugacacgaauaagucuucccugaacaucagcggguacaacuuuucccucggagcugccguuaaagcuggcgccugcaugcuggaugggggaaauaugcuugagacaaucaaggugucuccucagaccauggacggcauucugaaaagcauccucaaggugaaaaagucccugggcauguucauuagcgauacacccggggaacgcaacccuuaugagaauauccuguacaaaauuugucucucuggagacggcuggcccuauaucgcguccagaaccagcauuaccgggcgggccugggaaaacacagucguggaucuggagucuggaggcaagccucagaaggcugggagcaauaacuccaauaaaucucuucagagcgccggauuugcugccggccugacguacucccaacucaugacccugaaggacgccaugcugcagcuugauccgaacgcuaaaacauggauggacaucgagggcagacccgaagauccuguugagaucgcgcucuaccagcccauuagcgggugcuauauccacuucuuucgcgaaccuaccgaccugaagcaguucaaacaagacgccaaguacucucauggaauugaugugacagaccuguuugcugcccagcccggccucaccuccgccgucaucgaggcucugccgcggaauauggugauuacgugucaggggagcgaugacaucagaaaacuuuucgaaucucagggacgcaaggauaucaagcugauugacaucgcccucuccaaaacagauagccggaaguaugagaacgcgguuugggaccaauacaaagaucugugccacaugcauaccggcguggucguggagaagaagaaaaagggcgggaaagaagagauuaccccucacugugcucugauggacugcaucauguuugaugccgccgucuccggaggccuuaauacacucgugcugagagcuguucugccccgcgacaugguguuccggaccucuacaccuaaggucgugcucugaggacuaguuauaagacugacuagcccgaugggccucccaacgggcccuccuccccuccuugcaccgagauuaaucaaaggcucuuuucagagccaccaaaaaaaaaaaaaaaaaaaaaaaaaaaaaaaaaaaaaaaaaaaaaaaaaaaaaaaaaaaaaaaaaaaaaaaaaaaaaaaaaaaaaaaaaaaaaaaaaaaaa

SEQ ID NO: 17865 - RNA, 1923 nt, Artificial Sequence
  mRNA product Design i-3 (hSL-A100) comprising derived and/or modified sequence from LASV(Z0947-SLE-2011;Clade IV)__AIT17841__NP (opt5)
aggagaaagcuuaccaugagcgccuccaaggagaucaaaucuuuccuguggacccagagccucagacgggaacuguccggcuacugcucuaacauuaagcugcaaguggucaaagacgcucaggcccugcuccacgggcuggauuuuagcgagguuuccaaugugcagcgccuuaugagaaaggaacggcgcgacgauaacgaccugaaaagacuccgggaucugaaucaggcggugaacaaucuggucgagcucaagucuacacaacaaaagagcauccugcgcgugggaacgcuuaccuccgacgaucugcucauucuggcugccgaccuugaaaaacuuaagagcaaaguuacaagaaccgagcggccccucucugccggcguguauauggggaaccuguccagccagcagcuggaucagcgcagagcucuccugaauaugaucggaaugucuggcuccaaccagggggcccggacaggacgcgacggcgucgugagaguuugggaugugaagaaugcugagcuucugaacaaucaguucggcaccaugccuagccucacacuggccugucuuaccaaacaggggcaagucgaccugaacgaugcggugcaggcccucacggaccugggacugauuuacaccgcuaaguauccgaauacaucugaccucgaucggcugacccagucccaucccauccuuaacaugaucgacacaaagaaaagcucccugaauauuucuggcuacaacuuuagccucggggccgcugugaaggccggagcgugcaugcuggauggcgggaacaugcuugaaaccaucaaagucuccccucaaacgauggacggcauucucaagagcauccugaaaguuaagaaagcccugggaauguucauuucugaugcucccggcgagcgcaauccuuaugaaaacauccuguacaagauuugucucuccggggacggauggcccuauaucgccagcagaacaucuaucaccggccgggcuugggagaauacagugguggaucuggagagcgacgggaagccucagaaagccggauccaacggcucuaauaagagccuucaguccgccggguuuaccgcuggacugaccuacagccagcucaugacacugaaagaugcgaugcugcaacuugacccgaacgccaagacguggauggauauugaaggcagacccgaggacccugucgaaaucgcucucuaccagcccucuuccggcugcuauauucacuucuuucgcgagccuaccgaccugaaacaguucaagcaggaugccaaguacagccaugggaucgacgugacagaucuguuugccgcucaacccggacucaccucugccguuauugacgcgcugccgcggaauauggugaucacaugucagggcuccgaugacaucagaaaacuuuucgaaagccaggggcgcaaggauauuaaacugaucgacauugcucucuccaagaccgauucucggaaauaugagaacgccgucugggaccaguacaaggaucugugccacaugcauacgggaaucgugguugagaagaaaaagagaggcgggaaagaagagauuacaccucacugugcccugauggacugcaucauguuugaugcugccgugagcggcggacuuaauaccuccguccuccgcgcugugcugccccgggacauggucuucagaaccucuacaccucgcgugguucugugaggacuaguuauaagacugacuagcccgaugggccucccaacgggcccuccuccccuccuugcaccgagauuaaucaaaggcucuuuucagagccaccaaaaaaaaaaaaaaaaaaaaaaaaaaaaaaaaaaaaaaaaaaaaaaaaaaaaaaaaaaaaaaaaaaaaaaaaaaaaaaaaaaaaaaaaaaaaaaaaaaaaa

SEQ ID NO: 17866 - RNA, 1899 nt, Artificial Sequence
  mRNA product Design i-3 (A100) comprising derived and/or modified sequence from LASV(Josiah;Clade IV)__NP_694869__NP (opt1)
aggagaaagcuuaccaugagcgccuccaaggagaucaagagcuuccuguggacccagucccuccgccgggagcugagcggcuacugcuccaacaucaagcuccagguggucaaggacgcccaggcgcugcugcacgggcuggacuucagcgagguguccaacgugcagcgccucaugcggaaggagcgccgggacgacaacgaccugaagcgccugcgggaccucaaccaggccgucaacaaccugguggagcucaagagcacccagcagaaguccauccugcgcgugggcacccugaccagcgacgaccugcucauccuggccgccgaccuggagaagcucaaguccaaggucauccggaccgagcgcccccugagcgccgggguguacaugggcaaccuguccagccagcagcucgaccagcggcgcgcgcugcugaacaugaucgggauguccggcggcaaccagggggcccgggccggccgcgacggggugguccgggugugggacgugaagaacgccgagcuccugaacaaccaguucggcaccaugccgagccugacgcucgcgugccugaccaagcaggggcaggucgaccugaacgacgccgugcaggcccucaccgaccugggccugaucuacaccgccaaguaccccaacacguccgaccucgaccgccugacccagagccaccccauccugaacaugaucgacaccaagaaguccagccucaacaucagcggcuacaacuucucccugggggccgcggugaaggccggcgccugcaugcuggacgggggcaacaugcucgagaccaucaaggucagcccccagacgauggacggcauccugaaguccauccugaaggugaagaaggcccucgggauguucaucagcgacaccccgggcgagcggaaccccuacgagaacauccuguacaagaucugccuguccggggacggcuggcccuacaucgccagccgcaccuccaucaccgggcgggcgugggagaacacgguggucgaccucgagagcgacggcaagccccagaaggccgacuccaacaacagcuccaagagccugcaguccgccggcuucaccgccgggcugaccuacagccagcucaugacccugaaggacgccaugcugcagcuggacccgaacgcgaagacguggauggacaucgagggccgccccgaggaccccguggagaucgcccucuaccagcccuccagcgggugcuacauccacuucuuccgggagccgaccgaccugaagcaguucaagcaggacgccaaguacucccacggcaucgacgugaccgaccuguucgccacccagcccgggcucacgagcgccgucaucgacgcgcugccccgcaacauggugaucacgugccagggcuccgacgacauccgcaagcugcucgagagccagggccggaaggacaucaagcugaucgacaucgcccugagcaagaccgacucccgcaaguacgagaacgccgugugggaccaguacaaggaccucugccacaugcacaccggggucguggucgagaagaagaagcggggcgggaaggaggagaucaccccgcacugcgcccugauggacugcaucauguucgacgcggccgugagcggcgggcugaacaccuccgugcuccgcgccguccugccccgggacaugguguuccgcaccagcacgccccgggugguccugugaggacuaguuauaagacugacuagcccgaugggccucccaacgggcccuccuccccuccuugcaccgagauuaauaaaaaaaaaaaaaaaaaaaaaaaaaaaaaaaaaaaaaaaaaaaaaaaaaaaaaaaaaaaaaaaaaaaaaaaaaaaaaaaaaaaaaaaaaaaaaaaaaaaa

SEQ ID NO: 17867 - RNA, 1899 nt, Artificial Sequence
  mRNA product Design i-3 (A100) comprising derived and/or modified sequence from LASV(LP;Clade I)__AAF86702__NP (opt1)
aggagaaagcuuaccaugagcaacuccaaggagaucaagagcuuccuguggacccagucccuccgccgggagcugagcggcuacugcuccaacaucaagcuccagguggucaaggacgcccaggcccugcugcacgggcuggacuucagcgagguguccaacgugcagcgccucaugcggaagcagaagcgcgacgacgcggaccugaagcggcugcgcgaccucaaccaggccgucaacaaccugguggagcucaagagcacccagcagaagaacgugcugcgggucggcacgcuguccagcgacgaccugaucacccucgccgccgaccuggagaagcugaaguccaaggugauccgcaccgagcggccccucagcuccgggguguacaugggcaaccugagcucccagcagcuggaccagcgccgggcccuccugagcaugaucgggauguccggcggcccgcaggggaaccgcaccggcggggacggcgucgugcgggugugggacgucaagaacgcggagcugcucaacaaccaguucgggacgaugcccagccugacccuggccugccucaccaagcagggccagguggaccugaacgacgccgugcaggcccugaccgaccucggccugaucuacacggcgaaguaccccaacuccagcgaccuggacaugcucacccagagccaccccauccuggggauggucgacaccaagaaguccagccugaacaucuccggcuacaacuucagccucggggccgccgugaaggccggcgccugcaugcuggacggcgggaacaugcuggagaccaucaagguguccccgcagacgauggacggcauccucaagagcauccugaaggucaagcgcucccuggggauguucaucagcgacacccccggcgagcggaaccccuacgagaacauccucuacaagaucugccuguccggggagggcuggcccuacaucgcgagccgcaccuccaucaccggccgggccugggagaacacgcugguggaccucgagagcgacaacaagccgcccaagcugaacuccgccgggagcaacaagucccugcaggccgccggccucaacgcggggcugaccuacagccagcugaugacccugaaggacugcaugcuccagcuggaccccuccagcaagaccuggaucgacaucgagggccgccccgaggacccgguggagaucgcccuguuccagcccuccagcgggugcuacauccacuucuuccgggagcccacggaccucaagcaguucaagcaggacgccaaguacagccacggcaucgacgucaccgaccuguucuccacccagcccggccugaccagcgccgugaucgaggcccucccgcgcaacauggugcugacgugccagggguccgacgacaucaagaagcugcucgagagccagggccggcgcgacaucaagcugaucgacaucucccugagcaaggcggacucccgcaaguucgagaacgccgucugggaccaguacaaggaccucugccacaugcacaccgggguggucguggagaagaagaagcggggcgggaaggaggagaucacgccccacugcgcccugcuggacugcaucauguucgacgccgccaccaccggcagccucaacaucaccacccugcgcgcggugcugccccgggacauggucuuccgcaccuccacgcccaagguggugcucugaggacuaguuauaagacugacuagcccgaugggccucccaacgggcccuccuccccuccuugcaccgagauuaauaaaaaaaaaaaaaaaaaaaaaaaaaaaaaaaaaaaaaaaaaaaaaaaaaaaaaaaaaaaaaaaaaaaaaaaaaaaaaaaaaaaaaaaaaaaaaaaaaaaa

SEQ ID NO: 17868 - RNA, 1899 nt, Artificial Sequence
  mRNA product Design i-3 (A100) comprising derived and/or modified sequence from LASV(803213;Clade II)__AAF86704__NP (opt1)
aggagaaagcuuaccaugagcgccuccaaggaggugaaguccuuccuguggacccagagccuccgccgggagcugagcggcuacugcuccaacaucaagcugcaggucgugaaggacgcccaggcgcuccugcacgggcuggacuucagcgaggugaacaacguccagcgccucaugcggaagcagaagcgcgacgacggcgaccugaagcggcugcgcgaccucaaccaggccgugaacaaccugguggagcugaaguccacccagcagaaguccauccuccgggucgggacgcugaccagcgacgaccugcucacccuggccgccgaccuggagaagcucaagagcaaggugauccgcaccgagcggccccuguccagcggcguguacauggggaaccuguccacgcagcagcucgagcagcgccgggcccugcugaacaugaucggcauggucggcggggcgcagggcacccagccggggcgcgacggcguggugcgggucugggacgugaagaaccccgaccuccugaacaaccaguucgggaccaugcccagccugacccucgccugccugacgaagcagggccagguggaccugaacgacgccguccucgcccugaccgaccugggccucaucuacaccgcgaaguaccccaacuccagcgaccuggaccgccugucccagagccacccgauccucaacaugguggacaccaagaaguccagccugaacaucagcggguacaacuucucccugggcgccgccgugaaggccggggccugcaugcucgacggcggcaacaugcuggagacgaucaaggucacgccccagaccauggacgggauccucaagagcauccugaaggugaagcggucccugggcauguucgugagcgacacccccggggagcgcaaccccuacgagaacauccuguacaagaucugccucuccggcgacggguggccguacaucgcgagccggaccuccaucgucggccgcgccugggagaacaccaccguggaccuggagagcgacggcaagccccagaagguggggaccgccggcuccaacaagagccugcaguccgccggguuccccacgggccucaccuacagccagcugaugacccugaaggacuccaugaugcagcuggaccccagcgccaagaccuggaucgacaucgaggggcggccggaggaccccgucgagaucgcgcucuaccagcccauguccggcugcuacauccacuucuuccgcgagcccacggaccugaagcaguucaagcaggacgccaaguacagccacggcaucgacguggccgaccuguucccggcccagcccgggcucaccuccgccgucaucgaggcgcugccccggaacauggugcugaccugccagggcagcgacgacaucaagaagcuccuggacucccaggggcgccgcgacaucaagcugaucgacaucagccucagcaagguggacucccggaaguucgagaacgccgucugggaccagugcaaggaccugugccacaugcacaccggcgugguggucgagaagaagaagcgcgggggcaaggaggagaucacgccccacugcgcccugauggacugcaucauguucgacgccgccgugagcggcgggcucaacaucccggugcugcgggcgguccugccccgcgacaugguguuccggaccuccagccccaaggugguccucugaggacuaguuauaagacugacuagcccgaugggccucccaacgggcccuccuccccuccuugcaccgagauuaauaaaaaaaaaaaaaaaaaaaaaaaaaaaaaaaaaaaaaaaaaaaaaaaaaaaaaaaaaaaaaaaaaaaaaaaaaaaaaaaaaaaaaaaaaaaaaaaaaaaa

SEQ ID NO: 17869 - RNA, 1902 nt, Artificial Sequence
  mRNA product Design i-3 (A100) comprising derived and/or modified sequence from LASV(GA391;Clade III)__CAA36646__NP (opt1)
aggagaaagcuuaccaugagcgccuccaaggaggugcgcagcuuccuguggacccagucccuccggcgcgagcugagcggcuacugcuccaacaucaagcugcaggucgugaaggacgcccaggcgcuccugcacgggcuggacuucagcgagguguccaacguccagcggcucaugcgcaagcagaagcgggacgacggcgaccugaagcgccugcgggaccucaaccaggccgugaacaaccugguggagcucaagagcacccagcagaaguccguccugcgcguggggacccugagcuccgacgaccugcucauccuggccgccgaccuggagaagcucaagagcaaggugacccggaccgagcgcccccuguccagcggcgucuacauggggaaccuguccagccagcagcucgaccagcggcgcgcccugcugaacaugaucggcaugaccggcguguccgggggcgggaagggcgcgagcgacgggaucgugcgggucugggacgugaagaacgccgagcuccugaacaaccaguucggcacgaugccgucccugacccucgccugccugaccaagcagggccagguggaccugaacgacgccguccaggcgcucaccgaccuggggcugaucuacacggccaaguaccccaacagcagcgaccucgaccgccugucccagagccaccccauccugaacaugaucgacaccaagaaguccagccucaacaucuccggcuacaacuucagccugggggccgccgugaaggccggcgcgugcaugcuggacggcgggaacaugcucgagaccaucaaggugagcccccagaccauggacggcauccucaaguccauccugaaggucaagaagucccuggggauguucgugagcgacacgccgggcgagcggaaccccuacgagaacauccuguacaagaucugccuguccggggacggcuggcccuacaucgccagccgcaccuccaucgugggccgggccugggagaacaccgucguggaccucgagcaggacaacaagccccagaagaucgggaacggcgggagcaacaagucccugcagagcgccggcuucgccgcggggcugaccuacucccagcucaugacgcugaaggacuucaagugcuucaaccugaucccgaacgccaagaccuggauggacaucgagggccgccccgaggaccccguggagaucgcccuguaccagcccagcuccggcugcuacguccacuucuuccgggagccgaccgaccucaagcaguucaagcaggacgccaaguacagccacgggaucgacgugaccgaccuguucgccgcgcagcccggccugacgagcgccgucaucgaggcccucccccgcaacauggugaucacgugccagggguccgaggacauccggaagcugcuggagagccagggccgccgcgacaucaagcucaucgacaucacccuguccaaggccgacagccggaaguucgagaacgccgugugggaccaguucaaggaccugugccacaugcacaccggggucgugguggagaagaagaagcgcggcggcaaggaggagaucacgccccacugcgcgcucauggacugcaucauguucgacgccgccgucuccgggggccuggacgccaaggugcugcgggugguccucccgcgcgacaugguguuccggaccagcacccccaaggugguccugugaggacuaguuauaagacugacuagcccgaugggccucccaacgggcccuccuccccuccuugcaccgagauuaauaaaaaaaaaaaaaaaaaaaaaaaaaaaaaaaaaaaaaaaaaaaaaaaaaaaaaaaaaaaaaaaaaaaaaaaaaaaaaaaaaaaaaaaaaaaaaaaaaaaa

SEQ ID NO: 17870 - RNA, 1899 nt, Artificial Sequence
  mRNA product Design i-3 (A100) comprising derived and/or modified sequence from LASV(AV;Clade V)__CCA30315__NP (opt1)
aggagaaagcuuaccaugagcgccuccaaggaggugaaguccuuccuguggacccagagccuccgccgggagcugagcggcuacugcuccaacaucaagcugcaggucgugaaggacgcccaggcgcuccugcacgggcuggacuucagcgagguguccaacguccagcgccucaugcggaagcagcgccgggacgacagcgaccugaagcgccugcgggaccucaaccaggccgugaacaaccugguggagcugaaguccacccagcagaaguccguccuccgcgugggcacgcugagcagcgacgaccugcucacccuggccgccgaccuggagaagcucaaguccaaggugacccggaccgagcgcccccugagcuccggggucuacaugggcaaccugagcucccagcagcucgaccagcggcgcgcccugcugaaccucaucgggaugacgaacggcagccagggcucccaggcggggcgggacggcguggugcgcgucugggacgugaagaacgccgagcugcugaacaaccaguucgggaccaugccgagccucacccuggccugccugaccaagcagggccagguggaccucaacgacgucgugcaggcccugacggaccuggggcucaucuacaccgcgaaguaccccaacaccagcgaccuggaccggcugacccagucccaccccauccucaacaugaucgacacgaagaaguccagccugaacaucagcggcuacaacuucucccugggcgccgccgugaaggccggggccugcaugcucgacggcgggaacaugcuggagaccaucaaggucagcccccaguccauggacggcauccucaagagcauccugaaggugaagcgcgcgcugggcauguucguguccgacaccccgggggagcggaaccccuacgagaacauccuguacaagaucugccucagcggcgacggguggcccuacaucgccucccgcaccagcaucgucggccgggccugggagaacacggugguggaccuggagaccgacgggaagccccagaagaucggcuccggcaacagcaacaagucccugcagagcgccggguucuccgccggccucaccuacagccagcugaugacccugaaggacgcgaugcugcagcucgacccgaacgccaagacguggauggacaucgaggggcgccccgaggaccccgucgagguggcccuguaccagcccaucuccggcugcuacauccacuucuuccgggagccgaccgaccugaagcaguucaagcaggacgccaaguacagccacgggaucgacaucgccgaccucuucgcggcccagcccggccugaccagcgccgucaucgaggcccugccccgcaacauggugaucacgugccagggcuccgaggacaucaagaagcuccuggagagccaggggcgcaaggacaucaagcugaucgacaucgcccucuccaagaucgacagccggaaguucgagaacgcggugugggaccaguacaaggaccugugccacaugcacaccggcgucgugguggagaagaagaagcgcgggggcaaggaggagaucaccccgcacugcgcccugauggacugcaucauguucgacgccgccgucuccgggggccucaacacccuggugcugcgggcggugcucccccgcgacauggucuuccggaccagcacgccccgcguggugcugugaggacuaguuauaagacugacuagcccgaugggccucccaacgggcccuccuccccuccuugcaccgagauuaauaaaaaaaaaaaaaaaaaaaaaaaaaaaaaaaaaaaaaaaaaaaaaaaaaaaaaaaaaaaaaaaaaaaaaaaaaaaaaaaaaaaaaaaaaaaaaaaaaaaa

SEQ ID NO: 17871 - RNA, 1899 nt, Artificial Sequence
  mRNA product Design i-3 (A100) comprising derived and/or modified sequence from LASV(Togo/2016/7082;Clade VI)__AMR44578__NP (opt1)
aggagaaagcuuaccaugagcaacuccaaggaggugaaguccuuccuguggacccagagccuccgccgggagcugagcggcuacugcuccaacaucaagcugcaggucgugaaggacgcccaggcccuccugcacgggcuggacuucagcgagguguccaacguccagcgccucaugcggaagcagaagcgcgacgacggcgaccugaagcggcugcgcgaccucaaccaggcggugaacaaccugguggagcucaagagcguccagcagaaguccauccugcggguggggacccugaccagcgacgaccugcucacccuggccgccgaccuggagaagcucaaguccaaggugacccgcaccgagcggccccugagcuccggcgucuacauggggaaccugagcucccagcagcucgaccagcgccgggcccugcugagcaugaucggcauguccggcgggaaccagaacagccagccgaagggcgacgggguggugcgcgucugggacgugaagaacgccgaccuccugaacaaccaguucggcacgaugcccucccugacccucgcgugccugaccaagcagggccagguggaccugaacgacgccguccaggcccucaccgaccuggggcugaucuacacggccaaguaccccaacagcagcgaccucgaccggcugucccagagccaccccauccugaacaugaucgacaccaagaaguccagccucaacaucuccggcuacaacuucagccugggggcggccaucaagaccggcgccugcaugcuggacgggggcaacaugcucgagaccaucaaggugacgccgcagaccauggacggcauccugaaguccauccugaaggugaagcgcagccucgggauguucaucuccgacacccccggcgagcggaaccccuacgagaacauccuguacaagaucugccugagcggggacggcuggcccuacaucgccucccgcaccgccaucaucgggcgggcgugggagaacacggucguggaccucgagagcgacuccaagccgcagaagaucggcagcaacggcuccaacaagagccugcaguccgccggguucgcccccggccugaccuacagccagcucaugacccugaaggacuccaugcugcagcuggaccccaacgccaagaccuggaucgacaucgaggggcgccccgaggacccgguggaggucgcccucuuccagcccaucagcggcugcuacauccacuucuuccgggagcccacggaccugaagcaguucaagcaggacgcgaaguacagccacgggaucgacgugaccgaccuguucgccgcccagcccggccucaccuccgccgugaucgaggcccugccgcgcaacaugguccugaccugccagggcagcgacgacaucaagaagcuccuggacucccaggggcggcgcgacaucaagcugaucgacgugagccucaacaagaucgacucccgcaaguucgagaacgcggucugggaccaguacaaggaccugugccacaugcacacgggcgugguggucgagaagaagaagaagggcgggaaggaggagaucacgccccacugcgcccugcucgacugcaucauguucgacgccgccgugagcgggggccugaacgccaccgugcugcgggcgguccucccccgcgacaugguguuccggaccuccagccccaaggugguccugugaggacuaguuauaagacugacuagcccgaugggccucccaacgggcccuccuccccuccuugcaccgagauuaauaaaaaaaaaaaaaaaaaaaaaaaaaaaaaaaaaaaaaaaaaaaaaaaaaaaaaaaaaaaaaaaaaaaaaaaaaaaaaaaaaaaaaaaaaaaaaaaaaaaa

SEQ ID NO: 17872 - RNA, 1899 nt, Artificial Sequence
  mRNA product Design i-3 (A100) comprising derived and/or modified sequence from LASV(KAK-428;Clade n.d. (VII))__ANH09741__NP (opt1)
aggagaaagcuuaccaugagcaacuccaaggaggugaaguccuuccuguggacccagagccuccgccgggagcugagcggcuacugcaccaacaucaagcugcaggucgugaaggacgcccaggcccuccugcacgggcuggacuucuccgaggugagcaacguccagcgccucaugcggaagcagaagcgcgacgacaacgaccugaagcggcugcgcgaccucaaccaggcggugaacaaccugguggagcugaaguccguccagcagaaguccgugcucaaggugggcacgcugaacagcgacgaccugcucacccuggccgccgaccuggagaagcucaagagcaaggucgugcggaccgagcgcccccuguccagcgggguguacaugggcaaccuguccagccagcagcucgaccagcggcgcgcccugcugaacaugaucgggauggccggcggcucccaggggaaccagccgagccgggacggcgucgugcgcgugugggacgucaagaacgcggaccuccugaacaaccaguucgggaccaugcccucccugacgcucgccugccugaccaagcagggccagguggaccugaacgacgugguccucgcccugaccgaccuggggcucaucuacaccgccaaguaccccaacagcuccgaccuggaccggcugagccagaaccaccccgugcucaacaugaucgacgugaacaagagcucccugaacaucagcggcuacaacuucucccugggcgcggccgucaaggccggggccugcaugcucgacggcgggaacaugcuggagacgaucaagaucagcccgcagaccguggacggcauccugaaguccauccucaaggugaagcgcgcccugggcauguucgucagcgacacccccggggagcggaaccccuacgagaacauccuguacaaggugugccucuccggcaacggguggcccuacaucgcgagccgcaccuccaucgucggccgggccugggagaacacggugguggaccuggagagcaacaagaaccagccgaaggucgggaacaacggcuccaacaagaugcugcagagcuccggcuucgccaccgggcucaccuacagccagcugaugacccugcgcgacuccaugcugcagcucgaccccacggccaagaccuggaucgacaucgagggccggcccgaggaccccguggagcuggcccuguuccagccgagcuccgggugcuacauccacuucuuccgcgagcccaccgaccucaagcaguucaagcaggacgcgaaguacagccacggcaucgacgugaacgaccuguucuccgcccagcccgggcugaccagcgccguccucgaggcccugccccggaacauggugcugacgugccagggcagcgacgacauccgcaagcuccuggacucccaggaccgcaaggacaucaagcugaucgacaucagccucuccaaggccgacgcgcggaaguucgagaacgacgugugggaccaguucaaggaccugugccacaugcacaccggcaucgucguggagaagaagaagaagggcgggaagcaggagaugaccccgcacugcgcccugcucgacugcaucauguucgacgccgccgugagcgggggccugaacguccccacccugcgcgccgugcuccccacggacaugguguuccggaccaucaccaccaaggucgugcugugaggacuaguuauaagacugacuagcccgaugggccucccaacgggcccuccuccccuccuugcaccgagauuaauaaaaaaaaaaaaaaaaaaaaaaaaaaaaaaaaaaaaaaaaaaaaaaaaaaaaaaaaaaaaaaaaaaaaaaaaaaaaaaaaaaaaaaaaaaaaaaaaaaaa

SEQ ID NO: 17873 - RNA, 1899 nt, Artificial Sequence; identical to SEQ ID NO: 17867
  mRNA product Design i-3 (A100) comprising derived and/or modified sequence from LASV(Pinneo-NIG-1969;Clade I)__AIT17837__NP (opt1)

SEQ ID NO: 17874 - RNA, 1899 nt, Artificial Sequence
  mRNA product Design i-3 (A100) comprising derived and/or modified sequence from LASV(ISTH0009-NIG-2011;Clade II)__AIT17405__NP (opt1)
aggagaaagcuuaccaugagcguguccaaggaggucaagagcuuccuguggacccagucccuccgccgggagcugagcggcuacugcuccaacaucaagcuccagguggugaaggacgcccaggcccugcugcacgggcuggacuucagcgaggucuccaacgugcagcgccucaugcggaagcagaagcgcgacgacagcgaccugaagcggcugcgcgaccucaaccaggcggugaacaaccuggucgagcugaaguccacccagcagaaguccauccuccgggugggcacccugaccagcgacgaccugcucacccuggccgccgaccuggagaagcucaagagcaaggugauccgcaccgagcggccccuguccagcggggucuacaugggcaaccuguccacgcagcagcucgagcagcgccgggcccugcugaacaugaucgggauggugggcggcgcccaggggacccagccgggccgcgacggggugguccgggugugggacgugaagaaccccgaccuccugaacaaccaguucggcaccaugcccagccugacccucgcgugccugacgaagcaggggcaggucgaccugaacgacgccgugcucgcccugaccgaccugggccucaucuacaccgccaaguaccccaacuccagcgaccuggaccgccugucccagagccacccgauccucaacaugguggacaucaagaaguccagccugaacaucagcggcuacaacuucucccugggggcggccgucaaggccggcgccugcaugcucgacgggggcaacaugcuggagaccaucaaggugacgccccagaccauggacggcauccucaagagcauccugaaggugaagcggucccuggggauguucgucagcgacacccccggcgagcgcaaccccuacgagaacauccuguacaagaucugccucuccggggacggcuggccguacaucgccagccggaccuccaucguggggcgcgcgugggagaacacgaccguggaccuggagagcgacggcaagccccagaaggucggcuccgccgggagcaacaagucccugcagagcgccggcuuccccaccgggcucaccuacucccagcugaugacgcugaaggacagcaugaugcagcuggaccccuccgccaagaccuggaucgacaucgagggccggccggaggaccccguggagaucgcccucuaccagcccaugagcgggugcuacauccacuucuuccgcgagcccaccgaccugaagcaguucaagcaggacgcgaaguacucccacggcaucgacgucgccgaccuguucccggcccagcccggccucaccagcgccgugaucgaggcccugccccggaacauggugcugacgugccaggggagcgacgacaucaagcgccuccuggacucccagggccgccgggacaucaagcugaucgacaucgcgcucagcaaggccgacucccgccgguucgagaacgccgucugggaccagugcaaggaccugugccacaugcacaccggggugguggucgagaagaagaagcgcggcgggaaggaggagaucacgccccacugcgcccugauggacugcaucauguacgacgccgcggugagcggcggccucaacaucccggugcugcgggccguccugccccgcgacaugguguuccggaccuccagccccaaggugguccucugaggacuaguuauaagacugacuagcccgaugggccucccaacgggcccuccuccccuccuugcaccgagauuaauaaaaaaaaaaaaaaaaaaaaaaaaaaaaaaaaaaaaaaaaaaaaaaaaaaaaaaaaaaaaaaaaaaaaaaaaaaaaaaaaaaaaaaaaaaaaaaaaaaaa

SEQ ID NO: 17875 - RNA, 1899 nt, Artificial Sequence
  mRNA product Design i-3 (A100) comprising derived and/or modified sequence from LASV(ISTH2010-NIG-2012;Clade II)__AIT17483__NP (opt1)
aggagaaagcuuaccaugagcgccuccaaggaggugaaguccuuccuguggacccagagccuccgccgggagcugagcggcuacugcuccaacaucaagcugcaggucgugaaggacgcccaggcgcuccugcacgggcuggacuucagcgagguguccaacguccagcgccucaugcggaagcagaagcgcgacgacagcgaccugaagcggcugcgcgaccucaaccaggccgugaacaaccugguggagcugaaguccacccagcagaaguccauccuccgggucggcacgcugaccagcgacgaccugcucacccuggccgccgaccuggagaagcucaagagcaaggugauccgcaccgagcggccccuguccagcgggguguacaugggcaaccuguccacgcagcagcucgagcagcgccgggcccugcugaaccucaucgggauggucggcggcgcgcaggggacccagccgggccgcgacgggguggugcgggucugggacgugaagaaccccgaccugcugaacaaccaguucggcaccaugcccagccucacccuggccugccugacgaagcagggccagguggaccucaacgacgccguccuggcccugaccgaccucgggcugaucuacaccgcgaaguaccccaacuccagcgaccuggaccgccucucccagagccacccgauccugaacaugguggacaccaagaaguccagccugaacaucagcggcuucaacuucucccucggggccgccgugaaggccggcgccugcaugcuggacgggggcaacaugcuggagacgaucaaggucacgccccagaccauggacggcauccucaagagcauccugaaggugaagaagucccuggggauguucgugagcgacacccccggcgagcggaaccccuacgagaacauccucuacaagaucugccuguccggggacggcuggccguacaucgcgagccgcaccuccaucgucgggcgggccugggagaacaccaccguggaccuggagagcgacggcaagccccacaaggugggcaccgccggguccaacaagagccuccaguccgccggcuuccccacggggcugaccuacagccagcugaugacccugaaggacuccaugaugcagcucgaccccagcgccaagaccuggaucgacaucgagggccgcccggaggaccccgucgagaucgcgcuguaccagcccauguccgggugcuacauccacuucuuccgggagcccacggaccugaagcaguucaagcaggacgccaaguacagccacggcaucgacguggccgaccucuucccggcccagcccggccugaccuccgccgucaucgaggcgcugccccgcaacauggugcugaccugccaggggagcgacgacaucaagcggcuccuggacagccagggccgccgcgacaucaagcucaucgacaucgcccuguccaaggccgacagccggcgcuucgagaacgccgugugggaccagugcaaggaccugugccacaugcacaccggggucgugguggagaagaagaagcggggcgggaaggaggagaucacgccccacugcgcccucauggacugcaucauguacgacgcggccgucuccggcggccugaacaucccggugcugcgcgccgugcucccccgggacauggucuuccgcaccagcucccccaagguggugcugugaggacuaguuauaagacugacuagcccgaugggccucccaacgggcccuccuccccuccuugcaccgagauuaauaaaaaaaaaaaaaaaaaaaaaaaaaaaaaaaaaaaaaaaaaaaaaaaaaaaaaaaaaaaaaaaaaaaaaaaaaaaaaaaaaaaaaaaaaaaaaaaaaaaa

SEQ ID NO: 17876 - RNA, 1899 nt, Artificial Sequence
  mRNA product Design i-3 (A100) comprising derived and/or modified sequence from LASV(Lassa virus/H.sapiens-wt/NGA/2015/ISTH_0543;Clade II)__AVO03640__NP (opt1)
aggagaaagcuuaccaugagcgccuccaaggaggugaaguccuuccuguggacccagagccuccgccgggagcugagcggcuacugcuccaacaucaagcugcaggucgugaaggacgcccaggcgcuccugcacgggcuggacuucagcgagguguccaacguccagcgccucaugcggaagcagaagcgcgacgacagcgaccugaagcggcugcgcgaccucaaccaggccgugaacaaccugguggagcugaaguccacccagcagaaguccauccuccgggucggcacgcugaccagcgacgaccugcucacccuggccgccgaccuggagaagcucaagagcaaggugauccgcaccgagcggccccuguccagcgggguguacaugggcaaccuguccacgcagcagcucgagcagcgccgggcccugcugaacaugaucgggauggucggcggcgcgcaggggacccagccgggccgcgacgggguggugcgggucugggacgugaagaaccccgaccuccugaacaaccaguucggcaccaugcccagccugacccucgccugccugacgaagcagggccagguggaccugaacgacgccguccucgcccugaccgaccuggggcucaucuacaccgcgaaguaccccaacuccagcgaccuggaccgccugucccagagccacccgauccucaacaugguggacaccaagaaguccagccugaacaucagcggcuacaacuucucccugggggccgccgugaaggccggcgccugcaugcucgacgggggcaacaugcuggagacgaucaaggucacgccccagaccauggacggcauccucaagagcauccugaaggugaagaagucccuggggauguucgugagcgacacccccggcgagcggaaccccuacgagaacauccuguacaagaucugccucuccggggacggcuggccguacaucgcgagccgcaccuccaucgucgggcgggccugggagaacaccaccguggaccuggagagcgacggcaagccccagaaggugggcuccgccgggagcaacaagucccugcagagcgccggcuuccccaccgggcucacguacucccagcugaugacccugaaggacagcaugaugcagcuggaccccuccgccaagaccuggaucgacaucgagggccgcccggaggaccccgucgagaucgcgcucuaccagcccaugagcgggugcuacauccacuucuuccgggagcccaccgaccugaagcaguucaagcaggacgccaaguacucccacggcaucgacguggccgaccuguucccggcccagcccggccucacgagcgccgucaucgaggcgcugccccgcaacauggugcugaccugccaggggagcgacgacaucaagcggcuccuggacucccagggccgcaaggacaucaagcugaucgacaucgcccucagcaaggccgacucccgccgguucgagaacgccgugugggaccagugcaaggaccugugccacaugcacaccggggucgugguggagaagaagaagcgcggcgggaaggaggagaucacgccccacugcgcccugauggacugcaucauguacgacgcggccgucagcggcggccucaacaucccggugcugcgggccgugcugccccgcgacauggucuuccggaccuccagccccaagguggugcucugaggacuaguuauaagacugacuagcccgaugggccucccaacgggcccuccuccccuccuugcaccgagauuaauaaaaaaaaaaaaaaaaaaaaaaaaaaaaaaaaaaaaaaaaaaaaaaaaaaaaaaaaaaaaaaaaaaaaaaaaaaaaaaaaaaaaaaaaaaaaaaaaaaaa

SEQ ID NO: 17877 - RNA, 1899 nt, Artificial Sequence
  mRNA product Design i-3 (A100) comprising derived and/or modified sequence from LASV(Lassa virus/H.sapiens-wt/NGA/2016/ISTH_0009;Clade II)__AVO03572__NP (opt1)
aggagaaagcuuaccaugagcgccuccaaggaggugaaguccuuccuguggacccagagccuccgccgggagcugagcggcuacugcuccaacaucaagcugcaggucgugaaggacgcccaggcgcuccugcacgggcuggacuucagcgagguguccaacguccagcgccucaugcggaagcagaagcgcgacgacagcgaccugaagcggcugcgcgaccucaaccaggccgugaacaaccugguggagcugaaguccacccagcagaaguccauccuccgggucggcacgcugaccagcgacgaccugcucacccuggccgccgaccuggagaagcucaagagcaaggugauccgcaccgagcggccccuguccagcgggguguacaugggcaaccuguccacgcagcagcucgagcagcgccgggcccugcugaacaugaucgggauggucggcggcgcgcaggggacccagccgggccgcgacgggguggugcgggucugggacgugaagaaccccgaccuccugaacaaccaguucggcaccaugcccagccugacccucgccugccugacgaagcagggccagguggaccugaacgacgccguccucgcccugaccgaccuggggcucaucuacaccgcgaaguaccccaacuccagcgaccuggaccgccugucccagagccacccgauccucaacaugguggacaccaagaaguccagccugaacaucagcggcuacaacuucucccugggggccgccgugaaggccggcgccugcaugcucgacgggggcaacaugcuggagacgaucaaggucacgccccagaccauggacggcauccucaagagcauccugaaggugaagaagucccuggggauguucgugagcgacacccccggcgagcggaaccccuacgagaacauccuguacaagaucugccucuccggggacggcuggccguacaucgcgagccgcaccuccaucgucgggcgggccugggagaacaccaccguggaccuggagagcgacggcaagccccagaaggugggcuccgccgggagcaacaagucccugcagagcgccggcuuccccaccgggcucacguacucccagcugaugacccugaaggacagcaugaugcagcuggaccccuccgccaagaccuggaucgacaucgagggccgcccggaggaccccgucgagaucgcgcucuaccagcccaugagcgggugcuacauccacuucuuccgggagcccaccgaccugaagcaguucaagcaggacgccaaguacucccacggcaucgacguggccgaccuguucccggcccagcccggccucacgagcgccgucaucgaggcgcugccccgcaacauggugcugaccugccaggggagcgacgacaucaagcggcuccuggacucccagggccgccgcgacaucaagcugaucgacaucgcccucagcaaggccgacucccggcgcuucgagaacgccgugugggaccagugcaaggaccugugccacaugcacaccggggucgugguggagaagaagaagcggggcgggaaggaggagaucacgccccacugcgcccugauggacugcaucauguacgacgcggccgucagcggcggccucaacaucccggugcugcgcgccgugcugccccgggacauggucuuccgcaccuccagccccaagguggugcucugaggacuaguuauaagacugacuagcccgaugggccucccaacgggcccuccuccccuccuugcaccgagauuaauaaaaaaaaaaaaaaaaaaaaaaaaaaaaaaaaaaaaaaaaaaaaaaaaaaaaaaaaaaaaaaaaaaaaaaaaaaaaaaaaaaaaaaaaaaaaaaaaaaaa

SEQ ID NO: 17878 - RNA, 1899 nt, Artificial Sequence
  mRNA product Design i-3 (A100) comprising derived and/or modified sequence from LASV(Lassa virus/H.sapiens-wt/NGA/2016/ISTH_0017;Clade II)__AVO03568__NP (opt1)
aggagaaagcuuaccaugagcgccuccaaggaggugaaguccuuccuguggacccagagccuccgccgggagcugagcggcuacugcuccagcaucaagcugcaggucgugaaggacgcccaggcgcuccugcacgggcuggacuucuccgaggugagcaacguccagcgccucaugcggaagcagaagcgcgacgacuccgaccugaagcggcugcgcgaccucaaccaggccgugaacaaccugguggagcucaagagcacccagcagaaguccauccugcgggucggcacgcugaccagcgacgaccugcucacccuggccgccgaccuggagaagcucaaguccaaggugauccgcaccgagcggccccugagcuccgggguguacaugggcaaccugagcacgcagcagcucgagcagcgccgggcccugcugaacaugaucgggauggcgggcggcgcccaggggacccagccgggccgcgacggggucgugcgggugugggacgucaagaaccccgaccuccugaacaaccaguucggcaccaugcccucccugacccucgccugccugacgaagcagggccagguggaccugaacgacgccgugcucgcgcugaccgaccuggggcucaucuacaccgccaaguaccccaacagcuccgaccuggaccgccugagccagagccacccgauccucaacauggucgacaccaagaaguccagccugaacaucuccggcuacaacuucagccugggggccgccgugaaggccggcgcgugcaugcucgacgggggcaacaugcuggagacgaucaaggugacgccccagaccauggacggcauccugaaguccauccucaaggucaagcggagccuggggauguucguguccgacgcccccggcgagcgcaaccccuacgagaacauccuguacaagaucugccucagcggggacggcuggccguacaucgccucccggaccagcaucguggggcgcgccugggagaacaccaccgucgaccuggaguccgacggcaagccccagaaggugggcgccaccgggagcaacaagucccugcagagcgcgggcuuccccaccgggcucacguacucccagcugaugacccugaaggacagcaugaugcagcuggaccccuccgccaagaccuggaucgacaucgagggccggccggaggaccccguggaggucgcccucuaccagcccgugagcgggugcuacauccacuucuuccgcgagcccaccgaccugaagcaguucaagcaggacgccaaguacucccacggcaucgacgucgccgaccuguucccggcgcagcccggccucacgagcgccgugaucgaggcccugccccggaacauggugcugaccugccaggggagcgacgacaucaagaagcuccuggacucccagggccgcaaggacaucaagcugaucgacaucgcccucagcaaggccgacucccgccgguucgagaacgcggucugggaccagugcaaggaccugugccacaugcacaccggggugguggucgagaagaagaagcgcggcgggaaggaggagaucacgccccacugcgcccugauggacugcaucauguacgacgccgccgugagcggcggccucaacaucccggugcugcgggcgguccugccccgcgacaugguguuccggaccuccagccccaaggugguccucugaggacuaguuauaagacugacuagcccgaugggccucccaacgggcccuccuccccuccuugcaccgagauuaauaaaaaaaaaaaaaaaaaaaaaaaaaaaaaaaaaaaaaaaaaaaaaaaaaaaaaaaaaaaaaaaaaaaaaaaaaaaaaaaaaaaaaaaaaaaaaaaaaaaa

SEQ ID NO: 17879 - RNA, 1899 nt, Artificial Sequence
  mRNA product Design i-3 (A100) comprising derived and/or modified sequence from LASV(Lassa virus/H.sapiens-wt/NGA/2018/ISTH_0959;Clade II)__AVV65100__NP (opt1)
aggagaaagcuuaccaugagcgccuccaaggaggugaaguccuuccuguggacccagagccuccgccgggagcugagcggcuacugcuccaacaucaagcugcaggucgugaaggacgcccaggcgcuccugcacgggcuggacuucagcgagguguccaacguccagcgccucaugcggaagcagaagcgcgacgacagcgaccugaagcggcugcgcgaccucaaccaggccgugaacaaccugguggagcugaaguccacccagcagaaguccauccuccgggucggcacccugaccagcgacgaccugcucacccuggccgccgaccuggagaagcucaagagcaaggugauccgcaccgagcggccccuguccagcgggguguacaugggcaaccuguccacgcagcagcucgagcagcgccgggcccugcugaaccucaucgggauggucggcggcgcgcaggggacccagccgggccgcgacgggguggugcgggucugggacgugaagaaccccgaccugcugaacaaccaguucggcaccaugcccagccucacccuggccugccugacgaagcagggccagguggaccucaacgacgucgugcuggcccugaccgaccucgggcugaucuacaccgccaaguaccccaacuccagcgaccuggaccgccucucccagagccacccgauccugaacaugguggacaccaagaaguccagccugaacaucagcggcuucaacuucucccucggggcggccgucaaggccggcgccugcaugcuggacgggggcaacaugcuggagacgaucaaggugacgccccagaccauggacggcauccucaagagcauccugaaggugaagaagucccuggggauguucgucagcgacacccccggcgagcggaaccccuacgagaacauccucuacaagaucugccuguccggggacggcuggccguacaucgccagccgcaccuccaucguggggcgggcgugggagaacaccaccguggaccuggagagcgacggcaagccccacaaggucggcaccgccggguccaacaagagccuccaguccgccggcuuccccacggggcugaccuacagccagcugaugacccugaaggacuccaugaugcagcucgaccccagcgccaagaccuggaucgacaucgagggccgcccggaggaccccguggagaucgcccuguaccagcccauguccgggugcuacauccacuucuuccgggagcccacggaccugaagcaguucaagcaggacgcgaaguacagccacggcaucgacgucgccgaccucuucccggcccagcccggccugaccuccgccgugaucgaggcccugccccgcaacauggugcugaccugccaggggagcgacgacaucaagcggcuccuggacagccagggccgcaaggacaucaagcucaucgacaucgcgcuguccaagaccgacagccgccgguucgagaacgccgucugggaccagugcaaggaccugugccacaugcacacgggggugguggucgagaagaagaagcgcggcgggaaggaggagaucacgccccacugcgcccucauggacugcaucauguacgacgccgccguguccggcggccugaacaucccggugcugcgggcgguccucccccgcgacaugguguuccggaccagcucccccaaggugguccugugaggacuaguuauaagacugacuagcccgaugggccucccaacgggcccuccuccccuccuugcaccgagauuaauaaaaaaaaaaaaaaaaaaaaaaaaaaaaaaaaaaaaaaaaaaaaaaaaaaaaaaaaaaaaaaaaaaaaaaaaaaaaaaaaaaaaaaaaaaaaaaaaaaaa

SEQ ID NO: 17880 - RNA, 1899 nt, Artificial Sequence
  mRNA product Design i-3 (A100) comprising derived and/or modified sequence from LASV(LASV003-NIG-2008;Clade II)__AIT17581__NP (opt1)
aggagaaagcuuaccaugagcgccuccaaggaggugaaguccuuccuguggacccagagccuccgccgggagcugagcggcuacugcuccagcaucaagcugcaggucgugaaggacgcccaggcgcuccugcacgggcuggacuucuccgaggugagcaacguccagcgccucaugcggaagcagaagcgcgacgacuccgaccugaagcggcugcgcgaccucaaccaggccgugaacaaccugguggagcucaagagcacccagcagaaguccguccugcgggugggcacccugaccagcgacgaccugcucacccuggccgccgaccuggagaagcucaaguccaaggugauccgcaccgagcggccccugagcuccggggucuacaugggcaaccugagcgcccagcagcucgagcagcgccggacgcugcugaacaugaucgggauggugggcggcgcgcaggggacccagccgggccgcgacggggugguccgggugugggacgugaagaaccccgaccuccugaacaaccaguucggcaccaugcccucccugacccucgccugccugacgaagcaggggcaggucgaccugaacgacguggugcucgcccugaccgaccugggccucaucuacaccgccaaguaccccaacagcuccgaccuggaccgccugagccagagccacccgauccucuccauggucgacaccaagaaguccagccugaacaucagcggcuacaacuucucccugggggcggccgugaaggccggcgccugcaugcucgacgggggcaacaugcuggagacgaucaaggugacgccccagaccauggacggcauccucaagagcauccugaaggucaagaagucccuggggauguucgugagcgacacccccggcgagcggaaccccuacgagaacauccuguacaagaucugccucuccggggacggcuggccguacaucgccagccgcaccuccaucguggggcgggcgugggagaacaccaccgucgaccuggagagcgacggcaagccccagaaggugggcaccgccggguccaacaagagccugcaguccgccggcuuccccacggggcucaccuacagccagcugaugacccugaaggacuccaugaugcagcuggaccccagcgccaagaccuggaucgacaucgagggccgcccggaggaccccgucgagaucgcccucuaccagcccauguccgggugcuacauccacuucuuccgggagcccacggaccugaagcaguucaagcaggacgcgaaguacagccacggcaucgacgugaccgaccuguucccggcccagcccggccucaccagcgccgugaucgaggcccugccccgcaacaugguccugaccugccagggguccgacgacaucaagcggcuccuggacagccagggccgccgcgacaucaagcugaucgacaucgcccucuccaaggcggacagccggcgcuucgagaacgccgugugggaccagugcaaggaccugugccacaugcacacggggguggucguggagaagaagaagcggggcgggaaggaggagaucacgccccacugcgcccugauggacugcaucauguacgacgccgccguguccggcggccucaacaucccgguccugcgcgcggugcugccccgggacaugguguuccgcaccagcucccccaaggucgugcucugaggacuaguuauaagacugacuagcccgaugggccucccaacgggcccuccuccccuccuugcaccgagauuaauaaaaaaaaaaaaaaaaaaaaaaaaaaaaaaaaaaaaaaaaaaaaaaaaaaaaaaaaaaaaaaaaaaaaaaaaaaaaaaaaaaaaaaaaaaaaaaaaaaaa

SEQ ID NO: 17881 - RNA, 1899 nt, Artificial Sequence
  mRNA product Design i-3 (A100) comprising derived and/or modified sequence from LASV(LASV035-NIG-2009;Clade II)__AIT17589__NP (opt1)
aggagaaagcuuaccaugagcgccuccaaggaggugaaguccuuccuguggacccagagccuccgccgggagcugagcggcuacugcuccagcaucaagcugcaggucgugaaggacgcccaggcgcuccugcacgggcuggacuucuccgaggugagcaacguccagcgccucaugcggaagcagaagcgcgacgacuccgaccugaagcggcugcgcgaccucaaccaggccgugaacaaccugguggagcucaagagcacccagcagaaguccauccugcgggucggcacgcugaccagcgacgaccugcucacccuggccgccgaccuggagaagcucaaguccaaggugauccgcaccgagcggccccugagcuccgggguguacaugggcaaccugagcgcccagcagcucgagcagcgccgggcgcugcugaacaugaucgggauggucggcggcgcccaggggacgcagccgggccgcgacgggguggugcgggucugggacgugaagaaccccgaccuccugaacaaccaguucggcaccaugcccucccugacccucgccugccugaccaagcagggccagguggaccugaacgacgccguccucgcgcugacggaccuggggcucaucuacaccgccaaguaccccaacagcuccgaccuggaccgccugagccagagccacccgauccucaacaugguggacaccaagaaguccagccugaacaucuccggcuacaacuucagccugggggccgccgugaaggccggcgcgugcaugcucgacgggggcaacaugcuggagaccaucaaggucacgccccagaccauggacggcauccugaaguccauccucaaggugaagcggagccuggggauguucguguccgacacccccggcgagcgcaaccccuacgagaacauccuguacaagaucugccucagcggggacggcuggccguacaucgccucccggaccagcaucgucgggcgcgccugggagaacacgaccguggaccuggaguccgacggcaagccccagaaggugggcaccaccgggagcaacaagucccugcagagcgccggcuuccccacggggcucaccuacucccagcugaugacccugaaggacagcaugaugcagcuggaccccuccgccaagaccuggaucgacaucgagggccggccggaggaccccgucgagaucgcgcucuaccagcccaugagcgggugcuacauccacuucuuccgcgagcccacggaccugaagcaguucaagcaggacgccaaguacucccacggcaucgacguggccgaccuguucccggcccagcccggccucaccagcgccgucaucgaggcgcugccccggaacauggugcugaccugccaggggagcgacgacaucaagaagcuccuggacucccagggccgccgcgacaucaagcugaucgacaucgcccucagcaaggccgacucccggaaguucgagaacgccgugugggaccagugcaaggaccugugccacaugcacaccggggucgugguggagaagaagaagcgcggcgggaaggaggagaucacgccccacugcgcccugauggacugcaucauguacgacgcggccgucagcggcggccucaacaucccggugcugcgggccgugcugccccgcgacauggucuuccggaccuccagccccaagguggugcucugaggacuaguuauaagacugacuagcccgaugggccucccaacgggcccuccuccccuccuugcaccgagauuaauaaaaaaaaaaaaaaaaaaaaaaaaaaaaaaaaaaaaaaaaaaaaaaaaaaaaaaaaaaaaaaaaaaaaaaaaaaaaaaaaaaaaaaaaaaaaaaaaaaaa

SEQ ID NO: 17882 - RNA, 1899 nt, Artificial Sequence
  mRNA product Design i-3 (A100) comprising derived and/or modified sequence from LASV(LASV1000-NIG-2009;Clade II)__AIT17783__NP (opt1)
aggagaaagcuuaccaugagcgccuccaaggaggugaaguccuuccuguggacccagagccuccgccgggagcugagcggcuacugcuccaacaucaagcugcaggucgugaaggacgcccaggcgcuccugcacgggcuggacuucagcgagguguccaacguccagcgccucaugcggaagcagaagcgcgacgacagcgaccugaagcggcugcgcgaccucaaccaggccgugaacaaccugguggagcugaaguccacccagcagaaguccauccuccgggucggcacgcugaccagcgacgaccugcucacccuggccgccgaccuggagaagcucaagagcaaggugauccgcaccgagcggccccuguccagcgggguguacaugggcaaccuguccacgcagcagcucgagcagcgccgggcccugcugaacaugaucgggauggucggcggcgcgcaggggacccagccgggccgcgacgggguggugcgggucugggacgugaagaaccccgaccuccugaacaaccaguucggcaccaugcccagccugacccucgccugccugacgaagcagggccagguggaccugaacgacgucgugcucgcccugaccgaccuggggcucaucuacaccgccaaguaccccaacuccagcgaccuggaccgccugucccagagccacccgauccucaacaugguggacaccaagaaguccagccugaacaucagcggcuacaacuucucccugggggcggccgucaaggccggcgccugcaugcucgacgggggcaacaugcuggagacgaucaaggugacgccccagaccauggacggcauccucaagagcauccugaaggugaagaagucccuggggauguucgucagcgacacccccggcgagcggaaccccuacgagaacauccuguacaagaucugccucuccggggacggcuggccguacaucgccagccgcaccuccaucguggggcgggcgugggagaacaccaccguggaccuggagagcgacggcaagccccagaaggucggcaccgccggguccaacaagagccugcaguccgccggcuuccccacggggcucaccuacagccagcugaugacccugaaggacuccaugaugcagcuggaccccagcgccaagaccuggaucgacaucgagggccgcccggaggaccccguggagaucgcccucuaccagcccgucuccgggugcuacauccacuucuuccgggagcccacggaccugaagcaguucaagcaggacgcgaaguacagccacggcaucgacguggccgaccuguucccggcccagcccggccucaccuccgccgugaucgaggcccugccccgcaacaugguccugaccugccaggggagcgacgacaucaagcggcuccuggacagccagggccgccgcgacaucaagcugaucgacaucgcgcucuccaaggccgacagccggcgcuucgagaacgccgugugggaccagugcaaggaccugugccacaugcacaccgggguggucguggagaagaagaagcggggcgggaaggaggagaucacgccccacugcgcccugauggacugcaucauguacgacgccgcgguguccggcggccucaacaucccgguccugcgcgccgugcugccccgggacaugguguuccgcaccagcucccccaaggucgugcucugaggacuaguuauaagacugacuagcccgaugggccucccaacgggcccuccuccccuccuugcaccgagauuaauaaaaaaaaaaaaaaaaaaaaaaaaaaaaaaaaaaaaaaaaaaaaaaaaaaaaaaaaaaaaaaaaaaaaaaaaaaaaaaaaaaaaaaaaaaaaaaaaaaaa

SEQ ID NO: 17883 - RNA, 1899 nt, Artificial Sequence
  mRNA product Design i-3 (A100) comprising derived and/or modified sequence from LASV(LASV221-NIG-2010;Clade II)__AIT17625__NP (opt1)
aggagaaagcuuaccaugagcgccuccaaggaggugaaguccuuccuguggacccagagccuccgccgggagcugagcggcuacugcuccagcaucaagcugcaggucgugaaggacgcccaggcgcuccugcacgggcuggacuucuccgaggugagcaacguccagcgccucaugcggaagcagcgccgggacgacuccgaccugaagcgccugcgggaccucaaccaggccgugaacaaccugguggagcucaagagcacccagcagaaguccauccugcgcgucggcacgcugaccagcgacgaccugcucacccuggccgccgaccuggagaagcucaaguccaaggugauccggaccgagcgcccccugagcuccgggguguacaugggcaaccugagcacgcagcagcucgagcagcggcgcgcccugcugaacaugaucgggauggucggcggcgcgcaggggacccagccgggccgggacgggguggugcgcgucugggacgugaagaaccccgaccuccugaacaaccaguucggcaccaugcccucccugacccucgccugccugacgaagcagggccagguggaccugaacgacgccguccucgcccugaccgaccuggggcucaucuacaccgcgaaguaccccaacagcuccgaccuggaccggcugagccagagccacccgauccucaacaugguggacaccaagaaguccagccugaacaucuccggcuacaacuucagccugggggccgccgugaaggccggcgccugcaugcucgacgggggcaacaugcuggagacgaucaaggucacgccccagaccguggacggcauccugaaguccauccucaaggugaagcgcagccuggggauguucgucuccgacacccccggcgagcggaaccccuacgagaacauccuguacaagaucugccucagcggggacggcuggccguacaucgcgucccgcaccagcaucguggggcgggccugggagaacaccaccguggaccuggaguccgacggcaagccccagaaggucggcaccgccgggagcaacaagucccugcagagcgccggcuuccccacggggcucaccuacucccagcugaugacccugaaggacagcaugaugcagcuggaccccuccgccaagaccuggaucgacaucgagggccgcccggaggaccccguggagaucgcgcucuaccagcccaugagcgggugcuacauccacuucuuccgggagcccacggaccugaagcaguucaagcaggacgccaaguacucccacggcaucgacgucgccgaccuguucccggcccagcccggccucaccagcgccgugaucgaggcgcugccccgcaacauggugcugaccugccaggggagcgacgacaucaagcgccuccuggacucccagggccggcgcgacaucaagcugaucgacaucgcccucagcaaggccgacucccggaaguucgagaacgccgucugggaccagugcaaggaccugugccacaugcacaccggggugguggucgagaagaagaagcgcggcgggaaggaggagaucacgccccacugcgcccugauggacugcaucauguacgacgcggccgugagcggcggccucaacaucccggugcugcgggccguccugccccgcgacaugguguuccggaccuccagccccaaggugguccucugaggacuaguuauaagacugacuagcccgaugggccucccaacgggcccuccuccccuccuugcaccgagauuaauaaaaaaaaaaaaaaaaaaaaaaaaaaaaaaaaaaaaaaaaaaaaaaaaaaaaaaaaaaaaaaaaaaaaaaaaaaaaaaaaaaaaaaaaaaaaaaaaaaaa

SEQ ID NO: 17884 - RNA, 1899 nt, Artificial Sequence
  mRNA product Design i-3 (A100) comprising derived and/or modified sequence from LASV(LASV237-NIG-2010;Clade II)__AIT17639__NP (opt1)
aggagaaagcuuaccaugagcgccuccaaggaggugaaguccuuccuguggacccagagccuccgccgggagcugagcggcuacugcuccaacaucaagcugcaggucgugaaggacgcccaggcgcuccugcacgggcuggacuucagcgagguguccaacguccagcgccucaugcggaagcagaagcgcgacgacagcgaccugaagcggcugcgcgaccucaaccaggccgugaacaaccugguggagcugaaguccacccagcagaaguccauccuccgggucggcacccugaccagcgacgaccugcucacccuggccgccgaccuggagaagcucaagagcaaggugauccgcaccgagcggccccuguccagcgggguguacaugggcaaccuguccacgcagcagcucgagcagcgccgggcccugcugaacaugaucgggauggucggcggcgcgcaggggacccagccgggccgcgacgggguggugcgggucugggacgugaagaaccccgaccuccugaacaaccaguucggcaccaugcccagccugacccucgccugccugacgaagcagggccagguggaccugaacgacgccguccucgcccugaccgaccuggggcucaucuacaccgcgaaguaccccaacuccagcgaccuggaccgccugucccagagccacccgauccucaacaugguggacaucaagaaguccagccugaacaucagcggcuacaacuucucccugggggccgccgugaaggccggcgccugcaugcucgacgggggcaacaugcuggagaccaucaaggucacgccccagaccauggacggcauccucaagagcauccugaaggugaagcggucccuggggauguucgugagcgacacccccggcgagcgcaaccccuacgagaacauccuguacaagaucugccucuccggggacggcuggccguacaucgcgagccggaccuccaucgucgggcgcgccugggagaacacgaccguggaccuggagagcgacggcaagccccagaaggugggcuccgccgggagcaacaagucccugcagagcgccggcuuccccaccgggcucaccuacucccagcugaugacgcugaaggacagcaugaugcagcuggaccccuccgccaagaccuggaucgacaucgagggccggccggaggaccccgucgagaucgcgcucuaccagcccaugagcgggugcuacauccacuucuuccgcgagcccaccgaccugaagcaguucaagcaggacgccaaguacucccacggcaucgacguggccgaccuguucccggcccagcccggccucaccagcgccgucaucgaggcgcugccccggaacauggugcugacgugccaggggagcgacgacaucaagcgccuccuggacucccagggccgccgggacaucaagcugaucgacaucgcccucagcaaggccgacucccgccgguucgagaacgccgugugggaccagugcaaggaccugugccacaugcacaccggggucgugguggagaagaagaagcgcggcgggaaggaggagaucacgccccacugcgcccugauggacugcaucauguacgacgcggccgucagcggcggccucaacaucccggugcugcgggccgugcugccccgcgacauggucuuccggaccuccagccccaagguggugcucugaggacuaguuauaagacugacuagcccgaugggccucccaacgggcccuccuccccuccuugcaccgagauuaauaaaaaaaaaaaaaaaaaaaaaaaaaaaaaaaaaaaaaaaaaaaaaaaaaaaaaaaaaaaaaaaaaaaaaaaaaaaaaaaaaaaaaaaaaaaaaaaaaaaa

SEQ ID NO: 17885 - RNA, 1899 nt, Artificial Sequence
  mRNA product Design i-3 (A100) comprising derived and/or modified sequence from LASV(LASV253-NIG-2011;Clade II)__AIT17671__NP (opt1)
aggagaaagcuuaccaugagcgccuccaaggaggugaaguccuuccuguggacccagagccuccgccgggagcugagcggcuacugcuccagcaucaagcugcaggucgugaaggacgcccaggcgcuccugcacgggcuggacuucuccgaggugagcaacguccagcgccucaugcggaagcagaagcgcgacgacuccgaccugaagcggcugcgcgaccucaaccaggccgugaacaaccugguggagcucaagagcacccagcagaaguccguccugcgggugggcacccugaccagcgacgaccugcucacccuggccgccgaccuggagaagcucaaguccaaggugauccgcaccgagcggccccugagcuccggggucuacaugggcaaccugagcacgcagcagcucgagcagcgccgggcccugcugaacaugaucgggauggugggcggcgcgcaggggacccagccgggccgcgacggggugguccgggugugggacgugaagaaccccgaccuccugaacaaccaguucggcaccaugcccucccugacccucgccugccugacgaagcaggggcaggucgaccugaacgacguggugcucgcccugaccgaccugggccucaucuacaccgccaaguaccccaacagcuccgaccuggaccgccugagccagagccacccgauccucaacauggucgacaccaagaaguccagccugaacaucuccggcuacaacuucagccugggggcggccgugaaggccggcgccugcaugcucgacgggggcaacaugcuggagacgaucaaggugacgccccagaccauggacggcauccugaaguccauccucaaggucaagaagucccuggggauguucgugagcgacacccccggcgagcggaaccccuacgagaacauccuguacaagaucugccucagcggggacggcuggccguacaucgccucccgcaccagcaucguggggcgggcgugggagaacaccaccgucgaccuggaguccgacggcaagccccagaaggugggcaccgccgggagcaacaagucccugcagagcgccggcuuccccacggggcucaccuacucccagcugaugacccugaaggacagcaugaugcagcuggaccccuccgccaagaccuggaucgacaucgagggccgcccggaggaccccgucgagaucgcccucuaccagcccaugagcgggugcuacauccacuucuuccgggagcccacggaccugaagcaguucaagcaggacgcgaaguacucccacggcaucgacgugaccgaccuguucccggcccagcccggccucaccagcgccgugaucgaggcccugccccgcaacaugguccugaccugccaggggagcgacgacaucaagcggcuccuggacucccagggccgccgcgacaucaagcugaucgacaucgcccucagcaaggcggacucccggcgcuucgagaacgccgugugggaccagugcaaggaccugugccacaugcacacggggguggucguggagaagaagaagcggggcgggaaggaggagaucacgccccacugcgcccugauggacugcaucauguacgacgccgccgugagcggcggccucaacaucccgguccugcgcgcggugcugccccgggacaugguguuccgcaccuccagccccaaggucgugcucugaggacuaguuauaagacugacuagcccgaugggccucccaacgggcccuccuccccuccuugcaccgagauuaauaaaaaaaaaaaaaaaaaaaaaaaaaaaaaaaaaaaaaaaaaaaaaaaaaaaaaaaaaaaaaaaaaaaaaaaaaaaaaaaaaaaaaaaaaaaaaaaaaaaa

SEQ ID NO: 17886 - RNA, 1899 nt, Artificial Sequence
  mRNA product Design i-3 (A100) comprising derived and/or modified sequence from LASV(LASV254-NIG-2011;Clade II)__AIT17675__NP (opt1)
aggagaaagcuuaccaugagcgccuccaaggaggugaaguccuuccuguggacccagagccuccgccgggagcugagcggcuacugcuccagcaucaagcugcaggucgugaaggacgcccaggcgcuccugcacgggcuggacuucuccgaggugagcaacguccagcgccucaugcggaagcagaagcgcgacgacuccgaccugaagcggcugcgcgaccucaaccaggccgugaacaaccugguggagcucaagagcacccagcagaaguccguccugcgggugggcacgcugaccagcgacgaccugcucacccuggccgccgaccuggagaagcucaaguccaaggugauccgcaccgagcggccccugagcuccggggucuacaugggcaaccugagcacgcagcagcucgagcagcgccgggcccugcugaacaugaucgggauggugggcggcgcgcaggggacccagccgggccgcgacggggugguccgggugugggacgugaagaaccccgaccuccugaacaaccaguucggcaccaugcccucccugacccucgccugccugacgaagcaggggcaggucgaccugaacgacgccgugcucgcccugaccgaccugggccucaucuacaccgcgaaguaccccaacagcuccgaccuggaccgccugagccagagccacccgauccucaacaugguggacaccaagaaguccagccugaacaucuccggcuacaacuucagccugggggccgccgucaaggccggcgccugcaugcucgacgggggcaacaugcuggagacgaucaaggugacgccccagaccauggacggcauccugaaguccauccucaaggugaagaagucccuggggauguucgucagcgacacccccggcgagcggaaccccuacgagaacauccuguacaagaucugccucagcggggacggcuggccguacaucgcgucccgcaccagcaucguggggcgggccugggagaacaccaucguggaccuggaguccgacggcaagccccagaaggucggcaccgccgggagcaacaagucccugcagagcgccggcuuccccaccgggcucacguacucccagcugaugacccugaaggacagcaugaugcagcuggaccccuccgccaagaccuggaucgacaucgagggccgcccggaggaccccguggagaucgcgcucuaccagcccaugagcgggugcuacauccacuucuuccgggagcccaccgaccugaagcaguucaagcaggacgccaaguacucccacggcaucgacgucgccgaccuguucccggcccagcccggccucacgagcgccgugaucgaggcgcugccccgcaacauggugcugaccugccaggggagcgacgacaucaagcggcuccuggacucccagggccgccgcgacaucaagcugaucgacaucgcccucagcaaggccgacucccggcgcuucgagaacgccgucugggaccagugcaaggaccugugccacaugcacaccggggugguggucgagaagaagaagcggggcgggaaggaggagaucacgccccacugcgcccugauggacugcaucauguacgacgcggccgugagcggcggccucaacaucccggugcugcgcgccguccugccccgggacaugguguuccgcaccuccagccccaaggugguccucugaggacuaguuauaagacugacuagcccgaugggccucccaacgggcccuccuccccuccuugcaccgagauuaauaaaaaaaaaaaaaaaaaaaaaaaaaaaaaaaaaaaaaaaaaaaaaaaaaaaaaaaaaaaaaaaaaaaaaaaaaaaaaaaaaaaaaaaaaaaaaaaaaaaa

SEQ ID NO: 17887 - RNA, 1899 nt, Artificial Sequence
  mRNA product Design i-3 (A100) comprising derived and/or modified sequence from LASV(Nig08-04;Clade II)__ADU56611__NP (opt1)
aggagaaagcuuaccaugagcgccuccaaggaggugaaguccuuccuguggacccagagccuccgccgggagcugagcggcuacugcuccaacaucaagcugcaggucgugaaggacgcccaggcgcuccugcacgggcuggacuucagcgagguguccaacguccagcgccucaugcggaagcagaagcgcgacgacggcgaccugaagcggcugcgcgaccucaaccaggccgugaacaaccugguggagcucaagagcacccagcagaaguccguccugcggguggggacccugaccagcgacgaccugcucacccuggccgccgaccuggagaagcucaaguccaaggugauccgcaccgagcggccccugagcuccggcgucuacauggggaaccugagcacgcagcagcucgagcagcgcaaggcccugcuguccaugaucggcauggugggcggggcgcagggcacccagccggggcgggacggcgugguccgcgugugggacgugaagaaccccgaccuccugaacaaccaguucgggaccaugcccagccugacccucgccugccugacgaagcagggccaggucgaccugaacgacgccgugcucgcccugaccgaccugggccucaucuacaccgcgaaguaccccaacuccagcgaccuggaccggcugucccagagccacccgauccucaacaugguggacaccaagaaguccagccugaacaucagcggguacaacuucucccugggcgccgccgucaaggccggggccugcaugcucgacggcggcaacaugcuggagacgaucaaggugacgccccagaccauggacgggauccucaagagcauccugaaggugaagcgcucccugggcauguucgucagcgacacccccggggagcggaaccccuacgagaacauccuguacaagaucugccucuccggcgacggguggccguacaucgcgagccgcaccuccaucgugggccgggccugggagaacaccaccguggaccuggagagcgacggcaagccccagaaggucgggaccgccggcuccaacaagagccugcaguccgccggguuccccacgggccucaccuacagccagcugaugacccugaaggacuccaugaugcagcuggaccccagcgccaagaccuggaucgacaucgaggggcgcccggaggaccccguggagaucgcgcucuaccagcccauguccggcugcuacauccacuucuuccgggagcccacggaccugaagcaguucaagcaggacgccaaguacagccacggcaucgacgucaccgaccuguucuccgcccagccggggcucaccagcgccgugaucgaggcccugccccgcaacauggugcugaccugccagggcagcgacgacaucaagaagcuccuggacucccaggggcggcgcgacaucaagcugaucgacaucagccucaacaaggcggacucccgccgguucgagaacgccgucugggaccagugcaaggaccugugccacaugcacacgggcgugguggucgagaagaagaagcgcgggggcaaggaggagaucacgccccacugcgcccugauggacugcaucauguucgacgccgccgugagcggcgggcucaacauccccauccugcgggcggugcugccgcgcgacauggucuuccggaccuccagccccaagguggugcucugaggacuaguuauaagacugacuagcccgaugggccucccaacgggcccuccuccccuccuugcaccgagauuaauaaaaaaaaaaaaaaaaaaaaaaaaaaaaaaaaaaaaaaaaaaaaaaaaaaaaaaaaaaaaaaaaaaaaaaaaaaaaaaaaaaaaaaaaaaaaaaaaaaaa

SEQ ID NO: 17888 - RNA, 1902 nt, Artificial Sequence
  mRNA product Design i-3 (A100) comprising derived and/or modified sequence from LASV(GA391;Clade III)__AAA46284__NP (opt1)
aggagaaagcuuaccaugagcgccuccaaggaggugcgcagcugccuguggacccagucccuccggcgcgagcugagcggcuacugcuccaacaucaagcugcaggucgugaaggacgcccaggcgcuccugcacgggcuggacuucagcgagguguccaacguccagcggcucaugcgcaagcagaagcgggacgacggcgaccugaagcgccugcgggaccucaaccaggccgugaacaaccugguggagcugaaguccacccagcagaaguccguccuccgcguggggacgcugagcuccgacgaccugcucauccuggccgccgaccuggagaagcucaagagcaaggugacccggaccgagcgcccccuguccagcggcgucuacauggggaaccuguccagccagcagcucgaccagcggcgcgcccugcugaacaugaucggcaugaccggcguguccgggggcgggaagggcgcgagcaacgggaucgugcgggucugggacgugaagaacgccgagcuccugaacaaccaguucggcacgaugccgucccugacccucgccugccugaccaagcagggccagguggaccugaacgacgccguccaggcgcucaccgaccuggggcugaucuacacggccaaguaccccaacagcagcgaccucgaccgccugucccagagccaccccauccugaacaugaucgacaccaagaaguccagccucaacaucuccggcuacaacuucagccugggggccgccgugaaggccggcgcgugcaugcuggacggcgggaacaugcucgagaccaucaaggugagcccccagaccauggacggcauccucaagagcauccugaaggucaagaagucccuggggauguucgugagcgacacgccgggcgagcggaaccccuacgagaacauccuguacaagaucugccuguccggggacggcuggagcuacaucgccucccgcaccagcaucgugggccgggccugggagaacaccgucguggaccucgagcaggacaacaagccccagaagaucgggaacggcggguccaacaagagccugcaguccgccggcuucgccgcggggcugaucuacagccagcucaugacccugaaggacuucaagugcuucaaccugauccccaacgccaagacguggauggacaucgagggccgcccggaggaccccguggagaucgcccuguaccagcccuccagcggcugcuacguccacuucuuccgggagcccaccgaccucaagcaguucaagcaggacgccaaguacagccacgggcgcgacgugaccgaccuguucgccgcgcagccgggccugaccuccgccgucaucgaggcccucccccggaacauggugaucacgugccaggggagcgaggacauccgcaagcugcuggagucccagggccgccgggacaucaagcucaucgacaucacccugagcaaggccgacucccgcaaguucgagaacgccgugugggaccaguucaaggaccugugccacaugcacaccggggucgugguggagaagaagaagcggggcggcaaggaggagaucacgccccacugcgcgcucauggacugcaucauguucgacgccgccgucagcgggggccuggacgccaaggugcugcgcgugguccucccccgggacaugguguuccgcaccuccaccccgaaggugguccugugaggacuaguuauaagacugacuagcccgaugggccucccaacgggcccuccuccccuccuugcaccgagauuaauaaaaaaaaaaaaaaaaaaaaaaaaaaaaaaaaaaaaaaaaaaaaaaaaaaaaaaaaaaaaaaaaaaaaaaaaaaaaaaaaaaaaaaaaaaaaaaaaaaaa

SEQ ID NO: 17889 - RNA, 1899 nt, Artificial Sequence
  mRNA product Design i-3 (A100) comprising derived and/or modified sequence from LASV(Nig08-A19;Clade III)__ADU56619__NP (opt1)
aggagaaagcuuaccaugagcgccuccaaggaggugaaguccuuccuguggacccagucccuccgccgggagcugagcggcuacugcuccaacaucaagcugcaggucgugaaggacgcccaggcgcuccugcacgggcuggacuucagcgagguguccaacguccagcgccucaugcggaagcagaagcgcgacgacggcgaccugaagcggcugcgcgaccucaaccaggccgugaacaaccugguggagcucaagagcacccagcagaaguccguccugcggguggggacccugagcuccgacgaccugcucgugcuggccgccgaccuggagaagcucaagagcaaggucgugcgcaccgagcggccccuguccagcggcaucuacauggggaaccuguccagccagcagcucgaccagcgcaaggcccugcugaacaugaucggcaugaccggcgggaacggcgggcggaacaccacguccgacggcaucgugcgcgucugggacgugaagaacgcggagcuccugaacaaccaguucgggaccaugccgagccugacccucgccugccugaccaagcagggccagguggaccugaacgacgccguccaggcccucacggaccugggccugaucuacaccgcgaaguaccccaacuccagcgaccucgaccggcuggcccagagccaccccauccugaacaugaucgacaccaagaaguccagccucaacaucuccggguacaacuucagccugggcgccgccgugaaggccggggcgugcaugcuggacggcggcaacaugcucgagaccaucaaggugagcccccagacgauggacgggauccucaagagcauccugaaggucaagcgcucccugggcauguucaucagcgacaccccgggggagcggaaccccuacgagaacauccuguacaagaucugccuguccggcgacggguggcccuacaucgccagccgcaccuccaucgugggccgggccugggagaacaccguggucgaccucgagagcgacaacaagccccagaagacgggcaacgggggcuccaacaagagccugcaguccgccggguucgccgcgggccugaccuacagccagcucaugacccugaaggacuccaugcugcagcuggacccgaacgccaagaccuggauggacaucgaggggcgccccgaggaccccguggagaucgcccucuaccagcccagcuccggcugcuacauccacuucuuccgggagccgacggaccugaagcaguucaagcaggacgccaaguacagccacggcaucgacgugaccgaccuguucgccgcgcagcccgggcucaccagcgccgucaucgaggcccugccccgcaacauggugaucacgugccagggcuccgaggacauccggaagcugcucgagagccaggggcgccgcgacaucaagcugaucgacaucucccugagcaaggucgacucccggaaguucgagaacgccgugugggaccaguucaaggaccucugccacaugcacaccggcaucguggucgagaagaagaagcgcgggggcaaggaggagaucacgccccacugcgcccugauggacugcaucauguucgacgcggccgugagcggcgggguggacgccaagguccugcgggccgugcucccgcgcgacaugguguuccggaccuccacccccaaggucgugcugugaggacuaguuauaagacugacuagcccgaugggccucccaacgggcccuccuccccuccuugcaccgagauuaauaaaaaaaaaaaaaaaaaaaaaaaaaaaaaaaaaaaaaaaaaaaaaaaaaaaaaaaaaaaaaaaaaaaaaaaaaaaaaaaaaaaaaaaaaaaaaaaaaaaa

SEQ ID NO: 17890 - RNA, 1899 nt, Artificial Sequence
  mRNA product Design i-3 (A100) comprising derived and/or modified sequence from LASV(G1180-SLE-2010;Clade IV)__AIT17169__NP (opt1)
aggagaaagcuuaccaugagcgccuccaaggagaucaagagcuuccuguggacccagucccuccgccgggagcugagcggcuacugcuccaacaucaagcuccagguggucaaggacgcccaggcgcugcugcacgggcuggacuucagcgagguguccaacgugcagcgccucaugcggaaggagcgccgggacgacaacgaccugaagcgccugcgggaccucaaccaggccgucaacaaccugguggagcucaagagcacccagcagaaguccauccugcgcgugggcacccugaccagcgacgaccugcucauccuggccgccgaccuggagaagcucaaguccaaggucauccggaccgagcgcccccugagcgccgggguguacaugggcaaccuguccagccagcagcucgaccagcggcgcgcgcugcuguccaugaucgggaugagcuccggcaaccagcgggcccaggccggccgcgacggggugguccgggugugggacgugaagaacgucgagcuccugaacaaccaguucggcaccaugccgagccugacgcucgccugccugaccaagcagggccagguggaccugaacgacgcggugcaggcccucaccgaccuggggcugaucuacaccgccaaguaccccaacacguccgaccucgaccgccugacccagagccaccccauccugaacaugaucgacaccaagaaguccagccucaacaucagcggguacaacuucucccugggcgccgccgucaaggcgggcgccugcaugcuggacgggggcaacaugcucgagaccaucaaggugagcccccagacgauggacgggauccugaaguccauccugaaggugaagaaggcccucggcauguucaucagcgacaccccgggcgagcggaaccccuacgagaacauccuguacaagaucugccuguccggggacggcuggcccuacaucgccagccgcaccuccaucaccgggcgggccugggagaacacggucguggaccucgagagcgacggcaagccccagaaggcgggguccaacaacagcaacaagucccugcagagcgugggcuucaccgccggccugaccuacucccagcucaugacccugaaggacgccaugcugcagcuggacccgaacgccaagacguggauggacaucgaggggcgccccgaggaccccgucgagaucgcccucuaccagcccagcuccggcugcuacauccacuucuuccgggagccgaccgaccugaagcaguucaagcaggacgcgaaguacagccacgggaucgacgugaccgaccuguucgccgcccagcccggccucaccuccgccgugaucgacgcccugccccgcaacauggucaucacgugccaggggagcgacgacauccgcaagcugcucgagagccagggccggaaggacaucaagcugaucgacaucgcgcuguccaagaccgacagccgcaaguacgagaacgccgugugggaccaguacaaggaccucugccacaugcacaccggcgucgugguggagaagaagaagcgcgggggcaaggaggagaucacgccccacugcgcccugauggacugcaucauguucgacgccgcggucuccgggggccugaacaccagcgugcuccgggccgugcugccgcgggacauggucuuccgcaccuccacgccccggguggugcugugaggacuaguuauaagacugacuagcccgaugggccucccaacgggcccuccuccccuccuugcaccgagauuaauaaaaaaaaaaaaaaaaaaaaaaaaaaaaaaaaaaaaaaaaaaaaaaaaaaaaaaaaaaaaaaaaaaaaaaaaaaaaaaaaaaaaaaaaaaaaaaaaaaaa

SEQ ID NO: 17891 - RNA, 1899 nt, Artificial Sequence
  mRNA product Design i-3 (A100) comprising derived and/or modified sequence from LASV(G1442-SLE-2011;Clade IV)__AIT17181__NP (opt1)
aggagaaagcuuaccaugagcgccuccaaggaggugaaguccuuccuguggacccagagccuccgccgggagcugagcggcuacugcuccaacaucaagcugcaggucgugaaggacgcccaggcgcuccugcacgggcuggacuucagcgagguguccaacguccagcgccucaugcggaagcagcgccgggacgacaacgaccugaagcgccugcgggaccucaaccaggccgugaacaaccugguggagcucaagagcacccagcagaaguccguccugcgcgugggcacccugaccagcgacgaccugcucgugcuggccgccgaccuggagaagcucaaguccaaggucauccggaccgagcgcccccugagcgccgggguguacaugggcaaccuguccagccagcagcucgaccagcggcgcgcgcugcugaacaugaucgggauguccggcggcauccaggggacccggacgggccgcgacggggugguccgggugugggacgugaagaacgccgaccuccugaacaaccaguucggcaccaugccgagccugacccucgccugccugaccaagcaggggcaggucgaccugaacgacguggugcaggcccucacggaccugggccugaucuacaccgcgaaguaccccaacgccuccgaccucgaccgccugacccagagccaccccauccugaacaugaucgacaccaagaaguccagccucaacaucagcggcuacaacuucucccugggggccgccgucaaggccggcgcgugcaugcuggacgggggcaacaugcucgagacgaucaaggugagcccccagaccauggacggcauccugaaguccauccugaaggugaagaagacccucgggauguucaucagcgacaccccgggcgagcggaaccccuacgagaacauccuguacaagaucugccuguccggggacggcuggcccuacaucgccagccgcacguccaucaccgggcgggccugggagaacaccgucguggaccucgagagcgacggcaagccccagaaggccggcuccaacaacagcaacaagucccugcagagcgccggguucgcggccggccugaccuacucccagcucaugacgcugaaggacgccaugcugcagcuggacccgaacgccaagaccuggauggacaucgaggggcgccccgaggaccccguggagaucgcccucuaccagcccagcuccggcugcuacauccacuucuuccgggagccgaccgaccugaagcaguucaagcaggacgcgaaguacagccacgggaucgacgucaccgaccuguucgccgcccagcccggccucacguccgccgugaucgaggcccugccccgcaacauggucaucacgugccagggcagcgacgacaucaagaagcugcucgagucccaggggcgcaaggacaucaagcugaucgacaucgcgcugagcaagaccgacagccggaaguacgagaacgccgugugggaccaguacaaggaccucugccacaugcacaccggcguggucguggagaagaagaagcgcgggggcaaggaggagaucaccccgcacugcgcccugauggacugcaucauguucgacgccgcgguguccgggggccugaacacccucguccugcgggccgugcugccccgcgacaugguguuccggaccagcacgccccgcgucgugcucugaggacuaguuauaagacugacuagcccgaugggccucccaacgggcccuccuccccuccuugcaccgagauuaauaaaaaaaaaaaaaaaaaaaaaaaaaaaaaaaaaaaaaaaaaaaaaaaaaaaaaaaaaaaaaaaaaaaaaaaaaaaaaaaaaaaaaaaaaaaaaaaaaaaa

SEQ ID NO: 17892 - RNA, 1899 nt, Artificial Sequence
  mRNA product Design i-3 (A100) comprising derived and/or modified sequence from LASV(G3010-SLE-2013;Clade IV)__AIT17345__NP (opt1)
aggagaaagcuuaccaugagcgccuccaaggagaucaagagcuuccuguggacccagucccuccgccgggagcugagcggcuacugcuccaacaucaagcuccagguggucaaggacgcccaggcgcugcugcacgggcuggacuucagcgagguguccaacgugcagcgccucaugcggaaggagcgccgggacgacaacgaccugaagcgccugcgggaccucaaccaggccgucaacaaccugguggagcucaagagcacccagcagaaguccauccugcgcgugggcacccugaccagcgacgaccugcucauccuggccgccgaccuggagaagcucaaguccaaggucacccggaccgagcgcccccugagcgccgggguguacaugggcaaccuguccagccagcagcucgaccagcggcgcgcgcugcuguccaugaucgggaugagcuccggcgugcagggcgcccgggccgggcgcgacggcgucgugcgggugugggacgucaagaacgccgagcuccugaacaaccaguucgggacgaugccgagccugacccucgcgugccugaccaagcagggccagguggaccugaacgacgugguccaggcccucaccgaccuggggcugaucuacacggccaaguaccccaacaccuccgaccucgaccgccugacccagagccaccccauccugaacaugaucgacaccaagaaguccagccucaacaucagcggcuacaacuucucccugggcgccgccgugaaggcgggggccugcaugcuggacggcgggaacaugcucgagacgaucaaggugagcccccagaccauggacggcauccugaaguccauccugaaggucaagaaggcccucggcauguucaucagcgagaccccgggggagcggaaccccuacgagaacauccuguacaagaucugccuguccggcgacggguggcccuacaucgccagccgcaccuccaucacgggccgggccugggagaacaccgugguggaccucgagagcgacgggaagccccagaaggcgggcuccaacaacagcaacaagucccugcagagcgccggcuucaccgccgggcugaccuacucccagcucaugacgcugaaggacgccaugcugcagcuggacccgaacgccaagaccuggauggacaucgagggccgccccgaggaccccgucgagguggcgcucuaccagcccagcuccgggugcuacauccacuucuuccgggagccgaccgaccugaagcaguucaagcaggacgccaaguacagccacggcaucgacgugaccgaccuguucgccgcccagcccgggcucacguccgccgucaucgacgcgcugccccgcaacauggugaucacgugccagggcagcgacgacaucaagaagcugcucgagagccagggccgcaaggacaucaagcugaucgacaucgcccuguccaagaccgacagccggaaguacgagaacgccgucugggaccaguacaaggaccucugccacaugcacaccggggugguggucgagaagaagaagcgcggcgggaaggaggagaucaccccgcacugcgcccugauggacugcaucauguucgacgcggccguguccggcgggcugaacaccagcgugcuccgggccguccugccccgcgacaugguguuccggaccuccacgccccgcgugguccugugaggacuaguuauaagacugacuagcccgaugggccucccaacgggcccuccuccccuccuugcaccgagauuaauaaaaaaaaaaaaaaaaaaaaaaaaaaaaaaaaaaaaaaaaaaaaaaaaaaaaaaaaaaaaaaaaaaaaaaaaaaaaaaaaaaaaaaaaaaaaaaaaaaaa

SEQ ID NO: 17893 - RNA, 1899 nt, Artificial Sequence
  mRNA product Design i-3 (A100) comprising derived and/or modified sequence from LASV(G502-SLE-2009;Clade IV)__AIT17127__NP (opt1)
aggagaaagcuuaccaugagcgccuccaaggagaucaagagcuuccuguggacccagucccuccgccgggagcugagcggcuacugcuccaacaucaagcuccagguggucaaggacgcccaggcgcugcugcacgggcuggacuucagcgagguguccaacgugcagcgccucaugcggaaggagcgccgggacgacaacgaccugaagcgccugcgggaccucaaccaggccgucaacaaccugguggagcucaagagcacccagcagaaguccauccugcgcgugggcacccugaccagcgacgaccugcucauccuggccgccgaccuggagaagcucaaguccaaggucauccggaccgagcgcccccugagcgccgggguguacaugggcaaccuguccagccagcagcucgaccagcggcgcgcgcugcuguccaugaucgggaugagcggcggcaaccagggggugcgggccggcaaggacggggucgugcgcgugugggacgucaagaacgccgagcuccugaacaaccaguucggcaccaugccgucccugacgcucgccugccugaccaagcagggccagguggaccugaacgacgcggugcaggcccucaccgaccuggggcugaucuacaccgccaaguaccccaacacgagcgaccucgaccggcugacccagucccaccccauccugaacaugaucgacaccaagaaguccagccucaacaucuccggcuacaacuucagccugggggccgccgucaaggcgggcgccugcaugcuggacgggggcaacaugcucgagaccaucaaggugagcccccagacgauggacggcauccucaagagcauccugaaggugaagaaggcccuggggauguucaucuccgacaccccgggcgagcgcaaccccuacgagaacauccuguacaagaucugccugagcggggacggcuggcccuacaucgccucccggaccagcaucaccgggcgcgccugggagaacacggucguggaccucgaguccgacggcaagccccagaaggcgggcagcaacaacuccaacaagagccugcaguccgccggguucaccgccggccugaccuacagccagcucaugacccugaaggacgccaugcugcagcuggacccgaacacgaagaccuggauggacaucgaggggcggcccgaggaccccguggagaucgcccucuaccagcccuccagcggcugcuacauccacuucuuccgcgagccgaccgaccugaagcaguucaagcaggacgcgaaguacucccacgggaucgacgucaccgaccuguucgccgcccagcccggccucacgagcgccgugaucgacgcccugccccggaacauggugaucacgugccagggcuccgacgacauccgcaagcugcucgagagccaggggcgcaaggacaucaagcugaucgacaucgcgcugaacaagaccgacagccggaaguacgagaacgccgucugggaccaguacaaggaccucugccacaugcacaccggcguggucguggagaagaagaagcgcgggggcaaggaggagaucaccccgcacugcgcccugauggacugcaucauguucgacgccgcgguguccgggggccugaacaccagcguccuccgggccgugcugccccgcgacaugguguuccggaccuccacgccccgcgucgugcugugaggacuaguuauaagacugacuagcccgaugggccucccaacgggcccuccuccccuccuugcaccgagauuaauaaaaaaaaaaaaaaaaaaaaaaaaaaaaaaaaaaaaaaaaaaaaaaaaaaaaaaaaaaaaaaaaaaaaaaaaaaaaaaaaaaaaaaaaaaaaaaaaaaaa

SEQ ID NO: 17894 - RNA, 1899 nt, Artificial Sequence
  mRNA product Design i-3 (A100) comprising derived and/or modified sequence from LASV(G733-SLE-2010;Clade IV)__AIT17155__NP (opt1)
aggagaaagcuuaccaugagcgccuccaaggagaucaagagcuuccuguggacccagucccuccgccgggagcugagcggcuacugcuccaacaucaagcuccagguggucaaggacgcccaggcgcugcugcacgggcuggacuucagcgagguguccaacgugcagcgccucaugcggaaggagcgccgggacgacaacgaccugaagcgccugcgggaccucaaccaggccgucaacaaccugguggagcucaagagcacccagcagaaguccgugcugcgcgucggcacccugaccagcgacgagcugcucgugcuggccgccgaccuggagaagcucaaguccaaggugauccggaccgagcgcccccugagcgccggggucuacaugggcaaccuguccagccagcagcucgaccagcggcgcgcgcugcuguccaugaucgggaugagcggcggcaaccagggggcccggaccggccgcgacgggguggugcgggucugggacgugaagaacgccgagcuccugaacaaccaguucggcaccaugccgucccugacccucgccugccugaccaagcagggccagguggaccugaacgacgcgguccaggcccucaccgaccuggggcugaucuacacggccaaguaccccaacaccagcgaccucgaccgccugacccagucccaccccauccugaacaugaucgacaccaagaaguccagccucaacaucuccggcuacaacuucagccugggggccgccgugaaggcgggcgccugcaugcuggacgggggcaacaugcucgagacgaucaaggugagcccccagaccauggacggcauccucaagagcauccugaaggucaagaaggcccuggggauguucaucuccgacaccccgggcgagcggaaccccuacgagaacauccuguacaagaucugccugagcggggacggcuggcccuacaucgccucccgcaccagcaucacggggcgggccugggagaacaccgugguggaccucgaguccgacggcaagccccagaaggcgggcagcaacaacuccaacaagagccugcaguccgccggguucaccgccggccugaccuacagccagcucaugacgcugaaggacgccaugcugcagcuggacccgaacgccaagaccuggauggacaucgaggggcgccccgaggaccccgucgagaucgcgcucuaccagcccuccagcggcugcuacauccacuucuuccgggagccgaccgaccugaagcaguucaagcaggacgccaaguacucccacgggaucgacgugaccgaccuguucgccgcccagcccggccucacgagcgccgugaucgacgcgcugccccgcaacauggucaucacgugccagggcuccgacgacauccgcaagcugcucgagagccaggggcggaaggacaucaagcugaucgacaucgcccugagcaagaucgacucccgcaaguacgagaacgccgugugggaccaguacaaggaccucugccacaugcacaccggcgucgugguggagaagaagaagcgcgggggcaaggaggagaucacgccccacugcgcccugauggacugcaucauguucgacgcggccgucagcgggggccugaacucccucgugcugcgggccgugcugccgcgggacauggucuuccgcaccagcacgccccggguggugcucugaggacuaguuauaagacugacuagcccgaugggccucccaacgggcccuccuccccuccuugcaccgagauuaauaaaaaaaaaaaaaaaaaaaaaaaaaaaaaaaaaaaaaaaaaaaaaaaaaaaaaaaaaaaaaaaaaaaaaaaaaaaaaaaaaaaaaaaaaaaaaaaaaaaa

SEQ ID NO: 17895 - RNA, 1899 nt, Artificial Sequence
  mRNA product Design i-3 (A100) comprising derived and/or modified sequence from MOPV/LASV reassortant(IGS-1;Clade IV)__AFY05578__NP (opt1)
aggagaaagcuuaccaugagcgccuccaaggagaucaagagcuuccuguggacccagucccuccgccgggagcugagcggcuacugcuccaacaucaagcuccagguggucaaggacgcccaggcgcugcugcacgggcuggacuucagcgagguguccaacgugcagcgccucaugcggaaggagcgccgggacgacaacgaccugaagcgccugcgggaccucaaccaggccgucaacaaccugguggagcucaagagcacccagcagaaguccauccugcgcgugggcacccugaccagcgacgaccugcucauccuggccgccgaccuggagaagcuccgguccaaggucauccgcaccgagcggccccugagcgccgggguguacaugggcaaccuguccagccagcagcucgaccagcgccgggcgcugcugaacaugaucgggauguccggcggcaaccagggggcccgcgccggccgggacggggugguccgcgugugggacgugaagaacgccgagcuccugagcaaccaguucggcaccaugccgucccugacgcucgcgugccugaccaagcaggggcaggucgaccugaacgacgccgugcaggcccucaccgaccugggccugaucuacaccgccaaguaccccaacacgagcgaccucgaccggcugacccagucccaccccauccugaacaugaucgacaccaagaaguccagccucaacaucuccggcuacaacuucagccugggggccgcggugaaggccggcgccugcaugcuggacgggggcaacaugcucgagaccaucaaggucagcccccagacgauggacggcauccucaagagcauccugaaggugaagaaggcccuggggauguucaucuccgacaccccgggcgagcgcaaccccuacgagaacauccuguacaagaucugccugagcggggacggcuggcccuacaucgccucccggaccagcaucaccgggcgcgcgugggagaacacgguggucgaccucgaguccgacggcaagccccagaaggccgacagcaacaacuccagcaagucccugcagagcgccggcuucaccgccgggcugaccuacucccagcucaugacccugaaggacgccaugcugcagcuggacccgaacgcgaagacguggauggacaucgagggccggcccgaggaccccguggagaucgcccucuaccagcccagcuccgggugcuacauccacuucuuccgcgagccgaccgaccugaagcaguucaagcaggacgccaaguacagccacggcaucgacgugaccgaccuguucgccacccagcccgggcucacguccgccgucaucgacgcgcugccccgcaacauggugaucacgugccagggcagcgacgacauccggaagcugcucgagagccagggccgcaaggacaucaagcugaucgacaucgaccuguccaagaccgacagccggaaguacgagaacgccgugugggaccaguacaaggaccucugccacaugcacaccggggucguggucgagaagaagaagcgcggcgggaaggaggagaucaccccgcacugcgcccugauggacugcaucauguucgacgccgcgguguccggcgggcugaacaccagcgugcuccgggccguccugccccgcgacaugguguuccggaccuccacgccccgcgugguccugugaggacuaguuauaagacugacuagcccgaugggccucccaacgggcccuccuccccuccuugcaccgagauuaauaaaaaaaaaaaaaaaaaaaaaaaaaaaaaaaaaaaaaaaaaaaaaaaaaaaaaaaaaaaaaaaaaaaaaaaaaaaaaaaaaaaaaaaaaaaaaaaaaaaa

SEQ ID NO: 17896 - RNA, 1899 nt, Artificial Sequence
  mRNA product Design i-3 (A100) comprising derived and/or modified sequence from LASV(LM765-SLE-2012;Clade IV)__AIT17815__NP (opt1)
aggagaaagcuuaccaugagcgccuccaaggagaucaagagcuuccuguggacccagucccuccgccgggagcugagcggcuacugcuccaacaucaagcuccagguggucaaggacgcccaggcgcugcugcacgggcuggacuucagcgagguguccaacgugcagcgccucaugcggaaggagcgccgggacgacaacgaccugaagcgccugcgggaccucaaccaggccgucaacaaccugguggagcucaagagcacccagcagaaguccauccugcgcgugggcacccugaccagcgacgaccugcucauccuggccgccgaccuggagaagcucaaguccaaggucacccggaccgagcgcccccugagcgccgggguguacaugggcaaccuguccagccagcagcucgaccagcggcgcgcgcugcuggacaugaucgggauguccggcagcaaccagggcgcccgggccgggcgcgacggcgugguccgggugugggacgugaagaacgccgagcuccugaacaaccaguucgggacgaugccgucccugacccucgcgugccugaccaagcagggccaggucgaccugaacgacgccgugcaggcccucaccgaccuggggcugaucuacacggccaaguaccccaacaccagcgaccucgaccgccugacccagucccaccccauccugaacaugaucgacaccaagaaguccagccucaacaucuccggcuacaacuucagccugggcgccgcggugaaggccggggccugcaugcuggacggcgggaacaugcucgagacgaucaaggucagcccccagaccauggacggcauccucaagagcauccugaaggugaagaaggcccugggcauguucaucuccgacgccccgggggagcggaaccccuacgagaacauccuguacaagaucugccugagcggcgacggguggcccuacaucgcgucccgcaccagcaucaccggccgggccugggagaacacgguggucgaccucgaguccgacgggaagccccagaaggccggcagcaacggcuccaacaagagccugcaguccgccggguucaccgccggccugaccuacagccagcucaugacccugaaggacgcgaugcugcagcuggacccgaacgccaagacguggauggacaucgaggggcgccccgaggaccccguggagaucgcccucuaccagcccuccagcggcugcuacauccacuucuuccgggagccgaccgaccugaagcaguucaagcaggacgccaaguacucccacgggaucgacgugaccgaccuguucgccgcgcagcccggccucaccagcgccgucaucgacgcccugccccgcaacauggugaucacgugccagggcuccgacgacauccgcaagcuguucgagagccaggggcggaaggacaucaagcucaucgacaucgcccugagcaagaccgacucccgcaaguacgagaacgcggugugggaccaguacaaggaccugugccacaugcacaccggcaucgucguggagaagaagaagcgcgggggcaaggaggagaucacgccccacugcgcccucauggacugcaucauguucgacgccgccgucagcgggggccugaacaccuccgugcugcgggccgugcucccgcgggacauggucuuccgcaccagcacgccccggguggugcugugaggacuaguuauaagacugacuagcccgaugggccucccaacgggcccuccuccccuccuugcaccgagauuaauaaaaaaaaaaaaaaaaaaaaaaaaaaaaaaaaaaaaaaaaaaaaaaaaaaaaaaaaaaaaaaaaaaaaaaaaaaaaaaaaaaaaaaaaaaaaaaaaaaaa

SEQ ID NO: 17897 - RNA, 1899 nt, Artificial Sequence
  mRNA product Design i-3 (A100) comprising derived and/or modified sequence from LASV(LM776-SLE-2012;Clade IV)__AIT17825__NP (opt1)
aggagaaagcuuaccaugagcgccuccaaggagaucaagagcuuccuguggacccagucccuccgccgggagcugagcuccuacugcagcaacaucaagcuccagguggucaaggacgcccaggcgcugcugcacggccuggacuucuccgaggugagcaacgugcagcgccucaugcggaaggagcgccgggacgacaacgaccugaagcgccugcgggaccucaaccaggccgucaacaaccugguggagcugaaguccacccagcagaaguccauccuccgcguggggacccugaccuccgacgaccugcucauccuggccgccgaccuggagaagcucaagagcaaggucacccggaccgagcgcccccuguccgccggcguguacauggggaaccugagcucccagcagcucgaccagcggcgcgcgcugcugagcaugaucggcauguccgggagcaaccagggcgcccgggccggccgcgacggggugguccgggugugggacgugaagaacgccgagcuccugaacaaccaguucggcacgaugccgucccugacccucgcgugccugaccaagcaggggcaggucgaccugaacgacgccgugcaggcccucaccgaccugggccugaucuacacggccaaguaccccaacaccagcgaccucgaccgccugacccagagccaccccauccugaacaugaucgacaccaagaaguccagccucaacaucuccggguacaacuucagccugggcgccgcggugaaggccggcgccugcaugcuggacgggggcaacaugcucgagacgaucaaggucagcccccagaccauggacgggauccucaagagcauccugaaggugaagaaggcccugggcauguucaucuccgacaccccgggcgagcggaaccccuacgagaacauccuguacaagaucugccugagcggggacggcuggcccuacaucgccucccgcaccagcaucacggggcgggcgugggagaacaccguggucgaccucgaguccgacggcaagccccagaaggccgggagcaacaacuccaacaagagccugcaguccgccggcuucaccgccggccugaccuacagccagcucaugacgcugaaggacgccaugcugcagcuggacccgaacgcgaagaccuggauggacaucgaggggcgccccgaggaccccguggagguggcccucuaccagcccuccagcggcugcuacauccacuucuuccgggagccgaccgaccugaagcaguucaagcaggacgccaaguacucccacgggaucgacgucaccgaccuguucgccgcccagcccggccucacgagcgcggugaucgacgcccugccccgcaacauggugaucacgugccaggggagcgacgacauccgcaagcugcucgagucccagggccggaaggacaucaagcugaucgacaucgcccugagcaagaccgacucccgcaaguacgagaacgccgucugggaccaguacaaggaccucugccacaugcacaccggcguggucguggagaagaagaagcgcgggggcaaggaggagaucaccccgcacugcgcgcugauggacugcaucauguucgacgccgccgugagcgggggccugaacaccuccguccuccgggccgugcugccccgggacaugguguuccgcaccagcacgccccgggucgugcugugaggacuaguuauaagacugacuagcccgaugggccucccaacgggcccuccuccccuccuugcaccgagauuaauaaaaaaaaaaaaaaaaaaaaaaaaaaaaaaaaaaaaaaaaaaaaaaaaaaaaaaaaaaaaaaaaaaaaaaaaaaaaaaaaaaaaaaaaaaaaaaaaaaaa

SEQ ID NO: 17898 - RNA, 1899 nt, Artificial Sequence
  mRNA product Design i-3 (A100) comprising derived and/or modified sequence from LASV(Mad39;Clade IV)__ANH09723__NP (opt1)
aggagaaagcuuaccaugagcgccuccaaggagaucaagagcuuccuguggacccagucccuccgccgggagcugagcggcuacugcuccaacaucaagcuccagguggucaaggacgcccaggcgcugcugcacgggcuggacuucagcgagguguccaacgugcagcgccucaugcggaagcagcgccgggacgacaacgaccugaagcgccugcgggaccucaaccaggccgucaacaaccugguggagcugaaguccacccagcagaaguccgugcuccgcgucggcacgcugaccagcgacgaccugcucacccuggccgccgaccuggagaagcucaaguccaaggugacccggacggagcgcccccugaccgccgggguguacaugggcaaccugagcucccagcagcucgaccagcggcgcgcgcugcugaacaugaucgggaugagcggcggcaaccagggggcccggaccggccgcgacggggucgugcgggugugggacgucaagaacgccgagcuccugaacaaccaguucggcaccaugccgucccugacgcucgccugccugaccaagcagggccagguggaccugaacgacgugguccaggcgcucaccgaccuggggcugaucuacaccgccaaguaccccaacacgagcgaccucgaccgccugacccagucccaccccauccugaacaugaucgacaccaacaagagcucccucaacaucagcggcuacaacuucagccugggggccgccgugaaggccggcgcgugcaugcuggacgggggcaacaugcucgagaccaucaaggugagcccccagacgauggacggcauccucaagagcauccugaaggucaagaagucccuggggauguucaucagcgacaccccgggcgagcggaaccccuacgagaacauccuguacaagaucugccuguccggggacggcuggcccuacaucgccagccgcaccuccaucaccgggcgggccugggagaacacggugguggaccucgagagcggcggcaagccccagaaggccggguccaacaacagcaacaagucccugcagagcgccggcuucgcggccgggcugaccuacucccagcucaugacccugaaggacgccaugcugcagcuggacccgaacgccaagaccuggauggacaucgagggccgccccgaggaccccgucgagaucgcccucuaccagcccaucagcgggugcuacauccacuucuuccgggagccgacggaccugaagcaguucaagcaggacgcgaaguacucccacggcaucgacgugaccgaccuguucgccgcccagcccggccucaccagcgccgugaucgaggcccugccccgcaacauggucaucacgugccagggguccgacgacauccgcaagcuguucgagagccagggccggaaggacaucaagcucaucgacaucgcgcuguccaagaccgacagccgcaaguacgagaacgccgugugggaccaguacaaggaccugugccacaugcacaccggggucgugguggagaagaagaagaagggcgggaaggaggagaucacgccccacugcgcccucauggacugcaucauguucgacgccgcggucagcggcggccugaacacccuggugcuccgggccgugcugccgcgcgacauggucuuccggaccuccacccccaagguggugcugugaggacuaguuauaagacugacuagcccgaugggccucccaacgggcccuccuccccuccuugcaccgagauuaauaaaaaaaaaaaaaaaaaaaaaaaaaaaaaaaaaaaaaaaaaaaaaaaaaaaaaaaaaaaaaaaaaaaaaaaaaaaaaaaaaaaaaaaaaaaaaaaaaaaa

SEQ ID NO: 17899 - RNA, 1899 nt, Artificial Sequence
  mRNA product Design i-3 (A100) comprising derived and/or modified sequence from LASV(Z0947-SLE-2011;Clade IV)__AIT17841__NP (opt1)
aggagaaagcuuaccaugagcgccuccaaggagaucaagagcuuccuguggacccagucccuccgccgggagcugagcggcuacugcuccaacaucaagcuccagguggucaaggacgcccaggcgcugcugcacgggcuggacuucagcgagguguccaacgugcagcgccucaugcggaaggagcgccgggacgacaacgaccugaagcgccugcgggaccucaaccaggccgucaacaaccugguggagcucaagagcacccagcagaaguccauccugcgcgugggcacccugaccagcgacgaccugcucauccuggccgccgaccuggagaagcucaaguccaaggucacccggaccgagcgcccccugagcgccgggguguacaugggcaaccuguccagccagcagcucgaccagcggcgcgcgcugcugaacaugaucgggauguccggcagcaaccagggcgcccggacggggcgcgacggcgugguccgggugugggacgugaagaacgccgagcuccugaacaaccaguucgggaccaugccgucccugacccucgccugccugaccaagcagggccaggucgaccugaacgacgcggugcaggcccucacggaccuggggcugaucuacaccgccaaguaccccaacaccagcgaccucgaccgccugacccagucccaccccauccugaacaugaucgacacgaagaaguccagccucaacaucuccggcuacaacuucagccugggcgccgccgugaaggcgggggccugcaugcuggacggcgggaacaugcucgagaccaucaaggucagcccccagaccauggacggcauccucaagagcauccugaaggugaagaaggcccugggcauguucaucuccgacgccccgggggagcggaaccccuacgagaacauccuguacaagaucugccugagcggcgacggguggcccuacaucgccucccgcaccagcaucacgggccgggcgugggagaacaccguggucgaccucgaguccgacgggaagccccagaaggccggcagcaacggcuccaacaagagccugcaguccgccggguucaccgccggccugaccuacagccagcucaugacgcugaaggacgccaugcugcagcuggacccgaacgcgaagaccuggauggacaucgaggggcgccccgaggaccccguggagaucgcccucuaccagcccuccagcggcugcuacauccacuucuuccgggagccgaccgaccugaagcaguucaagcaggacgccaaguacucccacgggaucgacgugaccgaccuguucgccgcccagcccggccucacgagcgcggucaucgacgcccugccccgcaacauggugaucacgugccagggcuccgacgacauccgcaagcuguucgagagccaggggcggaaggacaucaagcucaucgacaucgcccugagcaagaccgacucccgcaaguacgagaacgccgugugggaccaguacaaggaccugugccacaugcacaccggcaucgucguggagaagaagaagcgcgggggcaaggaggagaucaccccgcacugcgcgcucauggacugcaucauguucgacgccgccgucagcgggggccugaacaccuccgugcugcgggccgugcucccccgggacauggucuuccgcaccagcacgccccggguggugcugugaggacuaguuauaagacugacuagcccgaugggccucccaacgggcccuccuccccuccuugcaccgagauuaauaaaaaaaaaaaaaaaaaaaaaaaaaaaaaaaaaaaaaaaaaaaaaaaaaaaaaaaaaaaaaaaaaaaaaaaaaaaaaaaaaaaaaaaaaaaaaaaaaaaa

SEQ ID NO: 17900 - RNA, 1899 nt, Artificial Sequence
  mRNA product Design i-3 (A100) comprising derived and/or modified sequence from LASV(Josiah;Clade IV)__NP_694869__NP (opt4)
aggagaaagcuuaccaugagcgccagcaaggagaucaagagcuuccuguggacccagagccugagaagagagcugagcggcuacugcagcaacaucaagcugcagguggugaaggacgcccaggcccugcugcacggccuggacuucagcgaggugagcaacgugcagagacugaugagaaaggagagaagagacgacaacgaccugaagagacugagagaccugaaccaggccgugaacaaccugguggagcugaagagcacccagcagaagagcauccugagagugggcacccugaccagcgacgaccugcugauccuggccgccgaccuggagaagcugaagagcaaggugaucagaaccgagagaccccugagcgccggcguguacaugggcaaccugagcagccagcagcuggaccagagaagagcccugcugaacaugaucggcaugagcggcggcaaccagggcgccagagccggcagagacggcguggugagagugugggacgugaagaacgccgagcugcugaacaaccaguucggcaccaugcccagccugacccuggccugccugaccaagcagggccagguggaccugaacgacgccgugcaggcccugaccgaccugggccugaucuacaccgccaaguaccccaacaccagcgaccuggacagacugacccagagccaccccauccugaacaugaucgacaccaagaagagcagccugaacaucagcggcuacaacuucagccugggcgccgccgugaaggccggcgccugcaugcuggacggcggcaacaugcuggagaccaucaaggugagcccccagaccauggacggcauccugaagagcauccugaaggugaagaaggcccugggcauguucaucagcgacacccccggcgagagaaaccccuacgagaacauccuguacaagaucugccugagcggcgacggcuggcccuacaucgccagcagaaccagcaucaccggcagagccugggagaacaccgugguggaccuggagagcgacggcaagccccagaaggccgacagcaacaacagcagcaagagccugcagagcgccggcuucaccgccggccugaccuacagccagcugaugacccugaaggacgccaugcugcagcuggaccccaacgccaagaccuggauggacaucgagggcagacccgaggaccccguggagaucgcccuguaccagcccagcagcggcugcuacauccacuucuucagagagcccaccgaccugaagcaguucaagcaggacgccaaguacagccacggcaucgacgugaccgaccuguucgccacccagcccggccugaccagcgccgugaucgacgcccugcccagaaacauggugaucaccugccagggcagcgacgacaucagaaagcugcuggagagccagggcagaaaggacaucaagcugaucgacaucgcccugagcaagaccgacagcagaaaguacgagaacgccgugugggaccaguacaaggaccugugccacaugcacaccggcguggugguggagaagaagaagagaggcggcaaggaggagaucaccccccacugcgcccugauggacugcaucauguucgacgccgccgugagcggcggccugaacaccagcgugcugagagccgugcugcccagagacaugguguucagaaccagcacccccagaguggugcugugaggacuaguuauaagacugacuagcccgaugggccucccaacgggcccuccuccccuccuugcaccgagauuaauaaaaaaaaaaaaaaaaaaaaaaaaaaaaaaaaaaaaaaaaaaaaaaaaaaaaaaaaaaaaaaaaaaaaaaaaaaaaaaaaaaaaaaaaaaaaaaaaaaaa

SEQ ID NO: 17901 - RNA, 1899 nt, Artificial Sequence
  mRNA product Design i-3 (A100) comprising derived and/or modified sequence from LASV(LP;Clade I)__AAF86702__NP (opt4)
aggagaaagcuuaccaugagcaacagcaaggagaucaagagcuuccuguggacccagagccugagaagagagcugagcggcuacugcagcaacaucaagcugcagguggugaaggacgcccaggcccugcugcacggccuggacuucagcgaggugagcaacgugcagagacugaugagaaagcagaagagagacgacgccgaccugaagagacugagagaccugaaccaggccgugaacaaccugguggagcugaagagcacccagcagaagaacgugcugagagugggcacccugagcagcgacgaccugaucacccuggccgccgaccuggagaagcugaagagcaaggugaucagaaccgagagaccccugagcagcggcguguacaugggcaaccugagcagccagcagcuggaccagagaagagcccugcugagcaugaucggcaugagcggcggcccccagggcaacagaaccggcggcgacggcguggugagagugugggacgugaagaacgccgagcugcugaacaaccaguucggcaccaugcccagccugacccuggccugccugaccaagcagggccagguggaccugaacgacgccgugcaggcccugaccgaccugggccugaucuacaccgccaaguaccccaacagcagcgaccuggacaugcugacccagagccaccccauccugggcaugguggacaccaagaagagcagccugaacaucagcggcuacaacuucagccugggcgccgccgugaaggccggcgccugcaugcuggacggcggcaacaugcuggagaccaucaaggugagcccccagaccauggacggcauccugaagagcauccugaaggugaagagaagccugggcauguucaucagcgacacccccggcgagagaaaccccuacgagaacauccuguacaagaucugccugagcggcgagggcuggcccuacaucgccagcagaaccagcaucaccggcagagccugggagaacacccugguggaccuggagagcgacaacaagccccccaagcugaacagcgccggcagcaacaagagccugcaggccgccggccugaacgccggccugaccuacagccagcugaugacccugaaggacugcaugcugcagcuggaccccagcagcaagaccuggaucgacaucgagggcagacccgaggaccccguggagaucgcccuguuccagcccagcagcggcugcuacauccacuucuucagagagcccaccgaccugaagcaguucaagcaggacgccaaguacagccacggcaucgacgugaccgaccuguucagcacccagcccggccugaccagcgccgugaucgaggcccugcccagaaacauggugcugaccugccagggcagcgacgacaucaagaagcugcuggagagccagggcagaagagacaucaagcugaucgacaucagccugagcaaggccgacagcagaaaguucgagaacgccgugugggaccaguacaaggaccugugccacaugcacaccggcguggugguggagaagaagaagagaggcggcaaggaggagaucaccccccacugcgcccugcuggacugcaucauguucgacgccgccaccaccggcagccugaacaucaccacccugagagccgugcugcccagagacaugguguucagaaccagcacccccaagguggugcugugaggacuaguuauaagacugacuagcccgaugggccucccaacgggcccuccuccccuccuugcaccgagauuaauaaaaaaaaaaaaaaaaaaaaaaaaaaaaaaaaaaaaaaaaaaaaaaaaaaaaaaaaaaaaaaaaaaaaaaaaaaaaaaaaaaaaaaaaaaaaaaaaaaaa

SEQ ID NO: 17902 - RNA, 1899 nt, Artificial Sequence
  mRNA product Design i-3 (A100) comprising derived and/or modified sequence from LASV(803213;Clade II)__AAF86704__NP (opt4)
aggagaaagcuuaccaugagcgccagcaaggaggugaagagcuuccuguggacccagagccugagaagagagcugagcggcuacugcagcaacaucaagcugcagguggugaaggacgcccaggcccugcugcacggccuggacuucagcgaggugaacaacgugcagagacugaugagaaagcagaagagagacgacggcgaccugaagagacugagagaccugaaccaggccgugaacaaccugguggagcugaagagcacccagcagaagagcauccugagagugggcacccugaccagcgacgaccugcugacccuggccgccgaccuggagaagcugaagagcaaggugaucagaaccgagagaccccugagcagcggcguguacaugggcaaccugagcacccagcagcuggagcagagaagagcccugcugaacaugaucggcauggugggcggcgcccagggcacccagcccggcagagacggcguggugagagugugggacgugaagaaccccgaccugcugaacaaccaguucggcaccaugcccagccugacccuggccugccugaccaagcagggccagguggaccugaacgacgccgugcuggcccugaccgaccugggccugaucuacaccgccaaguaccccaacagcagcgaccuggacagacugagccagagccaccccauccugaacaugguggacaccaagaagagcagccugaacaucagcggcuacaacuucagccugggcgccgccgugaaggccggcgccugcaugcuggacggcggcaacaugcuggagaccaucaaggugaccccccagaccauggacggcauccugaagagcauccugaaggugaagagaagccugggcauguucgugagcgacacccccggcgagagaaaccccuacgagaacauccuguacaagaucugccugagcggcgacggcuggcccuacaucgccagcagaaccagcaucgugggcagagccugggagaacaccaccguggaccuggagagcgacggcaagccccagaaggugggcaccgccggcagcaacaagagccugcagagcgccggcuuccccaccggccugaccuacagccagcugaugacccugaaggacagcaugaugcagcuggaccccagcgccaagaccuggaucgacaucgagggcagacccgaggaccccguggagaucgcccuguaccagcccaugagcggcugcuacauccacuucuucagagagcccaccgaccugaagcaguucaagcaggacgccaaguacagccacggcaucgacguggccgaccuguuccccgcccagcccggccugaccagcgccgugaucgaggcccugcccagaaacauggugcugaccugccagggcagcgacgacaucaagaagcugcuggacagccagggcagaagagacaucaagcugaucgacaucagccugagcaagguggacagcagaaaguucgagaacgccgugugggaccagugcaaggaccugugccacaugcacaccggcguggugguggagaagaagaagagaggcggcaaggaggagaucaccccccacugcgcccugauggacugcaucauguucgacgccgccgugagcggcggccugaacauccccgugcugagagccgugcugcccagagacaugguguucagaaccagcagccccaagguggugcugugaggacuaguuauaagacugacuagcccgaugggccucccaacgggcccuccuccccuccuugcaccgagauuaauaaaaaaaaaaaaaaaaaaaaaaaaaaaaaaaaaaaaaaaaaaaaaaaaaaaaaaaaaaaaaaaaaaaaaaaaaaaaaaaaaaaaaaaaaaaaaaaaaaaa

SEQ ID NO: 17903 - RNA, 1902 nt, Artificial Sequence
  mRNA product Design i-3 (A100) comprising derived and/or modified sequence from LASV(GA391;Clade III)__CAA36646__NP (opt4)
aggagaaagcuuaccaugagcgccagcaaggaggugagaagcuuccuguggacccagagccugagaagagagcugagcggcuacugcagcaacaucaagcugcagguggugaaggacgcccaggcccugcugcacggccuggacuucagcgaggugagcaacgugcagagacugaugagaaagcagaagagagacgacggcgaccugaagagacugagagaccugaaccaggccgugaacaaccugguggagcugaagagcacccagcagaagagcgugcugagagugggcacccugagcagcgacgaccugcugauccuggccgccgaccuggagaagcugaagagcaaggugaccagaaccgagagaccccugagcagcggcguguacaugggcaaccugagcagccagcagcuggaccagagaagagcccugcugaacaugaucggcaugaccggcgugagcggcggcggcaagggcgccagcgacggcaucgugagagugugggacgugaagaacgccgagcugcugaacaaccaguucggcaccaugcccagccugacccuggccugccugaccaagcagggccagguggaccugaacgacgccgugcaggcccugaccgaccugggccugaucuacaccgccaaguaccccaacagcagcgaccuggacagacugagccagagccaccccauccugaacaugaucgacaccaagaagagcagccugaacaucagcggcuacaacuucagccugggcgccgccgugaaggccggcgccugcaugcuggacggcggcaacaugcuggagaccaucaaggugagcccccagaccauggacggcauccugaagagcauccugaaggugaagaagagccugggcauguucgugagcgacacccccggcgagagaaaccccuacgagaacauccuguacaagaucugccugagcggcgacggcuggcccuacaucgccagcagaaccagcaucgugggcagagccugggagaacaccgugguggaccuggagcaggacaacaagccccagaagaucggcaacggcggcagcaacaagagccugcagagcgccggcuucgccgccggccugaccuacagccagcugaugacccugaaggacuucaagugcuucaaccugauccccaacgccaagaccuggauggacaucgagggcagacccgaggaccccguggagaucgcccuguaccagcccagcagcggcugcuacgugcacuucuucagagagcccaccgaccugaagcaguucaagcaggacgccaaguacagccacggcaucgacgugaccgaccuguucgccgcccagcccggccugaccagcgccgugaucgaggcccugcccagaaacauggugaucaccugccagggcagcgaggacaucagaaagcugcuggagagccagggcagaagagacaucaagcugaucgacaucacccugagcaaggccgacagcagaaaguucgagaacgccgugugggaccaguucaaggaccugugccacaugcacaccggcguggugguggagaagaagaagagaggcggcaaggaggagaucaccccccacugcgcccugauggacugcaucauguucgacgccgccgugagcggcggccuggacgccaaggugcugagaguggugcugcccagagacaugguguucagaaccagcacccccaagguggugcugugaggacuaguuauaagacugacuagcccgaugggccucccaacgggcccuccuccccuccuugcaccgagauuaauaaaaaaaaaaaaaaaaaaaaaaaaaaaaaaaaaaaaaaaaaaaaaaaaaaaaaaaaaaaaaaaaaaaaaaaaaaaaaaaaaaaaaaaaaaaaaaaaaaaa

SEQ ID NO: 17904 - RNA, 1899 nt, Artificial Sequence
  mRNA product Design i-3 (A100) comprising derived and/or modified sequence from LASV(AV;Clade V)__CCA30315__NP (opt4)
aggagaaagcuuaccaugagcgccagcaaggaggugaagagcuuccuguggacccagagccugagaagagagcugagcggcuacugcagcaacaucaagcugcagguggugaaggacgcccaggcccugcugcacggccuggacuucagcgaggugagcaacgugcagagacugaugagaaagcagagaagagacgacagcgaccugaagagacugagagaccugaaccaggccgugaacaaccugguggagcugaagagcacccagcagaagagcgugcugagagugggcacccugagcagcgacgaccugcugacccuggccgccgaccuggagaagcugaagagcaaggugaccagaaccgagagaccccugagcagcggcguguacaugggcaaccugagcagccagcagcuggaccagagaagagcccugcugaaccugaucggcaugaccaacggcagccagggcagccaggccggcagagacggcguggugagagugugggacgugaagaacgccgagcugcugaacaaccaguucggcaccaugcccagccugacccuggccugccugaccaagcagggccagguggaccugaacgacguggugcaggcccugaccgaccugggccugaucuacaccgccaaguaccccaacaccagcgaccuggacagacugacccagagccaccccauccugaacaugaucgacaccaagaagagcagccugaacaucagcggcuacaacuucagccugggcgccgccgugaaggccggcgccugcaugcuggacggcggcaacaugcuggagaccaucaaggugagcccccagagcauggacggcauccugaagagcauccugaaggugaagagagcccugggcauguucgugagcgacacccccggcgagagaaaccccuacgagaacauccuguacaagaucugccugagcggcgacggcuggcccuacaucgccagcagaaccagcaucgugggcagagccugggagaacaccgugguggaccuggagaccgacggcaagccccagaagaucggcagcggcaacagcaacaagagccugcagagcgccggcuucagcgccggccugaccuacagccagcugaugacccugaaggacgccaugcugcagcuggaccccaacgccaagaccuggauggacaucgagggcagacccgaggaccccguggagguggcccuguaccagcccaucagcggcugcuacauccacuucuucagagagcccaccgaccugaagcaguucaagcaggacgccaaguacagccacggcaucgacaucgccgaccuguucgccgcccagcccggccugaccagcgccgugaucgaggcccugcccagaaacauggugaucaccugccagggcagcgaggacaucaagaagcugcuggagagccagggcagaaaggacaucaagcugaucgacaucgcccugagcaagaucgacagcagaaaguucgagaacgccgugugggaccaguacaaggaccugugccacaugcacaccggcguggugguggagaagaagaagagaggcggcaaggaggagaucaccccccacugcgcccugauggacugcaucauguucgacgccgccgugagcggcggccugaacacccuggugcugagagccgugcugcccagagacaugguguucagaaccagcacccccagaguggugcugugaggacuaguuauaagacugacuagcccgaugggccucccaacgggcccuccuccccuccuugcaccgagauuaauaaaaaaaaaaaaaaaaaaaaaaaaaaaaaaaaaaaaaaaaaaaaaaaaaaaaaaaaaaaaaaaaaaaaaaaaaaaaaaaaaaaaaaaaaaaaaaaaaaaa

SEQ ID NO: 17905 - RNA, 1899 nt, Artificial Sequence
  mRNA product Design i-3 (A100) comprising derived and/or modified sequence from LASV(Togo/2016/7082;Clade VI)__AMR44578__NP (opt4)
aggagaaagcuuaccaugagcaacagcaaggaggugaagagcuuccuguggacccagagccugagaagagagcugagcggcuacugcagcaacaucaagcugcagguggugaaggacgcccaggcccugcugcacggccuggacuucagcgaggugagcaacgugcagagacugaugagaaagcagaagagagacgacggcgaccugaagagacugagagaccugaaccaggccgugaacaaccugguggagcugaagagcgugcagcagaagagcauccugagagugggcacccugaccagcgacgaccugcugacccuggccgccgaccuggagaagcugaagagcaaggugaccagaaccgagagaccccugagcagcggcguguacaugggcaaccugagcagccagcagcuggaccagagaagagcccugcugagcaugaucggcaugagcggcggcaaccagaacagccagcccaagggcgacggcguggugagagugugggacgugaagaacgccgaccugcugaacaaccaguucggcaccaugcccagccugacccuggccugccugaccaagcagggccagguggaccugaacgacgccgugcaggcccugaccgaccugggccugaucuacaccgccaaguaccccaacagcagcgaccuggacagacugagccagagccaccccauccugaacaugaucgacaccaagaagagcagccugaacaucagcggcuacaacuucagccugggcgccgccaucaagaccggcgccugcaugcuggacggcggcaacaugcuggagaccaucaaggugaccccccagaccauggacggcauccugaagagcauccugaaggugaagagaagccugggcauguucaucagcgacacccccggcgagagaaaccccuacgagaacauccuguacaagaucugccugagcggcgacggcuggcccuacaucgccagcagaaccgccaucaucggcagagccugggagaacaccgugguggaccuggagagcgacagcaagccccagaagaucggcagcaacggcagcaacaagagccugcagagcgccggcuucgcccccggccugaccuacagccagcugaugacccugaaggacagcaugcugcagcuggaccccaacgccaagaccuggaucgacaucgagggcagacccgaggaccccguggagguggcccuguuccagcccaucagcggcugcuacauccacuucuucagagagcccaccgaccugaagcaguucaagcaggacgccaaguacagccacggcaucgacgugaccgaccuguucgccgcccagcccggccugaccagcgccgugaucgaggcccugcccagaaacauggugcugaccugccagggcagcgacgacaucaagaagcugcuggacagccagggcagaagagacaucaagcugaucgacgugagccugaacaagaucgacagcagaaaguucgagaacgccgugugggaccaguacaaggaccugugccacaugcacaccggcguggugguggagaagaagaagaagggcggcaaggaggagaucaccccccacugcgcccugcuggacugcaucauguucgacgccgccgugagcggcggccugaacgccaccgugcugagagccgugcugcccagagacaugguguucagaaccagcagccccaagguggugcugugaggacuaguuauaagacugacuagcccgaugggccucccaacgggcccuccuccccuccuugcaccgagauuaauaaaaaaaaaaaaaaaaaaaaaaaaaaaaaaaaaaaaaaaaaaaaaaaaaaaaaaaaaaaaaaaaaaaaaaaaaaaaaaaaaaaaaaaaaaaaaaaaaaaa

SEQ ID NO: 17906 - RNA, 1899 nt, Artificial Sequence
  mRNA product Design i-3 (A100) comprising derived and/or modified sequence from LASV(KAK-428;Clade n.d. (VII))__ANH09741__NP (opt4)
aggagaaagcuuaccaugagcaacagcaaggaggugaagagcuuccuguggacccagagccugagaagagagcugagcggcuacugcaccaacaucaagcugcagguggugaaggacgcccaggcccugcugcacggccuggacuucagcgaggugagcaacgugcagagacugaugagaaagcagaagagagacgacaacgaccugaagagacugagagaccugaaccaggccgugaacaaccugguggagcugaagagcgugcagcagaagagcgugcugaaggugggcacccugaacagcgacgaccugcugacccuggccgccgaccuggagaagcugaagagcaagguggugagaaccgagagaccccugagcagcggcguguacaugggcaaccugagcagccagcagcuggaccagagaagagcccugcugaacaugaucggcauggccggcggcagccagggcaaccagcccagcagagacggcguggugagagugugggacgugaagaacgccgaccugcugaacaaccaguucggcaccaugcccagccugacccuggccugccugaccaagcagggccagguggaccugaacgacguggugcuggcccugaccgaccugggccugaucuacaccgccaaguaccccaacagcagcgaccuggacagacugagccagaaccaccccgugcugaacaugaucgacgugaacaagagcagccugaacaucagcggcuacaacuucagccugggcgccgccgugaaggccggcgccugcaugcuggacggcggcaacaugcuggagaccaucaagaucagcccccagaccguggacggcauccugaagagcauccugaaggugaagagagcccugggcauguucgugagcgacacccccggcgagagaaaccccuacgagaacauccuguacaaggugugccugagcggcaacggcuggcccuacaucgccagcagaaccagcaucgugggcagagccugggagaacaccgugguggaccuggagagcaacaagaaccagcccaaggugggcaacaacggcagcaacaagaugcugcagagcagcggcuucgccaccggccugaccuacagccagcugaugacccugagagacagcaugcugcagcuggaccccaccgccaagaccuggaucgacaucgagggcagacccgaggaccccguggagcuggcccuguuccagcccagcagcggcugcuacauccacuucuucagagagcccaccgaccugaagcaguucaagcaggacgccaaguacagccacggcaucgacgugaacgaccuguucagcgcccagcccggccugaccagcgccgugcuggaggcccugcccagaaacauggugcugaccugccagggcagcgacgacaucagaaagcugcuggacagccaggacagaaaggacaucaagcugaucgacaucagccugagcaaggccgacgccagaaaguucgagaacgacgugugggaccaguucaaggaccugugccacaugcacaccggcaucgugguggagaagaagaagaagggcggcaagcaggagaugaccccccacugcgcccugcuggacugcaucauguucgacgccgccgugagcggcggccugaacgugcccacccugagagccgugcugcccaccgacaugguguucagaaccaucaccaccaagguggugcugugaggacuaguuauaagacugacuagcccgaugggccucccaacgggcccuccuccccuccuugcaccgagauuaauaaaaaaaaaaaaaaaaaaaaaaaaaaaaaaaaaaaaaaaaaaaaaaaaaaaaaaaaaaaaaaaaaaaaaaaaaaaaaaaaaaaaaaaaaaaaaaaaaaaa

SEQ ID NO: 17907 - RNA, 1899 nt, Artificial Sequence; identical to SEQ ID NO: 17901
  mRNA product Design i-3 (A100) comprising derived and/or modified sequence from LASV(Pinneo-NIG-1969;Clade I)__AIT17837__NP (opt4)

SEQ ID NO: 17908 - RNA, 1899 nt, Artificial Sequence
  mRNA product Design i-3 (A100) comprising derived and/or modified sequence from LASV(ISTH0009-NIG-2011;Clade II)__AIT17405__NP (opt4)
aggagaaagcuuaccaugagcgugagcaaggaggugaagagcuuccuguggacccagagccugagaagagagcugagcggcuacugcagcaacaucaagcugcagguggugaaggacgcccaggcccugcugcacggccuggacuucagcgaggugagcaacgugcagagacugaugagaaagcagaagagagacgacagcgaccugaagagacugagagaccugaaccaggccgugaacaaccugguggagcugaagagcacccagcagaagagcauccugagagugggcacccugaccagcgacgaccugcugacccuggccgccgaccuggagaagcugaagagcaaggugaucagaaccgagagaccccugagcagcggcguguacaugggcaaccugagcacccagcagcuggagcagagaagagcccugcugaacaugaucggcauggugggcggcgcccagggcacccagcccggcagagacggcguggugagagugugggacgugaagaaccccgaccugcugaacaaccaguucggcaccaugcccagccugacccuggccugccugaccaagcagggccagguggaccugaacgacgccgugcuggcccugaccgaccugggccugaucuacaccgccaaguaccccaacagcagcgaccuggacagacugagccagagccaccccauccugaacaugguggacaucaagaagagcagccugaacaucagcggcuacaacuucagccugggcgccgccgugaaggccggcgccugcaugcuggacggcggcaacaugcuggagaccaucaaggugaccccccagaccauggacggcauccugaagagcauccugaaggugaagagaagccugggcauguucgugagcgacacccccggcgagagaaaccccuacgagaacauccuguacaagaucugccugagcggcgacggcuggcccuacaucgccagcagaaccagcaucgugggcagagccugggagaacaccaccguggaccuggagagcgacggcaagccccagaaggugggcagcgccggcagcaacaagagccugcagagcgccggcuuccccaccggccugaccuacagccagcugaugacccugaaggacagcaugaugcagcuggaccccagcgccaagaccuggaucgacaucgagggcagacccgaggaccccguggagaucgcccuguaccagcccaugagcggcugcuacauccacuucuucagagagcccaccgaccugaagcaguucaagcaggacgccaaguacagccacggcaucgacguggccgaccuguuccccgcccagcccggccugaccagcgccgugaucgaggcccugcccagaaacauggugcugaccugccagggcagcgacgacaucaagagacugcuggacagccagggcagaagagacaucaagcugaucgacaucgcccugagcaaggccgacagcagaagauucgagaacgccgugugggaccagugcaaggaccugugccacaugcacaccggcguggugguggagaagaagaagagaggcggcaaggaggagaucaccccccacugcgcccugauggacugcaucauguacgacgccgccgugagcggcggccugaacauccccgugcugagagccgugcugcccagagacaugguguucagaaccagcagccccaagguggugcugugaggacuaguuauaagacugacuagcccgaugggccucccaacgggcccuccuccccuccuugcaccgagauuaauaaaaaaaaaaaaaaaaaaaaaaaaaaaaaaaaaaaaaaaaaaaaaaaaaaaaaaaaaaaaaaaaaaaaaaaaaaaaaaaaaaaaaaaaaaaaaaaaaaaa

SEQ ID NO: 17909 - RNA, 1899 nt, Artificial Sequence
  mRNA product Design i-3 (A100) comprising derived and/or modified sequence from LASV(ISTH2010-NIG-2012;Clade II)__AIT17483__NP (opt4)
aggagaaagcuuaccaugagcgccagcaaggaggugaagagcuuccuguggacccagagccugagaagagagcugagcggcuacugcagcaacaucaagcugcagguggugaaggacgcccaggcccugcugcacggccuggacuucagcgaggugagcaacgugcagagacugaugagaaagcagaagagagacgacagcgaccugaagagacugagagaccugaaccaggccgugaacaaccugguggagcugaagagcacccagcagaagagcauccugagagugggcacccugaccagcgacgaccugcugacccuggccgccgaccuggagaagcugaagagcaaggugaucagaaccgagagaccccugagcagcggcguguacaugggcaaccugagcacccagcagcuggagcagagaagagcccugcugaaccugaucggcauggugggcggcgcccagggcacccagcccggcagagacggcguggugagagugugggacgugaagaaccccgaccugcugaacaaccaguucggcaccaugcccagccugacccuggccugccugaccaagcagggccagguggaccugaacgacgccgugcuggcccugaccgaccugggccugaucuacaccgccaaguaccccaacagcagcgaccuggacagacugagccagagccaccccauccugaacaugguggacaccaagaagagcagccugaacaucagcggcuucaacuucagccugggcgccgccgugaaggccggcgccugcaugcuggacggcggcaacaugcuggagaccaucaaggugaccccccagaccauggacggcauccugaagagcauccugaaggugaagaagagccugggcauguucgugagcgacacccccggcgagagaaaccccuacgagaacauccuguacaagaucugccugagcggcgacggcuggcccuacaucgccagcagaaccagcaucgugggcagagccugggagaacaccaccguggaccuggagagcgacggcaagccccacaaggugggcaccgccggcagcaacaagagccugcagagcgccggcuuccccaccggccugaccuacagccagcugaugacccugaaggacagcaugaugcagcuggaccccagcgccaagaccuggaucgacaucgagggcagacccgaggaccccguggagaucgcccuguaccagcccaugagcggcugcuacauccacuucuucagagagcccaccgaccugaagcaguucaagcaggacgccaaguacagccacggcaucgacguggccgaccuguuccccgcccagcccggccugaccagcgccgugaucgaggcccugcccagaaacauggugcugaccugccagggcagcgacgacaucaagagacugcuggacagccagggcagaagagacaucaagcugaucgacaucgcccugagcaaggccgacagcagaagauucgagaacgccgugugggaccagugcaaggaccugugccacaugcacaccggcguggugguggagaagaagaagagaggcggcaaggaggagaucaccccccacugcgcccugauggacugcaucauguacgacgccgccgugagcggcggccugaacauccccgugcugagagccgugcugcccagagacaugguguucagaaccagcagccccaagguggugcugugaggacuaguuauaagacugacuagcccgaugggccucccaacgggcccuccuccccuccuugcaccgagauuaauaaaaaaaaaaaaaaaaaaaaaaaaaaaaaaaaaaaaaaaaaaaaaaaaaaaaaaaaaaaaaaaaaaaaaaaaaaaaaaaaaaaaaaaaaaaaaaaaaaaa

SEQ ID NO: 17910 - RNA, 1899 nt, Artificial Sequence
  mRNA product Design i-3 (A100) comprising derived and/or modified sequence from LASV(Lassa virus/H.sapiens-wt/NGA/2015/ISTH_0543;Clade II)__AVO03640__NP (opt4)
aggagaaagcuuaccaugagcgccagcaaggaggugaagagcuuccuguggacccagagccugagaagagagcugagcggcuacugcagcaacaucaagcugcagguggugaaggacgcccaggcccugcugcacggccuggacuucagcgaggugagcaacgugcagagacugaugagaaagcagaagagagacgacagcgaccugaagagacugagagaccugaaccaggccgugaacaaccugguggagcugaagagcacccagcagaagagcauccugagagugggcacccugaccagcgacgaccugcugacccuggccgccgaccuggagaagcugaagagcaaggugaucagaaccgagagaccccugagcagcggcguguacaugggcaaccugagcacccagcagcuggagcagagaagagcccugcugaacaugaucggcauggugggcggcgcccagggcacccagcccggcagagacggcguggugagagugugggacgugaagaaccccgaccugcugaacaaccaguucggcaccaugcccagccugacccuggccugccugaccaagcagggccagguggaccugaacgacgccgugcuggcccugaccgaccugggccugaucuacaccgccaaguaccccaacagcagcgaccuggacagacugagccagagccaccccauccugaacaugguggacaccaagaagagcagccugaacaucagcggcuacaacuucagccugggcgccgccgugaaggccggcgccugcaugcuggacggcggcaacaugcuggagaccaucaaggugaccccccagaccauggacggcauccugaagagcauccugaaggugaagaagagccugggcauguucgugagcgacacccccggcgagagaaaccccuacgagaacauccuguacaagaucugccugagcggcgacggcuggcccuacaucgccagcagaaccagcaucgugggcagagccugggagaacaccaccguggaccuggagagcgacggcaagccccagaaggugggcagcgccggcagcaacaagagccugcagagcgccggcuuccccaccggccugaccuacagccagcugaugacccugaaggacagcaugaugcagcuggaccccagcgccaagaccuggaucgacaucgagggcagacccgaggaccccguggagaucgcccuguaccagcccaugagcggcugcuacauccacuucuucagagagcccaccgaccugaagcaguucaagcaggacgccaaguacagccacggcaucgacguggccgaccuguuccccgcccagcccggccugaccagcgccgugaucgaggcccugcccagaaacauggugcugaccugccagggcagcgacgacaucaagagacugcuggacagccagggcagaaaggacaucaagcugaucgacaucgcccugagcaaggccgacagcagaagauucgagaacgccgugugggaccagugcaaggaccugugccacaugcacaccggcguggugguggagaagaagaagagaggcggcaaggaggagaucaccccccacugcgcccugauggacugcaucauguacgacgccgccgugagcggcggccugaacauccccgugcugagagccgugcugcccagagacaugguguucagaaccagcagccccaagguggugcugugaggacuaguuauaagacugacuagcccgaugggccucccaacgggcccuccuccccuccuugcaccgagauuaauaaaaaaaaaaaaaaaaaaaaaaaaaaaaaaaaaaaaaaaaaaaaaaaaaaaaaaaaaaaaaaaaaaaaaaaaaaaaaaaaaaaaaaaaaaaaaaaaaaaa

SEQ ID NO: 17911 - RNA, 1899 nt, Artificial Sequence
  mRNA product Design i-3 (A100) comprising derived and/or modified sequence from LASV(Lassa virus/H.sapiens-wt/NGA/2016/ISTH_0009;Clade II)__AVO03572__NP (opt4)
aggagaaagcuuaccaugagcgccagcaaggaggugaagagcuuccuguggacccagagccugagaagagagcugagcggcuacugcagcaacaucaagcugcagguggugaaggacgcccaggcccugcugcacggccuggacuucagcgaggugagcaacgugcagagacugaugagaaagcagaagagagacgacagcgaccugaagagacugagagaccugaaccaggccgugaacaaccugguggagcugaagagcacccagcagaagagcauccugagagugggcacccugaccagcgacgaccugcugacccuggccgccgaccuggagaagcugaagagcaaggugaucagaaccgagagaccccugagcagcggcguguacaugggcaaccugagcacccagcagcuggagcagagaagagcccugcugaacaugaucggcauggugggcggcgcccagggcacccagcccggcagagacggcguggugagagugugggacgugaagaaccccgaccugcugaacaaccaguucggcaccaugcccagccugacccuggccugccugaccaagcagggccagguggaccugaacgacgccgugcuggcccugaccgaccugggccugaucuacaccgccaaguaccccaacagcagcgaccuggacagacugagccagagccaccccauccugaacaugguggacaccaagaagagcagccugaacaucagcggcuacaacuucagccugggcgccgccgugaaggccggcgccugcaugcuggacggcggcaacaugcuggagaccaucaaggugaccccccagaccauggacggcauccugaagagcauccugaaggugaagaagagccugggcauguucgugagcgacacccccggcgagagaaaccccuacgagaacauccuguacaagaucugccugagcggcgacggcuggcccuacaucgccagcagaaccagcaucgugggcagagccugggagaacaccaccguggaccuggagagcgacggcaagccccagaaggugggcagcgccggcagcaacaagagccugcagagcgccggcuuccccaccggccugaccuacagccagcugaugacccugaaggacagcaugaugcagcuggaccccagcgccaagaccuggaucgacaucgagggcagacccgaggaccccguggagaucgcccuguaccagcccaugagcggcugcuacauccacuucuucagagagcccaccgaccugaagcaguucaagcaggacgccaaguacagccacggcaucgacguggccgaccuguuccccgcccagcccggccugaccagcgccgugaucgaggcccugcccagaaacauggugcugaccugccagggcagcgacgacaucaagagacugcuggacagccagggcagaagagacaucaagcugaucgacaucgcccugagcaaggccgacagcagaagauucgagaacgccgugugggaccagugcaaggaccugugccacaugcacaccggcguggugguggagaagaagaagagaggcggcaaggaggagaucaccccccacugcgcccugauggacugcaucauguacgacgccgccgugagcggcggccugaacauccccgugcugagagccgugcugcccagagacaugguguucagaaccagcagccccaagguggugcugugaggacuaguuauaagacugacuagcccgaugggccucccaacgggcccuccuccccuccuugcaccgagauuaauaaaaaaaaaaaaaaaaaaaaaaaaaaaaaaaaaaaaaaaaaaaaaaaaaaaaaaaaaaaaaaaaaaaaaaaaaaaaaaaaaaaaaaaaaaaaaaaaaaaa

SEQ ID NO: 17912 - RNA, 1899 nt, Artificial Sequence
  mRNA product Design i-3 (A100) comprising derived and/or modified sequence from LASV(Lassa virus/H.sapiens-wt/NGA/2016/ISTH_0017;Clade II)__AVO03568__NP (opt4)
aggagaaagcuuaccaugagcgccagcaaggaggugaagagcuuccuguggacccagagccugagaagagagcugagcggcuacugcagcagcaucaagcugcagguggugaaggacgcccaggcccugcugcacggccuggacuucagcgaggugagcaacgugcagagacugaugagaaagcagaagagagacgacagcgaccugaagagacugagagaccugaaccaggccgugaacaaccugguggagcugaagagcacccagcagaagagcauccugagagugggcacccugaccagcgacgaccugcugacccuggccgccgaccuggagaagcugaagagcaaggugaucagaaccgagagaccccugagcagcggcguguacaugggcaaccugagcacccagcagcuggagcagagaagagcccugcugaacaugaucggcauggccggcggcgcccagggcacccagcccggcagagacggcguggugagagugugggacgugaagaaccccgaccugcugaacaaccaguucggcaccaugcccagccugacccuggccugccugaccaagcagggccagguggaccugaacgacgccgugcuggcccugaccgaccugggccugaucuacaccgccaaguaccccaacagcagcgaccuggacagacugagccagagccaccccauccugaacaugguggacaccaagaagagcagccugaacaucagcggcuacaacuucagccugggcgccgccgugaaggccggcgccugcaugcuggacggcggcaacaugcuggagaccaucaaggugaccccccagaccauggacggcauccugaagagcauccugaaggugaagagaagccugggcauguucgugagcgacgcccccggcgagagaaaccccuacgagaacauccuguacaagaucugccugagcggcgacggcuggcccuacaucgccagcagaaccagcaucgugggcagagccugggagaacaccaccguggaccuggagagcgacggcaagccccagaaggugggcgccaccggcagcaacaagagccugcagagcgccggcuuccccaccggccugaccuacagccagcugaugacccugaaggacagcaugaugcagcuggaccccagcgccaagaccuggaucgacaucgagggcagacccgaggaccccguggagguggcccuguaccagcccgugagcggcugcuacauccacuucuucagagagcccaccgaccugaagcaguucaagcaggacgccaaguacagccacggcaucgacguggccgaccuguuccccgcccagcccggccugaccagcgccgugaucgaggcccugcccagaaacauggugcugaccugccagggcagcgacgacaucaagaagcugcuggacagccagggcagaaaggacaucaagcugaucgacaucgcccugagcaaggccgacagcagaagauucgagaacgccgugugggaccagugcaaggaccugugccacaugcacaccggcguggugguggagaagaagaagagaggcggcaaggaggagaucaccccccacugcgcccugauggacugcaucauguacgacgccgccgugagcggcggccugaacauccccgugcugagagccgugcugcccagagacaugguguucagaaccagcagccccaagguggugcugugaggacuaguuauaagacugacuagcccgaugggccucccaacgggcccuccuccccuccuugcaccgagauuaauaaaaaaaaaaaaaaaaaaaaaaaaaaaaaaaaaaaaaaaaaaaaaaaaaaaaaaaaaaaaaaaaaaaaaaaaaaaaaaaaaaaaaaaaaaaaaaaaaaaa

SEQ ID NO: 17913 - RNA, 1899 nt, Artificial Sequence
  mRNA product Design i-3 (A100) comprising derived and/or modified sequence from LASV(Lassa virus/H.sapiens-wt/NGA/2018/ISTH_0959;Clade II)__AVV65100__NP (opt4)
aggagaaagcuuaccaugagcgccagcaaggaggugaagagcuuccuguggacccagagccugagaagagagcugagcggcuacugcagcaacaucaagcugcagguggugaaggacgcccaggcccugcugcacggccuggacuucagcgaggugagcaacgugcagagacugaugagaaagcagaagagagacgacagcgaccugaagagacugagagaccugaaccaggccgugaacaaccugguggagcugaagagcacccagcagaagagcauccugagagugggcacccugaccagcgacgaccugcugacccuggccgccgaccuggagaagcugaagagcaaggugaucagaaccgagagaccccugagcagcggcguguacaugggcaaccugagcacccagcagcuggagcagagaagagcccugcugaaccugaucggcauggugggcggcgcccagggcacccagcccggcagagacggcguggugagagugugggacgugaagaaccccgaccugcugaacaaccaguucggcaccaugcccagccugacccuggccugccugaccaagcagggccagguggaccugaacgacguggugcuggcccugaccgaccugggccugaucuacaccgccaaguaccccaacagcagcgaccuggacagacugagccagagccaccccauccugaacaugguggacaccaagaagagcagccugaacaucagcggcuucaacuucagccugggcgccgccgugaaggccggcgccugcaugcuggacggcggcaacaugcuggagaccaucaaggugaccccccagaccauggacggcauccugaagagcauccugaaggugaagaagagccugggcauguucgugagcgacacccccggcgagagaaaccccuacgagaacauccuguacaagaucugccugagcggcgacggcuggcccuacaucgccagcagaaccagcaucgugggcagagccugggagaacaccaccguggaccuggagagcgacggcaagccccacaaggugggcaccgccggcagcaacaagagccugcagagcgccggcuuccccaccggccugaccuacagccagcugaugacccugaaggacagcaugaugcagcuggaccccagcgccaagaccuggaucgacaucgagggcagacccgaggaccccguggagaucgcccuguaccagcccaugagcggcugcuacauccacuucuucagagagcccaccgaccugaagcaguucaagcaggacgccaaguacagccacggcaucgacguggccgaccuguuccccgcccagcccggccugaccagcgccgugaucgaggcccugcccagaaacauggugcugaccugccagggcagcgacgacaucaagagacugcuggacagccagggcagaaaggacaucaagcugaucgacaucgcccugagcaagaccgacagcagaagauucgagaacgccgugugggaccagugcaaggaccugugccacaugcacaccggcguggugguggagaagaagaagagaggcggcaaggaggagaucaccccccacugcgcccugauggacugcaucauguacgacgccgccgugagcggcggccugaacauccccgugcugagagccgugcugcccagagacaugguguucagaaccagcagccccaagguggugcugugaggacuaguuauaagacugacuagcccgaugggccucccaacgggcccuccuccccuccuugcaccgagauuaauaaaaaaaaaaaaaaaaaaaaaaaaaaaaaaaaaaaaaaaaaaaaaaaaaaaaaaaaaaaaaaaaaaaaaaaaaaaaaaaaaaaaaaaaaaaaaaaaaaaa

SEQ ID NO: 17914 - RNA, 1899 nt, Artificial Sequence
  mRNA product Design i-3 (A100) comprising derived and/or modified sequence from LASV(LASV003-NIG-2008;Clade II)__AIT17581__NP (opt4)
aggagaaagcuuaccaugagcgccagcaaggaggugaagagcuuccuguggacccagagccugagaagagagcugagcggcuacugcagcagcaucaagcugcagguggugaaggacgcccaggcccugcugcacggccuggacuucagcgaggugagcaacgugcagagacugaugagaaagcagaagagagacgacagcgaccugaagagacugagagaccugaaccaggccgugaacaaccugguggagcugaagagcacccagcagaagagcgugcugagagugggcacccugaccagcgacgaccugcugacccuggccgccgaccuggagaagcugaagagcaaggugaucagaaccgagagaccccugagcagcggcguguacaugggcaaccugagcgcccagcagcuggagcagagaagaacccugcugaacaugaucggcauggugggcggcgcccagggcacccagcccggcagagacggcguggugagagugugggacgugaagaaccccgaccugcugaacaaccaguucggcaccaugcccagccugacccuggccugccugaccaagcagggccagguggaccugaacgacguggugcuggcccugaccgaccugggccugaucuacaccgccaaguaccccaacagcagcgaccuggacagacugagccagagccaccccauccugagcaugguggacaccaagaagagcagccugaacaucagcggcuacaacuucagccugggcgccgccgugaaggccggcgccugcaugcuggacggcggcaacaugcuggagaccaucaaggugaccccccagaccauggacggcauccugaagagcauccugaaggugaagaagagccugggcauguucgugagcgacacccccggcgagagaaaccccuacgagaacauccuguacaagaucugccugagcggcgacggcuggcccuacaucgccagcagaaccagcaucgugggcagagccugggagaacaccaccguggaccuggagagcgacggcaagccccagaaggugggcaccgccggcagcaacaagagccugcagagcgccggcuuccccaccggccugaccuacagccagcugaugacccugaaggacagcaugaugcagcuggaccccagcgccaagaccuggaucgacaucgagggcagacccgaggaccccguggagaucgcccuguaccagcccaugagcggcugcuacauccacuucuucagagagcccaccgaccugaagcaguucaagcaggacgccaaguacagccacggcaucgacgugaccgaccuguuccccgcccagcccggccugaccagcgccgugaucgaggcccugcccagaaacauggugcugaccugccagggcagcgacgacaucaagagacugcuggacagccagggcagaagagacaucaagcugaucgacaucgcccugagcaaggccgacagcagaagauucgagaacgccgugugggaccagugcaaggaccugugccacaugcacaccggcguggugguggagaagaagaagagaggcggcaaggaggagaucaccccccacugcgcccugauggacugcaucauguacgacgccgccgugagcggcggccugaacauccccgugcugagagccgugcugcccagagacaugguguucagaaccagcagccccaagguggugcugugaggacuaguuauaagacugacuagcccgaugggccucccaacgggcccuccuccccuccuugcaccgagauuaauaaaaaaaaaaaaaaaaaaaaaaaaaaaaaaaaaaaaaaaaaaaaaaaaaaaaaaaaaaaaaaaaaaaaaaaaaaaaaaaaaaaaaaaaaaaaaaaaaaaa

SEQ ID NO: 17915 - RNA, 1899 nt, Artificial Sequence
  mRNA product Design i-3 (A100) comprising derived and/or modified sequence from LASV(LASV035-NIG-2009;Clade II)__AIT17589__NP (opt4)
aggagaaagcuuaccaugagcgccagcaaggaggugaagagcuuccuguggacccagagccugagaagagagcugagcggcuacugcagcagcaucaagcugcagguggugaaggacgcccaggcccugcugcacggccuggacuucagcgaggugagcaacgugcagagacugaugagaaagcagaagagagacgacagcgaccugaagagacugagagaccugaaccaggccgugaacaaccugguggagcugaagagcacccagcagaagagcauccugagagugggcacccugaccagcgacgaccugcugacccuggccgccgaccuggagaagcugaagagcaaggugaucagaaccgagagaccccugagcagcggcguguacaugggcaaccugagcgcccagcagcuggagcagagaagagcccugcugaacaugaucggcauggugggcggcgcccagggcacccagcccggcagagacggcguggugagagugugggacgugaagaaccccgaccugcugaacaaccaguucggcaccaugcccagccugacccuggccugccugaccaagcagggccagguggaccugaacgacgccgugcuggcccugaccgaccugggccugaucuacaccgccaaguaccccaacagcagcgaccuggacagacugagccagagccaccccauccugaacaugguggacaccaagaagagcagccugaacaucagcggcuacaacuucagccugggcgccgccgugaaggccggcgccugcaugcuggacggcggcaacaugcuggagaccaucaaggugaccccccagaccauggacggcauccugaagagcauccugaaggugaagagaagccugggcauguucgugagcgacacccccggcgagagaaaccccuacgagaacauccuguacaagaucugccugagcggcgacggcuggcccuacaucgccagcagaaccagcaucgugggcagagccugggagaacaccaccguggaccuggagagcgacggcaagccccagaaggugggcaccaccggcagcaacaagagccugcagagcgccggcuuccccaccggccugaccuacagccagcugaugacccugaaggacagcaugaugcagcuggaccccagcgccaagaccuggaucgacaucgagggcagacccgaggaccccguggagaucgcccuguaccagcccaugagcggcugcuacauccacuucuucagagagcccaccgaccugaagcaguucaagcaggacgccaaguacagccacggcaucgacguggccgaccuguuccccgcccagcccggccugaccagcgccgugaucgaggcccugcccagaaacauggugcugaccugccagggcagcgacgacaucaagaagcugcuggacagccagggcagaagagacaucaagcugaucgacaucgcccugagcaaggccgacagcagaaaguucgagaacgccgugugggaccagugcaaggaccugugccacaugcacaccggcguggugguggagaagaagaagagaggcggcaaggaggagaucaccccccacugcgcccugauggacugcaucauguacgacgccgccgugagcggcggccugaacauccccgugcugagagccgugcugcccagagacaugguguucagaaccagcagccccaagguggugcugugaggacuaguuauaagacugacuagcccgaugggccucccaacgggcccuccuccccuccuugcaccgagauuaauaaaaaaaaaaaaaaaaaaaaaaaaaaaaaaaaaaaaaaaaaaaaaaaaaaaaaaaaaaaaaaaaaaaaaaaaaaaaaaaaaaaaaaaaaaaaaaaaaaaa

SEQ ID NO: 17916 - RNA, 1899 nt, Artificial Sequence
  mRNA product Design i-3 (A100) comprising derived and/or modified sequence from LASV(LASV1000-NIG-2009;Clade II)__AIT17783__NP (opt4)
aggagaaagcuuaccaugagcgccagcaaggaggugaagagcuuccuguggacccagagccugagaagagagcugagcggcuacugcagcaacaucaagcugcagguggugaaggacgcccaggcccugcugcacggccuggacuucagcgaggugagcaacgugcagagacugaugagaaagcagaagagagacgacagcgaccugaagagacugagagaccugaaccaggccgugaacaaccugguggagcugaagagcacccagcagaagagcauccugagagugggcacccugaccagcgacgaccugcugacccuggccgccgaccuggagaagcugaagagcaaggugaucagaaccgagagaccccugagcagcggcguguacaugggcaaccugagcacccagcagcuggagcagagaagagcccugcugaacaugaucggcauggugggcggcgcccagggcacccagcccggcagagacggcguggugagagugugggacgugaagaaccccgaccugcugaacaaccaguucggcaccaugcccagccugacccuggccugccugaccaagcagggccagguggaccugaacgacguggugcuggcccugaccgaccugggccugaucuacaccgccaaguaccccaacagcagcgaccuggacagacugagccagagccaccccauccugaacaugguggacaccaagaagagcagccugaacaucagcggcuacaacuucagccugggcgccgccgugaaggccggcgccugcaugcuggacggcggcaacaugcuggagaccaucaaggugaccccccagaccauggacggcauccugaagagcauccugaaggugaagaagagccugggcauguucgugagcgacacccccggcgagagaaaccccuacgagaacauccuguacaagaucugccugagcggcgacggcuggcccuacaucgccagcagaaccagcaucgugggcagagccugggagaacaccaccguggaccuggagagcgacggcaagccccagaaggugggcaccgccggcagcaacaagagccugcagagcgccggcuuccccaccggccugaccuacagccagcugaugacccugaaggacagcaugaugcagcuggaccccagcgccaagaccuggaucgacaucgagggcagacccgaggaccccguggagaucgcccuguaccagcccgugagcggcugcuacauccacuucuucagagagcccaccgaccugaagcaguucaagcaggacgccaaguacagccacggcaucgacguggccgaccuguuccccgcccagcccggccugaccagcgccgugaucgaggcccugcccagaaacauggugcugaccugccagggcagcgacgacaucaagagacugcuggacagccagggcagaagagacaucaagcugaucgacaucgcccugagcaaggccgacagcagaagauucgagaacgccgugugggaccagugcaaggaccugugccacaugcacaccggcguggugguggagaagaagaagagaggcggcaaggaggagaucaccccccacugcgcccugauggacugcaucauguacgacgccgccgugagcggcggccugaacauccccgugcugagagccgugcugcccagagacaugguguucagaaccagcagccccaagguggugcugugaggacuaguuauaagacugacuagcccgaugggccucccaacgggcccuccuccccuccuugcaccgagauuaauaaaaaaaaaaaaaaaaaaaaaaaaaaaaaaaaaaaaaaaaaaaaaaaaaaaaaaaaaaaaaaaaaaaaaaaaaaaaaaaaaaaaaaaaaaaaaaaaaaaa

SEQ ID NO: 17917 - RNA, 1899 nt, Artificial Sequence
  mRNA product Design i-3 (A100) comprising derived and/or modified sequence from LASV(LASV221-NIG-2010;Clade II)__AIT17625__NP (opt4)
aggagaaagcuuaccaugagcgccagcaaggaggugaagagcuuccuguggacccagagccugagaagagagcugagcggcuacugcagcagcaucaagcugcagguggugaaggacgcccaggcccugcugcacggccuggacuucagcgaggugagcaacgugcagagacugaugagaaagcagagaagagacgacagcgaccugaagagacugagagaccugaaccaggccgugaacaaccugguggagcugaagagcacccagcagaagagcauccugagagugggcacccugaccagcgacgaccugcugacccuggccgccgaccuggagaagcugaagagcaaggugaucagaaccgagagaccccugagcagcggcguguacaugggcaaccugagcacccagcagcuggagcagagaagagcccugcugaacaugaucggcauggugggcggcgcccagggcacccagcccggcagagacggcguggugagagugugggacgugaagaaccccgaccugcugaacaaccaguucggcaccaugcccagccugacccuggccugccugaccaagcagggccagguggaccugaacgacgccgugcuggcccugaccgaccugggccugaucuacaccgccaaguaccccaacagcagcgaccuggacagacugagccagagccaccccauccugaacaugguggacaccaagaagagcagccugaacaucagcggcuacaacuucagccugggcgccgccgugaaggccggcgccugcaugcuggacggcggcaacaugcuggagaccaucaaggugaccccccagaccguggacggcauccugaagagcauccugaaggugaagagaagccugggcauguucgugagcgacacccccggcgagagaaaccccuacgagaacauccuguacaagaucugccugagcggcgacggcuggcccuacaucgccagcagaaccagcaucgugggcagagccugggagaacaccaccguggaccuggagagcgacggcaagccccagaaggugggcaccgccggcagcaacaagagccugcagagcgccggcuuccccaccggccugaccuacagccagcugaugacccugaaggacagcaugaugcagcuggaccccagcgccaagaccuggaucgacaucgagggcagacccgaggaccccguggagaucgcccuguaccagcccaugagcggcugcuacauccacuucuucagagagcccaccgaccugaagcaguucaagcaggacgccaaguacagccacggcaucgacguggccgaccuguuccccgcccagcccggccugaccagcgccgugaucgaggcccugcccagaaacauggugcugaccugccagggcagcgacgacaucaagagacugcuggacagccagggcagaagagacaucaagcugaucgacaucgcccugagcaaggccgacagcagaaaguucgagaacgccgugugggaccagugcaaggaccugugccacaugcacaccggcguggugguggagaagaagaagagaggcggcaaggaggagaucaccccccacugcgcccugauggacugcaucauguacgacgccgccgugagcggcggccugaacauccccgugcugagagccgugcugcccagagacaugguguucagaaccagcagccccaagguggugcugugaggacuaguuauaagacugacuagcccgaugggccucccaacgggcccuccuccccuccuugcaccgagauuaauaaaaaaaaaaaaaaaaaaaaaaaaaaaaaaaaaaaaaaaaaaaaaaaaaaaaaaaaaaaaaaaaaaaaaaaaaaaaaaaaaaaaaaaaaaaaaaaaaaaa

SEQ ID NO: 17918 - RNA, 1899 nt, Artificial Sequence
  mRNA product Design i-3 (A100) comprising derived and/or modified sequence from LASV(LASV237-NIG-2010;Clade II)__AIT17639__NP (opt4)
aggagaaagcuuaccaugagcgccagcaaggaggugaagagcuuccuguggacccagagccugagaagagagcugagcggcuacugcagcaacaucaagcugcagguggugaaggacgcccaggcccugcugcacggccuggacuucagcgaggugagcaacgugcagagacugaugagaaagcagaagagagacgacagcgaccugaagagacugagagaccugaaccaggccgugaacaaccugguggagcugaagagcacccagcagaagagcauccugagagugggcacccugaccagcgacgaccugcugacccuggccgccgaccuggagaagcugaagagcaaggugaucagaaccgagagaccccugagcagcggcguguacaugggcaaccugagcacccagcagcuggagcagagaagagcccugcugaacaugaucggcauggugggcggcgcccagggcacccagcccggcagagacggcguggugagagugugggacgugaagaaccccgaccugcugaacaaccaguucggcaccaugcccagccugacccuggccugccugaccaagcagggccagguggaccugaacgacgccgugcuggcccugaccgaccugggccugaucuacaccgccaaguaccccaacagcagcgaccuggacagacugagccagagccaccccauccugaacaugguggacaucaagaagagcagccugaacaucagcggcuacaacuucagccugggcgccgccgugaaggccggcgccugcaugcuggacggcggcaacaugcuggagaccaucaaggugaccccccagaccauggacggcauccugaagagcauccugaaggugaagagaagccugggcauguucgugagcgacacccccggcgagagaaaccccuacgagaacauccuguacaagaucugccugagcggcgacggcuggcccuacaucgccagcagaaccagcaucgugggcagagccugggagaacaccaccguggaccuggagagcgacggcaagccccagaaggugggcagcgccggcagcaacaagagccugcagagcgccggcuuccccaccggccugaccuacagccagcugaugacccugaaggacagcaugaugcagcuggaccccagcgccaagaccuggaucgacaucgagggcagacccgaggaccccguggagaucgcccuguaccagcccaugagcggcugcuacauccacuucuucagagagcccaccgaccugaagcaguucaagcaggacgccaaguacagccacggcaucgacguggccgaccuguuccccgcccagcccggccugaccagcgccgugaucgaggcccugcccagaaacauggugcugaccugccagggcagcgacgacaucaagagacugcuggacagccagggcagaagagacaucaagcugaucgacaucgcccugagcaaggccgacagcagaagauucgagaacgccgugugggaccagugcaaggaccugugccacaugcacaccggcguggugguggagaagaagaagagaggcggcaaggaggagaucaccccccacugcgcccugauggacugcaucauguacgacgccgccgugagcggcggccugaacauccccgugcugagagccgugcugcccagagacaugguguucagaaccagcagccccaagguggugcugugaggacuaguuauaagacugacuagcccgaugggccucccaacgggcccuccuccccuccuugcaccgagauuaauaaaaaaaaaaaaaaaaaaaaaaaaaaaaaaaaaaaaaaaaaaaaaaaaaaaaaaaaaaaaaaaaaaaaaaaaaaaaaaaaaaaaaaaaaaaaaaaaaaaa

SEQ ID NO: 17919 - RNA, 1899 nt, Artificial Sequence
  mRNA product Design i-3 (A100) comprising derived and/or modified sequence from LASV(LASV253-NIG-2011;Clade II)__AIT17671__NP (opt4)
aggagaaagcuuaccaugagcgccagcaaggaggugaagagcuuccuguggacccagagccugagaagagagcugagcggcuacugcagcagcaucaagcugcagguggugaaggacgcccaggcccugcugcacggccuggacuucagcgaggugagcaacgugcagagacugaugagaaagcagaagagagacgacagcgaccugaagagacugagagaccugaaccaggccgugaacaaccugguggagcugaagagcacccagcagaagagcgugcugagagugggcacccugaccagcgacgaccugcugacccuggccgccgaccuggagaagcugaagagcaaggugaucagaaccgagagaccccugagcagcggcguguacaugggcaaccugagcacccagcagcuggagcagagaagagcccugcugaacaugaucggcauggugggcggcgcccagggcacccagcccggcagagacggcguggugagagugugggacgugaagaaccccgaccugcugaacaaccaguucggcaccaugcccagccugacccuggccugccugaccaagcagggccagguggaccugaacgacguggugcuggcccugaccgaccugggccugaucuacaccgccaaguaccccaacagcagcgaccuggacagacugagccagagccaccccauccugaacaugguggacaccaagaagagcagccugaacaucagcggcuacaacuucagccugggcgccgccgugaaggccggcgccugcaugcuggacggcggcaacaugcuggagaccaucaaggugaccccccagaccauggacggcauccugaagagcauccugaaggugaagaagagccugggcauguucgugagcgacacccccggcgagagaaaccccuacgagaacauccuguacaagaucugccugagcggcgacggcuggcccuacaucgccagcagaaccagcaucgugggcagagccugggagaacaccaccguggaccuggagagcgacggcaagccccagaaggugggcaccgccggcagcaacaagagccugcagagcgccggcuuccccaccggccugaccuacagccagcugaugacccugaaggacagcaugaugcagcuggaccccagcgccaagaccuggaucgacaucgagggcagacccgaggaccccguggagaucgcccuguaccagcccaugagcggcugcuacauccacuucuucagagagcccaccgaccugaagcaguucaagcaggacgccaaguacagccacggcaucgacgugaccgaccuguuccccgcccagcccggccugaccagcgccgugaucgaggcccugcccagaaacauggugcugaccugccagggcagcgacgacaucaagagacugcuggacagccagggcagaagagacaucaagcugaucgacaucgcccugagcaaggccgacagcagaagauucgagaacgccgugugggaccagugcaaggaccugugccacaugcacaccggcguggugguggagaagaagaagagaggcggcaaggaggagaucaccccccacugcgcccugauggacugcaucauguacgacgccgccgugagcggcggccugaacauccccgugcugagagccgugcugcccagagacaugguguucagaaccagcagccccaagguggugcugugaggacuaguuauaagacugacuagcccgaugggccucccaacgggcccuccuccccuccuugcaccgagauuaauaaaaaaaaaaaaaaaaaaaaaaaaaaaaaaaaaaaaaaaaaaaaaaaaaaaaaaaaaaaaaaaaaaaaaaaaaaaaaaaaaaaaaaaaaaaaaaaaaaaa

SEQ ID NO: 17920 - RNA, 1899 nt, Artificial Sequence
  mRNA product Design i-3 (A100) comprising derived and/or modified sequence from LASV(LASV254-NIG-2011;Clade II)__AIT17675__NP (opt4)
aggagaaagcuuaccaugagcgccagcaaggaggugaagagcuuccuguggacccagagccugagaagagagcugagcggcuacugcagcagcaucaagcugcagguggugaaggacgcccaggcccugcugcacggccuggacuucagcgaggugagcaacgugcagagacugaugagaaagcagaagagagacgacagcgaccugaagagacugagagaccugaaccaggccgugaacaaccugguggagcugaagagcacccagcagaagagcgugcugagagugggcacccugaccagcgacgaccugcugacccuggccgccgaccuggagaagcugaagagcaaggugaucagaaccgagagaccccugagcagcggcguguacaugggcaaccugagcacccagcagcuggagcagagaagagcccugcugaacaugaucggcauggugggcggcgcccagggcacccagcccggcagagacggcguggugagagugugggacgugaagaaccccgaccugcugaacaaccaguucggcaccaugcccagccugacccuggccugccugaccaagcagggccagguggaccugaacgacgccgugcuggcccugaccgaccugggccugaucuacaccgccaaguaccccaacagcagcgaccuggacagacugagccagagccaccccauccugaacaugguggacaccaagaagagcagccugaacaucagcggcuacaacuucagccugggcgccgccgugaaggccggcgccugcaugcuggacggcggcaacaugcuggagaccaucaaggugaccccccagaccauggacggcauccugaagagcauccugaaggugaagaagagccugggcauguucgugagcgacacccccggcgagagaaaccccuacgagaacauccuguacaagaucugccugagcggcgacggcuggcccuacaucgccagcagaaccagcaucgugggcagagccugggagaacaccaucguggaccuggagagcgacggcaagccccagaaggugggcaccgccggcagcaacaagagccugcagagcgccggcuuccccaccggccugaccuacagccagcugaugacccugaaggacagcaugaugcagcuggaccccagcgccaagaccuggaucgacaucgagggcagacccgaggaccccguggagaucgcccuguaccagcccaugagcggcugcuacauccacuucuucagagagcccaccgaccugaagcaguucaagcaggacgccaaguacagccacggcaucgacguggccgaccuguuccccgcccagcccggccugaccagcgccgugaucgaggcccugcccagaaacauggugcugaccugccagggcagcgacgacaucaagagacugcuggacagccagggcagaagagacaucaagcugaucgacaucgcccugagcaaggccgacagcagaagauucgagaacgccgugugggaccagugcaaggaccugugccacaugcacaccggcguggugguggagaagaagaagagaggcggcaaggaggagaucaccccccacugcgcccugauggacugcaucauguacgacgccgccgugagcggcggccugaacauccccgugcugagagccgugcugcccagagacaugguguucagaaccagcagccccaagguggugcugugaggacuaguuauaagacugacuagcccgaugggccucccaacgggcccuccuccccuccuugcaccgagauuaauaaaaaaaaaaaaaaaaaaaaaaaaaaaaaaaaaaaaaaaaaaaaaaaaaaaaaaaaaaaaaaaaaaaaaaaaaaaaaaaaaaaaaaaaaaaaaaaaaaaa

SEQ ID NO: 17921 - RNA, 1899 nt, Artificial Sequence
  mRNA product Design i-3 (A100) comprising derived and/or modified sequence from LASV(Nig08-04;Clade II)__ADU56611__NP (opt4)
aggagaaagcuuaccaugagcgccagcaaggaggugaagagcuuccuguggacccagagccugagaagagagcugagcggcuacugcagcaacaucaagcugcagguggugaaggacgcccaggcccugcugcacggccuggacuucagcgaggugagcaacgugcagagacugaugagaaagcagaagagagacgacggcgaccugaagagacugagagaccugaaccaggccgugaacaaccugguggagcugaagagcacccagcagaagagcgugcugagagugggcacccugaccagcgacgaccugcugacccuggccgccgaccuggagaagcugaagagcaaggugaucagaaccgagagaccccugagcagcggcguguacaugggcaaccugagcacccagcagcuggagcagagaaaggcccugcugagcaugaucggcauggugggcggcgcccagggcacccagcccggcagagacggcguggugagagugugggacgugaagaaccccgaccugcugaacaaccaguucggcaccaugcccagccugacccuggccugccugaccaagcagggccagguggaccugaacgacgccgugcuggcccugaccgaccugggccugaucuacaccgccaaguaccccaacagcagcgaccuggacagacugagccagagccaccccauccugaacaugguggacaccaagaagagcagccugaacaucagcggcuacaacuucagccugggcgccgccgugaaggccggcgccugcaugcuggacggcggcaacaugcuggagaccaucaaggugaccccccagaccauggacggcauccugaagagcauccugaaggugaagagaagccugggcauguucgugagcgacacccccggcgagagaaaccccuacgagaacauccuguacaagaucugccugagcggcgacggcuggcccuacaucgccagcagaaccagcaucgugggcagagccugggagaacaccaccguggaccuggagagcgacggcaagccccagaaggugggcaccgccggcagcaacaagagccugcagagcgccggcuuccccaccggccugaccuacagccagcugaugacccugaaggacagcaugaugcagcuggaccccagcgccaagaccuggaucgacaucgagggcagacccgaggaccccguggagaucgcccuguaccagcccaugagcggcugcuacauccacuucuucagagagcccaccgaccugaagcaguucaagcaggacgccaaguacagccacggcaucgacgugaccgaccuguucagcgcccagcccggccugaccagcgccgugaucgaggcccugcccagaaacauggugcugaccugccagggcagcgacgacaucaagaagcugcuggacagccagggcagaagagacaucaagcugaucgacaucagccugaacaaggccgacagcagaagauucgagaacgccgugugggaccagugcaaggaccugugccacaugcacaccggcguggugguggagaagaagaagagaggcggcaaggaggagaucaccccccacugcgcccugauggacugcaucauguucgacgccgccgugagcggcggccugaacauccccauccugagagccgugcugcccagagacaugguguucagaaccagcagccccaagguggugcugugaggacuaguuauaagacugacuagcccgaugggccucccaacgggcccuccuccccuccuugcaccgagauuaauaaaaaaaaaaaaaaaaaaaaaaaaaaaaaaaaaaaaaaaaaaaaaaaaaaaaaaaaaaaaaaaaaaaaaaaaaaaaaaaaaaaaaaaaaaaaaaaaaaaa

SEQ ID NO: 17922 - RNA, 1902 nt, Artificial Sequence
  mRNA product Design i-3 (A100) comprising derived and/or modified sequence from LASV(GA391;Clade III)__AAA46284__NP (opt4)
aggagaaagcuuaccaugagcgccagcaaggaggugagaagcugccuguggacccagagccugagaagagagcugagcggcuacugcagcaacaucaagcugcagguggugaaggacgcccaggcccugcugcacggccuggacuucagcgaggugagcaacgugcagagacugaugagaaagcagaagagagacgacggcgaccugaagagacugagagaccugaaccaggccgugaacaaccugguggagcugaagagcacccagcagaagagcgugcugagagugggcacccugagcagcgacgaccugcugauccuggccgccgaccuggagaagcugaagagcaaggugaccagaaccgagagaccccugagcagcggcguguacaugggcaaccugagcagccagcagcuggaccagagaagagcccugcugaacaugaucggcaugaccggcgugagcggcggcggcaagggcgccagcaacggcaucgugagagugugggacgugaagaacgccgagcugcugaacaaccaguucggcaccaugcccagccugacccuggccugccugaccaagcagggccagguggaccugaacgacgccgugcaggcccugaccgaccugggccugaucuacaccgccaaguaccccaacagcagcgaccuggacagacugagccagagccaccccauccugaacaugaucgacaccaagaagagcagccugaacaucagcggcuacaacuucagccugggcgccgccgugaaggccggcgccugcaugcuggacggcggcaacaugcuggagaccaucaaggugagcccccagaccauggacggcauccugaagagcauccugaaggugaagaagagccugggcauguucgugagcgacacccccggcgagagaaaccccuacgagaacauccuguacaagaucugccugagcggcgacggcuggagcuacaucgccagcagaaccagcaucgugggcagagccugggagaacaccgugguggaccuggagcaggacaacaagccccagaagaucggcaacggcggcagcaacaagagccugcagagcgccggcuucgccgccggccugaucuacagccagcugaugacccugaaggacuucaagugcuucaaccugauccccaacgccaagaccuggauggacaucgagggcagacccgaggaccccguggagaucgcccuguaccagcccagcagcggcugcuacgugcacuucuucagagagcccaccgaccugaagcaguucaagcaggacgccaaguacagccacggcagagacgugaccgaccuguucgccgcccagcccggccugaccagcgccgugaucgaggcccugcccagaaacauggugaucaccugccagggcagcgaggacaucagaaagcugcuggagagccagggcagaagagacaucaagcugaucgacaucacccugagcaaggccgacagcagaaaguucgagaacgccgugugggaccaguucaaggaccugugccacaugcacaccggcguggugguggagaagaagaagagaggcggcaaggaggagaucaccccccacugcgcccugauggacugcaucauguucgacgccgccgugagcggcggccuggacgccaaggugcugagaguggugcugcccagagacaugguguucagaaccagcacccccaagguggugcugugaggacuaguuauaagacugacuagcccgaugggccucccaacgggcccuccuccccuccuugcaccgagauuaauaaaaaaaaaaaaaaaaaaaaaaaaaaaaaaaaaaaaaaaaaaaaaaaaaaaaaaaaaaaaaaaaaaaaaaaaaaaaaaaaaaaaaaaaaaaaaaaaaaaa

SEQ ID NO: 17923 - RNA, 1899 nt, Artificial Sequence
  mRNA product Design i-3 (A100) comprising derived and/or modified sequence from LASV(Nig08-A19;Clade III)__ADU56619__NP (opt4)
aggagaaagcuuaccaugagcgccagcaaggaggugaagagcuuccuguggacccagagccugagaagagagcugagcggcuacugcagcaacaucaagcugcagguggugaaggacgcccaggcccugcugcacggccuggacuucagcgaggugagcaacgugcagagacugaugagaaagcagaagagagacgacggcgaccugaagagacugagagaccugaaccaggccgugaacaaccugguggagcugaagagcacccagcagaagagcgugcugagagugggcacccugagcagcgacgaccugcuggugcuggccgccgaccuggagaagcugaagagcaagguggugagaaccgagagaccccugagcagcggcaucuacaugggcaaccugagcagccagcagcuggaccagagaaaggcccugcugaacaugaucggcaugaccggcggcaacggcggcagaaacaccaccagcgacggcaucgugagagugugggacgugaagaacgccgagcugcugaacaaccaguucggcaccaugcccagccugacccuggccugccugaccaagcagggccagguggaccugaacgacgccgugcaggcccugaccgaccugggccugaucuacaccgccaaguaccccaacagcagcgaccuggacagacuggcccagagccaccccauccugaacaugaucgacaccaagaagagcagccugaacaucagcggcuacaacuucagccugggcgccgccgugaaggccggcgccugcaugcuggacggcggcaacaugcuggagaccaucaaggugagcccccagaccauggacggcauccugaagagcauccugaaggugaagagaagccugggcauguucaucagcgacacccccggcgagagaaaccccuacgagaacauccuguacaagaucugccugagcggcgacggcuggcccuacaucgccagcagaaccagcaucgugggcagagccugggagaacaccgugguggaccuggagagcgacaacaagccccagaagaccggcaacggcggcagcaacaagagccugcagagcgccggcuucgccgccggccugaccuacagccagcugaugacccugaaggacagcaugcugcagcuggaccccaacgccaagaccuggauggacaucgagggcagacccgaggaccccguggagaucgcccuguaccagcccagcagcggcugcuacauccacuucuucagagagcccaccgaccugaagcaguucaagcaggacgccaaguacagccacggcaucgacgugaccgaccuguucgccgcccagcccggccugaccagcgccgugaucgaggcccugcccagaaacauggugaucaccugccagggcagcgaggacaucagaaagcugcuggagagccagggcagaagagacaucaagcugaucgacaucagccugagcaagguggacagcagaaaguucgagaacgccgugugggaccaguucaaggaccugugccacaugcacaccggcaucgugguggagaagaagaagagaggcggcaaggaggagaucaccccccacugcgcccugauggacugcaucauguucgacgccgccgugagcggcggcguggacgccaaggugcugagagccgugcugcccagagacaugguguucagaaccagcacccccaagguggugcugugaggacuaguuauaagacugacuagcccgaugggccucccaacgggcccuccuccccuccuugcaccgagauuaauaaaaaaaaaaaaaaaaaaaaaaaaaaaaaaaaaaaaaaaaaaaaaaaaaaaaaaaaaaaaaaaaaaaaaaaaaaaaaaaaaaaaaaaaaaaaaaaaaaaa

SEQ ID NO: 17924 - RNA, 1899 nt, Artificial Sequence
  mRNA product Design i-3 (A100) comprising derived and/or modified sequence from LASV(G1180-SLE-2010;Clade IV)__AIT17169__NP (opt4)
aggagaaagcuuaccaugagcgccagcaaggagaucaagagcuuccuguggacccagagccugagaagagagcugagcggcuacugcagcaacaucaagcugcagguggugaaggacgcccaggcccugcugcacggccuggacuucagcgaggugagcaacgugcagagacugaugagaaaggagagaagagacgacaacgaccugaagagacugagagaccugaaccaggccgugaacaaccugguggagcugaagagcacccagcagaagagcauccugagagugggcacccugaccagcgacgaccugcugauccuggccgccgaccuggagaagcugaagagcaaggugaucagaaccgagagaccccugagcgccggcguguacaugggcaaccugagcagccagcagcuggaccagagaagagcccugcugagcaugaucggcaugagcagcggcaaccagagagcccaggccggcagagacggcguggugagagugugggacgugaagaacguggagcugcugaacaaccaguucggcaccaugcccagccugacccuggccugccugaccaagcagggccagguggaccugaacgacgccgugcaggcccugaccgaccugggccugaucuacaccgccaaguaccccaacaccagcgaccuggacagacugacccagagccaccccauccugaacaugaucgacaccaagaagagcagccugaacaucagcggcuacaacuucagccugggcgccgccgugaaggccggcgccugcaugcuggacggcggcaacaugcuggagaccaucaaggugagcccccagaccauggacggcauccugaagagcauccugaaggugaagaaggcccugggcauguucaucagcgacacccccggcgagagaaaccccuacgagaacauccuguacaagaucugccugagcggcgacggcuggcccuacaucgccagcagaaccagcaucaccggcagagccugggagaacaccgugguggaccuggagagcgacggcaagccccagaaggccggcagcaacaacagcaacaagagccugcagagcgugggcuucaccgccggccugaccuacagccagcugaugacccugaaggacgccaugcugcagcuggaccccaacgccaagaccuggauggacaucgagggcagacccgaggaccccguggagaucgcccuguaccagcccagcagcggcugcuacauccacuucuucagagagcccaccgaccugaagcaguucaagcaggacgccaaguacagccacggcaucgacgugaccgaccuguucgccgcccagcccggccugaccagcgccgugaucgacgcccugcccagaaacauggugaucaccugccagggcagcgacgacaucagaaagcugcuggagagccagggcagaaaggacaucaagcugaucgacaucgcccugagcaagaccgacagcagaaaguacgagaacgccgugugggaccaguacaaggaccugugccacaugcacaccggcguggugguggagaagaagaagagaggcggcaaggaggagaucaccccccacugcgcccugauggacugcaucauguucgacgccgccgugagcggcggccugaacaccagcgugcugagagccgugcugcccagagacaugguguucagaaccagcacccccagaguggugcugugaggacuaguuauaagacugacuagcccgaugggccucccaacgggcccuccuccccuccuugcaccgagauuaauaaaaaaaaaaaaaaaaaaaaaaaaaaaaaaaaaaaaaaaaaaaaaaaaaaaaaaaaaaaaaaaaaaaaaaaaaaaaaaaaaaaaaaaaaaaaaaaaaaaa

SEQ ID NO: 17925 - RNA, 1899 nt, Artificial Sequence
  mRNA product Design i-3 (A100) comprising derived and/or modified sequence from LASV(G1442-SLE-2011;Clade IV)__AIT17181__NP (opt4)
aggagaaagcuuaccaugagcgccagcaaggaggugaagagcuuccuguggacccagagccugagaagagagcugagcggcuacugcagcaacaucaagcugcagguggugaaggacgcccaggcccugcugcacggccuggacuucagcgaggugagcaacgugcagagacugaugagaaagcagagaagagacgacaacgaccugaagagacugagagaccugaaccaggccgugaacaaccugguggagcugaagagcacccagcagaagagcgugcugagagugggcacccugaccagcgacgaccugcuggugcuggccgccgaccuggagaagcugaagagcaaggugaucagaaccgagagaccccugagcgccggcguguacaugggcaaccugagcagccagcagcuggaccagagaagagcccugcugaacaugaucggcaugagcggcggcauccagggcaccagaaccggcagagacggcguggugagagugugggacgugaagaacgccgaccugcugaacaaccaguucggcaccaugcccagccugacccuggccugccugaccaagcagggccagguggaccugaacgacguggugcaggcccugaccgaccugggccugaucuacaccgccaaguaccccaacgccagcgaccuggacagacugacccagagccaccccauccugaacaugaucgacaccaagaagagcagccugaacaucagcggcuacaacuucagccugggcgccgccgugaaggccggcgccugcaugcuggacggcggcaacaugcuggagaccaucaaggugagcccccagaccauggacggcauccugaagagcauccugaaggugaagaagacccugggcauguucaucagcgacacccccggcgagagaaaccccuacgagaacauccuguacaagaucugccugagcggcgacggcuggcccuacaucgccagcagaaccagcaucaccggcagagccugggagaacaccgugguggaccuggagagcgacggcaagccccagaaggccggcagcaacaacagcaacaagagccugcagagcgccggcuucgccgccggccugaccuacagccagcugaugacccugaaggacgccaugcugcagcuggaccccaacgccaagaccuggauggacaucgagggcagacccgaggaccccguggagaucgcccuguaccagcccagcagcggcugcuacauccacuucuucagagagcccaccgaccugaagcaguucaagcaggacgccaaguacagccacggcaucgacgugaccgaccuguucgccgcccagcccggccugaccagcgccgugaucgaggcccugcccagaaacauggugaucaccugccagggcagcgacgacaucaagaagcugcuggagagccagggcagaaaggacaucaagcugaucgacaucgcccugagcaagaccgacagcagaaaguacgagaacgccgugugggaccaguacaaggaccugugccacaugcacaccggcguggugguggagaagaagaagagaggcggcaaggaggagaucaccccccacugcgcccugauggacugcaucauguucgacgccgccgugagcggcggccugaacacccuggugcugagagccgugcugcccagagacaugguguucagaaccagcacccccagaguggugcugugaggacuaguuauaagacugacuagcccgaugggccucccaacgggcccuccuccccuccuugcaccgagauuaauaaaaaaaaaaaaaaaaaaaaaaaaaaaaaaaaaaaaaaaaaaaaaaaaaaaaaaaaaaaaaaaaaaaaaaaaaaaaaaaaaaaaaaaaaaaaaaaaaaaa

SEQ ID NO: 17926 - RNA, 1899 nt, Artificial Sequence
  mRNA product Design i-3 (A100) comprising derived and/or modified sequence from LASV(G3010-SLE-2013;Clade IV)__AIT17345__NP (opt4)
aggagaaagcuuaccaugagcgccagcaaggagaucaagagcuuccuguggacccagagccugagaagagagcugagcggcuacugcagcaacaucaagcugcagguggugaaggacgcccaggcccugcugcacggccuggacuucagcgaggugagcaacgugcagagacugaugagaaaggagagaagagacgacaacgaccugaagagacugagagaccugaaccaggccgugaacaaccugguggagcugaagagcacccagcagaagagcauccugagagugggcacccugaccagcgacgaccugcugauccuggccgccgaccuggagaagcugaagagcaaggugaccagaaccgagagaccccugagcgccggcguguacaugggcaaccugagcagccagcagcuggaccagagaagagcccugcugagcaugaucggcaugagcagcggcgugcagggcgccagagccggcagagacggcguggugagagugugggacgugaagaacgccgagcugcugaacaaccaguucggcaccaugcccagccugacccuggccugccugaccaagcagggccagguggaccugaacgacguggugcaggcccugaccgaccugggccugaucuacaccgccaaguaccccaacaccagcgaccuggacagacugacccagagccaccccauccugaacaugaucgacaccaagaagagcagccugaacaucagcggcuacaacuucagccugggcgccgccgugaaggccggcgccugcaugcuggacggcggcaacaugcuggagaccaucaaggugagcccccagaccauggacggcauccugaagagcauccugaaggugaagaaggcccugggcauguucaucagcgagacccccggcgagagaaaccccuacgagaacauccuguacaagaucugccugagcggcgacggcuggcccuacaucgccagcagaaccagcaucaccggcagagccugggagaacaccgugguggaccuggagagcgacggcaagccccagaaggccggcagcaacaacagcaacaagagccugcagagcgccggcuucaccgccggccugaccuacagccagcugaugacccugaaggacgccaugcugcagcuggaccccaacgccaagaccuggauggacaucgagggcagacccgaggaccccguggagguggcccuguaccagcccagcagcggcugcuacauccacuucuucagagagcccaccgaccugaagcaguucaagcaggacgccaaguacagccacggcaucgacgugaccgaccuguucgccgcccagcccggccugaccagcgccgugaucgacgcccugcccagaaacauggugaucaccugccagggcagcgacgacaucaagaagcugcuggagagccagggcagaaaggacaucaagcugaucgacaucgcccugagcaagaccgacagcagaaaguacgagaacgccgugugggaccaguacaaggaccugugccacaugcacaccggcguggugguggagaagaagaagagaggcggcaaggaggagaucaccccccacugcgcccugauggacugcaucauguucgacgccgccgugagcggcggccugaacaccagcgugcugagagccgugcugcccagagacaugguguucagaaccagcacccccagaguggugcugugaggacuaguuauaagacugacuagcccgaugggccucccaacgggcccuccuccccuccuugcaccgagauuaauaaaaaaaaaaaaaaaaaaaaaaaaaaaaaaaaaaaaaaaaaaaaaaaaaaaaaaaaaaaaaaaaaaaaaaaaaaaaaaaaaaaaaaaaaaaaaaaaaaaa

SEQ ID NO: 17927 - RNA, 1899 nt, Artificial Sequence
  mRNA product Design i-3 (A100) comprising derived and/or modified sequence from LASV(G502-SLE-2009;Clade IV)__AIT17127__NP (opt4)
aggagaaagcuuaccaugagcgccagcaaggagaucaagagcuuccuguggacccagagccugagaagagagcugagcggcuacugcagcaacaucaagcugcagguggugaaggacgcccaggcccugcugcacggccuggacuucagcgaggugagcaacgugcagagacugaugagaaaggagagaagagacgacaacgaccugaagagacugagagaccugaaccaggccgugaacaaccugguggagcugaagagcacccagcagaagagcauccugagagugggcacccugaccagcgacgaccugcugauccuggccgccgaccuggagaagcugaagagcaaggugaucagaaccgagagaccccugagcgccggcguguacaugggcaaccugagcagccagcagcuggaccagagaagagcccugcugagcaugaucggcaugagcggcggcaaccagggcgugagagccggcaaggacggcguggugagagugugggacgugaagaacgccgagcugcugaacaaccaguucggcaccaugcccagccugacccuggccugccugaccaagcagggccagguggaccugaacgacgccgugcaggcccugaccgaccugggccugaucuacaccgccaaguaccccaacaccagcgaccuggacagacugacccagagccaccccauccugaacaugaucgacaccaagaagagcagccugaacaucagcggcuacaacuucagccugggcgccgccgugaaggccggcgccugcaugcuggacggcggcaacaugcuggagaccaucaaggugagcccccagaccauggacggcauccugaagagcauccugaaggugaagaaggcccugggcauguucaucagcgacacccccggcgagagaaaccccuacgagaacauccuguacaagaucugccugagcggcgacggcuggcccuacaucgccagcagaaccagcaucaccggcagagccugggagaacaccgugguggaccuggagagcgacggcaagccccagaaggccggcagcaacaacagcaacaagagccugcagagcgccggcuucaccgccggccugaccuacagccagcugaugacccugaaggacgccaugcugcagcuggaccccaacaccaagaccuggauggacaucgagggcagacccgaggaccccguggagaucgcccuguaccagcccagcagcggcugcuacauccacuucuucagagagcccaccgaccugaagcaguucaagcaggacgccaaguacagccacggcaucgacgugaccgaccuguucgccgcccagcccggccugaccagcgccgugaucgacgcccugcccagaaacauggugaucaccugccagggcagcgacgacaucagaaagcugcuggagagccagggcagaaaggacaucaagcugaucgacaucgcccugaacaagaccgacagcagaaaguacgagaacgccgugugggaccaguacaaggaccugugccacaugcacaccggcguggugguggagaagaagaagagaggcggcaaggaggagaucaccccccacugcgcccugauggacugcaucauguucgacgccgccgugagcggcggccugaacaccagcgugcugagagccgugcugcccagagacaugguguucagaaccagcacccccagaguggugcugugaggacuaguuauaagacugacuagcccgaugggccucccaacgggcccuccuccccuccuugcaccgagauuaauaaaaaaaaaaaaaaaaaaaaaaaaaaaaaaaaaaaaaaaaaaaaaaaaaaaaaaaaaaaaaaaaaaaaaaaaaaaaaaaaaaaaaaaaaaaaaaaaaaaa

SEQ ID NO: 17928 - RNA, 1899 nt, Artificial Sequence
  mRNA product Design i-3 (A100) comprising derived and/or modified sequence from LASV(G733-SLE-2010;Clade IV)__AIT17155__NP (opt4)
aggagaaagcuuaccaugagcgccagcaaggagaucaagagcuuccuguggacccagagccugagaagagagcugagcggcuacugcagcaacaucaagcugcagguggugaaggacgcccaggcccugcugcacggccuggacuucagcgaggugagcaacgugcagagacugaugagaaaggagagaagagacgacaacgaccugaagagacugagagaccugaaccaggccgugaacaaccugguggagcugaagagcacccagcagaagagcgugcugagagugggcacccugaccagcgacgagcugcuggugcuggccgccgaccuggagaagcugaagagcaaggugaucagaaccgagagaccccugagcgccggcguguacaugggcaaccugagcagccagcagcuggaccagagaagagcccugcugagcaugaucggcaugagcggcggcaaccagggcgccagaaccggcagagacggcguggugagagugugggacgugaagaacgccgagcugcugaacaaccaguucggcaccaugcccagccugacccuggccugccugaccaagcagggccagguggaccugaacgacgccgugcaggcccugaccgaccugggccugaucuacaccgccaaguaccccaacaccagcgaccuggacagacugacccagagccaccccauccugaacaugaucgacaccaagaagagcagccugaacaucagcggcuacaacuucagccugggcgccgccgugaaggccggcgccugcaugcuggacggcggcaacaugcuggagaccaucaaggugagcccccagaccauggacggcauccugaagagcauccugaaggugaagaaggcccugggcauguucaucagcgacacccccggcgagagaaaccccuacgagaacauccuguacaagaucugccugagcggcgacggcuggcccuacaucgccagcagaaccagcaucaccggcagagccugggagaacaccgugguggaccuggagagcgacggcaagccccagaaggccggcagcaacaacagcaacaagagccugcagagcgccggcuucaccgccggccugaccuacagccagcugaugacccugaaggacgccaugcugcagcuggaccccaacgccaagaccuggauggacaucgagggcagacccgaggaccccguggagaucgcccuguaccagcccagcagcggcugcuacauccacuucuucagagagcccaccgaccugaagcaguucaagcaggacgccaaguacagccacggcaucgacgugaccgaccuguucgccgcccagcccggccugaccagcgccgugaucgacgcccugcccagaaacauggugaucaccugccagggcagcgacgacaucagaaagcugcuggagagccagggcagaaaggacaucaagcugaucgacaucgcccugagcaagaucgacagcagaaaguacgagaacgccgugugggaccaguacaaggaccugugccacaugcacaccggcguggugguggagaagaagaagagaggcggcaaggaggagaucaccccccacugcgcccugauggacugcaucauguucgacgccgccgugagcggcggccugaacagccuggugcugagagccgugcugcccagagacaugguguucagaaccagcacccccagaguggugcugugaggacuaguuauaagacugacuagcccgaugggccucccaacgggcccuccuccccuccuugcaccgagauuaauaaaaaaaaaaaaaaaaaaaaaaaaaaaaaaaaaaaaaaaaaaaaaaaaaaaaaaaaaaaaaaaaaaaaaaaaaaaaaaaaaaaaaaaaaaaaaaaaaaaa

SEQ ID NO: 17929 - RNA, 1899 nt, Artificial Sequence
  mRNA product Design i-3 (A100) comprising derived and/or modified sequence from MOPV/LASV reassortant(IGS-1;Clade IV)__AFY05578__NP (opt4)
aggagaaagcuuaccaugagcgccagcaaggagaucaagagcuuccuguggacccagagccugagaagagagcugagcggcuacugcagcaacaucaagcugcagguggugaaggacgcccaggcccugcugcacggccuggacuucagcgaggugagcaacgugcagagacugaugagaaaggagagaagagacgacaacgaccugaagagacugagagaccugaaccaggccgugaacaaccugguggagcugaagagcacccagcagaagagcauccugagagugggcacccugaccagcgacgaccugcugauccuggccgccgaccuggagaagcugagaagcaaggugaucagaaccgagagaccccugagcgccggcguguacaugggcaaccugagcagccagcagcuggaccagagaagagcccugcugaacaugaucggcaugagcggcggcaaccagggcgccagagccggcagagacggcguggugagagugugggacgugaagaacgccgagcugcugagcaaccaguucggcaccaugcccagccugacccuggccugccugaccaagcagggccagguggaccugaacgacgccgugcaggcccugaccgaccugggccugaucuacaccgccaaguaccccaacaccagcgaccuggacagacugacccagagccaccccauccugaacaugaucgacaccaagaagagcagccugaacaucagcggcuacaacuucagccugggcgccgccgugaaggccggcgccugcaugcuggacggcggcaacaugcuggagaccaucaaggugagcccccagaccauggacggcauccugaagagcauccugaaggugaagaaggcccugggcauguucaucagcgacacccccggcgagagaaaccccuacgagaacauccuguacaagaucugccugagcggcgacggcuggcccuacaucgccagcagaaccagcaucaccggcagagccugggagaacaccgugguggaccuggagagcgacggcaagccccagaaggccgacagcaacaacagcagcaagagccugcagagcgccggcuucaccgccggccugaccuacagccagcugaugacccugaaggacgccaugcugcagcuggaccccaacgccaagaccuggauggacaucgagggcagacccgaggaccccguggagaucgcccuguaccagcccagcagcggcugcuacauccacuucuucagagagcccaccgaccugaagcaguucaagcaggacgccaaguacagccacggcaucgacgugaccgaccuguucgccacccagcccggccugaccagcgccgugaucgacgcccugcccagaaacauggugaucaccugccagggcagcgacgacaucagaaagcugcuggagagccagggcagaaaggacaucaagcugaucgacaucgaccugagcaagaccgacagcagaaaguacgagaacgccgugugggaccaguacaaggaccugugccacaugcacaccggcguggugguggagaagaagaagagaggcggcaaggaggagaucaccccccacugcgcccugauggacugcaucauguucgacgccgccgugagcggcggccugaacaccagcgugcugagagccgugcugcccagagacaugguguucagaaccagcacccccagaguggugcugugaggacuaguuauaagacugacuagcccgaugggccucccaacgggcccuccuccccuccuugcaccgagauuaauaaaaaaaaaaaaaaaaaaaaaaaaaaaaaaaaaaaaaaaaaaaaaaaaaaaaaaaaaaaaaaaaaaaaaaaaaaaaaaaaaaaaaaaaaaaaaaaaaaaa

SEQ ID NO: 17930 - RNA, 1899 nt, Artificial Sequence
  mRNA product Design i-3 (A100) comprising derived and/or modified sequence from LASV(LM765-SLE-2012;Clade IV)__AIT17815__NP (opt4)
aggagaaagcuuaccaugagcgccagcaaggagaucaagagcuuccuguggacccagagccugagaagagagcugagcggcuacugcagcaacaucaagcugcagguggugaaggacgcccaggcccugcugcacggccuggacuucagcgaggugagcaacgugcagagacugaugagaaaggagagaagagacgacaacgaccugaagagacugagagaccugaaccaggccgugaacaaccugguggagcugaagagcacccagcagaagagcauccugagagugggcacccugaccagcgacgaccugcugauccuggccgccgaccuggagaagcugaagagcaaggugaccagaaccgagagaccccugagcgccggcguguacaugggcaaccugagcagccagcagcuggaccagagaagagcccugcuggacaugaucggcaugagcggcagcaaccagggcgccagagccggcagagacggcguggugagagugugggacgugaagaacgccgagcugcugaacaaccaguucggcaccaugcccagccugacccuggccugccugaccaagcagggccagguggaccugaacgacgccgugcaggcccugaccgaccugggccugaucuacaccgccaaguaccccaacaccagcgaccuggacagacugacccagagccaccccauccugaacaugaucgacaccaagaagagcagccugaacaucagcggcuacaacuucagccugggcgccgccgugaaggccggcgccugcaugcuggacggcggcaacaugcuggagaccaucaaggugagcccccagaccauggacggcauccugaagagcauccugaaggugaagaaggcccugggcauguucaucagcgacgcccccggcgagagaaaccccuacgagaacauccuguacaagaucugccugagcggcgacggcuggcccuacaucgccagcagaaccagcaucaccggcagagccugggagaacaccgugguggaccuggagagcgacggcaagccccagaaggccggcagcaacggcagcaacaagagccugcagagcgccggcuucaccgccggccugaccuacagccagcugaugacccugaaggacgccaugcugcagcuggaccccaacgccaagaccuggauggacaucgagggcagacccgaggaccccguggagaucgcccuguaccagcccagcagcggcugcuacauccacuucuucagagagcccaccgaccugaagcaguucaagcaggacgccaaguacagccacggcaucgacgugaccgaccuguucgccgcccagcccggccugaccagcgccgugaucgacgcccugcccagaaacauggugaucaccugccagggcagcgacgacaucagaaagcuguucgagagccagggcagaaaggacaucaagcugaucgacaucgcccugagcaagaccgacagcagaaaguacgagaacgccgugugggaccaguacaaggaccugugccacaugcacaccggcaucgugguggagaagaagaagagaggcggcaaggaggagaucaccccccacugcgcccugauggacugcaucauguucgacgccgccgugagcggcggccugaacaccagcgugcugagagccgugcugcccagagacaugguguucagaaccagcacccccagaguggugcugugaggacuaguuauaagacugacuagcccgaugggccucccaacgggcccuccuccccuccuugcaccgagauuaauaaaaaaaaaaaaaaaaaaaaaaaaaaaaaaaaaaaaaaaaaaaaaaaaaaaaaaaaaaaaaaaaaaaaaaaaaaaaaaaaaaaaaaaaaaaaaaaaaaaa

SEQ ID NO: 17931 - RNA, 1899 nt, Artificial Sequence
  mRNA product Design i-3 (A100) comprising derived and/or modified sequence from LASV(LM776-SLE-2012;Clade IV)__AIT17825__NP (opt4)
aggagaaagcuuaccaugagcgccagcaaggagaucaagagcuuccuguggacccagagccugagaagagagcugagcagcuacugcagcaacaucaagcugcagguggugaaggacgcccaggcccugcugcacggccuggacuucagcgaggugagcaacgugcagagacugaugagaaaggagagaagagacgacaacgaccugaagagacugagagaccugaaccaggccgugaacaaccugguggagcugaagagcacccagcagaagagcauccugagagugggcacccugaccagcgacgaccugcugauccuggccgccgaccuggagaagcugaagagcaaggugaccagaaccgagagaccccugagcgccggcguguacaugggcaaccugagcagccagcagcuggaccagagaagagcccugcugagcaugaucggcaugagcggcagcaaccagggcgccagagccggcagagacggcguggugagagugugggacgugaagaacgccgagcugcugaacaaccaguucggcaccaugcccagccugacccuggccugccugaccaagcagggccagguggaccugaacgacgccgugcaggcccugaccgaccugggccugaucuacaccgccaaguaccccaacaccagcgaccuggacagacugacccagagccaccccauccugaacaugaucgacaccaagaagagcagccugaacaucagcggcuacaacuucagccugggcgccgccgugaaggccggcgccugcaugcuggacggcggcaacaugcuggagaccaucaaggugagcccccagaccauggacggcauccugaagagcauccugaaggugaagaaggcccugggcauguucaucagcgacacccccggcgagagaaaccccuacgagaacauccuguacaagaucugccugagcggcgacggcuggcccuacaucgccagcagaaccagcaucaccggcagagccugggagaacaccgugguggaccuggagagcgacggcaagccccagaaggccggcagcaacaacagcaacaagagccugcagagcgccggcuucaccgccggccugaccuacagccagcugaugacccugaaggacgccaugcugcagcuggaccccaacgccaagaccuggauggacaucgagggcagacccgaggaccccguggagguggcccuguaccagcccagcagcggcugcuacauccacuucuucagagagcccaccgaccugaagcaguucaagcaggacgccaaguacagccacggcaucgacgugaccgaccuguucgccgcccagcccggccugaccagcgccgugaucgacgcccugcccagaaacauggugaucaccugccagggcagcgacgacaucagaaagcugcuggagagccagggcagaaaggacaucaagcugaucgacaucgcccugagcaagaccgacagcagaaaguacgagaacgccgugugggaccaguacaaggaccugugccacaugcacaccggcguggugguggagaagaagaagagaggcggcaaggaggagaucaccccccacugcgcccugauggacugcaucauguucgacgccgccgugagcggcggccugaacaccagcgugcugagagccgugcugcccagagacaugguguucagaaccagcacccccagaguggugcugugaggacuaguuauaagacugacuagcccgaugggccucccaacgggcccuccuccccuccuugcaccgagauuaauaaaaaaaaaaaaaaaaaaaaaaaaaaaaaaaaaaaaaaaaaaaaaaaaaaaaaaaaaaaaaaaaaaaaaaaaaaaaaaaaaaaaaaaaaaaaaaaaaaaa

SEQ ID NO: 17932 - RNA, 1899 nt, Artificial Sequence
  mRNA product Design i-3 (A100) comprising derived and/or modified sequence from LASV(Mad39;Clade IV)__ANH09723__NP (opt4)
aggagaaagcuuaccaugagcgccagcaaggagaucaagagcuuccuguggacccagagccugagaagagagcugagcggcuacugcagcaacaucaagcugcagguggugaaggacgcccaggcccugcugcacggccuggacuucagcgaggugagcaacgugcagagacugaugagaaagcagagaagagacgacaacgaccugaagagacugagagaccugaaccaggccgugaacaaccugguggagcugaagagcacccagcagaagagcgugcugagagugggcacccugaccagcgacgaccugcugacccuggccgccgaccuggagaagcugaagagcaaggugaccagaaccgagagaccccugaccgccggcguguacaugggcaaccugagcagccagcagcuggaccagagaagagcccugcugaacaugaucggcaugagcggcggcaaccagggcgccagaaccggcagagacggcguggugagagugugggacgugaagaacgccgagcugcugaacaaccaguucggcaccaugcccagccugacccuggccugccugaccaagcagggccagguggaccugaacgacguggugcaggcccugaccgaccugggccugaucuacaccgccaaguaccccaacaccagcgaccuggacagacugacccagagccaccccauccugaacaugaucgacaccaacaagagcagccugaacaucagcggcuacaacuucagccugggcgccgccgugaaggccggcgccugcaugcuggacggcggcaacaugcuggagaccaucaaggugagcccccagaccauggacggcauccugaagagcauccugaaggugaagaagagccugggcauguucaucagcgacacccccggcgagagaaaccccuacgagaacauccuguacaagaucugccugagcggcgacggcuggcccuacaucgccagcagaaccagcaucaccggcagagccugggagaacaccgugguggaccuggagagcggcggcaagccccagaaggccggcagcaacaacagcaacaagagccugcagagcgccggcuucgccgccggccugaccuacagccagcugaugacccugaaggacgccaugcugcagcuggaccccaacgccaagaccuggauggacaucgagggcagacccgaggaccccguggagaucgcccuguaccagcccaucagcggcugcuacauccacuucuucagagagcccaccgaccugaagcaguucaagcaggacgccaaguacagccacggcaucgacgugaccgaccuguucgccgcccagcccggccugaccagcgccgugaucgaggcccugcccagaaacauggugaucaccugccagggcagcgacgacaucagaaagcuguucgagagccagggcagaaaggacaucaagcugaucgacaucgcccugagcaagaccgacagcagaaaguacgagaacgccgugugggaccaguacaaggaccugugccacaugcacaccggcguggugguggagaagaagaagaagggcggcaaggaggagaucaccccccacugcgcccugauggacugcaucauguucgacgccgccgugagcggcggccugaacacccuggugcugagagccgugcugcccagagacaugguguucagaaccagcacccccaagguggugcugugaggacuaguuauaagacugacuagcccgaugggccucccaacgggcccuccuccccuccuugcaccgagauuaauaaaaaaaaaaaaaaaaaaaaaaaaaaaaaaaaaaaaaaaaaaaaaaaaaaaaaaaaaaaaaaaaaaaaaaaaaaaaaaaaaaaaaaaaaaaaaaaaaaaa

SEQ ID NO: 17933 - RNA, 1899 nt, Artificial Sequence
  mRNA product Design i-3 (A100) comprising derived and/or modified sequence from LASV(Z0947-SLE-2011;Clade IV)__AIT17841__NP (opt4)
aggagaaagcuuaccaugagcgccagcaaggagaucaagagcuuccuguggacccagagccugagaagagagcugagcggcuacugcagcaacaucaagcugcagguggugaaggacgcccaggcccugcugcacggccuggacuucagcgaggugagcaacgugcagagacugaugagaaaggagagaagagacgacaacgaccugaagagacugagagaccugaaccaggccgugaacaaccugguggagcugaagagcacccagcagaagagcauccugagagugggcacccugaccagcgacgaccugcugauccuggccgccgaccuggagaagcugaagagcaaggugaccagaaccgagagaccccugagcgccggcguguacaugggcaaccugagcagccagcagcuggaccagagaagagcccugcugaacaugaucggcaugagcggcagcaaccagggcgccagaaccggcagagacggcguggugagagugugggacgugaagaacgccgagcugcugaacaaccaguucggcaccaugcccagccugacccuggccugccugaccaagcagggccagguggaccugaacgacgccgugcaggcccugaccgaccugggccugaucuacaccgccaaguaccccaacaccagcgaccuggacagacugacccagagccaccccauccugaacaugaucgacaccaagaagagcagccugaacaucagcggcuacaacuucagccugggcgccgccgugaaggccggcgccugcaugcuggacggcggcaacaugcuggagaccaucaaggugagcccccagaccauggacggcauccugaagagcauccugaaggugaagaaggcccugggcauguucaucagcgacgcccccggcgagagaaaccccuacgagaacauccuguacaagaucugccugagcggcgacggcuggcccuacaucgccagcagaaccagcaucaccggcagagccugggagaacaccgugguggaccuggagagcgacggcaagccccagaaggccggcagcaacggcagcaacaagagccugcagagcgccggcuucaccgccggccugaccuacagccagcugaugacccugaaggacgccaugcugcagcuggaccccaacgccaagaccuggauggacaucgagggcagacccgaggaccccguggagaucgcccuguaccagcccagcagcggcugcuacauccacuucuucagagagcccaccgaccugaagcaguucaagcaggacgccaaguacagccacggcaucgacgugaccgaccuguucgccgcccagcccggccugaccagcgccgugaucgacgcccugcccagaaacauggugaucaccugccagggcagcgacgacaucagaaagcuguucgagagccagggcagaaaggacaucaagcugaucgacaucgcccugagcaagaccgacagcagaaaguacgagaacgccgugugggaccaguacaaggaccugugccacaugcacaccggcaucgugguggagaagaagaagagaggcggcaaggaggagaucaccccccacugcgcccugauggacugcaucauguucgacgccgccgugagcggcggccugaacaccagcgugcugagagccgugcugcccagagacaugguguucagaaccagcacccccagaguggugcugugaggacuaguuauaagacugacuagcccgaugggccucccaacgggcccuccuccccuccuugcaccgagauuaauaaaaaaaaaaaaaaaaaaaaaaaaaaaaaaaaaaaaaaaaaaaaaaaaaaaaaaaaaaaaaaaaaaaaaaaaaaaaaaaaaaaaaaaaaaaaaaaaaaaa

SEQ ID NO: 17934 - RNA, 1899 nt, Artificial Sequence
  mRNA product Design i-3 (A100) comprising derived and/or modified sequence from LASV(Josiah;Clade IV)__NP_694869__NP (opt5)
aggagaaagcuuaccaugagcgccuccaaggagaucaaaucuuuccuguggacccagagccucagacgggaacuguccggcuacugcucuaacauuaagcugcaaguggucaaagacgcucaggcccugcuccacgggcuggauuuuagcgagguuuccaaugugcagcgccuuaugagaaaggaacggcgcgacgauaacgaccugaaaagacuccgggaucugaaucaggcggugaacaaucuggucgagcucaagucuacacaacaaaagagcauccugcgcgugggaacgcuuaccuccgacgaucugcucauucuggcugccgaccuugaaaaacuuaagagcaaaguuaucagaacagagcggccccucucugccggcguguauauggggaaccuguccagccagcagcuggaucagcgcagagcucuccugaauaugauuggaaugucuggcgggaaccagggagcccgggcuggccgcgacggcgucgugagaguuugggaugugaagaaugccgagcuucugaacaaucaguucgggaccaugccuucccucacacuggcgugucuuaccaaacagggacaagucgaccugaacgaugccgugcaggcucucacagaccugggccugaucuacaccgccaaguauccgaauacgagcgaccucgaucggcugacccagucucaucccauccuuaacaugauugacacaaagaaauccagccugaauaucuccggguacaacuuuucucucggagcugccgugaaggcgggcgccugcaugcuggaugggggaaacaugcuugaaaccauuaaagucagcccucaaacaauggacggcauccugaaguccauucucaaaguuaagaaagcucugggcauguucaucagcgauacccccggggagcgcaauccuuaugaaaacauucuguacaagaucugucucucuggagacggcuggcccuauaucgccuccagaacgagcauuacagggcgggcuugggagaauaccgugguggaucuggagucugacggaaagccucagaaagccgauagcaacaauuccucuaagagccuucaguccgccggcuuuacagcugggcugaccuacagccagcucaugacccugaaagacgcgaugcugcaacuugauccgaacgccaagacauggauggacaucgaaggaagacccgaggacccugucgaaauugcucucuaccagcccucuuccggcugcuauauccacuucuuucgcgagccuacggaucugaaacaguucaagcaggacgccaaguacagccauggcauugaugugaccgaccuguuugccacacaacccgggcucaccucugcuguuaucgaugcccugccgcggaauauggugaucacaugucagggauccgacgauauuagaaaacuucuggaaagccagggccgcaaggacaucaaacucauugauaucgcgcuguccaagaccgacucucggaaauaugagaacgcugucugggaucaguacaaggaccugugccacaugcauacgggggugguuguggagaagaaaaagagaggaggcaaagaagagauuacaccucacugugcccuuauggauugcaucauguucgacgccgcugucagcgggggccucaauaccuccgugcugcgcgccguccugccccgggacaugguguuuagaaccucuacaccucgcguugugcucugaggacuaguuauaagacugacuagcccgaugggccucccaacgggcccuccuccccuccuugcaccgagauuaauaaaaaaaaaaaaaaaaaaaaaaaaaaaaaaaaaaaaaaaaaaaaaaaaaaaaaaaaaaaaaaaaaaaaaaaaaaaaaaaaaaaaaaaaaaaaaaaaaaaa

SEQ ID NO: 17935 - RNA, 1899 nt, Artificial Sequence
  mRNA product Design i-3 (A100) comprising derived and/or modified sequence from LASV(LP;Clade I)__AAF86702__NP (opt5)
aggagaaagcuuaccaugagcaacuccaaggagaucaaaucuuuccuguggacccagagccucagacgggaacuguccggcuacugcucuaauauuaagcuccaaguggucaaagacgcccaggcucugcuccacgggcuggauuuuagcgagguuuccaacgugcagcgccuuaugagaaagcagaaacgggacgaugccgaccugaagcgccucagagaucugaaucaagcggugaacaaucuggucgaacucaagucuacacagcagaaaaacgugcugcggguuggaacgcuuagcuccgacgaucugaucacccucgcugccgaccuggagaaacuuaaaagcaaggugauucgcacagaaagaccccugucuuccggcgucuauauggggaaucucagcucucagcaacuggaucagcggcgcgcccugcucuccaugaucggaaugagcggcgggccucagggaaacagaaccggcggcgacggggugguucgggugugggaugucaaaaaugcugagcugcuuaacaaucaguucggaacaaugccgucucugacccucgccugucugacaaagcaaggccagguggaccuuaacgaugcugugcaggcccugaccgaccucgggcugauuuacacggcgaaguaucccaauuccagcgaccuggauaugcucacccaaucccauccuauccugggaauggucgacacaaagaagucuagccuuaacaucuccggcuacaauuuuagccugggggccgcuguuaaagccggagcuugcaugcucgauggcggcaacaugcuggagaccauuaaggugucuccccagacaauggacgggauccuuaaauccauucugaaggugaaacgcagccucggaauguucaucucugauaccccuggcgaaagaaaccccuaugagaauauucuguacaagaucugucugagcggggaaggauggccuuauauugccucccggacgucuaucacaggccgcgcgugggagaacacccucgucgaccuggagagcgauaauaagccgcccaaacuuaacuccgccgggagcaauaagucucugcaggcugccggacucaacgcuggccugacauacucccagcugaugacccuuaaagacugcaugcuccaacuggauccuagcucuaagaccuggaucgacauugaaggcagacccgaggauccuguggaaaucgcccuguuucagcccuccagcggguguuacauucacuucuuucgggagccgacagaccucaaacaguucaagcaggacgccaaguauucccauggaaucgauguuacggaccuguuuucuacccaaccuggccuuacaagcgcugugauugaagcgcugcccagaaauaugguccuuaccugccagggguccgaugacaucaaaaagcugcuggagucucagggacgccgggauaucaaacuuauugacaucagccucuccaaggccgauagcagaaaauucgagaacgcugugugggaccaguacaaggaucugugucacaugcauacaggcguuguggucgaaaagaaaaagcgcgggggcaaagaggaaauuaccccucacugcgcccugcucgacuguaucauguuugaugccgcuacgacaggaucucugaauauuaccacccuucgggccgugcugcccagagacauggucuuccgcacauccacccccaaggugguucucugaggacuaguuauaagacugacuagcccgaugggccucccaacgggcccuccuccccuccuugcaccgagauuaauaaaaaaaaaaaaaaaaaaaaaaaaaaaaaaaaaaaaaaaaaaaaaaaaaaaaaaaaaaaaaaaaaaaaaaaaaaaaaaaaaaaaaaaaaaaaaaaaaaaa

SEQ ID NO: 17936 - RNA, 1899 nt, Artificial Sequence
  mRNA product Design i-3 (A100) comprising derived and/or modified sequence from LASV(803213;Clade II)__AAF86704__NP (opt5)
aggagaaagcuuaccaugagcgccuccaaggaggugaaaucuuuccuguggacccagagccucagacgggaacuguccggcuacugcucuaacaucaaacuucaagucguuaaggacgcucaggcccugcuccacgggcuggauuuuagcgaggugaauaacgugcagcgccuuaugagaaagcagaaacgggacgauggagaccugaagcgccucagagaucugaaucaagcggucaacaaucugguggaacucaaguccacacagcagaaaucuauucugcggguuggcacgcuuaccagcgacgaucugcucacacuggcugccgaccuugagaagcugaaauccaaggugauccgcaccgaaagaccccucagcucuggggucuauaugggaaaccuguccacacagcaacuggagcagcggcgcgcccuccugaauaugauuggcauggugggaggagcucagggcacccagccuggcagagaugggguugugcgggucugggacgugaaaaacccggaucuucugaauaaccaauucggaacaaugcccagccucacccuggccugucuuacgaagcagggccagguggaccugaaugaugcuguccucgcccugaccgaccuggggcucaucuacacagcgaaguauccuaacucuuccgaccuggaucgccuuagccaaucucaucccauucugaauaugguugacaccaaaaaguccagccucaacaucuccggauacaauuuuucucugggcgccgcugugaaagccggggcuugcaugcuugauggaggcaacaugcuggagacaaucaaggugaccccucagacgauggacggcauucucaaaagcauccugaaggucaaaagaucccuggggauguucgugagcgauacacccggagaacggaacccuuaugagaauauucucuacaagaucugucugucuggcgacggguggccguauauugccucccgcaccagcaucguugggagagcgugggaaaacacaaccguggaucuugagucugacggcaagccccagaaagucgggaccgccggaagcaauaagucccugcagucugcuggcuuuccuacaggccucacguacagccaacugaugacccugaaagauuccaugaugcagcuugaccccagcgccaagacauggauugauaucgaggggcggccugaagaccccguggagaucgcucucuaccagccgaugucuggaugcuauauucacuucuuuagagaaccuaccgaccugaaacaguucaagcaagaugccaaguacucccauggcaucgacguugccgaucuguuucccgcucagccugggcucacaagcgcggugauugaggcccugccccgcaacaugguccuuaccugucagggaucugacgauaucaaaaagcugcucgacucccagggccggagagauauuaaacugaucgacaucagccuguccaagguggauucucgcaaauucgaaaaugcugucugggaccaaugcaaggaucuuugucacaugcauacgggggugguuguggagaagaaaaagcggggcggaaaagaggaaauuacaccccacugcgcccucauggacuguaucauguuugaugccgcugucagcggcgggcugaacauuccugugcugagagccguucucccgcgcgacaugguguuccggaccuccucucccaaggucgugcugugaggacuaguuauaagacugacuagcccgaugggccucccaacgggcccuccuccccuccuugcaccgagauuaauaaaaaaaaaaaaaaaaaaaaaaaaaaaaaaaaaaaaaaaaaaaaaaaaaaaaaaaaaaaaaaaaaaaaaaaaaaaaaaaaaaaaaaaaaaaaaaaaaaaa

SEQ ID NO: 17937 - RNA, 1902 nt, Artificial Sequence
  mRNA product Design i-3 (A100) comprising derived and/or modified sequence from LASV(GA391;Clade III)__CAA36646__NP (opt5)
aggagaaagcuuaccaugagcgccuccaaggaggugagaucuuuccuguggacccagagccuccggcgcgaacuguccggcuacugcucuaacaucaaacuucaagucguuaaggacgcucaggcccugcuccacgggcuggauuuuagcgagguguccaaugugcagagacuuaugcggaaacagaagcgcgacgauggagaccugaaaagacuccgggaucugaaccaagcggucaauaaccugguggaacucaagucuacacagcagaaaagcguucugcgcgugggcacgcuuuccagcgacgaucugcucauucuggcugccgaccuugagaaacugaagucuaaagucaccagaacagaacggccccucuccagcgggguguauaugggaaaucugucuucccagcaacuggaucagcgcagagcccuccugaacaugaucggcaugaccgggguuagcggaggcggcaagggggcuucugacggaauugugcgggucugggaugugaaaaaugccgagcuucugaacaaucaguucggcacaaugccuucccucacccuggcuugucuuacaaagcaggggcaaguggaccugaacgaugccguccaggcgcucaccgaccugggacugaucuacacggccaaguauccgaauagcuccgaccucgaucgccugucucagagccaucccauucuuaacaugaucgacaccaaaaaguccagccugaauaucucuggcuacaacuuuucccucggggcugccguuaaagcuggagccugcaugcuggauggcggcaauaugcuugagacaauuaaggugagcccucaaaccauggacgggauccugaaaucuauucucaaggugaaaaagagccugggaauguucgucuccgauacacccggcgaaagaaacccuuaugagaacauccuguacaagauuugucucucuggggacggauggcccuauaucgcgagccggaccuccauugugggccgcgccugggaaaauacgguuguggaucuggagcaggacaacaaaccucagaagaucgggaauggaggcagcaacaaaucucuucaguccgcuggcuuugccgcugggcugacauacagccaacucaugacccugaaggauuucaaaugcuuuaaucugaucccgaacgccaagacauggauggacauugagggaagacccgaagauccugucgagaucgcccuuuaccagcccucuuccggcuguuaugugcacuucuuucgggaaccuaccgaccucaagcaguucaaacaggacgcuaaguacagccaugggauugauguuaccgaccuguuugcggcccaacccggacugacauccgcugugaucgaggcccucccgagaaauauggucauuacgugccagggcucugaagauauccgcaaacugcuugagagccaggggcggagagacaucaagcugauugauaucacccucuccaaagccgacucucgcaaguucgagaacgcugugugggaucaguuuaaggaccugugucacaugcauacaggcgucgugguugaaaagaagaaacggggaggcaaggaggaaauuaccccucacugcgcccugauggauuguaucauguucgacgcggcugugagcgggggacuugaugccaaaguccucagagugguucugccccgcgacaugguguuccggacauccaccccuaaggucgugcugugaggacuaguuauaagacugacuagcccgaugggccucccaacgggcccuccuccccuccuugcaccgagauuaauaaaaaaaaaaaaaaaaaaaaaaaaaaaaaaaaaaaaaaaaaaaaaaaaaaaaaaaaaaaaaaaaaaaaaaaaaaaaaaaaaaaaaaaaaaaaaaaaaaaa

SEQ ID NO: 17938 - RNA, 1899 nt, Artificial Sequence
  mRNA product Design i-3 (A100) comprising derived and/or modified sequence from LASV(AV;Clade V)__CCA30315__NP (opt5)
aggagaaagcuuaccaugagcgccuccaaggaggugaaaucuuuccuguggacccagagccucagacgggaacuguccggcuacugcucuaacaucaaacuucaagucguuaaggacgcucaggcccugcuccacgggcuggauuuuagcgagguguccaaugugcagcgccuuaugagaaagcagcggcgcgacgauucugaccugaaaagacuccgggaucugaaccaagcggucaauaaccugguggaacucaagagcacacagcagaaguccguucugcgcgugggaacgcuuagcucugacgaucugcucacccuggcugccgaccuugagaaacugaaguccaaagucacaagaaccgaacggccccucagcucuggcguguauauggggaaucuguccagccagcaacuggaucagcgcagagcccuccugaaccuuauuggaaugacaaauggcucucaggggucccaggcuggacgggacggcguugugcgcgucugggaugugaagaacgccgagcugcucaauaaccaauucggcaccaugccuagccugacacuugcuugucugaccaaacagggacagguggaccucaaugaugucguucaagcccugacggaccuggggcucaucuacaccgcgaaguauccgaacacauccgaccuggauagacuuacccagucucaucccauucugaauaugaucgacacaaagaaaagcucccucaacauuagcggcuacaauuuuucucugggggccgcugugaaggccggagcuugcaugcuugauggcgggaacaugcuggagaccaucaaaguguccccucagagcauggacggaauccucaagucuauucugaaagucaagcgggcccugggcauguucgugagcgauacgcccggcgaacgcaacccuuaugagaauauccucuacaaaauuugucuguccggggacggauggcccuauaucgcgucuagaacaagcauuguuggccgggccugggaaaacaccguggucgaucuugagacagacgggaagccucagaagaucggauccggcaauagcaacaaaucucugcaauccgcuggguuuagcgccggacucaccuacucucagcugaugacccugaaggaugcuaugcuucagcucgacccgaaugccaaaacauggauggauauugagggcagacccgaagacccuguggagguugcccuguaccagcccaucuccggcugcuauauccacuucuuucgcgaaccuacggaccugaagcaauucaaacaggaugcuaaguacagccaugggauugacaucgcggaucucuuugccgcucagcccggacugaccuccgccgugauugaggcccuuccgcggaacauggucaucacaugucagggcucugaagacauuaagaaacugcucgagagccaagggagaaaggauaucaaacugaucgacauugcucuguccaagaucgauucucgcaaauucgagaaugccgugugggaccaguauaaggaucuuugccacaugcauaccggagucgugguugaaaagaaaaagcggggcgggaaagaggaaauuacaccucacugugcgcucauggacugcaucauguuugaugcugccgugagcggcggacugaacacccugguccucagagccgugcugccccgcgacaugguuuuccggacguccacaccuagagugguccuuugaggacuaguuauaagacugacuagcccgaugggccucccaacgggcccuccuccccuccuugcaccgagauuaauaaaaaaaaaaaaaaaaaaaaaaaaaaaaaaaaaaaaaaaaaaaaaaaaaaaaaaaaaaaaaaaaaaaaaaaaaaaaaaaaaaaaaaaaaaaaaaaaaaaa

SEQ ID NO: 17939 - RNA, 1899 nt, Artificial Sequence
  mRNA product Design i-3 (A100) comprising derived and/or modified sequence from LASV(Togo/2016/7082;Clade VI)__AMR44578__NP (opt5)
aggagaaagcuuaccaugagcaacuccaaggaggugaaaucuuuccuguggacccagagccucagacgggaacuguccggcuacugcucuaauaucaaacuucaagucguuaaagacgcccaggcucugcuccacgggcuggauuuuagcgagguguccaacgugcagcgccuuaugagaaagcagaaacgggacgauggagaccugaagcgccucagagaucugaaucaagccgucaacaaucugguggaacucaagucuguucagcagaaaagcauucugcgggugggcacacuuacguccgacgaucugcucacccuggcggcugaccuugagaagcugaaaagcaaggucacacgcaccgaaagaccccucucuuccgggguguauaugggaaaccugagcucucagcaacuggaucagcggcgcgcccuccuguccaugaucggcaugagcgggggaaaucagaacucucagccuaaaggcgacggcguugugagagucugggaugugaagaaugccgaccuucugaacaaucaauucgggacaaugccgucccucacccuggcuugucuuacaaagcagggacagguggaucugaacgacgccguccaagcucucaccgaccugggccugauuuacacggccaaauaucccaauagcuccgaucucgaccggcugucucagagccauccuauccuuaacaugauugauaccaagaaauccagccugaauaucucuggguacaacuuuucccucggagcggccaucaagacaggcgcuugcaugcuggacgggggaaacaugcuugagaccauuaaaguuacaccccagaccauggauggcauccucaagagcauucugaaagugaagcgcucucugggcauguucaucagcgacacgccuggggagagaaaucccuaugaaaacauucuguacaagaucugucucuccggagauggcuggccuuauauugccucucggacagcuaucaucgggcgcgccugggagaauaccguggucgaccuggaaagcgauuccaaaccgcagaagauuggaagcaacggcucuaauaaaucccuucaaagcgcgggguuugcccccggacugacauacucucagcucaugacccugaaggacuccaugcugcagcuugauccuaacgcuaaaaccuggaucgacauugagggcagacccgaggacccuguggaaguugcccucuuccagcccaucagcggcugcuacauucacuuuuuccgggagccgacagaucugaagcaauuuaagcaggacgcuaaauauucccaugggaucgaugugacggaccuguucgccgcccagccuggacucaccucugcugucaucgaagcgcugcccagaaauauggugcuuacaugucagggcagcgaugacauuaagaaacugcucgauucccaagggcgccgggacaucaagcugauugauguuucucugaacaaaaucgacagcagaaaguuugagaaugccgugugggaucaguacaaggaccuuugccacaugcauaccggagucguggucgaaaagaagaaaaagggcgggaaagaggagauuacaccucacugugcucuccuggauugcaucauguucgacgccgccguguccggcggacugaacgcuaccguucuccgcgccgugcugccccgggacauggucuuuagaacgagcucucccaaggugguucuuugaggacuaguuauaagacugacuagcccgaugggccucccaacgggcccuccuccccuccuugcaccgagauuaauaaaaaaaaaaaaaaaaaaaaaaaaaaaaaaaaaaaaaaaaaaaaaaaaaaaaaaaaaaaaaaaaaaaaaaaaaaaaaaaaaaaaaaaaaaaaaaaaaaaa

SEQ ID NO: 17940 - RNA, 1899 nt, Artificial Sequence
  mRNA product Design i-3 (A100) comprising derived and/or modified sequence from LASV(KAK-428;Clade n.d. (VII))__ANH09741__NP (opt5)
aggagaaagcuuaccaugagcaacuccaaggaggugaaaucuuuccuguggacccagagccucagacgggaacuguccggcuacugcacaaauaucaaacuucaagucguuaaggacgcccaggcucugcuccacgggcuggauuuuucugaggugagcaacgugcagcgccuuaugagaaagcagaaacgggacgauaaugaccugaagcgccucagagaucugaaccaagccgucaauaaccugguggaacucaaguccguucagcagaaaucugugcugaaggucggaacgcuuaauagcgacgaucugcucacccuggcggcugaccuugagaaacugaaguccaaagugguucggacagaacgcccccucagcucuggcguguauauggggaaccuguccagccagcaacuggaucagagacgggcccuccugaauaugauuggaauggccggcgggucucagggaaaccagccuucccgcgacggcgucgugagagugugggaugucaagaaugcugaccuucugaacaaucaauucggcaccaugccgagccucacacuggccugucuuaccaagcaggggcagguugaucugaacgacguggugcucgcucugacagaccugggacucaucuacaccgccaaauaucccaauucuuccgaucuggaccggcuuagccaaaaccauccuguccugaacaugauugaugugaauaaguccucucucaacaucagcggcuacaauuuuucccugggggcggccguuaaagcuggagccugcaugcuugacggcgggaacaugcuggagacgauuaagaucagcccccagaccguggauggaauccucaaaucuauucugaaggucaaacgcgcucugggcauguucguguccgacacaccuggcgagagaaaucccuaugaaaacauccucuacaagguuugucugagcgggaauggauggccuuauauugccucucggaccagcaucgugggccgcgcgugggagaacacagucguggaucuugaauccaauaagaaccagccgaaagucgggaauaacggaucuaauaagaugcugcagagcuccggcuuugccaccgggcucacguacagccaacugaugacacugagagacucuaugcuucagcucgaucccaccgcuaaaacauggauugacaucgagggacggccugaggaucccguggaacuggcccuguuccagccuuccagcggcugcuacauucacuuuuucagagagcccaccgaccucaagcaguuuaaacaagacgcuaaguauucucauggcaucgauguuaacgaccuguucuccgcccagccggggcuuaccagcgccgugcuggaagcucucccucgcaauaugguccugacaugucagggauccgaugacauccggaagcugcuugauucucaggacagaaaagauauuaagcucaucgacauuagccuguccaaagcggaugcccgcaaguuugagaacgacgugugggaucaauucaaagaccugugccacaugcauacgggcaucguuguggaaaagaagaaaaagggagggaaacaggagaugacaccccacugugcucuccuggauugcauuauguuugacgccgccgucucuggcgggcuuaacgugccuacccugcgggcugugcuccccaccgacaugguuuucagaacaaucaccacgaaggucgugcugugaggacuaguuauaagacugacuagcccgaugggccucccaacgggcccuccuccccuccuugcaccgagauuaauaaaaaaaaaaaaaaaaaaaaaaaaaaaaaaaaaaaaaaaaaaaaaaaaaaaaaaaaaaaaaaaaaaaaaaaaaaaaaaaaaaaaaaaaaaaaaaaaaaaa

SEQ ID NO: 17941 - RNA, 1899 nt, Artificial Sequence; identical to SEQ ID NO: 17935
  mRNA product Design i-3 (A100) comprising derived and/or modified sequence from LASV(Pinneo-NIG-1969;Clade I)__AIT17837__NP (opt5)

SEQ ID NO: 17942 - RNA, 1899 nt, Artificial Sequence
  mRNA product Design i-3 (A100) comprising derived and/or modified sequence from LASV(ISTH0009-NIG-2011;Clade II)__AIT17405__NP (opt5)
aggagaaagcuuaccaugagcguguccaaggaggucaaaucuuuccuguggacccagagccucagacgggaacuguccggcuacugcucuaacaucaaacuucaaguugugaaggacgcccaggcucugcuccacgggcuggauuuuagcgagguguccaauguccagcgccuuaugagaaagcagaaacgggacgauucugaccugaagcgccucagagaucugaaccaagccgugaauaaccugguugaacucaagagcacacagcagaaauccauucugcgggugggaacgcuuaccagcgacgaucugcucacacuggcggcugaccuugagaagcugaaaucuaaggucauccgcaccgaaagaccccucuccagcggcguguauauggggaaucugucuacacagcaacuggagcagcggcgcgcccuccugaacaugauuggaaugguuggcggggcccagggaacccagccuggcagagauggcgugguccgggugugggacgugaaaaauccggaucuucugaacaaucaauucgggacaaugcccucccucacccuggcuugucuuacgaagcagggacaggucgaccugaacgaugccguucucgcucugaccgaccugggccucaucuacacagccaaguauccuaauagcucugaccuggaucgccuuucccaaagccaucccauucugaacaugguggacaucaaaaaguccucucucaauaucagcggguacaacuuuucccugggagcggccgugaaagcuggcgccugcaugcuugaugggggaaauaugcuggagaccauuaaggucacaccucagaccauggacggcauccucaaaagcauucugaaggugaaaagaucucugggcauguucguuuccgauacgcccggggaacggaacccuuaugagaacauccucuacaagauuugucugagcggagacggcuggccguauaucgcuucucgcacaagcauuguggggagagccugggaaaauaccacagucgaucuugaguccgacggaaagccccagaaagugggcucugcggggagcaacaagucccugcagagcgccggauuuccuaccggccucaccuacucucaacugaugacacugaaagauuccaugaugcagcuugaccccagcgcuaagacguggaucgauaucgagggccggccugaagaccccguugagauugcccucuaccagccgaugucugggugcuauauccacuucuuuagagaaccuaccgaccugaaacaguucaagcaagaugcuaaguacucccauggaauugacguggccgaucuguuucccgcccagccuggccucacaagcgcugucaucgaggcgcugccccgcaauauggugcuuaccugucagggguccgacgauauuaaacggcugcucgacucucagggaagacgcgauaucaagcugaucgacauugcccugagcaaagcugauucccggagauucgaaaacgccgucugggaccaaugcaaggaucuuugucacaugcauacaggcgugguuguggagaaaaagaagcgcgggggcaaagaggaaaucacgccccacugcgcccucauggacuguauuauguaugaugcugccgucucuggaggccugaauaucccugugcugcgggcgguucucccgagagacaugguguuucgcaccagcucccccaaggucgugcugugaggacuaguuauaagacugacuagcccgaugggccucccaacgggcccuccuccccuccuugcaccgagauuaauaaaaaaaaaaaaaaaaaaaaaaaaaaaaaaaaaaaaaaaaaaaaaaaaaaaaaaaaaaaaaaaaaaaaaaaaaaaaaaaaaaaaaaaaaaaaaaaaaaaa

SEQ ID NO: 17943 - RNA, 1899 nt, Artificial Sequence
  mRNA product Design i-3 (A100) comprising derived and/or modified sequence from LASV(ISTH2010-NIG-2012;Clade II)__AIT17483__NP (opt5)
aggagaaagcuuaccaugagcgccuccaaggaggugaaaucuuuccuguggacccagagccucagacgggaacuguccggcuacugcucuaacaucaaacuucaagucguuaaggacgcucaggcccugcuccacgggcuggauuuuagcgagguguccaaugugcagcgccuuaugagaaagcagaaacgggacgauucugaccugaagcgccucagagaucugaaccaagcggucaauaaccugguggaacucaagagcacacagcagaaauccauucugcggguuggaacgcuuaccagcgacgaucugcucacacuggcugccgaccuugagaagcugaaaucuaaggugauccgcaccgaaagaccccucuccagcggcgucuauauggggaaucugucuacacagcaacuggagcagcggcgcgcccuccugaaccuuauuggaauggugggcggggcucagggaacccagccuggcagagauggcguugugcgggucugggacgugaaaaauccggaucugcucaacaaucaauucgggacaaugcccucccugacccuugccugucugacgaagcagggacagguggaccucaacgaugcuguccuggcccugaccgaccucggccugaucuacacagcgaaguauccuaauagcucugaccuugaucgccugucccaaagccaucccauucucaacaugguugacaccaaaaaguccucucugaauaucagcggguuuaacuucucccuuggagccgcugugaaagccggcgcuugcaugcuggaugggggaaauaugcucgagacaaucaaggugaccccucagacgauggacggcauucugaaaagcauccugaaggucaaaaagucucucggcauguuuguguccgauacacccggggaaagaaacccuuacgagaacauucuguauaagaucugucuuagcggagacggcuggccguacauugccucucggaccagcaucguugggcgcgcgugggaaaauacaaccguggaucuggaguccgacggaaaaccccacaaggucggcaccgccgggucuaacaaaagccuccaguccgcuggauucccuacaggccugacguauagccagcugaugacccuuaaggauucuaugaugcaacucgaccccuccgccaaaacauggauugauaucgagggcagaccugaagaccccguggagaucgcucuguaccagccgaugagcgggugcuacauucacuuuuuccgggaaccuaccgaccugaagcaguuuaagcaggaugccaaauauucucauggaaucgacguugccgaucucuuccccgcucaaccuggccugacauccgcggugauugaggcccuucccagaaauaugguccugaccugucaggggagcgacgauaucaagcgccuccuggacucccagggacggagagauauuaaacugaucgacaucgcucuuucuaaggccgauagccgccgguuugaaaacgccgugugggaccagugcaaagaucucugucauaugcacacgggcgucgugguugagaagaagaaaagagggggcaaggaggaaauuacaccccacugcgcucugauggacuguaucauguacgaugccgcgguguccggaggccugaauauuccuguccuccgcgcugugcugccgcgggacaugguuuucagaaccucuagccccaaagugguccuuugaggacuaguuauaagacugacuagcccgaugggccucccaacgggcccuccuccccuccuugcaccgagauuaauaaaaaaaaaaaaaaaaaaaaaaaaaaaaaaaaaaaaaaaaaaaaaaaaaaaaaaaaaaaaaaaaaaaaaaaaaaaaaaaaaaaaaaaaaaaaaaaaaaaa

SEQ ID NO: 17944 - RNA, 1899 nt, Artificial Sequence
  mRNA product Design i-3 (A100) comprising derived and/or modified sequence from LASV(Lassa virus/H.sapiens-wt/NGA/2015/ISTH_0543;Clade II)__AVO03640__NP (opt5)
aggagaaagcuuaccaugagcgccuccaaggaggugaaaucuuuccuguggacccagagccucagacgggaacuguccggcuacugcucuaacaucaaacuucaagucguuaaggacgcucaggcccugcuccacgggcuggauuuuagcgagguguccaaugugcagcgccuuaugagaaagcagaaacgggacgauucugaccugaagcgccucagagaucugaaccaagcggucaauaaccugguggaacucaagagcacacagcagaaauccauucugcggguuggaacgcuuaccagcgacgaucugcucacacuggcugccgaccuugagaagcugaaaucuaaggugauccgcaccgaaagaccccucuccagcggcgucuauauggggaaucugucuacacagcaacuggagcagcggcgcgcccuccugaacaugauuggaauggugggcggggcucagggaacccagccuggcagagauggcguugugcgggucugggacgugaaaaauccggaucuucugaacaaucaauucgggacaaugcccucccucacccuggccugucuuacgaagcagggacagguggaccugaacgaugcuguccucgcccugaccgaccugggccucaucuacacagcgaaguauccuaauagcucugaccuggaucgccuuucccaaagccaucccauucugaacaugguugacaccaaaaaguccucucucaauaucagcggguacaacuuuucccugggagccgcugugaaagccggcgcuugcaugcuugaugggggaaauaugcuggagacaaucaaggugaccccucagacgauggacggcauucucaaaagcauccugaaggucaaaaagucucugggcauguucguguccgauacacccggggaaagaaacccuuaugagaacauucucuacaagaucugucugagcggagacggcuggccguauauugccucucggaccagcaucguugggcgcgcgugggaaaauacaaccguggaucuugaguccgacggaaaaccccagaaggucggcucugccgggagcaacaaaucccugcagagcgcuggauuuccuaccggccucacauacucucaacugaugacgcugaaggauuccaugaugcagcuugaccccagcgccaaaaccuggauugauaucgagggcagaccugaagaccccguggagaucgcucucuaccagccgaugucugggugcuauauucacuucuuucgggaaccuacagaccugaagcaguucaagcaagaugccaaauacucccauggaaucgacguugccgaucuguuucccgcucagccuggccucaccagcgcggugauugaggcccugcccagaaauaugguccuuacaugucagggguccgacgauaucaagcgccugcucgacucucagggacggaaagauauuaagcugaucgacaucgcucugagcaaagccgauuccagacgcuucgaaaacgccgugugggaccaaugcaaggaucuuugucacaugcauaccggcgucgugguugagaagaaaaagagagggggcaaagaggaaauuacgccccacugcgcucucauggacuguaucauguaugaugccgcggugucuggaggccugaauauuccuguccugcgggcugugcucccgcgcgacaugguuuuucggacaagcucccccaaggugguccugugaggacuaguuauaagacugacuagcccgaugggccucccaacgggcccuccuccccuccuugcaccgagauuaauaaaaaaaaaaaaaaaaaaaaaaaaaaaaaaaaaaaaaaaaaaaaaaaaaaaaaaaaaaaaaaaaaaaaaaaaaaaaaaaaaaaaaaaaaaaaaaaaaaaa

SEQ ID NO: 17945 - RNA, 1899 nt, Artificial Sequence
  mRNA product Design i-3 (A100) comprising derived and/or modified sequence from LASV(Lassa virus/H.sapiens-wt/NGA/2016/ISTH_0009;Clade II)__AVO03572__NP (opt5)
aggagaaagcuuaccaugagcgccuccaaggaggugaaaucuuuccuguggacccagagccucagacgggaacuguccggcuacugcucuaacaucaaacuucaagucguuaaggacgcucaggcccugcuccacgggcuggauuuuagcgagguguccaaugugcagcgccuuaugagaaagcagaaacgggacgauucugaccugaagcgccucagagaucugaaccaagcggucaauaaccugguggaacucaagagcacacagcagaaauccauucugcggguuggaacgcuuaccagcgacgaucugcucacacuggcugccgaccuugagaagcugaaaucuaaggugauccgcaccgaaagaccccucuccagcggcgucuauauggggaaucugucuacacagcaacuggagcagcggcgcgcccuccugaacaugauuggaauggugggcggggcucagggaacccagccuggcagagauggcguugugcgggucugggacgugaaaaauccggaucuucugaacaaucaauucgggacaaugcccucccucacccuggccugucuuacgaagcagggacagguggaccugaacgaugcuguccucgcccugaccgaccugggccucaucuacacagcgaaguauccuaauagcucugaccuggaucgccuuucccaaagccaucccauucugaacaugguugacaccaaaaaguccucucucaauaucagcggguacaacuuuucccugggagccgcugugaaagccggcgcuugcaugcuugaugggggaaauaugcuggagacaaucaaggugaccccucagacgauggacggcauucucaaaagcauccugaaggucaaaaagucucugggcauguucguguccgauacacccggggaaagaaacccuuaugagaacauucucuacaagaucugucugagcggagacggcuggccguauauugccucucggaccagcaucguugggcgcgcgugggaaaauacaaccguggaucuugaguccgacggaaaaccccagaaggucggcucugccgggagcaacaaaucccugcagagcgcuggauuuccuaccggccucacauacucucaacugaugacgcugaaggauuccaugaugcagcuugaccccagcgccaaaaccuggauugauaucgagggcagaccugaagaccccguggagaucgcucucuaccagccgaugucugggugcuauauucacuucuuucgggaaccuacagaccugaagcaguucaagcaagaugccaaauacucccauggaaucgacguugccgaucuguuucccgcucagccuggccucaccagcgcggugauugaggcccugcccagaaauaugguccuuacaugucagggguccgacgauaucaagcgccugcucgacucucagggacggagagauauuaaacugaucgacaucgcucugagcaaggccgauucccgccgguucgaaaacgccgugugggaccaaugcaaagaucuuugucacaugcauaccggcgucgugguugagaagaagaaaagagggggcaaggaggaaauuacgccccacugcgcucucauggacuguaucauguaugaugccgcggugucuggaggccugaauauuccuguccugcgcgcugugcucccgcgggacaugguuuuuagaacaagcucccccaaagugguccugugaggacuaguuauaagacugacuagcccgaugggccucccaacgggcccuccuccccuccuugcaccgagauuaauaaaaaaaaaaaaaaaaaaaaaaaaaaaaaaaaaaaaaaaaaaaaaaaaaaaaaaaaaaaaaaaaaaaaaaaaaaaaaaaaaaaaaaaaaaaaaaaaaaaa

SEQ ID NO: 17946 - RNA, 1899 nt, Artificial Sequence
  mRNA product Design i-3 (A100) comprising derived and/or modified sequence from LASV(Lassa virus/H.sapiens-wt/NGA/2016/ISTH_0017;Clade II)__AVO03568__NP (opt5)
aggagaaagcuuaccaugagcgccuccaaggaggugaaaucuuuccuguggacccagagccucagacgggaacuguccggcuacugcucuagcaucaaacuucaagucguuaaggacgcucaggcccugcuccacgggcuggauuuuuccgaggugucuaacgugcagcgccuuaugagaaagcagaaacgggacgauagcgaccugaagcgccucagagaucugaaucaagcggucaacaaucugguggaacucaaguccacacagcagaaaagcauucugcggguuggaacgcuuaccucugacgaucugcucacacuggcugccgaccuugagaagcugaaauccaaggugauccgcaccgaaagaccccucagcucuggcgucuauauggggaaccuguccacacagcaacuggagcagcggcgcgcccuccugaauaugauuggaauggcuggcggggcccagggaacccagccuggcagagauggcgugguucgggugugggacgucaaaaacccggaucuucugaauaaccaauucgggacaaugcccagccucacccuggcuugucuuacgaagcagggacagguggaccugaaugaugccgugcucgcgcugaccgaccugggccucaucuacacagccaaguauccuaacucuuccgaccuggaucgccuuagccaaucccaucccauucugaauauggucgacaccaaaaagucuagccucaacaucuccggguacaauuuuagccugggagcugccguuaaagcuggcgccugcaugcuugaugggggaaacaugcuggagacaaucaaggugaccccucagacgauggacggcauucucaaaucuauccugaaggugaaaagaucccugggcauguucgucagcgaugcgcccggggaacggaauccuuaugagaacauucucuacaagaucugucugucuggagacggcuggccguauauugccagccgcacauccaucguggggagagcuugggaaaacaccacaguugaucuugagucugacggaaagccccagaaagugggcgccaccgggagcaauaagucccugcagagcgcuggauuuccuaccggccucacauacucucaacugaugacgcugaaagauuccaugaugcagcuugaccccagcgccaagaccuggauugauaucgagggccggccugaagaccccgucgagguggcccucuaccagccgguuucugggugcuauauccacuucuuuagagaaccuacagaccugaaacaguucaagcaagaugcuaaguacucccauggaauugacguggcggaucuguuucccgcccagccuggccucaccagcgcugucaucgaggcccugccccgcaacauggugcuuacaugucagggguccgacgauauuaaaaagcugcucgacucucagggacggaaagauaucaagcugauugacaucgcccugagcaaagcugauuccagacgcuucgaaaaugccgucugggaccaaugcaaggaucuuugucacaugcauaccggcgugguuguggagaagaaaaagagagggggcaaagaggaaaucacgccccacugcgcgcucauggacuguauuauguaugaugcugccgucucuggaggccugaacaucccugugcugcgggccguucucccgcgcgacaugguguuucggacaagcucccccaaggucgugcugugaggacuaguuauaagacugacuagcccgaugggccucccaacgggcccuccuccccuccuugcaccgagauuaauaaaaaaaaaaaaaaaaaaaaaaaaaaaaaaaaaaaaaaaaaaaaaaaaaaaaaaaaaaaaaaaaaaaaaaaaaaaaaaaaaaaaaaaaaaaaaaaaaaaa

SEQ ID NO: 17947 - RNA, 1899 nt, Artificial Sequence
  mRNA product Design i-3 (A100) comprising derived and/or modified sequence from LASV(Lassa virus/H.sapiens-wt/NGA/2018/ISTH_0959;Clade II)__AVV65100__NP (opt5)
aggagaaagcuuaccaugagcgccuccaaggaggugaaaucuuuccuguggacccagagccucagacgggaacuguccggcuacugcucuaacaucaaacuucaagucguuaaggacgcucaggcccugcuccacgggcuggauuuuagcgagguguccaaugugcagcgccuuaugagaaagcagaaacgggacgauucugaccugaagcgccucagagaucugaaccaagcggucaauaaccugguggaacucaagagcacccagcagaaauccauucugcggguuggaacgcuuaccagcgacgaucugcucacacuggcugccgaccuugagaagcugaaaucuaaggugauccgcaccgaaagaccccucuccagcggcgucuauauggggaaucugucuacacagcaacuggagcagcggcgcgcccuccugaaccuuauuggaauggugggcggggcucagggaacccagccuggcagagauggcguugugcgggucugggacgugaaaaauccggaucugcucaacaaucaauucgggacaaugcccucccugacccuugccugucugacgaagcagggacagguggaccucaacgaugucguucuggcucugaccgaccucggccugaucuacacagccaaguauccuaauagcucugaccuugaucgccugucccaaagccaucccauucucaacaugguggacaccaaaaaguccucucugaauaucagcggguuuaacuucucccuuggagcggccgugaaagcuggcgccugcaugcuggaugggggaaauaugcucgagacaaucaaggucaccccucagacgauggacggcauucugaaaagcauccugaaggugaaaaagucucucggcauguuuguuuccgauacacccggggaaagaaacccuuacgagaacauucuguauaagaucugucuuagcggagacggcuggccguacauugcuucucggaccagcaucguggggcgcgccugggaaaauacaaccgucgaucuggaguccgacggaaaaccccacaaggugggcaccgcggggucuaacaaaagccuccaguccgccggauucccuacaggccugacguauagccagcugaugacccuuaaggauucuaugaugcaacucgaccccuccgcuaaaacauggauugauaucgagggcagaccugaagaccccguugagaucgcccuguaccagccgaugagcgggugcuacauucacuuuuuccgggaaccuaccgaccugaagcaguuuaagcaggaugcuaaauauucucauggaaucgacguggccgaucucuuccccgcccaaccuggccugacauccgcugucauugaggcgcuucccagaaauauggugcugaccugucaggggagcgacgauaucaagcgccuccuggacucccagggacggaaagauauuaagcugaucgacaucgcccuuucuaaaacggauagcagacgcuuugaaaacgcugucugggaccagugcaaggaucucugucauaugcacacaggcgugguuguggagaagaaaaagagagggggcaaagaggaaauuacaccccacugcgcccugauggacuguaucauguacgaugccgcugucuccggaggccugaauauuccugugcuccgggccguucugccgcgcgacaugguguuccggaccucuagccccaaggucgugcuuugaggacuaguuauaagacugacuagcccgaugggccucccaacgggcccuccuccccuccuugcaccgagauuaauaaaaaaaaaaaaaaaaaaaaaaaaaaaaaaaaaaaaaaaaaaaaaaaaaaaaaaaaaaaaaaaaaaaaaaaaaaaaaaaaaaaaaaaaaaaaaaaaaaaa

SEQ ID NO: 17948 - RNA, 1899 nt, Artificial Sequence
  mRNA product Design i-3 (A100) comprising derived and/or modified sequence from LASV(LASV003-NIG-2008;Clade II)__AIT17581__NP (opt5)
aggagaaagcuuaccaugagcgccuccaaggaggugaaaucuuuccuguggacccagagccucagacgggaacuguccggcuacugcucuagcaucaaacuucaagucguuaaggacgcucaggcccugcuccacgggcuggauuuuuccgaggugucuaacgugcagcgccuuaugagaaagcagaaacgggacgauagcgaccugaagcgccucagagaucugaaucaagcggucaacaaucugguggaacucaaguccacccagcagaaaagcguucugcgggugggaacgcuuaccucugacgaucugcucacacuggcugccgaccuugagaagcugaaauccaaggucauucgcaccgaaagaccccucagcucuggcguguauauggggaaccuguccgcccagcaacuggagcagcggcgcacacuccugaauaugaucggaaugguuggcggggcucagggaacccagccuggcagagauggcgugguccgggugugggacgugaaaaacccggaucuucugaauaaccaauucgggacaaugcccagccucacccuggccugucuuacgaagcagggacaggucgaccugaaugauguugugcucgcucugaccgaccugggccucauuuacacagccaaguauccuaacucuuccgaccuggaucgccuuagccaaucccaucccauccugucuaugguggacaccaaaaagagcucccucaauauuagcggguacaacuuuucucugggagcggccgucaaagcuggcgccugcaugcuugaugggggaaauaugcuggagacaaucaaggugaccccucagacgauggacggcauccucaaauccauucugaagguuaaaaagagccugggcauguucgugucugauacacccggggaaagaaacccuuaugagaauauccucuacaagauuugucugagcggagacggcuggccguauaucgcuucccggaccucuauugucgggcgcgccugggaaaacacaaccguggaucuugagagcgacggaaaaccccagaagguuggcaccgcgggguccaacaaaagccugcagucugccggauuuccuacaggccucacguacucccaacugaugacccugaaggauagcaugaugcagcuugaccccucugcuaaaacauggaucgauauugagggcagaccugaagaccccguggagaucgcccucuaccagccgauguccgggugcuauauccacuucuuucgggaaccuaccgaccugaagcaguucaagcaagaugcuaaauacagccauggaauugacgucacagaucuguuucccgcccagccuggccucaccuccgccgugaucgaggcucugcccagaaauaugguccuuacgugucaggggucugacgauauuaagcgccugcucgacagccagggacggagagauaucaaacugauugacaucgcgcuguccaaggccgauucucgccgguucgaaaacgcugugugggaccaaugcaaagaucuuugucacaugcauacaggcguuguggucgagaagaagaaaagagggggcaaggaggaaaucacaccccacugcgcccucauggacuguauuauguaugaugccgcugugagcggaggccugaauaucccuguucugcgcgccgugcucccgcgggacauggucuuuagaaccuccagccccaaaguggugcugugaggacuaguuauaagacugacuagcccgaugggccucccaacgggcccuccuccccuccuugcaccgagauuaauaaaaaaaaaaaaaaaaaaaaaaaaaaaaaaaaaaaaaaaaaaaaaaaaaaaaaaaaaaaaaaaaaaaaaaaaaaaaaaaaaaaaaaaaaaaaaaaaaaaa

SEQ ID NO: 17949 - RNA, 1899 nt, Artificial Sequence
  mRNA product Design i-3 (A100) comprising derived and/or modified sequence from LASV(LASV035-NIG-2009;Clade II)__AIT17589__NP (opt5)
aggagaaagcuuaccaugagcgccuccaaggaggugaaaucuuuccuguggacccagagccucagacgggaacuguccggcuacugcucuagcaucaaacuucaagucguuaaagacgcucaggcccugcuccacgggcuggauuuuuccgaggugucuaacgugcagcgccuuaugagaaagcagaaacgggacgauagcgaccugaagcgccucagagaucugaaucaagcggucaacaaucugguggaacucaaguccacacagcagaaaagcauucugcggguuggaacgcuuaccucugacgaucugcucacacuggcugccgaccuugagaagcugaaauccaaggugauccgcaccgaaagaccccucagcucuggcgucuauauggggaaccuguccgcccagcaacuggagcagcggcgcgcucuccugaauaugauuggaauggugggcggggcccagggaacacagccuggcagagauggcguugugcgggucugggacgugaaaaacccggaucuucugaauaaccaauucgggaccaugcccagccucacacuggcuugucuuaccaagcagggacagguggaccugaaugaugccguccucgcgcugacggaccugggccucaucuacaccgccaaguauccuaacucuuccgaccuggaucgccuuagccaaucccaucccauucugaauaugguugacacaaagaagucuagccucaacaucuccggguacaauuuuagccugggagcugccgugaaagcuggcgccugcaugcuugaugggggaaacaugcuggagaccaucaaggugacaccucagaccauggacggcauucucaaaucuauccugaaggucaaaagaucccugggcauguucgugagcgauacgcccggggaacggaauccuuaugagaacauucucuacaagaucugucugucuggagacggcuggccguauauugcgagccgcacauccaucguugggagagccugggaaaacaccacaguggaucuugagucugacggaaagccccagaaagucggcaccaccgggagcaauaagucccugcagagcgcuggauuuccuacaggccucacguacucucaacugaugacccugaaagauuccaugaugcagcuugaccccagcgccaagacauggauugauaucgagggccggccugaagaccccguggagaucgcucucuaccagccgaugucugggugcuauauucacuucuuuagagaaccuaccgaccugaaacaguucaagcaagaugccaaguacucccauggaaucgacguugccgaucuguuucccgcucagccuggccucacaagcgcggugauugaggcccugccccgcaacaugguccuuaccugucagggguccgacgauaucaaaaagcugcucgacucucagggacggagagauauuaaacugaucgacaucgcucugagcaaggccgauucccgcaaauucgaaaaugccgugugggaccaaugcaaggaucuuugucacaugcauacgggcgucgugguugagaagaaaaagagagggggcaaagaggaaauuacaccccacugcgcucucauggacuguaucauguaugaugccgcggugucuggaggccugaacauuccuguccugcgggcugugcucccgcgcgacaugguuuuucggaccagcucccccaaggugguccugugaggacuaguuauaagacugacuagcccgaugggccucccaacgggcccuccuccccuccuugcaccgagauuaauaaaaaaaaaaaaaaaaaaaaaaaaaaaaaaaaaaaaaaaaaaaaaaaaaaaaaaaaaaaaaaaaaaaaaaaaaaaaaaaaaaaaaaaaaaaaaaaaaaaa

SEQ ID NO: 17950 - RNA, 1899 nt, Artificial Sequence
  mRNA product Design i-3 (A100) comprising derived and/or modified sequence from LASV(LASV1000-NIG-2009;Clade II)__AIT17783__NP (opt5)
aggagaaagcuuaccaugagcgccuccaaggaggugaaaucuuuccuguggacccagagccucagacgggaacuguccggcuacugcucuaacaucaaacuucaagucguuaaggacgcucaggcccugcuccacgggcuggauuuuagcgagguguccaaugugcagcgccuuaugagaaagcagaaacgggacgauucugaccugaagcgccucagagaucugaaccaagcggucaauaaccugguggaacucaagagcacacagcagaaauccauucugcggguuggaacgcuuaccagcgacgaucugcucacacuggcugccgaccuugagaagcugaaaucuaaggugauccgcaccgaaagaccccucuccagcggcgucuauauggggaaucugucuacacagcaacuggagcagcggcgcgcccuccugaacaugauuggaauggugggcggggcucagggaacccagccuggcagagauggcguugugcgggucugggacgugaaaaauccggaucuucugaacaaucaauucgggacaaugcccucccucacccuggccugucuuacgaagcagggacagguggaccugaacgaugucguucucgcucugaccgaccugggccucaucuacacagccaaguauccuaauagcucugaccuggaucgccuuucccaaagccaucccauucugaacaugguggacaccaaaaaguccucucucaauaucagcggguacaacuuuucccugggagcggccgugaaagcuggcgccugcaugcuugaugggggaaauaugcuggagacaaucaaggucaccccucagacgauggacggcauucucaaaagcauccugaaggugaaaaagucucugggcauguucguuuccgauacacccggggaaagaaacccuuaugagaacauucucuacaagaucugucugagcggagacggcuggccguauauugcuucucggaccagcaucguggggcgcgccugggaaaauacaaccgucgaucuugaguccgacggaaaaccccagaaggugggcaccgcggggucuaacaaaagccugcaguccgccggauuuccuacaggccucacguacagccaacugaugacccugaaggauucuaugaugcagcuugaccccuccgcuaaaacauggauugauaucgagggcagaccugaagaccccguugagaucgcccucuaccagccggugagcgggugcuauauucacuucuuucgggaaccuaccgaccugaagcaguucaagcaagaugcuaaauacucucauggaaucgacgucgccgaucuguuucccgcccagccuggccucacauccgcugugauugaggcgcugcccagaaauaugguccuuaccugucaggggagcgacgauaucaagcgccugcucgacucccagggacggagagauauuaaacugaucgacaucgcccugucuaaggcugauagccgccgguucgaaaacgccgugugggaccaaugcaaagaucuuugucacaugcauacgggcguuguggucgagaagaagaaaagagggggcaaggaggaaauuacaccccacugcgcccucauggacuguaucauguaugaugcugccguguccggaggccugaauauuccuguucugcgcgcggugcucccgcgggacauggucuuuagaaccucuagccccaaaguggugcugugaggacuaguuauaagacugacuagcccgaugggccucccaacgggcccuccuccccuccuugcaccgagauuaauaaaaaaaaaaaaaaaaaaaaaaaaaaaaaaaaaaaaaaaaaaaaaaaaaaaaaaaaaaaaaaaaaaaaaaaaaaaaaaaaaaaaaaaaaaaaaaaaaaaa

SEQ ID NO: 17951 - RNA, 1899 nt, Artificial Sequence
  mRNA product Design i-3 (A100) comprising derived and/or modified sequence from LASV(LASV221-NIG-2010;Clade II)__AIT17625__NP (opt5)
aggagaaagcuuaccaugagcgccuccaaggaggugaaaucuuuccuguggacccagagccucagacgggaacuguccggcuacugcucuagcaucaaacuucaagucguuaaggacgcucaggcccugcuccacgggcuggauuuuuccgaggugucuaacgugcagcgccuuaugagaaagcagcggcgcgacgauagcgaccugaaaagacuccgggaucugaaucaagcggucaacaaucugguggaacucaaguccacacagcaaaagagcauucugcgcguuggaacgcuuaccucugacgaucugcucacacuggcugccgaccuugagaaacugaaguccaaagugaucagaaccgaacggccccucagcucuggcgucuauauggggaaccuguccacacagcagcuggagcagcgcagagcccuccugaauaugauuggaauggugggcggggcucagggaacccagccuggccgggauggcguugugcgcgucugggacgugaagaacccggaucuucugaauaaccaauucgggacaaugcccagccucacccuggccugucuuacgaaacagggacagguggaccugaaugaugcuguccucgcccugaccgaccugggccucaucuacacagcgaaguauccuaacucuuccgaccuggauagacuuagccaaucccaucccauucugaauaugguugacaccaagaaaucuagccucaacaucuccggguacaauuuuagccugggagccgcugugaaggccggcgcuugcaugcuugaugggggaaacaugcuggagacaaucaaagugaccccucagacggucgacggcauucucaagucuauccugaaagugaagcggucccugggcauguucguuagcgauacacccggggaacgcaauccuuaugagaacauucucuacaaaaucugucugucuggagacggcuggccguauauugccagcagaaccuccaucguggggcgggcgugggaaaacacaaccgucgaucuugagucugacggaaagccccagaaggugggcaccgccgggagcaauaaaucccugcagagcgcuggauuuccuacaggccucacguacucucaacugaugacccugaaggauuccaugaugcagcuugaccccagcgccaaaacauggauugauaucgagggcagaccugaagaccccguugagaucgcucucuaccagccgaugucugggugcuauauucacuucuuucgcgaaccuaccgaccugaagcaguucaaacaagaugccaaguacucccauggaaucgacguggccgaucuguuucccgcucagccuggccucacaagcgcggucauugaggcccugccccggaacauggugcuuaccugucagggguccgacgauaucaagagacugcucgacucucagggacgccgggauauuaaacugaucgacaucgcucugagcaaggccgauuccagaaaauucgaaaaugccgucugggaccaaugcaaggaucuuugucacaugcauacgggcgugguuguggagaaaaagaagcgcgggggcaaagaggaaauuacaccccacugcgcucucauggacuguaucauguaugaugccgcggucucuggaggccugaacauuccugugcugcgggcuguucucccgagagacaugguguuucgcaccagcucccccaaggucgugcugugaggacuaguuauaagacugacuagcccgaugggccucccaacgggcccuccuccccuccuugcaccgagauuaauaaaaaaaaaaaaaaaaaaaaaaaaaaaaaaaaaaaaaaaaaaaaaaaaaaaaaaaaaaaaaaaaaaaaaaaaaaaaaaaaaaaaaaaaaaaaaaaaaaaa

SEQ ID NO: 17952 - RNA, 1899 nt, Artificial Sequence
  mRNA product Design i-3 (A100) comprising derived and/or modified sequence from LASV(LASV237-NIG-2010;Clade II)__AIT17639__NP (opt5)
aggagaaagcuuaccaugagcgccuccaaggaggugaaaucuuuccuguggacccagagccucagacgggaacuguccggcuacugcucuaacaucaaacuucaagucguuaaggacgcucaggcccugcuccacgggcuggauuuuagcgagguguccaaugugcagcgccuuaugagaaagcagaaacgggacgauucugaccugaagcgccucagagaucugaaccaagcggucaauaaccugguggaacucaagagcacacagcagaaauccauucugcggguuggaacgcuuaccagcgacgaucugcucacacuggcugccgaccuugagaagcugaaaucuaaggugauccgcaccgaaagaccccucuccagcggcgucuauauggggaaucugucuacacagcaacuggagcagcggcgcgcccuccugaacaugauuggaauggugggcggggcucagggaacccagccuggcagagauggcguugugcgggucugggacgugaaaaauccggaucuucugaacaaucaauucgggacaaugcccucccucacccuggccugucuuacgaagcagggacagguggaccugaacgaugcuguccucgcccugaccgaccugggccucaucuacacagcgaaguauccuaauagcucugaccuggaucgccuuucccaaagccaucccauucugaacaugguugacaucaaaaaguccucucucaauaucagcggguacaacuuuucccugggagccgcugugaaagccggcgcuugcaugcuugaugggggaaauaugcuggagaccauuaaggugacaccucagaccauggacggcauccucaaaagcauucugaaggucaaaagaucucugggcauguucguguccgauacgcccggggaacggaacccuuaugagaacauccucuacaagauuugucugagcggagacggcuggccguauaucgccucucgcacaagcauuguugggagagcgugggaaaauaccacaguggaucuugaguccgacggaaagccccagaaagucggcucugccgggagcaacaagucccugcagagcgcuggauuuccuaccggccucaccuacucucaacugaugacacugaaagauuccaugaugcagcuugaccccagcgccaagacguggaucgauaucgagggccggccugaagaccccguggagauugcucucuaccagccgaugucugggugcuauauccacuucuuuagagaaccuaccgaccugaaacaguucaagcaagaugccaaguacucccauggaauugacguugccgaucuguuucccgcucagccuggccucacaagcgcggugaucgaggcccugccccgcaauaugguccuuaccugucagggguccgacgauauuaaacggcugcucgacucucagggaagacgcgauaucaagcugaucgacauugcucugagcaaagccgauucccggagauucgaaaacgccgugugggaccaaugcaaggaucuuugucacaugcauacaggcgucgugguugagaaaaagaagcgcgggggcaaagaggaaaucacgccccacugcgcucucauggacuguauuauguaugaugccgcggugucuggaggccugaauaucccuguccugcgggcugugcucccgagagacaugguuuuucgcaccagcucccccaaggugguccugugaggacuaguuauaagacugacuagcccgaugggccucccaacgggcccuccuccccuccuugcaccgagauuaauaaaaaaaaaaaaaaaaaaaaaaaaaaaaaaaaaaaaaaaaaaaaaaaaaaaaaaaaaaaaaaaaaaaaaaaaaaaaaaaaaaaaaaaaaaaaaaaaaaaa

SEQ ID NO: 17953 - RNA, 1899 nt, Artificial Sequence
  mRNA product Design i-3 (A100) comprising derived and/or modified sequence from LASV(LASV253-NIG-2011;Clade II)__AIT17671__NP (opt5)
aggagaaagcuuaccaugagcgccuccaaggaggugaaaucuuuccuguggacccagagccucagacgggaacuguccggcuacugcucuagcaucaaacuucaagucguuaaggacgcucaggcccugcuccacgggcuggauuuuuccgaggugucuaacgugcagcgccuuaugagaaagcagaaacgggacgauagcgaccugaagcgccucagagaucugaaucaagcggucaacaaucugguggaacucaaguccacccagcagaaaagcguucugcgggugggaacgcuuaccucugacgaucugcucacacuggcugccgaccuugagaagcugaaauccaaggucauucgcaccgaaagaccccucagcucuggcguguauauggggaaccuguccacacagcaacuggagcagcggcgcgcccuccugaauaugaucggaaugguuggcggggcucagggaacccagccuggcagagauggcgugguccgggugugggacgugaaaaacccggaucuucugaauaaccaauucgggacaaugcccagccucacccuggccugucuuacgaagcagggacaggucgaccugaaugauguugugcucgcucugaccgaccugggccucauuuacacagccaaguauccuaacucuuccgaccuggaucgccuuagccaaucccaucccauccugaauaugguggacaccaaaaagucuagccucaacauuuccggguacaauuuuagccugggagcggccgucaaagcuggcgccugcaugcuugaugggggaaacaugcuggagacaaucaaggugaccccucagacgauggacggcauccucaaaucuauucugaagguuaaaaagucccugggcauguucgugagcgauacacccggggaaagaaauccuuaugagaacauccucuacaagauuugucugucuggagacggcuggccguauaucgcuagccggaccuccauugucgggcgcgccugggaaaacacaaccguggaucuugagucugacggaaaaccccagaagguuggcaccgcggggagcaauaaaucccugcagagcgccggauuuccuacaggccucacguacucucaacugaugacccugaaggauuccaugaugcagcuugaccccagcgcuaaaacauggaucgauauugagggcagaccugaagaccccguggagaucgcccucuaccagccgaugucugggugcuauauccacuucuuucgggaaccuaccgaccugaagcaguucaagcaagaugcuaaauacucccauggaauugacgucacagaucuguuucccgcccagccuggccucaccagcgccgugaucgaggcucugcccagaaacaugguccuuacgugucagggguccgacgauauuaagcgccugcucgacucucagggacggagagauaucaaacugauugacaucgcgcugagcaaggccgauucccgccgguucgaaaaugcugugugggaccaaugcaaagaucuuugucacaugcauacaggcguuguggucgagaagaagaaaagagggggcaaggaggaaaucacaccccacugcgcccucauggacuguauuauguaugaugccgcugugucuggaggccugaacaucccuguucugcgcgccgugcucccgcgggacauggucuuuagaaccagcucccccaaaguggugcugugaggacuaguuauaagacugacuagcccgaugggccucccaacgggcccuccuccccuccuugcaccgagauuaauaaaaaaaaaaaaaaaaaaaaaaaaaaaaaaaaaaaaaaaaaaaaaaaaaaaaaaaaaaaaaaaaaaaaaaaaaaaaaaaaaaaaaaaaaaaaaaaaaaaa

SEQ ID NO: 17954 - RNA, 1899 nt, Artificial Sequence
  mRNA product Design i-3 (A100) comprising derived and/or modified sequence from LASV(LASV254-NIG-2011;Clade II)__AIT17675__NP (opt5)
aggagaaagcuuaccaugagcgccuccaaggaggugaaaucuuuccuguggacccagagccucagacgggaacuguccggcuacugcucuagcaucaaacuucaagucguuaaggacgcucaggcccugcuccacgggcuggauuuuuccgaggugucuaacgugcagcgccuuaugagaaagcagaaacgggacgauagcgaccugaagcgccucagagaucugaaucaagcggucaacaaucugguggaacucaaguccacacagcagaaaagcguucugcgggugggaacgcuuaccucugacgaucugcucacacuggcugccgaccuugagaagcugaaauccaaggucauucgcaccgaaagaccccucagcucuggcguguauauggggaaccuguccacacagcaacuggagcagcggcgcgcccuccugaauaugaucggaaugguuggcggggcucagggaacccagccuggcagagauggcgugguccgggugugggacgugaaaaacccggaucuucugaauaaccaauucgggacaaugcccagccucacccuggccugucuuacgaagcagggacaggucgaccugaaugaugcuguucucgcccugaccgaccugggccucauuuacacagcgaaguauccuaacucuuccgaccuggaucgccuuagccaaucccaucccauccugaauaugguggacaccaaaaagucuagccucaacauuuccggguacaauuuuagccugggagccgcugugaaagccggcgcuugcaugcuugaugggggaaacaugcuggagacaaucaaggucaccccucagacgauggacggcauccucaaaucuauucugaaggugaaaaagucccugggcauguucguuagcgauacacccggggaaagaaauccuuaugagaacauccucuacaagauuugucugucuggagacggcuggccguauaucgccagccggaccuccauuguggggcgcgcgugggaaaacacaaucgucgaucuugagucugacggaaaaccccagaaggugggcaccgccgggagcaauaaaucccugcagagcgcuggauuuccuaccggccucacauacucucaacugaugacgcugaaggauuccaugaugcagcuugaccccagcgccaaaaccuggauugauaucgagggcagaccugaagaccccguugagaucgcucucuaccagccgaugucugggugcuauauucacuucuuucgggaaccuacagaccugaagcaguucaagcaagaugccaaauacucccauggaaucgacguggccgaucuguuucccgcucagccuggccucaccagcgcggucauugaggcccugcccagaaacauggugcuuacaugucagggguccgacgauaucaagcgccugcucgacucucagggacggagagauauuaaacugaucgacaucgcucugagcaaggccgauucccgccgguucgaaaaugccgucugggaccaaugcaaagaucuuugucacaugcauaccggcgugguuguggagaagaagaaaagagggggcaaggaggaaauuacgccccacugcgcucucauggacuguaucauguaugaugccgcggucucuggaggccugaacauuccugugcugcgcgcuguucucccgcgggacaugguguuuagaacaagcucccccaaagucgugcugugaggacuaguuauaagacugacuagcccgaugggccucccaacgggcccuccuccccuccuugcaccgagauuaauaaaaaaaaaaaaaaaaaaaaaaaaaaaaaaaaaaaaaaaaaaaaaaaaaaaaaaaaaaaaaaaaaaaaaaaaaaaaaaaaaaaaaaaaaaaaaaaaaaaa

SEQ ID NO: 17955 - RNA, 1899 nt, Artificial Sequence
  mRNA product Design i-3 (A100) comprising derived and/or modified sequence from LASV(Nig08-04;Clade II)__ADU56611__NP (opt5)
aggagaaagcuuaccaugagcgccuccaaggaggugaaaucuuuccuguggacccagagccucagacgggaacuguccggcuacugcucuaacaucaaacuucaagucguuaaggacgcucaggcccugcuccacgggcuggauuuuagcgagguguccaaugugcagcgccuuaugagaaagcagaaacgggacgauggagaccugaagcgccucagagaucugaaccaagcggucaauaaccugguggaacucaagucuacccagcagaaaagcguucugcgggugggcacgcuuaccuccgacgaucugcucacacuggcugccgaccuugagaagcugaaaagcaaggucauucgcaccgaaagaccccucucuuccgggguguauaugggaaaucugagcacacagcaacuggagcagcggaaagcccuccugucuaugaucggcaugguugggggagcucagggcacccagccuggccgcgaugggguggucagagugugggacgugaagaacccggaucuucugaauaaccaauucggaacaaugcccucccucacccuggccugucuuacgaagcagggccaggucgaccugaaugaugcuguucucgcccugaccgaccuggggcucauuuacacagcgaaauauccuaacagcucugaccuggaucggcuuucccaaagccaucccauccugaauaugguggacaccaagaaauccucucucaacauuagcggauacaauuuuucccugggcgccgcugugaaggccggggcuugcaugcuugauggaggcaacaugcuggagacaaucaaagucaccccucagacgauggacggcauccucaagagcauucugaaagugaagcgcucucuggggauguucguuuccgauacacccggagaaagaaauccuuaugagaacauccucuacaagauuugucugagcggcgacggguggccguauaucgccucucggaccagcauugugggacgcgcgugggaaaacacaaccgucgaucuugaguccgacggcaaaccccagaagguggggaccgccggaucuaauaaaagccugcaguccgcuggcuuuccuacaggccucacguacagccaacugaugacccugaaggauucuaugaugcagcuugaccccuccgccaaaacauggaucgauauugaggggagaccugaagaccccguugagaucgcucucuaccagccgaugagcggaugcuauauccacuucuuucgggaaccuaccgaccugaagcaguucaagcaagaugccaaauacucucauggcauugacgugacagaucuguuuuccgcccagcccgggcucaccagcgcugucaucgaggcgcugccuagaaacauggugcuuacgugucagggauccgacgauauuaagaaacugcucgacucucagggccgccgggauaucaagcugauugacaucagccugaauaaagccgauuccagacgcuucgaaaacgcugucugggaccaaugcaaggaucuuugucacaugcauacaggggugguuguggagaagaaaaagcggggcggaaaagaggaaaucacaccccacugcgcccucauggacuguauuauguuugaugccgcugucucuggcgggcugaauauccccauucugagagccgugcucccucgcgacaugguuuuccggaccagcuccccgaaggugguccugugaggacuaguuauaagacugacuagcccgaugggccucccaacgggcccuccuccccuccuugcaccgagauuaauaaaaaaaaaaaaaaaaaaaaaaaaaaaaaaaaaaaaaaaaaaaaaaaaaaaaaaaaaaaaaaaaaaaaaaaaaaaaaaaaaaaaaaaaaaaaaaaaaaaa

SEQ ID NO: 17956 - RNA, 1902 nt, Artificial Sequence
  mRNA product Design i-3 (A100) comprising derived and/or modified sequence from LASV(GA391;Clade III)__AAA46284__NP (opt5)
aggagaaagcuuaccaugagcgccuccaaggaggugagaucuugccuguggacccagagccuccggcgcgaacuguccggcuacuguucuaacaucaaacuucaagucguuaaggacgcucaggcccugcuccacgggcuggauuucagcgagguguccaaugugcagagacuuaugcggaaacagaagcgcgacgauggagaccugaaaagacuccgggaucugaaccaagcggucaauaaccugguggaacucaagucuacacagcagaaaagcguucugcgcgugggcacgcuuuccagcgacgaucugcucauucuggcugccgaccuugagaaacugaagucuaaagucaccagaacagaacggccccucuccagcgggguguauaugggaaaucugucuucccagcaacuggaucagcgcagagcccuccugaacaugaucggcaugaccgggguuagcggaggcggcaagggggcuucuaauggaauugugcgggucugggacgugaaaaacgccgagcuucugaauaaccaguuuggcacaaugccuucccucacccuggcuugccuuacaaagcaggggcaaguggaucugaaugacgccguccaggcgcucaccgaucugggacugaucuacacggccaaguauccgaacagcuccgaccucgaccgccugucucagagccaucccauucuuaauaugaucgauaccaaaaaguccagccugaacaucucuggcuacaauuucucccucggggcugccguuaaagcuggagccuguaugcuggacggcggcaacaugcuugagacaauuaaggugagcccucaaaccauggaugggauccugaaaucuauucucaaggugaaaaagagccugggaauguuugucuccgacacacccggcgaaagaaacccuuaugagaauauccuguacaagauuugccucucuggggauggauggagcuauaucgcgucccggaccagcauugugggccgcgccugggaaaacacgguuguggaccuggagcaggauaauaaaccccagaagaucgggaacggaggcucuaauaaaucccuucagagcgcuggcuucgccgcugggcugaucuacucucaacucaugacacugaaggacuuuaaauguuucaaccugauuccuaaugccaagaccuggauggauaucgagggaagaccggaagaccccgucgagauugcccuuuaccagccuuccagcggcugcuaugugcacuuuuuccgggaacccacagaucucaagcaguuuaaacaggacgcuaaguacucccaugggagagacguuaccgaucuguucgcggcccaaccuggacugaccucugcugugaucgaggcccucccccgcaacauggucauuacaugucagggcagcgaagacauccggaaacugcuugagucccaggggagacgcgauaucaagcugauugacaucacgcucucuaaagccgauagccggaaguuugagaaugcugugugggaccaguucaaggaucugugccacaugcauaccggcgucgugguugaaaagaagaaaagaggaggcaaggaggaaauuacaccgcacugugcccugauggacugcaucauguuugaugcggcuguguccgggggacuugacgccaaaguccuccgcgugguucugccucgggauaugguguucagaaccagcacacccaaggucgugcugugaggacuaguuauaagacugacuagcccgaugggccucccaacgggcccuccuccccuccuugcaccgagauuaauaaaaaaaaaaaaaaaaaaaaaaaaaaaaaaaaaaaaaaaaaaaaaaaaaaaaaaaaaaaaaaaaaaaaaaaaaaaaaaaaaaaaaaaaaaaaaaaaaaaa

SEQ ID NO: 17957 - RNA, 1899 nt, Artificial Sequence
  mRNA product Design i-3 (A100) comprising derived and/or modified sequence from LASV(Nig08-A19;Clade III)__ADU56619__NP (opt5)
aggagaaagcuuaccaugagcgccuccaaggaggugaaaucuuuccuguggacccagagccucagacgggaacuguccggcuacugcucuaacaucaaacuucaagucguuaaggacgcucaggcccugcuccacgggcuggauuuuagcgagguguccaaugugcagcgccuuaugagaaagcagaaacgggacgauggagaccugaagcgccucagagaucugaaccaagcggucaauaaccugguggaacucaagucuacacagcagaaaagcguucugcgggugggcacgcuuuccagcgacgaucugcucguccuggcugccgaccuugagaagcugaaaucuaaggugguucgcaccgaaagaccccucuccagcgggauuuauaugggaaaucugucuucccagcaacuggaucagcggaaagcccuccugaacaugaucggcaugacagggggaaauggcggccgcaacaccacaagcgacgggauugugagagucugggaugugaagaaugcugagcuucugaacaaucaguucggaaccaugccuucucucacacuggccugucuuaccaagcagggccaaguggaccugaacgaugcuguccaggcccucacggaccuggggcugaucuacaccgcgaaauaucccaauuccagcgaccucgaucggcuggcccagucccauccgauucuuaacaugaucgacacaaagaaaucuagccugaauaucuccggauacaacuuuagccucggcgcugccguuaaggcuggggccugcaugcuggauggaggcaacaugcuugagaccauuaaagugucuccucaaacaauggacggcauccugaaguccauucucaaagugaagcgcagccuggggauguucaucucugauacccccggagaaagaaauccuuaugagaacauucuguacaagaucugucucagcggcgacggguggcccuauauugcgucccggacgucuaucgucggacgcgccugggaaaauacagugguugaucuggagagcgacaacaaaccucagaagaccggcaaugggggauccaacaaaagccuucagucugcuggcuuugccgcuggccugacauacucccagcucaugacccugaaggauagcaugcugcaacuugacccgaaugccaaaaccuggauggauaucgaggggagacccgaagacccuguggagauugcccucuaccagcccucuuccggaugcuauauccacuucuuucgggaaccuacagaccugaagcaguucaagcaggaugcuaaauacagccauggcauugacgucacggaucuguuugcggcccaacccgggcucaccuccgcugugaucgaggcccugccgagaaacaugguuauuacaugucagggaucugaagacauccgcaaacuucuggagagccagggccggagagauaucaagcucauugacaucucccugucuaagguggauagccgcaaauucgagaaugccgucugggaccaguuuaaggaucugugccacaugcauaccgggauuguggucgaaaagaaaaagcggggcggaaaagaggaaaucacaccucacugugcucuuauggacugcauuauguucgaugccgcgguguccggcgggguugacgcuaaggugcucagagccguccugccccgcgauaugguguuucggaccagcacgccuaaaguugugcugugaggacuaguuauaagacugacuagcccgaugggccucccaacgggcccuccuccccuccuugcaccgagauuaauaaaaaaaaaaaaaaaaaaaaaaaaaaaaaaaaaaaaaaaaaaaaaaaaaaaaaaaaaaaaaaaaaaaaaaaaaaaaaaaaaaaaaaaaaaaaaaaaaaaa

SEQ ID NO: 17958 - RNA, 1899 nt, Artificial Sequence
  mRNA product Design i-3 (A100) comprising derived and/or modified sequence from LASV(G1180-SLE-2010;Clade IV)__AIT17169__NP (opt5)
aggagaaagcuuaccaugagcgccuccaaggagaucaaaucuuuccuguggacccagagccucagacgggaacuguccggcuacugcucuaacauuaagcugcaaguggucaaagacgcucaggcccugcuccacgggcuggauuuuagcgagguuuccaaugugcagcgccuuaugagaaaggaacggcgcgacgauaacgaccugaaaagacuccgggaucugaaucaggcggugaacaaucuggucgagcucaagucuacacaacaaaagagcauccugcgcgugggaacgcuuaccuccgacgaucugcucauucuggcugccgaccuugaaaaacuuaagagcaaaguuaucagaacagagcggccccucucugccggcguguauauggggaaccuguccagccagcagcuggaucagcgcagagcucuccugucuaugauuggaauguccagcggcaaucagcgggcccaggcugggcgcgacggagucgugagaguuugggaugugaagaacgucgagcuucugaauaaccaguucggcaccaugccuucucucacacuggccugucuuaccaaacaaggccagguggaccugaaugaugcggugcaggcccucacagaccuggggcugaucuacaccgcuaaguauccgaacacguccgaccucgaucggcugacccaaagccaucccauccuuaauaugauugacacaaagaaauccucucugaacaucagcggauacaauuuuucccucggcgccgcugucaaggccggggcgugcaugcuggauggaggcaacaugcuugaaaccauuaaaguuagcccucagacaauggacgggauccugaagucuauucucaaagugaagaaagcccugggaauguucaucuccgauacccccggcgagcgcaacccuuaugaaaauauucuguacaagaucugucucagcggcgacggguggcccuauaucgcuucuagaacgagcauuacaggacgggccugggagaacaccguggucgaucuggaguccgacggcaagccucagaaagcugggucuaauaacagcaauaagucccuucagagcgugggauuuacagccggccugaccuacucucaacucaugacccugaaagaugccaugcugcagcuugacccgaacgcuaagacauggauggauaucgaagggagacccgaggacccuguugaaauugcgcucuaccagcccuccagcggaugcuauauccacuucuuucgcgagccuacggaccugaaacaguucaagcaagaugccaaguacucucauggcauugacgugaccgaucuguuugcugcccagcccggccucacauccgccgucaucgacgcucugccgcggaauauggugaucaccugucaggggagcgaugacauuagaaaacuucuggaaucccagggacgcaaggauaucaaacucauugacaucgcccugucuaagacagauagccggaaauaugagaacgcgguuugggaccaauacaaggaucugugccacaugcauaccggcguggucguggagaagaaaaagagagggggaaaagaagagauuacgccucacugugcucuuauggacugcaucauguucgaugccgccgucuccggcgggcucaauacaucugugcugcgcgcuguucugccccgggacaugguguuuagaaccagcaccccucgcgucgugcucugaggacuaguuauaagacugacuagcccgaugggccucccaacgggcccuccuccccuccuugcaccgagauuaauaaaaaaaaaaaaaaaaaaaaaaaaaaaaaaaaaaaaaaaaaaaaaaaaaaaaaaaaaaaaaaaaaaaaaaaaaaaaaaaaaaaaaaaaaaaaaaaaaaaa

SEQ ID NO: 17959 - RNA, 1899 nt, Artificial Sequence
  mRNA product Design i-3 (A100) comprising derived and/or modified sequence from LASV(G1442-SLE-2011;Clade IV)__AIT17181__NP (opt5)
aggagaaagcuuaccaugagcgccuccaaggaggugaaaucuuuccuguggacccagagccucagacgggaacuguccggcuacugcucuaacaucaaacuucaagucguuaaggacgcucaggcccugcuccacgggcuggauuuuagcgagguguccaaugugcagcgccuuaugagaaagcagcggcgcgacgauaacgaccugaaaagacuccgggaucugaaucaagcggucaacaaucugguggaacucaagucuacacagcaaaagagcguucugcgcgugggaacgcuuaccuccgacgaucugcucguccuggcugccgaccuugagaaacuuaagagcaaagugauuagaacagaacggccccucucugccggcguuuauauggggaaccuguccagccagcagcuggaucagcgcagagcucuccugaauaugaucggaaugucuggcgggauucagggaacccggacaggccgcgacggcguggucagagugugggaugugaagaacgccgaccuucugaauaaccaguucgggaccaugccuucccucacacuggcuugucuuaccaaacaaggacaggucgaucugaaugacguugugcaggcccucacggaccugggccugaucuacaccgcgaaguauccgaacgccagcgaucucgaccggcugacacaaucucaucccauucuuaauaugaucgauaccaagaaauccagccugaacaucuccggguacaauuuuucucucggagcugccgugaaggcuggcgccugcaugcuggacgggggaaacaugcuugagacaauuaaagucagcccucagaccauggauggcauccugaaguccauucucaaagugaagaaaacgcugggcauguucaucagcgacacacccggggagcgcaacccuuaugaaaauauucuguacaagaucugucucucuggagauggcuggcccuauauugcguccagaaccagcaucacagggcgggccugggagaacaccguuguggaccuggaaucugauggaaagccucagaaagcuggcagcaauaacuccaauaagucucuucagagcgccggguuugcugccggacugaccuacucccaacucaugacacugaaagacgccaugcugcagcuugauccgaacgcuaagacguggauggacaucgagggcagacccgaggacccugucgaaauugcgcucuaccagcccagcucuggcugcuauauccacuucuuucgcgagccuaccgaucugaaacaguucaagcaagacgccaaguacucccaugggauugaugugacagaccuguuugcugcccagcccggacucaccagcgccguuaucgaagcucugccgcggaauauggugauuacaugucagggcucugaugacaucaaaaagcugcuggagucccaggggagaaaagauaucaagcucauugacaucgcccugagcaaaaccgauucccgcaaguaugaaaacgcggucugggaccaauacaaggaucugugccacaugcauacgggaguggucguggagaaaaagaaacggggcgggaaggaggaaauuacaccucacugugcucuuauggacugcaucauguucgaugccgccguuucuggcggacucaauacccuggugcugagagcuguccucccccgcgacaugguguuucggaccagcacaccuagaguugugcugugaggacuaguuauaagacugacuagcccgaugggccucccaacgggcccuccuccccuccuugcaccgagauuaauaaaaaaaaaaaaaaaaaaaaaaaaaaaaaaaaaaaaaaaaaaaaaaaaaaaaaaaaaaaaaaaaaaaaaaaaaaaaaaaaaaaaaaaaaaaaaaaaaaaa

SEQ ID NO: 17960 - RNA, 1899 nt, Artificial Sequence
  mRNA product Design i-3 (A100) comprising derived and/or modified sequence from LASV(G3010-SLE-2013;Clade IV)__AIT17345__NP (opt5)
aggagaaagcuuaccaugagcgccuccaaggagaucaaaucuuuccuguggacccagagccucagacgggaacuguccggcuacugcucuaacauuaaacuucaaguggucaaagacgcucaggcccugcuccacgggcuggauuuuagcgagguuuccaaugugcagcgccuuaugagaaaggaacggcgcgacgauaacgaccugaaaagacuccgggaucugaaucaggcggugaacaaucuggucgagcucaagucuacacaacaaaagagcauccugcgcgugggaacgcuuaccuccgacgaucugcucauucuggcugccgaccuugaaaaacuuaagagcaaaguuacaagaaccgagcggccccucucugccggcguguauauggggaaccuguccagccagcagcuggaucagcgcagagcucuccugucuaugaucggaauguccagcggcguccagggggcccgggcuggacgcgacggcgugguuagagugugggaugucaagaaugccgagcuucugaacaaucaguucggcacaaugccuucucucacccuggcgugucuuacaaaacaggggcaaguggaccugaacgaugugguccaggcccucaccgaccugggacugauuuacacggcuaaguauccgaauaccuccgaccucgaucggcugacacagagccaucccauccuuaacaugaucgacaccaagaaauccucucugaauauuagcggcuacaacuuuucccucggggccgcuguuaaggccggagcgugcaugcuggauggcgggaauaugcuugaaacaaucaaagugagcccucaaaccauggacggcauucugaagucuauccucaaagugaagaaagcccugggaauguucauuuccgagacgcccggcgaacgcaacccuuaugagaacauccuguacaagauuugucucagcggggauggauggcccuauaucgcuucuagaacaagcaucaccggccgggccugggagaauacagucguggaccuggaauccgaugggaagccucagaaagcuggaucuaacaauagcaacaagucccuucagagcgccggcuuuaccgccgggcugaccuacucucagcucaugacacugaaagacgcuaugcugcaacuugauccgaaugcgaagacguggauggacauugagggaagacccgaagauccuguugagguggcccucuaccagcccuccagcggcugcuauauccacuucuuucgcgaaccuaccgaccugaaacaguucaagcaggacgcuaaguacucucauggcauugaugucacagaccuguuugccgcccaacccgggcucaccuccgcugugaucgaugcccugccgcggaacaugguuauuacaugucagggaagcgacgauaucaaaaagcugcuggagucccagggcagaaaagacaucaagcucauugauaucgcgcugucuaaaaccgacagccgcaaguaugagaaugcugugugggaucaguacaaggaccugugccacaugcauacgggggucguggucgaaaagaagaaacggggaggcaaggaggaaauuacaccucacugugcccuuauggauugcaucauguucgacgccgcuguguccgggggccucaacaccucuguucugagagccgugcugccccgcgauauggucuuucggaccagcacaccuagagugguucucugaggacuaguuauaagacugacuagcccgaugggccucccaacgggcccuccuccccuccuugcaccgagauuaauaaaaaaaaaaaaaaaaaaaaaaaaaaaaaaaaaaaaaaaaaaaaaaaaaaaaaaaaaaaaaaaaaaaaaaaaaaaaaaaaaaaaaaaaaaaaaaaaaaaa

SEQ ID NO: 17961 - RNA, 1899 nt, Artificial Sequence
  mRNA product Design i-3 (A100) comprising derived and/or modified sequence from LASV(G502-SLE-2009;Clade IV)__AIT17127__NP (opt5)
aggagaaagcuuaccaugagcgccuccaaggagaucaaaucuuuccuguggacccagagccucagacgggaacuguccggcuacugcucuaacauuaagcugcaaguggucaaagacgcucaggcccugcuccacgggcuggauuuuagcgagguuuccaaugugcagcgccuuaugagaaaggaacggcgcgacgauaacgaccugaaaagacuccgggaucugaaucaggcggugaacaaucuggucgagcucaagucuacacaacaaaagagcauccugcgcgugggaacgcuuaccuccgacgaucugcucauucuggcugccgaccuugaaaaacuuaagagcaaaguuaucagaacagagcggccccucucugccggcguguauauggggaaccuguccagccagcagcuggaucagcgcagagcucuccugucuaugauuggaauguccggcgggaaucagggaguccgggccggcaaggacggcgugguucgcgugugggaugucaaaaacgcugagcuucugaauaaccaguucgggaccaugccuagccucacacuggccugucuuaccaagcagggacaaguggaccugaaugaugcggugcaggcccucacagaccugggccugaucuacaccgcuaaguauccgaacacgucugaccucgauagacugacccagucccaucccauccuuaauaugauugacaccaaaaagagcucccugaacaucucuggguacaauuuuagccucggagccgcugucaaagccggcgcgugcaugcuggaugggggaaacaugcuugaaacaauuaagguuuccccucaaacaauggacggcauccugaaaagcauucucaaggugaaaaaggcccugggcauguucaucucugauacccccggggagcggaacccuuaugaaaauauucuguacaagaucugucucuccggagacggcuggcccuauaucgcuagccgcacgucuauuacagggagagccugggagaacaccguggucgaucuggagagcgacggaaaaccucagaaggcuggcuccaauaacucuaauaaaagccuucaguccgccggguuuacagccggacugaccuacagccagcucaugacccugaaggaugcuaugcugcaacuugacccgaacacaaaaacguggauggauaucgaaggccggcccgaggacccuguggaaauugcgcucuaccagcccucuuccggcugcuauauccacuucuuuagagagccuaccgaccugaagcaguucaagcaggaugccaaauacagccaugggauugacguuacagaucuguuugcugcccaacccggacucaccucugccgugaucgacgcucugccgcgcaauauggucaucacaugucagggcuccgaugacauucggaaacuucuggaaagccaggggagaaaggauaucaagcucauugacaucgcccugaacaaaaccgauucccgcaaguaugagaaugcggugugggaccaguacaaggaucugugccacaugcauacgggaguuguggucgagaaaaagaaacggggcgggaaggaagagauuacaccucacugugcucuuauggacugcaucauguucgaugccgccgugucuggcggacucaacaccagcguccugagagcugugcugccccgcgacaugguuuuucggaccuccacaccuagagugguccucugaggacuaguuauaagacugacuagcccgaugggccucccaacgggcccuccuccccuccuugcaccgagauuaauaaaaaaaaaaaaaaaaaaaaaaaaaaaaaaaaaaaaaaaaaaaaaaaaaaaaaaaaaaaaaaaaaaaaaaaaaaaaaaaaaaaaaaaaaaaaaaaaaaaa

SEQ ID NO: 17962 - RNA, 1899 nt, Artificial Sequence
  mRNA product Design i-3 (A100) comprising derived and/or modified sequence from LASV(G733-SLE-2010;Clade IV)__AIT17155__NP (opt5)
aggagaaagcuuaccaugagcgccuccaaggagaucaaaucuuuccuguggacccagagccucagacgggaacuguccggcuacugcucuaacauuaagcugcaaguggucaaagacgcucaggcccugcuccacgggcuggauuuuagcgagguuuccaaugugcagcgccuuaugagaaaggaacggcgcgacgauaacgaccugaaaagacuccgggaucugaaucaggcggugaacaaucuggucgagcucaagucuacacaacaaaagagcgugcugcgcguuggaacgcuuaccuccgacgaacugcucgugcuggcugccgaucuugagaaacuuaagagcaaagucaucagaacagagcggccccucucugccggcguguauauggggaaccuguccagccagcagcuggaccagcgcagagcucuccugucuaugauuggaauguccggcgggaaucagggagcccggaccggccgcgauggcguugugagagucugggacgugaagaacgcugaacuucugaauaaccaguucgggacaaugccuagccucacccuggccugucuuacaaaacagggacaaguggaucugaaugacgcgguccaggcccucaccgaucugggccugaucuacacggcuaaguauccgaacaccucugaccucgaccggcugacacagucccaucccauucuuaauaugaucgauaccaagaaaagcucccugaacaucucuggguacaauuuuagccucggagccgcuguuaaggccggcgcgugcaugcuggacgggggaaacaugcuugagacaauuaaaguguccccucaaaccauggauggcauccucaagagcauucugaaagugaagaaagcccugggcauguucaucucugacacgcccggggaacgcaacccuuaugagaauauucuguacaagaucugucucuccggagauggcuggcccuauauugcuagcagaacaucuaucaccgggcgggccugggagaacacagucguggaccuggaaagcgauggaaagccucagaaagcuggcuccaauaacucuaauaagagccuucaguccgccggguuuaccgccggacugaccuacagccagcucaugacacugaaagacgcuaugcugcaacuugauccgaacgcgaagacguggauggacaucgagggcagacccgaagauccuguugagauugcccucuaccagcccucuuccggcugcuauauccacuucuuucgcgaaccuaccgaccugaaacaguucaagcaggacgcuaaguacagccaugggauugaugugacagaccuguuugccgcccaacccggacucaccucugcugucaucgaugcccugccgcggaauauggugauuacaugucagggcuccgacgauaucagaaaacuucuggagagccaggggcgcaaggacaucaaacucauugauaucgcgcuguccaagauugacucucggaaauaugagaacgcuguuugggaucaguacaaggaccugugccacaugcauaccggaguggucguggaaaagaaaaagagaggcgggaaagaggaaaucacgccucacugugcccuuauggauugcauuauguucgacgccgcugucagcggcggacucaauucccuggugcugcgcgccguucucccccgggauaugguguuuagaacaucuaccccucgcgucgugcugugaggacuaguuauaagacugacuagcccgaugggccucccaacgggcccuccuccccuccuugcaccgagauuaauaaaaaaaaaaaaaaaaaaaaaaaaaaaaaaaaaaaaaaaaaaaaaaaaaaaaaaaaaaaaaaaaaaaaaaaaaaaaaaaaaaaaaaaaaaaaaaaaaaaa

SEQ ID NO: 17963 - RNA, 1899 nt, Artificial Sequence
  mRNA product Design i-3 (A100) comprising derived and/or modified sequence from MOPV/LASV reassortant(IGS-1;Clade IV)__AFY05578__NP (opt5)
aggagaaagcuuaccaugagcgccuccaaggagaucaaaucuuuccuguggacccagagccucagacgggaacuguccggcuacugcucuaacauuaaacuucaaguggucaaggacgcucaggcccugcuccacgggcuggauuuuagcgagguuuccaaugugcagcgccuuaugagaaaggaacggcgcgacgauaacgaccugaaaagacuccgggaucugaaucaggcggugaacaaucuggucgagcucaagucuacacaacaaaagagcauccugcgcgugggaacgcuuaccuccgacgaucugcucauucuggcugccgaccuugaaaaacugagaagcaagguuauccggacagagcgcccccucucugccggcguguauauggggaaccuguccagccagcagcuggaucagagacgggcucuccugaauaugauuggaaugucuggcgggaaccagggagcccgcgcuggcagagacggcgucgugcggguuugggaugugaaaaaugccgagcuucuguccaaccaguucgggaccaugccuagccucacacuggcgugucuuaccaagcagggacaagucgaccugaaugaugccgugcaggcucucacagaccugggccugaucuacaccgccaaauauccgaacacgucugaccucgaucgccugacccagucccaucccauccuuaauaugauugacacaaagaaaagcucccugaacaucucuggguacaauuuuagccucggagcugccgugaaggcgggcgccugcaugcuggaugggggaaacaugcuugaaaccauuaaggucuccccucaaacaauggacggcauccugaaaagcauucucaagguuaaaaaggcucugggcauguucaucucugauacccccggggagagaaacccuuaugaaaauauucuguacaaaaucugucucuccggagacggcuggcccuauaucgccagccggacgucuauuacagggagagcuugggagaacaccgugguggaucuggagagcgacggaaagccucagaaggccgauuccaauaacucuagcaaaucccuucagagcgccggcuuuacagcugggcugaccuacucucagcucaugacccugaaggacgcgaugcugcaacuugauccgaaugccaaaacauggauggacaucgaaggacgccccgaggacccugucgaaauugcucucuaccagcccuccagcggcugcuauauccacuucuuucgggagccuacggaucugaagcaguucaaacaggacgccaaguacucucauggcauugaugugaccgaccuguuugccacacaacccgggcucaccuccgcuguuaucgaugcccugccgagaaacauggugaucacaugucagggaagcgacgauauucgcaaacuucuggaaucccagggccggaaggacaucaagcucauugauaucgaccugucuaaaaccgauagcagaaaguaugagaaugcggucugggaccaguacaaagaucugugccacaugcauacgggggugguuguggagaagaagaaacgcggaggcaaggaagagauuacaccucacugugcucuuauggacugcaucauguucgacgccgccgucuccgggggccucaacaccucugugcugcgggcuguccugcccagagauaugguguuucgcaccagcacaccucggguugugcucugaggacuaguuauaagacugacuagcccgaugggccucccaacgggcccuccuccccuccuugcaccgagauuaauaaaaaaaaaaaaaaaaaaaaaaaaaaaaaaaaaaaaaaaaaaaaaaaaaaaaaaaaaaaaaaaaaaaaaaaaaaaaaaaaaaaaaaaaaaaaaaaaaaaa

SEQ ID NO: 17964 - RNA, 1899 nt, Artificial Sequence
  mRNA product Design i-3 (A100) comprising derived and/or modified sequence from LASV(LM765-SLE-2012;Clade IV)__AIT17815__NP (opt5)
aggagaaagcuuaccaugagcgccuccaaggagaucaaaucuuuccuguggacccagagccucagacgggaacuguccggcuacugcucuaacauuaagcugcaaguggucaaagacgcucaggcccugcuccacgggcuggauuuuagcgagguuuccaaugugcagcgccuuaugagaaaggaacggcgcgacgauaacgaccugaaaagacuccgggaucugaaucaggcggugaacaaucuggucgagcucaagucuacacaacaaaagagcauccugcgcgugggaacgcuuaccuccgacgaucugcucauucuggcugccgaccuugaaaaacuuaagagcaaaguuacaagaaccgagcggccccucucugccggcguguauauggggaaccuguccagccagcagcuggaucagcgcagagcucuccuggacaugaucggaaugucuggcuccaaucagggggcccgggcuggacgcgauggcgucgugagaguuugggacgugaagaacgccgagcuucugaauaaccaguucggcacaaugccuagccucacccuggcgugucuuacaaaacaggggcaagucgaucugaaugacgccgugcaggcucucaccgaccugggacugauuuacacggccaaguauccgaacaccucugaucucgaccggcugacacagucccaucccauccuuaauaugaucgauaccaagaaaagcucccugaacauuucuggcuacaauuuuagccucggggcugccgugaaggcgggagccugcaugcuggacggcgggaacaugcuugaaacaaucaaagucuccccucaaaccauggauggcauucucaagagcauccugaaaguuaagaaagcucugggaauguucauuucugacgcccccggcgagcgcaacccuuaugaaaauauccuguacaagauuugucucuccggggauggauggcccuauaucgcuagcagaacgucuaucacaggccgggccugggagaacaccgugguggaccuggagagcgaugggaagccucagaaagccggauccaauggcucuaacaagagccuucaguccgcuggguuuacagcgggacugaccuacagccagcucaugacccugaaagacgccaugcugcaacuugauccgaaugcuaagacauggauggacauugaaggcagacccgaggacccugucgaaaucgcccucuaccagcccucuuccggcugcuauauucacuucuuucgcgagccuacggaucugaaacaguucaagcaggacgccaaguacagccaugggaucgaugugaccgaccuguuugcugcccaacccggacucacaucugcgguuauugaugcucugccgcggaacauggugaucaccugucagggcuccgacgauaucagaaaacuuuucgaaagccaggggcgcaaggacauuaaacugaucgauauugcccucuccaagacagacucucggaaauaugagaaugccgucugggaucaguacaaggaccugugccacaugcauaccggaaucgugguugagaagaaaaagagaggcgggaaagaagagauuacgccucacugugcucugauggauugcaucauguuugacgccgcugugagcggcggacuuaacacauccguccuccgcgccgugcugccccgggacauggucuucagaaccucuaccccucgcgugguucugugaggacuaguuauaagacugacuagcccgaugggccucccaacgggcccuccuccccuccuugcaccgagauuaauaaaaaaaaaaaaaaaaaaaaaaaaaaaaaaaaaaaaaaaaaaaaaaaaaaaaaaaaaaaaaaaaaaaaaaaaaaaaaaaaaaaaaaaaaaaaaaaaaaaa

SEQ ID NO: 17965 - RNA, 1899 nt, Artificial Sequence
  mRNA product Design i-3 (A100) comprising derived and/or modified sequence from LASV(LM776-SLE-2012;Clade IV)__AIT17825__NP (opt5)
aggagaaagcuuaccaugagcgccuccaaggagaucaaaucuuuccuguggacccagagccucagacgggaacuguccucuuacugcagcaacauuaaacuucaaguggucaaggacgcucaggcccugcuccacggccuggauuuuuccgagguuucuaaugugcagcgccuuaugagaaaggaacggcgcgacgauaacgaccugaaaagacuccgggaucugaaucaggcggugaacaaucuggucgagcucaagagcacacaacagaaguccauccugcgcguggggacgcuuaccagcgacgaucugcucauucuggcugccgaccuugaaaaacugaagucuaaaguuacaagaaccgagcggccccucuccgccggaguguauaugggcaaccugagcucucagcagcuggaucaacgcagagcucuccuguccaugaucgggaugagcggaucuaaucagggcgcccgggcugggcgcgacggagucgugagaguuugggaugugaagaacgccgagcuucugaauaaccaguucggcacaaugccuucccucacccuggcgugucuuacaaaacagggccaagucgaccugaaugaugccgugcaggcucucaccgaccuggggcugauuuacacggccaaguauccgaacaccagcgaccucgaucggcugacacagucccaucccauccuuaauaugaucgacaccaagaaaucuagccugaacauuuccggauacaauuuuagccucggcgcugccgugaaggcgggggccugcaugcuggauggaggcaacaugcuugaaacaaucaaagucucuccucaaaccauggacgggauucugaaguccauccucaaaguuaagaaagcucugggaauguucauuagcgauacgcccggcgagcgcaacccuuaugaaaauauccuguacaagauuugucucucuggcgacggguggcccuauaucgccagcagaacauccaucaccggacgggcuugggagaacacagugguggaucuggagucugacggcaagccucagaaagccgggagcaauaacuccaauaagagccuucagucugccggauuuaccgcuggccugaccuacucccagcucaugacacugaaagaugcgaugcugcaacuugacccgaacgccaagacguggauggauauugaagggagacccgaggacccugucgaaguggcucucuaccagcccagcucuggaugcuauauccacuucuuucgcgagccuaccgaccugaaacaguucaagcaggaugccaaguacucccauggcauugacguuacagaucuguuugccgcucaacccggccucaccagcgccgugaucgacgcgcugccgcggaauauggucauuacaugucagggguccgaugacaucagaaaacuucuggaaucucagggacgcaaggauaucaaacucauugacaucgcucugagcaagaccgauucccggaaauaugagaacgccgugugggaccaguacaaggaucugugccacaugcauacgggcguuguggucgagaagaaaaagagagggggaaaagaagagauuacaccucacugugcccuuauggacugcaucauguucgaugcugccgugucuggcgggcucaauaccagcguccugcgcgcugugcugccccgggacaugguuuuuagaaccuccacaccucgcgugguccucugaggacuaguuauaagacugacuagcccgaugggccucccaacgggcccuccuccccuccuugcaccgagauuaauaaaaaaaaaaaaaaaaaaaaaaaaaaaaaaaaaaaaaaaaaaaaaaaaaaaaaaaaaaaaaaaaaaaaaaaaaaaaaaaaaaaaaaaaaaaaaaaaaaaa

SEQ ID NO: 17966 - RNA, 1899 nt, Artificial Sequence
  mRNA product Design i-3 (A100) comprising derived and/or modified sequence from LASV(Mad39;Clade IV)__ANH09723__NP (opt5)
aggagaaagcuuaccaugagcgccuccaaggagaucaaaucuuuccuguggacccagagccucagacgggaacuguccggcuacugcucuaacauuaagcugcaaguggucaaagacgcucaggcccugcuccacgggcuggauuuuagcgagguuuccaaugugcagcgccuuaugagaaagcagcggcgcgacgauaacgaccugaaaagacuccgggaucugaaucaagcggugaacaaucuggucgaacucaagucuacacagcaaaagagcgugcugcgcguuggaacgcuuaccuccgacgaucugcucacacuggcugccgaccuugagaaacuuaagagcaaagugaccagaacagaacggccccucaccgccggcgucuauauggggaaccugucuucccagcagcuggaucagcgcagagcucuccugaauaugaucggaaugagcggcgggaaccagggagcccggacaggccgcgacggcgugguuagagugugggaugucaagaaugcugagcuucugaacaaucaguucgggaccaugccuucucucacgcuggccugucuuaccaaacaaggacagguggaccugaacgaugugguccaggcgcucacagaccugggccugauuuacaccgccaaguauccgaauacauccgaccucgaucggcugacccaaagccaucccauccuuaacaugauugacacgaauaagucuucccugaacaucagcggguacaacuuuucccucggagcugccguuaaagcuggcgccugcaugcuggaugggggaaauaugcuugagacaaucaaggugucuccucagaccauggacggcauucugaaaagcauccucaaggugaaaaagucccugggcauguucauuagcgauacacccggggaacgcaacccuuaugagaauauccuguacaaaauuugucucucuggagacggcuggcccuauaucgcguccagaaccagcauuaccgggcgggccugggaaaacacagucguggaucuggagucuggaggcaagccucagaaggcugggagcaauaacuccaauaaaucucuucagagcgccggauuugcugccggccugacguacucccaacucaugacccugaaggacgccaugcugcagcuugauccgaacgcuaaaacauggauggacaucgagggcagacccgaagauccuguugagaucgcgcucuaccagcccauuagcgggugcuauauccacuucuuucgcgaaccuaccgaccugaagcaguucaaacaagacgccaaguacucucauggaauugaugugacagaccuguuugcugcccagcccggccucaccuccgccgucaucgaggcucugccgcggaauauggugauuacgugucaggggagcgaugacaucagaaaacuuuucgaaucucagggacgcaaggauaucaagcugauugacaucgcccucuccaaaacagauagccggaaguaugagaacgcgguuugggaccaauacaaagaucugugccacaugcauaccggcguggucguggagaagaagaaaaagggcgggaaagaagagauuaccccucacugugcucugauggacugcaucauguuugaugccgccgucuccggaggccuuaauacacucgugcugagagcuguucugccccgcgacaugguguuccggaccucuacaccuaaggucgugcucugaggacuaguuauaagacugacuagcccgaugggccucccaacgggcccuccuccccuccuugcaccgagauuaauaaaaaaaaaaaaaaaaaaaaaaaaaaaaaaaaaaaaaaaaaaaaaaaaaaaaaaaaaaaaaaaaaaaaaaaaaaaaaaaaaaaaaaaaaaaaaaaaaaaa

SEQ ID NO: 17967 - RNA, 1899 nt, Artificial Sequence
  mRNA product Design i-3 (A100) comprising derived and/or modified sequence from LASV(Z0947-SLE-2011;Clade IV)__AIT17841__NP (opt5)
aggagaaagcuuaccaugagcgccuccaaggagaucaaaucuuuccuguggacccagagccucagacgggaacuguccggcuacugcucuaacauuaagcugcaaguggucaaagacgcucaggcccugcuccacgggcuggauuuuagcgagguuuccaaugugcagcgccuuaugagaaaggaacggcgcgacgauaacgaccugaaaagacuccgggaucugaaucaggcggugaacaaucuggucgagcucaagucuacacaacaaaagagcauccugcgcgugggaacgcuuaccuccgacgaucugcucauucuggcugccgaccuugaaaaacuuaagagcaaaguuacaagaaccgagcggccccucucugccggcguguauauggggaaccuguccagccagcagcuggaucagcgcagagcucuccugaauaugaucggaaugucuggcuccaaccagggggcccggacaggacgcgacggcgucgugagaguuugggaugugaagaaugcugagcuucugaacaaucaguucggcaccaugccuagccucacacuggccugucuuaccaaacaggggcaagucgaccugaacgaugcggugcaggcccucacggaccugggacugauuuacaccgcuaaguauccgaauacaucugaccucgaucggcugacccagucccaucccauccuuaacaugaucgacacaaagaaaagcucccugaauauuucuggcuacaacuuuagccucggggccgcugugaaggccggagcgugcaugcuggauggcgggaacaugcuugaaaccaucaaagucuccccucaaacgauggacggcauucucaagagcauccugaaaguuaagaaagcccugggaauguucauuucugaugcucccggcgagcgcaauccuuaugaaaacauccuguacaagauuugucucuccggggacggauggcccuauaucgccagcagaacaucuaucaccggccgggcuugggagaauacagugguggaucuggagagcgacgggaagccucagaaagccggauccaacggcucuaauaagagccuucaguccgccggguuuaccgcuggacugaccuacagccagcucaugacacugaaagaugcgaugcugcaacuugacccgaacgccaagacguggauggauauugaaggcagacccgaggacccugucgaaaucgcucucuaccagcccucuuccggcugcuauauucacuucuuucgcgagccuaccgaccugaaacaguucaagcaggaugccaaguacagccaugggaucgacgugacagaucuguuugccgcucaacccggacucaccucugccguuauugacgcgcugccgcggaauauggugaucacaugucagggcuccgaugacaucagaaaacuuuucgaaagccaggggcgcaaggauauuaaacugaucgacauugcucucuccaagaccgauucucggaaauaugagaacgccgucugggaccaguacaaggaucugugccacaugcauacgggaaucgugguugagaagaaaaagagaggcgggaaagaagagauuacaccucacugugcccugauggacugcaucauguuugaugcugccgugagcggcggacuuaauaccuccguccuccgcgcugugcugccccgggacauggucuucagaaccucuacaccucgcgugguucugugaggacuaguuauaagacugacuagcccgaugggccucccaacgggcccuccuccccuccuugcaccgagauuaauaaaaaaaaaaaaaaaaaaaaaaaaaaaaaaaaaaaaaaaaaaaaaaaaaaaaaaaaaaaaaaaaaaaaaaaaaaaaaaaaaaaaaaaaaaaaaaaaaaaa

SEQ ID NO: 17968 - protein, 590 aa, Artificial Sequence
  derived and/or modified protein sequence (wt) from LASV(Josiah;Clade IV)__NP_694869__SP-HsPLAT_NP(2-569)
MDAMKRGLCCVLLLCGAVFVSPSASKEIKSFLWTQSLRRELSGYCSNIKLQVVKDAQALLHGLDFSEVSNVQRLMRKERRDDNDLKRLRDLNQAVNNLVELKSTQQKSILRVGTLTSDDLLILAADLEKLKSKVIRTERPLSAGVYMGNLSSQQLDQRRALLNMIGMSGGNQGARAGRDGVVRVWDVKNAELLNNQFGTMPSLTLACLTKQGQVDLNDAVQALTDLGLIYTAKYPNTSDLDRLTQSHPILNMIDTKKSSLNISGYNFSLGAAVKAGACMLDGGNMLETIKVSPQTMDGILKSILKVKKALGMFISDTPGERNPYENILYKICLSGDGWPYIASRTSITGRAWENTVVDLESDGKPQKADSNNSSKSLQSAGFTAGLTYSQLMTLKDAMLQLDPNAKTWMDIEGRPEDPVEIALYQPSSGCYIHFFREPTDLKQFKQDAKYSHGIDVTDLFATQPGLTSAVIDALPRNMVITCQGSDDIRKLLESQGRKDIKLIDIALSKTDSRKYENAVWDQYKDLCHMHTGVVVEKKKRGGKEEITPHCALMDCIMFDAAVSGGLNTSVLRAVLPRDMVFRTSTPRVVL

SEQ ID NO: 17969 - protein, 590 aa, Artificial Sequence
  derived and/or modified protein sequence (wt) from LASV(LP;Clade I)__AAF86702__SP-HsPLAT_NP(2-569)
MDAMKRGLCCVLLLCGAVFVSPSNSKEIKSFLWTQSLRRELSGYCSNIKLQVVKDAQALLHGLDFSEVSNVQRLMRKQKRDDADLKRLRDLNQAVNNLVELKSTQQKNVLRVGTLSSDDLITLAADLEKLKSKVIRTERPLSSGVYMGNLSSQQLDQRRALLSMIGMSGGPQGNRTGGDGVVRVWDVKNAELLNNQFGTMPSLTLACLTKQGQVDLNDAVQALTDLGLIYTAKYPNSSDLDMLTQSHPILGMVDTKKSSLNISGYNFSLGAAVKAGACMLDGGNMLETIKVSPQTMDGILKSILKVKRSLGMFISDTPGERNPYENILYKICLSGEGWPYIASRTSITGRAWENTLVDLESDNKPPKLNSAGSNKSLQAAGLNAGLTYSQLMTLKDCMLQLDPSSKTWIDIEGRPEDPVEIALFQPSSGCYIHFFREPTDLKQFKQDAKYSHGIDVTDLFSTQPGLTSAVIEALPRNMVLTCQGSDDIKKLLESQGRRDIKLIDISLSKADSRKFENAVWDQYKDLCHMHTGVVVEKKKRGGKEEITPHCALLDCIMFDAATTGSLNITTLRAVLPRDMVFRTSTPKVVL

SEQ ID NO: 17970 - protein, 590 aa, Artificial Sequence
  derived and/or modified protein sequence (wt) from LASV(803213;Clade II)__AAF86704__SP-HsPLAT_NP(2-569)
MDAMKRGLCCVLLLCGAVFVSPSASKEVKSFLWTQSLRRELSGYCSNIKLQVVKDAQALLHGLDFSEVNNVQRLMRKQKRDDGDLKRLRDLNQAVNNLVELKSTQQKSILRVGTLTSDDLLTLAADLEKLKSKVIRTERPLSSGVYMGNLSTQQLEQRRALLNMIGMVGGAQGTQPGRDGVVRVWDVKNPDLLNNQFGTMPSLTLACLTKQGQVDLNDAVLALTDLGLIYTAKYPNSSDLDRLSQSHPILNMVDTKKSSLNISGYNFSLGAAVKAGACMLDGGNMLETIKVTPQTMDGILKSILKVKRSLGMFVSDTPGERNPYENILYKICLSGDGWPYIASRTSIVGRAWENTTVDLESDGKPQKVGTAGSNKSLQSAGFPTGLTYSQLMTLKDSMMQLDPSAKTWIDIEGRPEDPVEIALYQPMSGCYIHFFREPTDLKQFKQDAKYSHGIDVADLFPAQPGLTSAVIEALPRNMVLTCQGSDDIKKLLDSQGRRDIKLIDISLSKVDSRKFENAVWDQCKDLCHMHTGVVVEKKKRGGKEEITPHCALMDCIMFDAAVSGGLNIPVLRAVLPRDMVFRTSSPKVVL

SEQ ID NO: 17971 - protein, 591 aa, Artificial Sequence
  derived and/or modified protein sequence (wt) from LASV(GA391;Clade III)__CAA36646__SP-HsPLAT_NP(2-570)
MDAMKRGLCCVLLLCGAVFVSPSASKEVRSFLWTQSLRRELSGYCSNIKLQVVKDAQALLHGLDFSEVSNVQRLMRKQKRDDGDLKRLRDLNQAVNNLVELKSTQQKSVLRVGTLSSDDLLILAADLEKLKSKVTRTERPLSSGVYMGNLSSQQLDQRRALLNMIGMTGVSGGGKGASDGIVRVWDVKNAELLNNQFGTMPSLTLACLTKQGQVDLNDAVQALTDLGLIYTAKYPNSSDLDRLSQSHPILNMIDTKKSSLNISGYNFSLGAAVKAGACMLDGGNMLETIKVSPQTMDGILKSILKVKKSLGMFVSDTPGERNPYENILYKICLSGDGWPYIASRTSIVGRAWENTVVDLEQDNKPQKIGNGGSNKSLQSAGFAAGLTYSQLMTLKDFKCFNLIPNAKTWMDIEGRPEDPVEIALYQPSSGCYVHFFREPTDLKQFKQDAKYSHGIDVTDLFAAQPGLTSAVIEALPRNMVITCQGSEDIRKLLESQGRRDIKLIDITLSKADSRKFENAVWDQFKDLCHMHTGVVVEKKKRGGKEEITPHCALMDCIMFDAAVSGGLDAKVLRVVLPRDMVFRTSTPKVVL

SEQ ID NO: 17972 - protein, 590 aa, Artificial Sequence
  derived and/or modified protein sequence (wt) from LASV(AV;Clade V)__CCA30315__SP-HsPLAT_NP(2-569)
MDAMKRGLCCVLLLCGAVFVSPSASKEVKSFLWTQSLRRELSGYCSNIKLQVVKDAQALLHGLDFSEVSNVQRLMRKQRRDDSDLKRLRDLNQAVNNLVELKSTQQKSVLRVGTLSSDDLLTLAADLEKLKSKVTRTERPLSSGVYMGNLSSQQLDQRRALLNLIGMTNGSQGSQAGRDGVVRVWDVKNAELLNNQFGTMPSLTLACLTKQGQVDLNDVVQALTDLGLIYTAKYPNTSDLDRLTQSHPILNMIDTKKSSLNISGYNFSLGAAVKAGACMLDGGNMLETIKVSPQSMDGILKSILKVKRALGMFVSDTPGERNPYENILYKICLSGDGWPYIASRTSIVGRAWENTVVDLETDGKPQKIGSGNSNKSLQSAGFSAGLTYSQLMTLKDAMLQLDPNAKTWMDIEGRPEDPVEVALYQPISGCYIHFFREPTDLKQFKQDAKYSHGIDIADLFAAQPGLTSAVIEALPRNMVITCQGSEDIKKLLESQGRKDIKLIDIALSKIDSRKFENAVWDQYKDLCHMHTGVVVEKKKRGGKEEITPHCALMDCIMFDAAVSGGLNTLVLRAVLPRDMVFRTSTPRVVL

SEQ ID NO: 17973 - protein, 590 aa, Artificial Sequence
  derived and/or modified protein sequence (wt) from LASV(Togo/2016/7082;Clade VI)__AMR44578__SP-HsPLAT_NP(2-569)
MDAMKRGLCCVLLLCGAVFVSPSNSKEVKSFLWTQSLRRELSGYCSNIKLQVVKDAQALLHGLDFSEVSNVQRLMRKQKRDDGDLKRLRDLNQAVNNLVELKSVQQKSILRVGTLTSDDLLTLAADLEKLKSKVTRTERPLSSGVYMGNLSSQQLDQRRALLSMIGMSGGNQNSQPKGDGVVRVWDVKNADLLNNQFGTMPSLTLACLTKQGQVDLNDAVQALTDLGLIYTAKYPNSSDLDRLSQSHPILNMIDTKKSSLNISGYNFSLGAAIKTGACMLDGGNMLETIKVTPQTMDGILKSILKVKRSLGMFISDTPGERNPYENILYKICLSGDGWPYIASRTAIIGRAWENTVVDLESDSKPQKIGSNGSNKSLQSAGFAPGLTYSQLMTLKDSMLQLDPNAKTWIDIEGRPEDPVEVALFQPISGCYIHFFREPTDLKQFKQDAKYSHGIDVTDLFAAQPGLTSAVIEALPRNMVLTCQGSDDIKKLLDSQGRRDIKLIDVSLNKIDSRKFENAVWDQYKDLCHMHTGVVVEKKKKGGKEEITPHCALLDCIMFDAAVSGGLNATVLRAVLPRDMVFRTSSPKVVL

SEQ ID NO: 17974 - protein, 590 aa, Artificial Sequence
  derived and/or modified protein sequence (wt) from LASV(KAK-428;Clade n.d. (VII))__ANH09741__SP-HsPLAT_NP(2-569)
MDAMKRGLCCVLLLCGAVFVSPSNSKEVKSFLWTQSLRRELSGYCTNIKLQVVKDAQALLHGLDFSEVSNVQRLMRKQKRDDNDLKRLRDLNQAVNNLVELKSVQQKSVLKVGTLNSDDLLTLAADLEKLKSKVVRTERPLSSGVYMGNLSSQQLDQRRALLNMIGMAGGSQGNQPSRDGVVRVWDVKNADLLNNQFGTMPSLTLACLTKQGQVDLNDVVLALTDLGLIYTAKYPNSSDLDRLSQNHPVLNMIDVNKSSLNISGYNFSLGAAVKAGACMLDGGNMLETIKISPQTVDGILKSILKVKRALGMFVSDTPGERNPYENILYKVCLSGNGWPYIASRTSIVGRAWENTVVDLESNKNQPKVGNNGSNKMLQSSGFATGLTYSQLMTLRDSMLQLDPTAKTWIDIEGRPEDPVELALFQPSSGCYIHFFREPTDLKQFKQDAKYSHGIDVNDLFSAQPGLTSAVLEALPRNMVLTCQGSDDIRKLLDSQDRKDIKLIDISLSKADARKFENDVWDQFKDLCHMHTGIVVEKKKKGGKQEMTPHCALLDCIMFDAAVSGGLNVPTLRAVLPTDMVFRTITTKVVL

SEQ ID NO: 17975 - protein, 590 aa, Artificial Sequence; identical to SEQ ID NO: 17969
  derived and/or modified protein sequence (wt) from LASV(Pinneo-NIG-1969;Clade I)__AIT17837__SP-HsPLAT_NP(2-569)

SEQ ID NO: 17976 - protein, 590 aa, Artificial Sequence
  derived and/or modified protein sequence (wt) from LASV(ISTH0009-NIG-2011;Clade II)__AIT17405__SP-HsPLAT_NP(2-569)
MDAMKRGLCCVLLLCGAVFVSPSVSKEVKSFLWTQSLRRELSGYCSNIKLQVVKDAQALLHGLDFSEVSNVQRLMRKQKRDDSDLKRLRDLNQAVNNLVELKSTQQKSILRVGTLTSDDLLTLAADLEKLKSKVIRTERPLSSGVYMGNLSTQQLEQRRALLNMIGMVGGAQGTQPGRDGVVRVWDVKNPDLLNNQFGTMPSLTLACLTKQGQVDLNDAVLALTDLGLIYTAKYPNSSDLDRLSQSHPILNMVDIKKSSLNISGYNFSLGAAVKAGACMLDGGNMLETIKVTPQTMDGILKSILKVKRSLGMFVSDTPGERNPYENILYKICLSGDGWPYIASRTSIVGRAWENTTVDLESDGKPQKVGSAGSNKSLQSAGFPTGLTYSQLMTLKDSMMQLDPSAKTWIDIEGRPEDPVEIALYQPMSGCYIHFFREPTDLKQFKQDAKYSHGIDVADLFPAQPGLTSAVIEALPRNMVLTCQGSDDIKRLLDSQGRRDIKLIDIALSKADSRRFENAVWDQCKDLCHMHTGVVVEKKKRGGKEEITPHCALMDCIMYDAAVSGGLNIPVLRAVLPRDMVFRTSSPKVVL

SEQ ID NO: 17977 - protein, 590 aa, Artificial Sequence
  derived and/or modified protein sequence (wt) from LASV(ISTH2010-NIG-2012;Clade II)__AIT17483__SP-HsPLAT_NP(2-569)
MDAMKRGLCCVLLLCGAVFVSPSASKEVKSFLWTQSLRRELSGYCSNIKLQVVKDAQALLHGLDFSEVSNVQRLMRKQKRDDSDLKRLRDLNQAVNNLVELKSTQQKSILRVGTLTSDDLLTLAADLEKLKSKVIRTERPLSSGVYMGNLSTQQLEQRRALLNLIGMVGGAQGTQPGRDGVVRVWDVKNPDLLNNQFGTMPSLTLACLTKQGQVDLNDAVLALTDLGLIYTAKYPNSSDLDRLSQSHPILNMVDTKKSSLNISGFNFSLGAAVKAGACMLDGGNMLETIKVTPQTMDGILKSILKVKKSLGMFVSDTPGERNPYENILYKICLSGDGWPYIASRTSIVGRAWENTTVDLESDGKPHKVGTAGSNKSLQSAGFPTGLTYSQLMTLKDSMMQLDPSAKTWIDIEGRPEDPVEIALYQPMSGCYIHFFREPTDLKQFKQDAKYSHGIDVADLFPAQPGLTSAVIEALPRNMVLTCQGSDDIKRLLDSQGRRDIKLIDIALSKADSRRFENAVWDQCKDLCHMHTGVVVEKKKRGGKEEITPHCALMDCIMYDAAVSGGLNIPVLRAVLPRDMVFRTSSPKVVL

SEQ ID NO: 17978 - protein, 590 aa, Artificial Sequence
  derived and/or modified protein sequence (wt) from LASV(Lassa virus/H.sapiens-wt/NGA/2015/ISTH_0543;Clade II)__AVO03640__SP-HsPLAT_NP(2-569)
MDAMKRGLCCVLLLCGAVFVSPSASKEVKSFLWTQSLRRELSGYCSNIKLQVVKDAQALLHGLDFSEVSNVQRLMRKQKRDDSDLKRLRDLNQAVNNLVELKSTQQKSILRVGTLTSDDLLTLAADLEKLKSKVIRTERPLSSGVYMGNLSTQQLEQRRALLNMIGMVGGAQGTQPGRDGVVRVWDVKNPDLLNNQFGTMPSLTLACLTKQGQVDLNDAVLALTDLGLIYTAKYPNSSDLDRLSQSHPILNMVDTKKSSLNISGYNFSLGAAVKAGACMLDGGNMLETIKVTPQTMDGILKSILKVKKSLGMFVSDTPGERNPYENILYKICLSGDGWPYIASRTSIVGRAWENTTVDLESDGKPQKVGSAGSNKSLQSAGFPTGLTYSQLMTLKDSMMQLDPSAKTWIDIEGRPEDPVEIALYQPMSGCYIHFFREPTDLKQFKQDAKYSHGIDVADLFPAQPGLTSAVIEALPRNMVLTCQGSDDIKRLLDSQGRKDIKLIDIALSKADSRRFENAVWDQCKDLCHMHTGVVVEKKKRGGKEEITPHCALMDCIMYDAAVSGGLNIPVLRAVLPRDMVFRTSSPKVVL

SEQ ID NO: 17979 - protein, 590 aa, Artificial Sequence
  derived and/or modified protein sequence (wt) from LASV(Lassa virus/H.sapiens-wt/NGA/2016/ISTH_0009;Clade II)__AVO03572__SP-HsPLAT_NP(2-569)
MDAMKRGLCCVLLLCGAVFVSPSASKEVKSFLWTQSLRRELSGYCSNIKLQVVKDAQALLHGLDFSEVSNVQRLMRKQKRDDSDLKRLRDLNQAVNNLVELKSTQQKSILRVGTLTSDDLLTLAADLEKLKSKVIRTERPLSSGVYMGNLSTQQLEQRRALLNMIGMVGGAQGTQPGRDGVVRVWDVKNPDLLNNQFGTMPSLTLACLTKQGQVDLNDAVLALTDLGLIYTAKYPNSSDLDRLSQSHPILNMVDTKKSSLNISGYNFSLGAAVKAGACMLDGGNMLETIKVTPQTMDGILKSILKVKKSLGMFVSDTPGERNPYENILYKICLSGDGWPYIASRTSIVGRAWENTTVDLESDGKPQKVGSAGSNKSLQSAGFPTGLTYSQLMTLKDSMMQLDPSAKTWIDIEGRPEDPVEIALYQPMSGCYIHFFREPTDLKQFKQDAKYSHGIDVADLFPAQPGLTSAVIEALPRNMVLTCQGSDDIKRLLDSQGRRDIKLIDIALSKADSRRFENAVWDQCKDLCHMHTGVVVEKKKRGGKEEITPHCALMDCIMYDAAVSGGLNIPVLRAVLPRDMVFRTSSPKVVL

SEQ ID NO: 17980 - protein, 590 aa, Artificial Sequence
  derived and/or modified protein sequence (wt) from LASV(Lassa virus/H.sapiens-wt/NGA/2016/ISTH_0017;Clade II)__AVO03568__SP-HsPLAT_NP(2-569)
MDAMKRGLCCVLLLCGAVFVSPSASKEVKSFLWTQSLRRELSGYCSSIKLQVVKDAQALLHGLDFSEVSNVQRLMRKQKRDDSDLKRLRDLNQAVNNLVELKSTQQKSILRVGTLTSDDLLTLAADLEKLKSKVIRTERPLSSGVYMGNLSTQQLEQRRALLNMIGMAGGAQGTQPGRDGVVRVWDVKNPDLLNNQFGTMPSLTLACLTKQGQVDLNDAVLALTDLGLIYTAKYPNSSDLDRLSQSHPILNMVDTKKSSLNISGYNFSLGAAVKAGACMLDGGNMLETIKVTPQTMDGILKSILKVKRSLGMFVSDAPGERNPYENILYKICLSGDGWPYIASRTSIVGRAWENTTVDLESDGKPQKVGATGSNKSLQSAGFPTGLTYSQLMTLKDSMMQLDPSAKTWIDIEGRPEDPVEVALYQPVSGCYIHFFREPTDLKQFKQDAKYSHGIDVADLFPAQPGLTSAVIEALPRNMVLTCQGSDDIKKLLDSQGRKDIKLIDIALSKADSRRFENAVWDQCKDLCHMHTGVVVEKKKRGGKEEITPHCALMDCIMYDAAVSGGLNIPVLRAVLPRDMVFRTSSPKVVL

SEQ ID NO: 17981 - protein, 590 aa, Artificial Sequence
  derived and/or modified protein sequence (wt) from LASV(Lassa virus/H.sapiens-wt/NGA/2018/ISTH_0959;Clade II)__AVV65100__SP-HsPLAT_NP(2-569)
MDAMKRGLCCVLLLCGAVFVSPSASKEVKSFLWTQSLRRELSGYCSNIKLQVVKDAQALLHGLDFSEVSNVQRLMRKQKRDDSDLKRLRDLNQAVNNLVELKSTQQKSILRVGTLTSDDLLTLAADLEKLKSKVIRTERPLSSGVYMGNLSTQQLEQRRALLNLIGMVGGAQGTQPGRDGVVRVWDVKNPDLLNNQFGTMPSLTLACLTKQGQVDLNDVVLALTDLGLIYTAKYPNSSDLDRLSQSHPILNMVDTKKSSLNISGFNFSLGAAVKAGACMLDGGNMLETIKVTPQTMDGILKSILKVKKSLGMFVSDTPGERNPYENILYKICLSGDGWPYIASRTSIVGRAWENTTVDLESDGKPHKVGTAGSNKSLQSAGFPTGLTYSQLMTLKDSMMQLDPSAKTWIDIEGRPEDPVEIALYQPMSGCYIHFFREPTDLKQFKQDAKYSHGIDVADLFPAQPGLTSAVIEALPRNMVLTCQGSDDIKRLLDSQGRKDIKLIDIALSKTDSRRFENAVWDQCKDLCHMHTGVVVEKKKRGGKEEITPHCALMDCIMYDAAVSGGLNIPVLRAVLPRDMVFRTSSPKVVL

SEQ ID NO: 17982 - protein, 590 aa, Artificial Sequence
  derived and/or modified protein sequence (wt) from LASV(LASV003-NIG-2008;Clade II)__AIT17581__SP-HsPLAT_NP(2-569)
MDAMKRGLCCVLLLCGAVFVSPSASKEVKSFLWTQSLRRELSGYCSSIKLQVVKDAQALLHGLDFSEVSNVQRLMRKQKRDDSDLKRLRDLNQAVNNLVELKSTQQKSVLRVGTLTSDDLLTLAADLEKLKSKVIRTERPLSSGVYMGNLSAQQLEQRRTLLNMIGMVGGAQGTQPGRDGVVRVWDVKNPDLLNNQFGTMPSLTLACLTKQGQVDLNDVVLALTDLGLIYTAKYPNSSDLDRLSQSHPILSMVDTKKSSLNISGYNFSLGAAVKAGACMLDGGNMLETIKVTPQTMDGILKSILKVKKSLGMFVSDTPGERNPYENILYKICLSGDGWPYIASRTSIVGRAWENTTVDLESDGKPQKVGTAGSNKSLQSAGFPTGLTYSQLMTLKDSMMQLDPSAKTWIDIEGRPEDPVEIALYQPMSGCYIHFFREPTDLKQFKQDAKYSHGIDVTDLFPAQPGLTSAVIEALPRNMVLTCQGSDDIKRLLDSQGRRDIKLIDIALSKADSRRFENAVWDQCKDLCHMHTGVVVEKKKRGGKEEITPHCALMDCIMYDAAVSGGLNIPVLRAVLPRDMVFRTSSPKVVL

SEQ ID NO: 17983 - protein, 590 aa, Artificial Sequence
  derived and/or modified protein sequence (wt) from LASV(LASV035-NIG-2009;Clade II)__AIT17589__SP-HsPLAT_NP(2-569)
MDAMKRGLCCVLLLCGAVFVSPSASKEVKSFLWTQSLRRELSGYCSSIKLQVVKDAQALLHGLDFSEVSNVQRLMRKQKRDDSDLKRLRDLNQAVNNLVELKSTQQKSILRVGTLTSDDLLTLAADLEKLKSKVIRTERPLSSGVYMGNLSAQQLEQRRALLNMIGMVGGAQGTQPGRDGVVRVWDVKNPDLLNNQFGTMPSLTLACLTKQGQVDLNDAVLALTDLGLIYTAKYPNSSDLDRLSQSHPILNMVDTKKSSLNISGYNFSLGAAVKAGACMLDGGNMLETIKVTPQTMDGILKSILKVKRSLGMFVSDTPGERNPYENILYKICLSGDGWPYIASRTSIVGRAWENTTVDLESDGKPQKVGTTGSNKSLQSAGFPTGLTYSQLMTLKDSMMQLDPSAKTWIDIEGRPEDPVEIALYQPMSGCYIHFFREPTDLKQFKQDAKYSHGIDVADLFPAQPGLTSAVIEALPRNMVLTCQGSDDIKKLLDSQGRRDIKLIDIALSKADSRKFENAVWDQCKDLCHMHTGVVVEKKKRGGKEEITPHCALMDCIMYDAAVSGGLNIPVLRAVLPRDMVFRTSSPKVVL

SEQ ID NO: 17984 - protein, 590 aa, Artificial Sequence
  derived and/or modified protein sequence (wt) from LASV(LASV1000-NIG-2009;Clade II)__AIT17783__SP-HsPLAT_NP(2-569)
MDAMKRGLCCVLLLCGAVFVSPSASKEVKSFLWTQSLRRELSGYCSNIKLQVVKDAQALLHGLDFSEVSNVQRLMRKQKRDDSDLKRLRDLNQAVNNLVELKSTQQKSILRVGTLTSDDLLTLAADLEKLKSKVIRTERPLSSGVYMGNLSTQQLEQRRALLNMIGMVGGAQGTQPGRDGVVRVWDVKNPDLLNNQFGTMPSLTLACLTKQGQVDLNDVVLALTDLGLIYTAKYPNSSDLDRLSQSHPILNMVDTKKSSLNISGYNFSLGAAVKAGACMLDGGNMLETIKVTPQTMDGILKSILKVKKSLGMFVSDTPGERNPYENILYKICLSGDGWPYIASRTSIVGRAWENTTVDLESDGKPQKVGTAGSNKSLQSAGFPTGLTYSQLMTLKDSMMQLDPSAKTWIDIEGRPEDPVEIALYQPVSGCYIHFFREPTDLKQFKQDAKYSHGIDVADLFPAQPGLTSAVIEALPRNMVLTCQGSDDIKRLLDSQGRRDIKLIDIALSKADSRRFENAVWDQCKDLCHMHTGVVVEKKKRGGKEEITPHCALMDCIMYDAAVSGGLNIPVLRAVLPRDMVFRTSSPKVVL

SEQ ID NO: 17985 - protein, 590 aa, Artificial Sequence
  derived and/or modified protein sequence (wt) from LASV(LASV221-NIG-2010;Clade II)__AIT17625__SP-HsPLAT_NP(2-569)
MDAMKRGLCCVLLLCGAVFVSPSASKEVKSFLWTQSLRRELSGYCSSIKLQVVKDAQALLHGLDFSEVSNVQRLMRKQRRDDSDLKRLRDLNQAVNNLVELKSTQQKSILRVGTLTSDDLLTLAADLEKLKSKVIRTERPLSSGVYMGNLSTQQLEQRRALLNMIGMVGGAQGTQPGRDGVVRVWDVKNPDLLNNQFGTMPSLTLACLTKQGQVDLNDAVLALTDLGLIYTAKYPNSSDLDRLSQSHPILNMVDTKKSSLNISGYNFSLGAAVKAGACMLDGGNMLETIKVTPQTVDGILKSILKVKRSLGMFVSDTPGERNPYENILYKICLSGDGWPYIASRTSIVGRAWENTTVDLESDGKPQKVGTAGSNKSLQSAGFPTGLTYSQLMTLKDSMMQLDPSAKTWIDIEGRPEDPVEIALYQPMSGCYIHFFREPTDLKQFKQDAKYSHGIDVADLFPAQPGLTSAVIEALPRNMVLTCQGSDDIKRLLDSQGRRDIKLIDIALSKADSRKFENAVWDQCKDLCHMHTGVVVEKKKRGGKEEITPHCALMDCIMYDAAVSGGLNIPVLRAVLPRDMVFRTSSPKVVL

SEQ ID NO: 17986 - protein, 590 aa, Artificial Sequence
  derived and/or modified protein sequence (wt) from LASV(LASV237-NIG-2010;Clade II)__AIT17639__SP-HsPLAT_NP(2-569)
MDAMKRGLCCVLLLCGAVFVSPSASKEVKSFLWTQSLRRELSGYCSNIKLQVVKDAQALLHGLDFSEVSNVQRLMRKQKRDDSDLKRLRDLNQAVNNLVELKSTQQKSILRVGTLTSDDLLTLAADLEKLKSKVIRTERPLSSGVYMGNLSTQQLEQRRALLNMIGMVGGAQGTQPGRDGVVRVWDVKNPDLLNNQFGTMPSLTLACLTKQGQVDLNDAVLALTDLGLIYTAKYPNSSDLDRLSQSHPILNMVDIKKSSLNISGYNFSLGAAVKAGACMLDGGNMLETIKVTPQTMDGILKSILKVKRSLGMFVSDTPGERNPYENILYKICLSGDGWPYIASRTSIVGRAWENTTVDLESDGKPQKVGSAGSNKSLQSAGFPTGLTYSQLMTLKDSMMQLDPSAKTWIDIEGRPEDPVEIALYQPMSGCYIHFFREPTDLKQFKQDAKYSHGIDVADLFPAQPGLTSAVIEALPRNMVLTCQGSDDIKRLLDSQGRRDIKLIDIALSKADSRRFENAVWDQCKDLCHMHTGVVVEKKKRGGKEEITPHCALMDCIMYDAAVSGGLNIPVLRAVLPRDMVFRTSSPKVVL

SEQ ID NO: 17987 - protein, 590 aa, Artificial Sequence
  derived and/or modified protein sequence (wt) from LASV(LASV253-NIG-2011;Clade II)__AIT17671__SP-HsPLAT_NP(2-569)
MDAMKRGLCCVLLLCGAVFVSPSASKEVKSFLWTQSLRRELSGYCSSIKLQVVKDAQALLHGLDFSEVSNVQRLMRKQKRDDSDLKRLRDLNQAVNNLVELKSTQQKSVLRVGTLTSDDLLTLAADLEKLKSKVIRTERPLSSGVYMGNLSTQQLEQRRALLNMIGMVGGAQGTQPGRDGVVRVWDVKNPDLLNNQFGTMPSLTLACLTKQGQVDLNDVVLALTDLGLIYTAKYPNSSDLDRLSQSHPILNMVDTKKSSLNISGYNFSLGAAVKAGACMLDGGNMLETIKVTPQTMDGILKSILKVKKSLGMFVSDTPGERNPYENILYKICLSGDGWPYIASRTSIVGRAWENTTVDLESDGKPQKVGTAGSNKSLQSAGFPTGLTYSQLMTLKDSMMQLDPSAKTWIDIEGRPEDPVEIALYQPMSGCYIHFFREPTDLKQFKQDAKYSHGIDVTDLFPAQPGLTSAVIEALPRNMVLTCQGSDDIKRLLDSQGRRDIKLIDIALSKADSRRFENAVWDQCKDLCHMHTGVVVEKKKRGGKEEITPHCALMDCIMYDAAVSGGLNIPVLRAVLPRDMVFRTSSPKVVL

SEQ ID NO: 17988 - protein, 590 aa, Artificial Sequence
  derived and/or modified protein sequence (wt) from LASV(LASV254-NIG-2011;Clade II)__AIT17675__SP-HsPLAT_NP(2-569)
MDAMKRGLCCVLLLCGAVFVSPSASKEVKSFLWTQSLRRELSGYCSSIKLQVVKDAQALLHGLDFSEVSNVQRLMRKQKRDDSDLKRLRDLNQAVNNLVELKSTQQKSVLRVGTLTSDDLLTLAADLEKLKSKVIRTERPLSSGVYMGNLSTQQLEQRRALLNMIGMVGGAQGTQPGRDGVVRVWDVKNPDLLNNQFGTMPSLTLACLTKQGQVDLNDAVLALTDLGLIYTAKYPNSSDLDRLSQSHPILNMVDTKKSSLNISGYNFSLGAAVKAGACMLDGGNMLETIKVTPQTMDGILKSILKVKKSLGMFVSDTPGERNPYENILYKICLSGDGWPYIASRTSIVGRAWENTIVDLESDGKPQKVGTAGSNKSLQSAGFPTGLTYSQLMTLKDSMMQLDPSAKTWIDIEGRPEDPVEIALYQPMSGCYIHFFREPTDLKQFKQDAKYSHGIDVADLFPAQPGLTSAVIEALPRNMVLTCQGSDDIKRLLDSQGRRDIKLIDIALSKADSRRFENAVWDQCKDLCHMHTGVVVEKKKRGGKEEITPHCALMDCIMYDAAVSGGLNIPVLRAVLPRDMVFRTSSPKVVL

SEQ ID NO: 17989 - protein, 590 aa, Artificial Sequence
  derived and/or modified protein sequence (wt) from LASV(Nig08-04;Clade II)__ADU56611__SP-HsPLAT_NP(2-569)
MDAMKRGLCCVLLLCGAVFVSPSASKEVKSFLWTQSLRRELSGYCSNIKLQVVKDAQALLHGLDFSEVSNVQRLMRKQKRDDGDLKRLRDLNQAVNNLVELKSTQQKSVLRVGTLTSDDLLTLAADLEKLKSKVIRTERPLSSGVYMGNLSTQQLEQRKALLSMIGMVGGAQGTQPGRDGVVRVWDVKNPDLLNNQFGTMPSLTLACLTKQGQVDLNDAVLALTDLGLIYTAKYPNSSDLDRLSQSHPILNMVDTKKSSLNISGYNFSLGAAVKAGACMLDGGNMLETIKVTPQTMDGILKSILKVKRSLGMFVSDTPGERNPYENILYKICLSGDGWPYIASRTSIVGRAWENTTVDLESDGKPQKVGTAGSNKSLQSAGFPTGLTYSQLMTLKDSMMQLDPSAKTWIDIEGRPEDPVEIALYQPMSGCYIHFFREPTDLKQFKQDAKYSHGIDVTDLFSAQPGLTSAVIEALPRNMVLTCQGSDDIKKLLDSQGRRDIKLIDISLNKADSRRFENAVWDQCKDLCHMHTGVVVEKKKRGGKEEITPHCALMDCIMFDAAVSGGLNIPILRAVLPRDMVFRTSSPKVVL

SEQ ID NO: 17990 - protein, 591 aa, Artificial Sequence
  derived and/or modified protein sequence (wt) from LASV(GA391;Clade III)__AAA46284__SP-HsPLAT_NP(2-570)
MDAMKRGLCCVLLLCGAVFVSPSASKEVRSCLWTQSLRRELSGYCSNIKLQVVKDAQALLHGLDFSEVSNVQRLMRKQKRDDGDLKRLRDLNQAVNNLVELKSTQQKSVLRVGTLSSDDLLILAADLEKLKSKVTRTERPLSSGVYMGNLSSQQLDQRRALLNMIGMTGVSGGGKGASNGIVRVWDVKNAELLNNQFGTMPSLTLACLTKQGQVDLNDAVQALTDLGLIYTAKYPNSSDLDRLSQSHPILNMIDTKKSSLNISGYNFSLGAAVKAGACMLDGGNMLETIKVSPQTMDGILKSILKVKKSLGMFVSDTPGERNPYENILYKICLSGDGWSYIASRTSIVGRAWENTVVDLEQDNKPQKIGNGGSNKSLQSAGFAAGLIYSQLMTLKDFKCFNLIPNAKTWMDIEGRPEDPVEIALYQPSSGCYVHFFREPTDLKQFKQDAKYSHGRDVTDLFAAQPGLTSAVIEALPRNMVITCQGSEDIRKLLESQGRRDIKLIDITLSKADSRKFENAVWDQFKDLCHMHTGVVVEKKKRGGKEEITPHCALMDCIMFDAAVSGGLDAKVLRVVLPRDMVFRTSTPKVVL

SEQ ID NO: 17991 - protein, 590 aa, Artificial Sequence
  derived and/or modified protein sequence (wt) from LASV(Nig08-A19;Clade III)__ADU56619__SP-HsPLAT_NP(2-569)
MDAMKRGLCCVLLLCGAVFVSPSASKEVKSFLWTQSLRRELSGYCSNIKLQVVKDAQALLHGLDFSEVSNVQRLMRKQKRDDGDLKRLRDLNQAVNNLVELKSTQQKSVLRVGTLSSDDLLVLAADLEKLKSKVVRTERPLSSGIYMGNLSSQQLDQRKALLNMIGMTGGNGGRNTTSDGIVRVWDVKNAELLNNQFGTMPSLTLACLTKQGQVDLNDAVQALTDLGLIYTAKYPNSSDLDRLAQSHPILNMIDTKKSSLNISGYNFSLGAAVKAGACMLDGGNMLETIKVSPQTMDGILKSILKVKRSLGMFISDTPGERNPYENILYKICLSGDGWPYIASRTSIVGRAWENTVVDLESDNKPQKTGNGGSNKSLQSAGFAAGLTYSQLMTLKDSMLQLDPNAKTWMDIEGRPEDPVEIALYQPSSGCYIHFFREPTDLKQFKQDAKYSHGIDVTDLFAAQPGLTSAVIEALPRNMVITCQGSEDIRKLLESQGRRDIKLIDISLSKVDSRKFENAVWDQFKDLCHMHTGIVVEKKKRGGKEEITPHCALMDCIMFDAAVSGGVDAKVLRAVLPRDMVFRTSTPKVVL

SEQ ID NO: 17992 - protein, 590 aa, Artificial Sequence
  derived and/or modified protein sequence (wt) from LASV(G1180-SLE-2010;Clade IV)__AIT17169__SP-HsPLAT_NP(2-569)
MDAMKRGLCCVLLLCGAVFVSPSASKEIKSFLWTQSLRRELSGYCSNIKLQVVKDAQALLHGLDFSEVSNVQRLMRKERRDDNDLKRLRDLNQAVNNLVELKSTQQKSILRVGTLTSDDLLILAADLEKLKSKVIRTERPLSAGVYMGNLSSQQLDQRRALLSMIGMSSGNQRAQAGRDGVVRVWDVKNVELLNNQFGTMPSLTLACLTKQGQVDLNDAVQALTDLGLIYTAKYPNTSDLDRLTQSHPILNMIDTKKSSLNISGYNFSLGAAVKAGACMLDGGNMLETIKVSPQTMDGILKSILKVKKALGMFISDTPGERNPYENILYKICLSGDGWPYIASRTSITGRAWENTVVDLESDGKPQKAGSNNSNKSLQSVGFTAGLTYSQLMTLKDAMLQLDPNAKTWMDIEGRPEDPVEIALYQPSSGCYIHFFREPTDLKQFKQDAKYSHGIDVTDLFAAQPGLTSAVIDALPRNMVITCQGSDDIRKLLESQGRKDIKLIDIALSKTDSRKYENAVWDQYKDLCHMHTGVVVEKKKRGGKEEITPHCALMDCIMFDAAVSGGLNTSVLRAVLPRDMVFRTSTPRVVL

SEQ ID NO: 17993 - protein, 590 aa, Artificial Sequence
  derived and/or modified protein sequence (wt) from LASV(G1442-SLE-2011;Clade IV)__AIT17181__SP-HsPLAT_NP(2-569)
MDAMKRGLCCVLLLCGAVFVSPSASKEVKSFLWTQSLRRELSGYCSNIKLQVVKDAQALLHGLDFSEVSNVQRLMRKQRRDDNDLKRLRDLNQAVNNLVELKSTQQKSVLRVGTLTSDDLLVLAADLEKLKSKVIRTERPLSAGVYMGNLSSQQLDQRRALLNMIGMSGGIQGTRTGRDGVVRVWDVKNADLLNNQFGTMPSLTLACLTKQGQVDLNDVVQALTDLGLIYTAKYPNASDLDRLTQSHPILNMIDTKKSSLNISGYNFSLGAAVKAGACMLDGGNMLETIKVSPQTMDGILKSILKVKKTLGMFISDTPGERNPYENILYKICLSGDGWPYIASRTSITGRAWENTVVDLESDGKPQKAGSNNSNKSLQSAGFAAGLTYSQLMTLKDAMLQLDPNAKTWMDIEGRPEDPVEIALYQPSSGCYIHFFREPTDLKQFKQDAKYSHGIDVTDLFAAQPGLTSAVIEALPRNMVITCQGSDDIKKLLESQGRKDIKLIDIALSKTDSRKYENAVWDQYKDLCHMHTGVVVEKKKRGGKEEITPHCALMDCIMFDAAVSGGLNTLVLRAVLPRDMVFRTSTPRVVL

SEQ ID NO: 17994 - protein, 590 aa, Artificial Sequence
  derived and/or modified protein sequence (wt) from LASV(G3010-SLE-2013;Clade IV)__AIT17345__SP-HsPLAT_NP(2-569)
MDAMKRGLCCVLLLCGAVFVSPSASKEIKSFLWTQSLRRELSGYCSNIKLQVVKDAQALLHGLDFSEVSNVQRLMRKERRDDNDLKRLRDLNQAVNNLVELKSTQQKSILRVGTLTSDDLLILAADLEKLKSKVTRTERPLSAGVYMGNLSSQQLDQRRALLSMIGMSSGVQGARAGRDGVVRVWDVKNAELLNNQFGTMPSLTLACLTKQGQVDLNDVVQALTDLGLIYTAKYPNTSDLDRLTQSHPILNMIDTKKSSLNISGYNFSLGAAVKAGACMLDGGNMLETIKVSPQTMDGILKSILKVKKALGMFISETPGERNPYENILYKICLSGDGWPYIASRTSITGRAWENTVVDLESDGKPQKAGSNNSNKSLQSAGFTAGLTYSQLMTLKDAMLQLDPNAKTWMDIEGRPEDPVEVALYQPSSGCYIHFFREPTDLKQFKQDAKYSHGIDVTDLFAAQPGLTSAVIDALPRNMVITCQGSDDIKKLLESQGRKDIKLIDIALSKTDSRKYENAVWDQYKDLCHMHTGVVVEKKKRGGKEEITPHCALMDCIMFDAAVSGGLNTSVLRAVLPRDMVFRTSTPRVVL

SEQ ID NO: 17995 - protein, 590 aa, Artificial Sequence
  derived and/or modified protein sequence (wt) from LASV(G502-SLE-2009;Clade IV)__AIT17127__SP-HsPLAT_NP(2-569)
MDAMKRGLCCVLLLCGAVFVSPSASKEIKSFLWTQSLRRELSGYCSNIKLQVVKDAQALLHGLDFSEVSNVQRLMRKERRDDNDLKRLRDLNQAVNNLVELKSTQQKSILRVGTLTSDDLLILAADLEKLKSKVIRTERPLSAGVYMGNLSSQQLDQRRALLSMIGMSGGNQGVRAGKDGVVRVWDVKNAELLNNQFGTMPSLTLACLTKQGQVDLNDAVQALTDLGLIYTAKYPNTSDLDRLTQSHPILNMIDTKKSSLNISGYNFSLGAAVKAGACMLDGGNMLETIKVSPQTMDGILKSILKVKKALGMFISDTPGERNPYENILYKICLSGDGWPYIASRTSITGRAWENTVVDLESDGKPQKAGSNNSNKSLQSAGFTAGLTYSQLMTLKDAMLQLDPNTKTWMDIEGRPEDPVEIALYQPSSGCYIHFFREPTDLKQFKQDAKYSHGIDVTDLFAAQPGLTSAVIDALPRNMVITCQGSDDIRKLLESQGRKDIKLIDIALNKTDSRKYENAVWDQYKDLCHMHTGVVVEKKKRGGKEEITPHCALMDCIMFDAAVSGGLNTSVLRAVLPRDMVFRTSTPRVVL

SEQ ID NO: 17996 - protein, 590 aa, Artificial Sequence
  derived and/or modified protein sequence (wt) from LASV(G733-SLE-2010;Clade IV)__AIT17155__SP-HsPLAT_NP(2-569)
MDAMKRGLCCVLLLCGAVFVSPSASKEIKSFLWTQSLRRELSGYCSNIKLQVVKDAQALLHGLDFSEVSNVQRLMRKERRDDNDLKRLRDLNQAVNNLVELKSTQQKSVLRVGTLTSDELLVLAADLEKLKSKVIRTERPLSAGVYMGNLSSQQLDQRRALLSMIGMSGGNQGARTGRDGVVRVWDVKNAELLNNQFGTMPSLTLACLTKQGQVDLNDAVQALTDLGLIYTAKYPNTSDLDRLTQSHPILNMIDTKKSSLNISGYNFSLGAAVKAGACMLDGGNMLETIKVSPQTMDGILKSILKVKKALGMFISDTPGERNPYENILYKICLSGDGWPYIASRTSITGRAWENTVVDLESDGKPQKAGSNNSNKSLQSAGFTAGLTYSQLMTLKDAMLQLDPNAKTWMDIEGRPEDPVEIALYQPSSGCYIHFFREPTDLKQFKQDAKYSHGIDVTDLFAAQPGLTSAVIDALPRNMVITCQGSDDIRKLLESQGRKDIKLIDIALSKIDSRKYENAVWDQYKDLCHMHTGVVVEKKKRGGKEEITPHCALMDCIMFDAAVSGGLNSLVLRAVLPRDMVFRTSTPRVVL

SEQ ID NO: 17997 - protein, 590 aa, Artificial Sequence
  derived and/or modified protein sequence (wt) from MOPV/LASV reassortant(IGS-1;Clade IV)__AFY05578__SP-HsPLAT_NP(2-569)
MDAMKRGLCCVLLLCGAVFVSPSASKEIKSFLWTQSLRRELSGYCSNIKLQVVKDAQALLHGLDFSEVSNVQRLMRKERRDDNDLKRLRDLNQAVNNLVELKSTQQKSILRVGTLTSDDLLILAADLEKLRSKVIRTERPLSAGVYMGNLSSQQLDQRRALLNMIGMSGGNQGARAGRDGVVRVWDVKNAELLSNQFGTMPSLTLACLTKQGQVDLNDAVQALTDLGLIYTAKYPNTSDLDRLTQSHPILNMIDTKKSSLNISGYNFSLGAAVKAGACMLDGGNMLETIKVSPQTMDGILKSILKVKKALGMFISDTPGERNPYENILYKICLSGDGWPYIASRTSITGRAWENTVVDLESDGKPQKADSNNSSKSLQSAGFTAGLTYSQLMTLKDAMLQLDPNAKTWMDIEGRPEDPVEIALYQPSSGCYIHFFREPTDLKQFKQDAKYSHGIDVTDLFATQPGLTSAVIDALPRNMVITCQGSDDIRKLLESQGRKDIKLIDIDLSKTDSRKYENAVWDQYKDLCHMHTGVVVEKKKRGGKEEITPHCALMDCIMFDAAVSGGLNTSVLRAVLPRDMVFRTSTPRVVL

SEQ ID NO: 17998 - protein, 590 aa, Artificial Sequence
  derived and/or modified protein sequence (wt) from LASV(LM765-SLE-2012;Clade IV)__AIT17815__SP-HsPLAT_NP(2-569)
MDAMKRGLCCVLLLCGAVFVSPSASKEIKSFLWTQSLRRELSGYCSNIKLQVVKDAQALLHGLDFSEVSNVQRLMRKERRDDNDLKRLRDLNQAVNNLVELKSTQQKSILRVGTLTSDDLLILAADLEKLKSKVTRTERPLSAGVYMGNLSSQQLDQRRALLDMIGMSGSNQGARAGRDGVVRVWDVKNAELLNNQFGTMPSLTLACLTKQGQVDLNDAVQALTDLGLIYTAKYPNTSDLDRLTQSHPILNMIDTKKSSLNISGYNFSLGAAVKAGACMLDGGNMLETIKVSPQTMDGILKSILKVKKALGMFISDAPGERNPYENILYKICLSGDGWPYIASRTSITGRAWENTVVDLESDGKPQKAGSNGSNKSLQSAGFTAGLTYSQLMTLKDAMLQLDPNAKTWMDIEGRPEDPVEIALYQPSSGCYIHFFREPTDLKQFKQDAKYSHGIDVTDLFAAQPGLTSAVIDALPRNMVITCQGSDDIRKLFESQGRKDIKLIDIALSKTDSRKYENAVWDQYKDLCHMHTGIVVEKKKRGGKEEITPHCALMDCIMFDAAVSGGLNTSVLRAVLPRDMVFRTSTPRVVL

SEQ ID NO: 17999 - protein, 590 aa, Artificial Sequence
  derived and/or modified protein sequence (wt) from LASV(LM776-SLE-2012;Clade IV)__AIT17825__SP-HsPLAT_NP(2-569)
MDAMKRGLCCVLLLCGAVFVSPSASKEIKSFLWTQSLRRELSSYCSNIKLQVVKDAQALLHGLDFSEVSNVQRLMRKERRDDNDLKRLRDLNQAVNNLVELKSTQQKSILRVGTLTSDDLLILAADLEKLKSKVTRTERPLSAGVYMGNLSSQQLDQRRALLSMIGMSGSNQGARAGRDGVVRVWDVKNAELLNNQFGTMPSLTLACLTKQGQVDLNDAVQALTDLGLIYTAKYPNTSDLDRLTQSHPILNMIDTKKSSLNISGYNFSLGAAVKAGACMLDGGNMLETIKVSPQTMDGILKSILKVKKALGMFISDTPGERNPYENILYKICLSGDGWPYIASRTSITGRAWENTVVDLESDGKPQKAGSNNSNKSLQSAGFTAGLTYSQLMTLKDAMLQLDPNAKTWMDIEGRPEDPVEVALYQPSSGCYIHFFREPTDLKQFKQDAKYSHGIDVTDLFAAQPGLTSAVIDALPRNMVITCQGSDDIRKLLESQGRKDIKLIDIALSKTDSRKYENAVWDQYKDLCHMHTGVVVEKKKRGGKEEITPHCALMDCIMFDAAVSGGLNTSVLRAVLPRDMVFRTSTPRVVL

SEQ ID NO: 18000 - protein, 590 aa, Artificial Sequence
  derived and/or modified protein sequence (wt) from LASV(Mad39;Clade IV)__ANH09723__SP-HsPLAT_NP(2-569)
MDAMKRGLCCVLLLCGAVFVSPSASKEIKSFLWTQSLRRELSGYCSNIKLQVVKDAQALLHGLDFSEVSNVQRLMRKQRRDDNDLKRLRDLNQAVNNLVELKSTQQKSVLRVGTLTSDDLLTLAADLEKLKSKVTRTERPLTAGVYMGNLSSQQLDQRRALLNMIGMSGGNQGARTGRDGVVRVWDVKNAELLNNQFGTMPSLTLACLTKQGQVDLNDVVQALTDLGLIYTAKYPNTSDLDRLTQSHPILNMIDTNKSSLNISGYNFSLGAAVKAGACMLDGGNMLETIKVSPQTMDGILKSILKVKKSLGMFISDTPGERNPYENILYKICLSGDGWPYIASRTSITGRAWENTVVDLESGGKPQKAGSNNSNKSLQSAGFAAGLTYSQLMTLKDAMLQLDPNAKTWMDIEGRPEDPVEIALYQPISGCYIHFFREPTDLKQFKQDAKYSHGIDVTDLFAAQPGLTSAVIEALPRNMVITCQGSDDIRKLFESQGRKDIKLIDIALSKTDSRKYENAVWDQYKDLCHMHTGVVVEKKKKGGKEEITPHCALMDCIMFDAAVSGGLNTLVLRAVLPRDMVFRTSTPKVVL

SEQ ID NO: 18001 - protein, 590 aa, Artificial Sequence
  derived and/or modified protein sequence (wt) from LASV(Z0947-SLE-2011;Clade IV)__AIT17841__SP-HsPLAT_NP(2-569)
MDAMKRGLCCVLLLCGAVFVSPSASKEIKSFLWTQSLRRELSGYCSNIKLQVVKDAQALLHGLDFSEVSNVQRLMRKERRDDNDLKRLRDLNQAVNNLVELKSTQQKSILRVGTLTSDDLLILAADLEKLKSKVTRTERPLSAGVYMGNLSSQQLDQRRALLNMIGMSGSNQGARTGRDGVVRVWDVKNAELLNNQFGTMPSLTLACLTKQGQVDLNDAVQALTDLGLIYTAKYPNTSDLDRLTQSHPILNMIDTKKSSLNISGYNFSLGAAVKAGACMLDGGNMLETIKVSPQTMDGILKSILKVKKALGMFISDAPGERNPYENILYKICLSGDGWPYIASRTSITGRAWENTVVDLESDGKPQKAGSNGSNKSLQSAGFTAGLTYSQLMTLKDAMLQLDPNAKTWMDIEGRPEDPVEIALYQPSSGCYIHFFREPTDLKQFKQDAKYSHGIDVTDLFAAQPGLTSAVIDALPRNMVITCQGSDDIRKLFESQGRKDIKLIDIALSKTDSRKYENAVWDQYKDLCHMHTGIVVEKKKRGGKEEITPHCALMDCIMFDAAVSGGLNTSVLRAVLPRDMVFRTSTPRVVL

SEQ ID NO: 18002 - RNA, 1773 nt, Artificial Sequence
  derived and/or modified CDS sequence (opt1) from LASV(Josiah;Clade IV)__NP_694869__SP-HsPLAT_NP(2-569)
auggacgccaugaagcgcggccugugcugcgugcuccugcugugcggggccgucuucgugagccccagcgccuccaaggagaucaagagcuuccuguggacccagucccuccgccgggagcugagcggcuacugcuccaacaucaagcuccagguggucaaggacgcccaggcgcugcugcacgggcuggacuucagcgagguguccaacgugcagcgccucaugcggaaggagcgccgggacgacaacgaccugaagcgccugcgggaccucaaccaggccgucaacaaccugguggagcucaagagcacccagcagaaguccauccugcgcgugggcacccugaccagcgacgaccugcucauccuggccgccgaccuggagaagcucaaguccaaggucauccggaccgagcgcccccugagcgccgggguguacaugggcaaccuguccagccagcagcucgaccagcggcgcgcgcugcugaacaugaucgggauguccggcggcaaccagggggcccgggccggccgcgacggggugguccgggugugggacgugaagaacgccgagcuccugaacaaccaguucggcaccaugccgagccugacgcucgcgugccugaccaagcaggggcaggucgaccugaacgacgccgugcaggcccucaccgaccugggccugaucuacaccgccaaguaccccaacacguccgaccucgaccgccugacccagagccaccccauccugaacaugaucgacaccaagaaguccagccucaacaucagcggcuacaacuucucccugggggccgcggugaaggccggcgccugcaugcuggacgggggcaacaugcucgagaccaucaaggucagcccccagacgauggacggcauccugaaguccauccugaaggugaagaaggcccucgggauguucaucagcgacaccccgggcgagcggaaccccuacgagaacauccuguacaagaucugccuguccggggacggcuggcccuacaucgccagccgcaccuccaucaccgggcgggcgugggagaacacgguggucgaccucgagagcgacggcaagccccagaaggccgacuccaacaacagcuccaagagccugcaguccgccggcuucaccgccgggcugaccuacagccagcucaugacccugaaggacgccaugcugcagcuggacccgaacgcgaagacguggauggacaucgagggccgccccgaggaccccguggagaucgcccucuaccagcccuccagcgggugcuacauccacuucuuccgggagccgaccgaccugaagcaguucaagcaggacgccaaguacucccacggcaucgacgugaccgaccuguucgccacccagcccgggcucacgagcgccgucaucgacgcgcugccccgcaacauggugaucacgugccagggcuccgacgacauccgcaagcugcucgagagccagggccggaaggacaucaagcugaucgacaucgcccugagcaagaccgacucccgcaaguacgagaacgccgugugggaccaguacaaggaccucugccacaugcacaccggggucguggucgagaagaagaagcggggcgggaaggaggagaucaccccgcacugcgcccugauggacugcaucauguucgacgcggccgugagcggcgggcugaacaccuccgugcuccgcgccguccugccccgggacaugguguuccgcaccagcacgccccgggugguccuguga

SEQ ID NO: 18003 - RNA, 1773 nt, Artificial Sequence
  derived and/or modified CDS sequence (opt1) from LASV(LP;Clade I)__AAF86702__SP-HsPLAT_NP(2-569)
auggacgccaugaagcgcggccugugcugcgugcuccugcugugcggggccgucuucgugagccccagcaacuccaaggagaucaagagcuuccuguggacccagucccuccgccgggagcugagcggcuacugcuccaacaucaagcuccagguggucaaggacgcccaggcccugcugcacgggcuggacuucagcgagguguccaacgugcagcgccucaugcggaagcagaagcgcgacgacgcggaccugaagcggcugcgcgaccucaaccaggccgucaacaaccugguggagcucaagagcacccagcagaagaacgugcugcgggucggcacgcuguccagcgacgaccugaucacccucgccgccgaccuggagaagcugaaguccaaggugauccgcaccgagcggccccucagcuccgggguguacaugggcaaccugagcucccagcagcuggaccagcgccgggcccuccugagcaugaucgggauguccggcggcccgcaggggaaccgcaccggcggggacggcgucgugcgggugugggacgucaagaacgcggagcugcucaacaaccaguucgggacgaugcccagccugacccuggccugccucaccaagcagggccagguggaccugaacgacgccgugcaggcccugaccgaccucggccugaucuacacggcgaaguaccccaacuccagcgaccuggacaugcucacccagagccaccccauccuggggauggucgacaccaagaaguccagccugaacaucuccggcuacaacuucagccucggggccgccgugaaggccggcgccugcaugcuggacggcgggaacaugcuggagaccaucaagguguccccgcagacgauggacggcauccucaagagcauccugaaggucaagcgcucccuggggauguucaucagcgacacccccggcgagcggaaccccuacgagaacauccucuacaagaucugccuguccggggagggcuggcccuacaucgcgagccgcaccuccaucaccggccgggccugggagaacacgcugguggaccucgagagcgacaacaagccgcccaagcugaacuccgccgggagcaacaagucccugcaggccgccggccucaacgcggggcugaccuacagccagcugaugacccugaaggacugcaugcuccagcuggaccccuccagcaagaccuggaucgacaucgagggccgccccgaggacccgguggagaucgcccuguuccagcccuccagcgggugcuacauccacuucuuccgggagcccacggaccucaagcaguucaagcaggacgccaaguacagccacggcaucgacgucaccgaccuguucuccacccagcccggccugaccagcgccgugaucgaggcccucccgcgcaacauggugcugacgugccagggguccgacgacaucaagaagcugcucgagagccagggccggcgcgacaucaagcugaucgacaucucccugagcaaggcggacucccgcaaguucgagaacgccgucugggaccaguacaaggaccucugccacaugcacaccgggguggucguggagaagaagaagcggggcgggaaggaggagaucacgccccacugcgcccugcuggacugcaucauguucgacgccgccaccaccggcagccucaacaucaccacccugcgcgcggugcugccccgggacauggucuuccgcaccuccacgcccaagguggugcucuga

SEQ ID NO: 18004 - RNA, 1773 nt, Artificial Sequence
  derived and/or modified CDS sequence (opt1) from LASV(803213;Clade II)__AAF86704__SP-HsPLAT_NP(2-569)
auggacgccaugaagcgcggccugugcugcgugcuccugcugugcggggccgucuucgugagccccagcgccuccaaggaggugaaguccuuccuguggacccagagccuccgccgggagcugagcggcuacugcuccaacaucaagcugcaggucgugaaggacgcccaggcgcuccugcacgggcuggacuucagcgaggugaacaacguccagcgccucaugcggaagcagaagcgcgacgacggcgaccugaagcggcugcgcgaccucaaccaggccgugaacaaccugguggagcugaaguccacccagcagaaguccauccuccgggucgggacgcugaccagcgacgaccugcucacccuggccgccgaccuggagaagcucaagagcaaggugauccgcaccgagcggccccuguccagcggcguguacauggggaaccuguccacgcagcagcucgagcagcgccgggcccugcugaacaugaucggcauggucggcggggcgcagggcacccagccggggcgcgacggcguggugcgggucugggacgugaagaaccccgaccuccugaacaaccaguucgggaccaugcccagccugacccucgccugccugacgaagcagggccagguggaccugaacgacgccguccucgcccugaccgaccugggccucaucuacaccgcgaaguaccccaacuccagcgaccuggaccgccugucccagagccacccgauccucaacaugguggacaccaagaaguccagccugaacaucagcggguacaacuucucccugggcgccgccgugaaggccggggccugcaugcucgacggcggcaacaugcuggagacgaucaaggucacgccccagaccauggacgggauccucaagagcauccugaaggugaagcggucccugggcauguucgugagcgacacccccggggagcgcaaccccuacgagaacauccuguacaagaucugccucuccggcgacggguggccguacaucgcgagccggaccuccaucgucggccgcgccugggagaacaccaccguggaccuggagagcgacggcaagccccagaagguggggaccgccggcuccaacaagagccugcaguccgccggguuccccacgggccucaccuacagccagcugaugacccugaaggacuccaugaugcagcuggaccccagcgccaagaccuggaucgacaucgaggggcggccggaggaccccgucgagaucgcgcucuaccagcccauguccggcugcuacauccacuucuuccgcgagcccacggaccugaagcaguucaagcaggacgccaaguacagccacggcaucgacguggccgaccuguucccggcccagcccgggcucaccuccgccgucaucgaggcgcugccccggaacauggugcugaccugccagggcagcgacgacaucaagaagcuccuggacucccaggggcgccgcgacaucaagcugaucgacaucagccucagcaagguggacucccggaaguucgagaacgccgucugggaccagugcaaggaccugugccacaugcacaccggcgugguggucgagaagaagaagcgcgggggcaaggaggagaucacgccccacugcgcccugauggacugcaucauguucgacgccgccgugagcggcgggcucaacaucccggugcugcgggcgguccugccccgcgacaugguguuccggaccuccagccccaaggugguccucuga

SEQ ID NO: 18005 - RNA, 1776 nt, Artificial Sequence
  derived and/or modified CDS sequence (opt1) from LASV(GA391;Clade III)__CAA36646__SP-HsPLAT_NP(2-570)
auggacgccaugaagcgcggccugugcugcgugcuccugcugugcggggccgucuucgugagccccagcgccuccaaggaggugcgcagcuuccuguggacccagucccuccggcgcgagcugagcggcuacugcuccaacaucaagcugcaggucgugaaggacgcccaggcgcuccugcacgggcuggacuucagcgagguguccaacguccagcggcucaugcgcaagcagaagcgggacgacggcgaccugaagcgccugcgggaccucaaccaggccgugaacaaccugguggagcucaagagcacccagcagaaguccguccugcgcguggggacccugagcuccgacgaccugcucauccuggccgccgaccuggagaagcucaagagcaaggugacccggaccgagcgcccccuguccagcggcgucuacauggggaaccuguccagccagcagcucgaccagcggcgcgcccugcugaacaugaucggcaugaccggcguguccgggggcgggaagggcgcgagcgacgggaucgugcgggucugggacgugaagaacgccgagcuccugaacaaccaguucggcacgaugccgucccugacccucgccugccugaccaagcagggccagguggaccugaacgacgccguccaggcgcucaccgaccuggggcugaucuacacggccaaguaccccaacagcagcgaccucgaccgccugucccagagccaccccauccugaacaugaucgacaccaagaaguccagccucaacaucuccggcuacaacuucagccugggggccgccgugaaggccggcgcgugcaugcuggacggcgggaacaugcucgagaccaucaaggugagcccccagaccauggacggcauccucaaguccauccugaaggucaagaagucccuggggauguucgugagcgacacgccgggcgagcggaaccccuacgagaacauccuguacaagaucugccuguccggggacggcuggcccuacaucgccagccgcaccuccaucgugggccgggccugggagaacaccgucguggaccucgagcaggacaacaagccccagaagaucgggaacggcgggagcaacaagucccugcagagcgccggcuucgccgcggggcugaccuacucccagcucaugacgcugaaggacuucaagugcuucaaccugaucccgaacgccaagaccuggauggacaucgagggccgccccgaggaccccguggagaucgcccuguaccagcccagcuccggcugcuacguccacuucuuccgggagccgaccgaccucaagcaguucaagcaggacgccaaguacagccacgggaucgacgugaccgaccuguucgccgcgcagcccggccugacgagcgccgucaucgaggcccucccccgcaacauggugaucacgugccagggguccgaggacauccggaagcugcuggagagccagggccgccgcgacaucaagcucaucgacaucacccuguccaaggccgacagccggaaguucgagaacgccgugugggaccaguucaaggaccugugccacaugcacaccggggucgugguggagaagaagaagcgcggcggcaaggaggagaucacgccccacugcgcgcucauggacugcaucauguucgacgccgccgucuccgggggccuggacgccaaggugcugcgggugguccucccgcgcgacaugguguuccggaccagcacccccaaggugguccuguga

SEQ ID NO: 18006 - RNA, 1773 nt, Artificial Sequence
  derived and/or modified CDS sequence (opt1) from LASV(AV;Clade V)__CCA30315__SP-HsPLAT_NP(2-569)
auggacgccaugaagcgcggccugugcugcgugcuccugcugugcggggccgucuucgugagccccagcgccuccaaggaggugaaguccuuccuguggacccagagccuccgccgggagcugagcggcuacugcuccaacaucaagcugcaggucgugaaggacgcccaggcgcuccugcacgggcuggacuucagcgagguguccaacguccagcgccucaugcggaagcagcgccgggacgacagcgaccugaagcgccugcgggaccucaaccaggccgugaacaaccugguggagcugaaguccacccagcagaaguccguccuccgcgugggcacgcugagcagcgacgaccugcucacccuggccgccgaccuggagaagcucaaguccaaggugacccggaccgagcgcccccugagcuccggggucuacaugggcaaccugagcucccagcagcucgaccagcggcgcgcccugcugaaccucaucgggaugacgaacggcagccagggcucccaggcggggcgggacggcguggugcgcgucugggacgugaagaacgccgagcugcugaacaaccaguucgggaccaugccgagccucacccuggccugccugaccaagcagggccagguggaccucaacgacgucgugcaggcccugacggaccuggggcucaucuacaccgcgaaguaccccaacaccagcgaccuggaccggcugacccagucccaccccauccucaacaugaucgacacgaagaaguccagccugaacaucagcggcuacaacuucucccugggcgccgccgugaaggccggggccugcaugcucgacggcgggaacaugcuggagaccaucaaggucagcccccaguccauggacggcauccucaagagcauccugaaggugaagcgcgcgcugggcauguucguguccgacaccccgggggagcggaaccccuacgagaacauccuguacaagaucugccucagcggcgacggguggcccuacaucgccucccgcaccagcaucgucggccgggccugggagaacacggugguggaccuggagaccgacgggaagccccagaagaucggcuccggcaacagcaacaagucccugcagagcgccggguucuccgccggccucaccuacagccagcugaugacccugaaggacgcgaugcugcagcucgacccgaacgccaagacguggauggacaucgaggggcgccccgaggaccccgucgagguggcccuguaccagcccaucuccggcugcuacauccacuucuuccgggagccgaccgaccugaagcaguucaagcaggacgccaaguacagccacgggaucgacaucgccgaccucuucgcggcccagcccggccugaccagcgccgucaucgaggcccugccccgcaacauggugaucacgugccagggcuccgaggacaucaagaagcuccuggagagccaggggcgcaaggacaucaagcugaucgacaucgcccucuccaagaucgacagccggaaguucgagaacgcggugugggaccaguacaaggaccugugccacaugcacaccggcgucgugguggagaagaagaagcgcgggggcaaggaggagaucaccccgcacugcgcccugauggacugcaucauguucgacgccgccgucuccgggggccucaacacccuggugcugcgggcggugcucccccgcgacauggucuuccggaccagcacgccccgcguggugcuguga

SEQ ID NO: 18007 - RNA, 1773 nt, Artificial Sequence
  derived and/or modified CDS sequence (opt1) from LASV(Togo/2016/7082;Clade VI)__AMR44578__SP-HsPLAT_NP(2-569)
auggacgccaugaagcgcggccugugcugcgugcuccugcugugcggggccgucuucgugagccccagcaacuccaaggaggugaaguccuuccuguggacccagagccuccgccgggagcugagcggcuacugcuccaacaucaagcugcaggucgugaaggacgcccaggcccuccugcacgggcuggacuucagcgagguguccaacguccagcgccucaugcggaagcagaagcgcgacgacggcgaccugaagcggcugcgcgaccucaaccaggcggugaacaaccugguggagcucaagagcguccagcagaaguccauccugcggguggggacccugaccagcgacgaccugcucacccuggccgccgaccuggagaagcucaaguccaaggugacccgcaccgagcggccccugagcuccggcgucuacauggggaaccugagcucccagcagcucgaccagcgccgggcccugcugagcaugaucggcauguccggcgggaaccagaacagccagccgaagggcgacgggguggugcgcgucugggacgugaagaacgccgaccuccugaacaaccaguucggcacgaugcccucccugacccucgcgugccugaccaagcagggccagguggaccugaacgacgccguccaggcccucaccgaccuggggcugaucuacacggccaaguaccccaacagcagcgaccucgaccggcugucccagagccaccccauccugaacaugaucgacaccaagaaguccagccucaacaucuccggcuacaacuucagccugggggcggccaucaagaccggcgccugcaugcuggacgggggcaacaugcucgagaccaucaaggugacgccgcagaccauggacggcauccugaaguccauccugaaggugaagcgcagccucgggauguucaucuccgacacccccggcgagcggaaccccuacgagaacauccuguacaagaucugccugagcggggacggcuggcccuacaucgccucccgcaccgccaucaucgggcgggcgugggagaacacggucguggaccucgagagcgacuccaagccgcagaagaucggcagcaacggcuccaacaagagccugcaguccgccggguucgcccccggccugaccuacagccagcucaugacccugaaggacuccaugcugcagcuggaccccaacgccaagaccuggaucgacaucgaggggcgccccgaggacccgguggaggucgcccucuuccagcccaucagcggcugcuacauccacuucuuccgggagcccacggaccugaagcaguucaagcaggacgcgaaguacagccacgggaucgacgugaccgaccuguucgccgcccagcccggccucaccuccgccgugaucgaggcccugccgcgcaacaugguccugaccugccagggcagcgacgacaucaagaagcuccuggacucccaggggcggcgcgacaucaagcugaucgacgugagccucaacaagaucgacucccgcaaguucgagaacgcggucugggaccaguacaaggaccugugccacaugcacacgggcgugguggucgagaagaagaagaagggcgggaaggaggagaucacgccccacugcgcccugcucgacugcaucauguucgacgccgccgugagcgggggccugaacgccaccgugcugcgggcgguccucccccgcgacaugguguuccggaccuccagccccaaggugguccuguga

SEQ ID NO: 18008 - RNA, 1773 nt, Artificial Sequence
  derived and/or modified CDS sequence (opt1) from LASV(KAK-428;Clade n.d. (VII))__ANH09741__SP-HsPLAT_NP(2-569)
auggacgccaugaagcgcggccugugcugcgugcuccugcugugcggggccgucuucgugagccccagcaacuccaaggaggugaaguccuuccuguggacccagagccuccgccgggagcugagcggcuacugcaccaacaucaagcugcaggucgugaaggacgcccaggcccuccugcacgggcuggacuucuccgaggugagcaacguccagcgccucaugcggaagcagaagcgcgacgacaacgaccugaagcggcugcgcgaccucaaccaggcggugaacaaccugguggagcugaaguccguccagcagaaguccgugcucaaggugggcacgcugaacagcgacgaccugcucacccuggccgccgaccuggagaagcucaagagcaaggucgugcggaccgagcgcccccuguccagcgggguguacaugggcaaccuguccagccagcagcucgaccagcggcgcgcccugcugaacaugaucgggauggccggcggcucccaggggaaccagccgagccgggacggcgucgugcgcgugugggacgucaagaacgcggaccuccugaacaaccaguucgggaccaugcccucccugacgcucgccugccugaccaagcagggccagguggaccugaacgacgugguccucgcccugaccgaccuggggcucaucuacaccgccaaguaccccaacagcuccgaccuggaccggcugagccagaaccaccccgugcucaacaugaucgacgugaacaagagcucccugaacaucagcggcuacaacuucucccugggcgcggccgucaaggccggggccugcaugcucgacggcgggaacaugcuggagacgaucaagaucagcccgcagaccguggacggcauccugaaguccauccucaaggugaagcgcgcccugggcauguucgucagcgacacccccggggagcggaaccccuacgagaacauccuguacaaggugugccucuccggcaacggguggcccuacaucgcgagccgcaccuccaucgucggccgggccugggagaacacggugguggaccuggagagcaacaagaaccagccgaaggucgggaacaacggcuccaacaagaugcugcagagcuccggcuucgccaccgggcucaccuacagccagcugaugacccugcgcgacuccaugcugcagcucgaccccacggccaagaccuggaucgacaucgagggccggcccgaggaccccguggagcuggcccuguuccagccgagcuccgggugcuacauccacuucuuccgcgagcccaccgaccucaagcaguucaagcaggacgcgaaguacagccacggcaucgacgugaacgaccuguucuccgcccagcccgggcugaccagcgccguccucgaggcccugccccggaacauggugcugacgugccagggcagcgacgacauccgcaagcuccuggacucccaggaccgcaaggacaucaagcugaucgacaucagccucuccaaggccgacgcgcggaaguucgagaacgacgugugggaccaguucaaggaccugugccacaugcacaccggcaucgucguggagaagaagaagaagggcgggaagcaggagaugaccccgcacugcgcccugcucgacugcaucauguucgacgccgccgugagcgggggccugaacguccccacccugcgcgccgugcuccccacggacaugguguuccggaccaucaccaccaaggucgugcuguga

SEQ ID NO: 18009 - RNA, 1773 nt, Artificial Sequence; identical to SEQ ID NO: 18003
  derived and/or modified CDS sequence (opt1) from LASV(Pinneo-NIG-1969;Clade I)__AIT17837__SP-HsPLAT_NP(2-569)

SEQ ID NO: 18010 - RNA, 1773 nt, Artificial Sequence
  derived and/or modified CDS sequence (opt1) from LASV(ISTH0009-NIG-2011;Clade II)__AIT17405__SP-HsPLAT_NP(2-569)
auggacgccaugaagcgcggccugugcugcgugcuccugcugugcggggccgucuucgugagccccagcguguccaaggaggucaagagcuuccuguggacccagucccuccgccgggagcugagcggcuacugcuccaacaucaagcuccagguggugaaggacgcccaggcccugcugcacgggcuggacuucagcgaggucuccaacgugcagcgccucaugcggaagcagaagcgcgacgacagcgaccugaagcggcugcgcgaccucaaccaggcggugaacaaccuggucgagcugaaguccacccagcagaaguccauccuccgggugggcacccugaccagcgacgaccugcucacccuggccgccgaccuggagaagcucaagagcaaggugauccgcaccgagcggccccuguccagcggggucuacaugggcaaccuguccacgcagcagcucgagcagcgccgggcccugcugaacaugaucgggauggugggcggcgcccaggggacccagccgggccgcgacggggugguccgggugugggacgugaagaaccccgaccuccugaacaaccaguucggcaccaugcccagccugacccucgcgugccugacgaagcaggggcaggucgaccugaacgacgccgugcucgcccugaccgaccugggccucaucuacaccgccaaguaccccaacuccagcgaccuggaccgccugucccagagccacccgauccucaacaugguggacaucaagaaguccagccugaacaucagcggcuacaacuucucccugggggcggccgucaaggccggcgccugcaugcucgacgggggcaacaugcuggagaccaucaaggugacgccccagaccauggacggcauccucaagagcauccugaaggugaagcggucccuggggauguucgucagcgacacccccggcgagcgcaaccccuacgagaacauccuguacaagaucugccucuccggggacggcuggccguacaucgccagccggaccuccaucguggggcgcgcgugggagaacacgaccguggaccuggagagcgacggcaagccccagaaggucggcuccgccgggagcaacaagucccugcagagcgccggcuuccccaccgggcucaccuacucccagcugaugacgcugaaggacagcaugaugcagcuggaccccuccgccaagaccuggaucgacaucgagggccggccggaggaccccguggagaucgcccucuaccagcccaugagcgggugcuacauccacuucuuccgcgagcccaccgaccugaagcaguucaagcaggacgcgaaguacucccacggcaucgacgucgccgaccuguucccggcccagcccggccucaccagcgccgugaucgaggcccugccccggaacauggugcugacgugccaggggagcgacgacaucaagcgccuccuggacucccagggccgccgggacaucaagcugaucgacaucgcgcucagcaaggccgacucccgccgguucgagaacgccgucugggaccagugcaaggaccugugccacaugcacaccggggugguggucgagaagaagaagcgcggcgggaaggaggagaucacgccccacugcgcccugauggacugcaucauguacgacgccgcggugagcggcggccucaacaucccggugcugcgggccguccugccccgcgacaugguguuccggaccuccagccccaaggugguccucuga

SEQ ID NO: 18011 - RNA, 1773 nt, Artificial Sequence
  derived and/or modified CDS sequence (opt1) from LASV(ISTH2010-NIG-2012;Clade II)__AIT17483__SP-HsPLAT_NP(2-569)
auggacgccaugaagcgcggccugugcugcgugcuccugcugugcggggccgucuucgugagccccagcgccuccaaggaggugaaguccuuccuguggacccagagccuccgccgggagcugagcggcuacugcuccaacaucaagcugcaggucgugaaggacgcccaggcgcuccugcacgggcuggacuucagcgagguguccaacguccagcgccucaugcggaagcagaagcgcgacgacagcgaccugaagcggcugcgcgaccucaaccaggccgugaacaaccugguggagcugaaguccacccagcagaaguccauccuccgggucggcacgcugaccagcgacgaccugcucacccuggccgccgaccuggagaagcucaagagcaaggugauccgcaccgagcggccccuguccagcgggguguacaugggcaaccuguccacgcagcagcucgagcagcgccgggcccugcugaaccucaucgggauggucggcggcgcgcaggggacccagccgggccgcgacgggguggugcgggucugggacgugaagaaccccgaccugcugaacaaccaguucggcaccaugcccagccucacccuggccugccugacgaagcagggccagguggaccucaacgacgccguccuggcccugaccgaccucgggcugaucuacaccgcgaaguaccccaacuccagcgaccuggaccgccucucccagagccacccgauccugaacaugguggacaccaagaaguccagccugaacaucagcggcuucaacuucucccucggggccgccgugaaggccggcgccugcaugcuggacgggggcaacaugcuggagacgaucaaggucacgccccagaccauggacggcauccucaagagcauccugaaggugaagaagucccuggggauguucgugagcgacacccccggcgagcggaaccccuacgagaacauccucuacaagaucugccuguccggggacggcuggccguacaucgcgagccgcaccuccaucgucgggcgggccugggagaacaccaccguggaccuggagagcgacggcaagccccacaaggugggcaccgccggguccaacaagagccuccaguccgccggcuuccccacggggcugaccuacagccagcugaugacccugaaggacuccaugaugcagcucgaccccagcgccaagaccuggaucgacaucgagggccgcccggaggaccccgucgagaucgcgcuguaccagcccauguccgggugcuacauccacuucuuccgggagcccacggaccugaagcaguucaagcaggacgccaaguacagccacggcaucgacguggccgaccucuucccggcccagcccggccugaccuccgccgucaucgaggcgcugccccgcaacauggugcugaccugccaggggagcgacgacaucaagcggcuccuggacagccagggccgccgcgacaucaagcucaucgacaucgcccuguccaaggccgacagccggcgcuucgagaacgccgugugggaccagugcaaggaccugugccacaugcacaccggggucgugguggagaagaagaagcggggcgggaaggaggagaucacgccccacugcgcccucauggacugcaucauguacgacgcggccgucuccggcggccugaacaucccggugcugcgcgccgugcucccccgggacauggucuuccgcaccagcucccccaagguggugcuguga

SEQ ID NO: 18012 - RNA, 1773 nt, Artificial Sequence
  derived and/or modified CDS sequence (opt1) from LASV(Lassa virus/H.sapiens-wt/NGA/2015/ISTH_0543;Clade II)__AVO03640__SP-HsPLAT_NP(2-569)
auggacgccaugaagcgcggccugugcugcgugcuccugcugugcggggccgucuucgugagccccagcgccuccaaggaggugaaguccuuccuguggacccagagccuccgccgggagcugagcggcuacugcuccaacaucaagcugcaggucgugaaggacgcccaggcgcuccugcacgggcuggacuucagcgagguguccaacguccagcgccucaugcggaagcagaagcgcgacgacagcgaccugaagcggcugcgcgaccucaaccaggccgugaacaaccugguggagcugaaguccacccagcagaaguccauccuccgggucggcacgcugaccagcgacgaccugcucacccuggccgccgaccuggagaagcucaagagcaaggugauccgcaccgagcggccccuguccagcgggguguacaugggcaaccuguccacgcagcagcucgagcagcgccgggcccugcugaacaugaucgggauggucggcggcgcgcaggggacccagccgggccgcgacgggguggugcgggucugggacgugaagaaccccgaccuccugaacaaccaguucggcaccaugcccagccugacccucgccugccugacgaagcagggccagguggaccugaacgacgccguccucgcccugaccgaccuggggcucaucuacaccgcgaaguaccccaacuccagcgaccuggaccgccugucccagagccacccgauccucaacaugguggacaccaagaaguccagccugaacaucagcggcuacaacuucucccugggggccgccgugaaggccggcgccugcaugcucgacgggggcaacaugcuggagacgaucaaggucacgccccagaccauggacggcauccucaagagcauccugaaggugaagaagucccuggggauguucgugagcgacacccccggcgagcggaaccccuacgagaacauccuguacaagaucugccucuccggggacggcuggccguacaucgcgagccgcaccuccaucgucgggcgggccugggagaacaccaccguggaccuggagagcgacggcaagccccagaaggugggcuccgccgggagcaacaagucccugcagagcgccggcuuccccaccgggcucacguacucccagcugaugacccugaaggacagcaugaugcagcuggaccccuccgccaagaccuggaucgacaucgagggccgcccggaggaccccgucgagaucgcgcucuaccagcccaugagcgggugcuacauccacuucuuccgggagcccaccgaccugaagcaguucaagcaggacgccaaguacucccacggcaucgacguggccgaccuguucccggcccagcccggccucacgagcgccgucaucgaggcgcugccccgcaacauggugcugaccugccaggggagcgacgacaucaagcggcuccuggacucccagggccgcaaggacaucaagcugaucgacaucgcccucagcaaggccgacucccgccgguucgagaacgccgugugggaccagugcaaggaccugugccacaugcacaccggggucgugguggagaagaagaagcgcggcgggaaggaggagaucacgccccacugcgcccugauggacugcaucauguacgacgcggccgucagcggcggccucaacaucccggugcugcgggccgugcugccccgcgacauggucuuccggaccuccagccccaagguggugcucuga

SEQ ID NO: 18013 - RNA, 1773 nt, Artificial Sequence
  derived and/or modified CDS sequence (opt1) from LASV(Lassa virus/H.sapiens-wt/NGA/2016/ISTH_0009;Clade II)__AVO03572__SP-HsPLAT_NP(2-569)
auggacgccaugaagcgcggccugugcugcgugcuccugcugugcggggccgucuucgugagccccagcgccuccaaggaggugaaguccuuccuguggacccagagccuccgccgggagcugagcggcuacugcuccaacaucaagcugcaggucgugaaggacgcccaggcgcuccugcacgggcuggacuucagcgagguguccaacguccagcgccucaugcggaagcagaagcgcgacgacagcgaccugaagcggcugcgcgaccucaaccaggccgugaacaaccugguggagcugaaguccacccagcagaaguccauccuccgggucggcacgcugaccagcgacgaccugcucacccuggccgccgaccuggagaagcucaagagcaaggugauccgcaccgagcggccccuguccagcgggguguacaugggcaaccuguccacgcagcagcucgagcagcgccgggcccugcugaacaugaucgggauggucggcggcgcgcaggggacccagccgggccgcgacgggguggugcgggucugggacgugaagaaccccgaccuccugaacaaccaguucggcaccaugcccagccugacccucgccugccugacgaagcagggccagguggaccugaacgacgccguccucgcccugaccgaccuggggcucaucuacaccgcgaaguaccccaacuccagcgaccuggaccgccugucccagagccacccgauccucaacaugguggacaccaagaaguccagccugaacaucagcggcuacaacuucucccugggggccgccgugaaggccggcgccugcaugcucgacgggggcaacaugcuggagacgaucaaggucacgccccagaccauggacggcauccucaagagcauccugaaggugaagaagucccuggggauguucgugagcgacacccccggcgagcggaaccccuacgagaacauccuguacaagaucugccucuccggggacggcuggccguacaucgcgagccgcaccuccaucgucgggcgggccugggagaacaccaccguggaccuggagagcgacggcaagccccagaaggugggcuccgccgggagcaacaagucccugcagagcgccggcuuccccaccgggcucacguacucccagcugaugacccugaaggacagcaugaugcagcuggaccccuccgccaagaccuggaucgacaucgagggccgcccggaggaccccgucgagaucgcgcucuaccagcccaugagcgggugcuacauccacuucuuccgggagcccaccgaccugaagcaguucaagcaggacgccaaguacucccacggcaucgacguggccgaccuguucccggcccagcccggccucacgagcgccgucaucgaggcgcugccccgcaacauggugcugaccugccaggggagcgacgacaucaagcggcuccuggacucccagggccgccgcgacaucaagcugaucgacaucgcccucagcaaggccgacucccggcgcuucgagaacgccgugugggaccagugcaaggaccugugccacaugcacaccggggucgugguggagaagaagaagcggggcgggaaggaggagaucacgccccacugcgcccugauggacugcaucauguacgacgcggccgucagcggcggccucaacaucccggugcugcgcgccgugcugccccgggacauggucuuccgcaccuccagccccaagguggugcucuga

SEQ ID NO: 18014 - RNA, 1773 nt, Artificial Sequence
  derived and/or modified CDS sequence (opt1) from LASV(Lassa virus/H.sapiens-wt/NGA/2016/ISTH_0017;Clade II)__AVO03568__SP-HsPLAT_NP(2-569)
auggacgccaugaagcgcggccugugcugcgugcuccugcugugcggggccgucuucgugagccccagcgccuccaaggaggugaaguccuuccuguggacccagagccuccgccgggagcugagcggcuacugcuccagcaucaagcugcaggucgugaaggacgcccaggcgcuccugcacgggcuggacuucuccgaggugagcaacguccagcgccucaugcggaagcagaagcgcgacgacuccgaccugaagcggcugcgcgaccucaaccaggccgugaacaaccugguggagcucaagagcacccagcagaaguccauccugcgggucggcacgcugaccagcgacgaccugcucacccuggccgccgaccuggagaagcucaaguccaaggugauccgcaccgagcggccccugagcuccgggguguacaugggcaaccugagcacgcagcagcucgagcagcgccgggcccugcugaacaugaucgggauggcgggcggcgcccaggggacccagccgggccgcgacggggucgugcgggugugggacgucaagaaccccgaccuccugaacaaccaguucggcaccaugcccucccugacccucgccugccugacgaagcagggccagguggaccugaacgacgccgugcucgcgcugaccgaccuggggcucaucuacaccgccaaguaccccaacagcuccgaccuggaccgccugagccagagccacccgauccucaacauggucgacaccaagaaguccagccugaacaucuccggcuacaacuucagccugggggccgccgugaaggccggcgcgugcaugcucgacgggggcaacaugcuggagacgaucaaggugacgccccagaccauggacggcauccugaaguccauccucaaggucaagcggagccuggggauguucguguccgacgcccccggcgagcgcaaccccuacgagaacauccuguacaagaucugccucagcggggacggcuggccguacaucgccucccggaccagcaucguggggcgcgccugggagaacaccaccgucgaccuggaguccgacggcaagccccagaaggugggcgccaccgggagcaacaagucccugcagagcgcgggcuuccccaccgggcucacguacucccagcugaugacccugaaggacagcaugaugcagcuggaccccuccgccaagaccuggaucgacaucgagggccggccggaggaccccguggaggucgcccucuaccagcccgugagcgggugcuacauccacuucuuccgcgagcccaccgaccugaagcaguucaagcaggacgccaaguacucccacggcaucgacgucgccgaccuguucccggcgcagcccggccucacgagcgccgugaucgaggcccugccccggaacauggugcugaccugccaggggagcgacgacaucaagaagcuccuggacucccagggccgcaaggacaucaagcugaucgacaucgcccucagcaaggccgacucccgccgguucgagaacgcggucugggaccagugcaaggaccugugccacaugcacaccggggugguggucgagaagaagaagcgcggcgggaaggaggagaucacgccccacugcgcccugauggacugcaucauguacgacgccgccgugagcggcggccucaacaucccggugcugcgggcgguccugccccgcgacaugguguuccggaccuccagccccaaggugguccucuga

SEQ ID NO: 18015 - RNA, 1773 nt, Artificial Sequence
  derived and/or modified CDS sequence (opt1) from LASV(Lassa virus/H.sapiens-wt/NGA/2018/ISTH_0959;Clade II)__AVV65100__SP-HsPLAT_NP(2-569)
auggacgccaugaagcgcggccugugcugcgugcuccugcugugcggggccgucuucgugagccccagcgccuccaaggaggugaaguccuuccuguggacccagagccuccgccgggagcugagcggcuacugcuccaacaucaagcugcaggucgugaaggacgcccaggcgcuccugcacgggcuggacuucagcgagguguccaacguccagcgccucaugcggaagcagaagcgcgacgacagcgaccugaagcggcugcgcgaccucaaccaggccgugaacaaccugguggagcugaaguccacccagcagaaguccauccuccgggucggcacccugaccagcgacgaccugcucacccuggccgccgaccuggagaagcucaagagcaaggugauccgcaccgagcggccccuguccagcgggguguacaugggcaaccuguccacgcagcagcucgagcagcgccgggcccugcugaaccucaucgggauggucggcggcgcgcaggggacccagccgggccgcgacgggguggugcgggucugggacgugaagaaccccgaccugcugaacaaccaguucggcaccaugcccagccucacccuggccugccugacgaagcagggccagguggaccucaacgacgucgugcuggcccugaccgaccucgggcugaucuacaccgccaaguaccccaacuccagcgaccuggaccgccucucccagagccacccgauccugaacaugguggacaccaagaaguccagccugaacaucagcggcuucaacuucucccucggggcggccgucaaggccggcgccugcaugcuggacgggggcaacaugcuggagacgaucaaggugacgccccagaccauggacggcauccucaagagcauccugaaggugaagaagucccuggggauguucgucagcgacacccccggcgagcggaaccccuacgagaacauccucuacaagaucugccuguccggggacggcuggccguacaucgccagccgcaccuccaucguggggcgggcgugggagaacaccaccguggaccuggagagcgacggcaagccccacaaggucggcaccgccggguccaacaagagccuccaguccgccggcuuccccacggggcugaccuacagccagcugaugacccugaaggacuccaugaugcagcucgaccccagcgccaagaccuggaucgacaucgagggccgcccggaggaccccguggagaucgcccuguaccagcccauguccgggugcuacauccacuucuuccgggagcccacggaccugaagcaguucaagcaggacgcgaaguacagccacggcaucgacgucgccgaccucuucccggcccagcccggccugaccuccgccgugaucgaggcccugccccgcaacauggugcugaccugccaggggagcgacgacaucaagcggcuccuggacagccagggccgcaaggacaucaagcucaucgacaucgcgcuguccaagaccgacagccgccgguucgagaacgccgucugggaccagugcaaggaccugugccacaugcacacgggggugguggucgagaagaagaagcgcggcgggaaggaggagaucacgccccacugcgcccucauggacugcaucauguacgacgccgccguguccggcggccugaacaucccggugcugcgggcgguccucccccgcgacaugguguuccggaccagcucccccaaggugguccuguga

SEQ ID NO: 18016 - RNA, 1773 nt, Artificial Sequence
  derived and/or modified CDS sequence (opt1) from LASV(LASV003-NIG-2008;Clade II)__AIT17581__SP-HsPLAT_NP(2-569)
auggacgccaugaagcgcggccugugcugcgugcuccugcugugcggggccgucuucgugagccccagcgccuccaaggaggugaaguccuuccuguggacccagagccuccgccgggagcugagcggcuacugcuccagcaucaagcugcaggucgugaaggacgcccaggcgcuccugcacgggcuggacuucuccgaggugagcaacguccagcgccucaugcggaagcagaagcgcgacgacuccgaccugaagcggcugcgcgaccucaaccaggccgugaacaaccugguggagcucaagagcacccagcagaaguccguccugcgggugggcacccugaccagcgacgaccugcucacccuggccgccgaccuggagaagcucaaguccaaggugauccgcaccgagcggccccugagcuccggggucuacaugggcaaccugagcgcccagcagcucgagcagcgccggacgcugcugaacaugaucgggauggugggcggcgcgcaggggacccagccgggccgcgacggggugguccgggugugggacgugaagaaccccgaccuccugaacaaccaguucggcaccaugcccucccugacccucgccugccugacgaagcaggggcaggucgaccugaacgacguggugcucgcccugaccgaccugggccucaucuacaccgccaaguaccccaacagcuccgaccuggaccgccugagccagagccacccgauccucuccauggucgacaccaagaaguccagccugaacaucagcggcuacaacuucucccugggggcggccgugaaggccggcgccugcaugcucgacgggggcaacaugcuggagacgaucaaggugacgccccagaccauggacggcauccucaagagcauccugaaggucaagaagucccuggggauguucgugagcgacacccccggcgagcggaaccccuacgagaacauccuguacaagaucugccucuccggggacggcuggccguacaucgccagccgcaccuccaucguggggcgggcgugggagaacaccaccgucgaccuggagagcgacggcaagccccagaaggugggcaccgccggguccaacaagagccugcaguccgccggcuuccccacggggcucaccuacagccagcugaugacccugaaggacuccaugaugcagcuggaccccagcgccaagaccuggaucgacaucgagggccgcccggaggaccccgucgagaucgcccucuaccagcccauguccgggugcuacauccacuucuuccgggagcccacggaccugaagcaguucaagcaggacgcgaaguacagccacggcaucgacgugaccgaccuguucccggcccagcccggccucaccagcgccgugaucgaggcccugccccgcaacaugguccugaccugccagggguccgacgacaucaagcggcuccuggacagccagggccgccgcgacaucaagcugaucgacaucgcccucuccaaggcggacagccggcgcuucgagaacgccgugugggaccagugcaaggaccugugccacaugcacacggggguggucguggagaagaagaagcggggcgggaaggaggagaucacgccccacugcgcccugauggacugcaucauguacgacgccgccguguccggcggccucaacaucccgguccugcgcgcggugcugccccgggacaugguguuccgcaccagcucccccaaggucgugcucuga

SEQ ID NO: 18017 - RNA, 1773 nt, Artificial Sequence
  derived and/or modified CDS sequence (opt1) from LASV(LASV035-NIG-2009;Clade II)__AIT17589__SP-HsPLAT_NP(2-569)
auggacgccaugaagcgcggccugugcugcgugcuccugcugugcggggccgucuucgugagccccagcgccuccaaggaggugaaguccuuccuguggacccagagccuccgccgggagcugagcggcuacugcuccagcaucaagcugcaggucgugaaggacgcccaggcgcuccugcacgggcuggacuucuccgaggugagcaacguccagcgccucaugcggaagcagaagcgcgacgacuccgaccugaagcggcugcgcgaccucaaccaggccgugaacaaccugguggagcucaagagcacccagcagaaguccauccugcgggucggcacgcugaccagcgacgaccugcucacccuggccgccgaccuggagaagcucaaguccaaggugauccgcaccgagcggccccugagcuccgggguguacaugggcaaccugagcgcccagcagcucgagcagcgccgggcgcugcugaacaugaucgggauggucggcggcgcccaggggacgcagccgggccgcgacgggguggugcgggucugggacgugaagaaccccgaccuccugaacaaccaguucggcaccaugcccucccugacccucgccugccugaccaagcagggccagguggaccugaacgacgccguccucgcgcugacggaccuggggcucaucuacaccgccaaguaccccaacagcuccgaccuggaccgccugagccagagccacccgauccucaacaugguggacaccaagaaguccagccugaacaucuccggcuacaacuucagccugggggccgccgugaaggccggcgcgugcaugcucgacgggggcaacaugcuggagaccaucaaggucacgccccagaccauggacggcauccugaaguccauccucaaggugaagcggagccuggggauguucguguccgacacccccggcgagcgcaaccccuacgagaacauccuguacaagaucugccucagcggggacggcuggccguacaucgccucccggaccagcaucgucgggcgcgccugggagaacacgaccguggaccuggaguccgacggcaagccccagaaggugggcaccaccgggagcaacaagucccugcagagcgccggcuuccccacggggcucaccuacucccagcugaugacccugaaggacagcaugaugcagcuggaccccuccgccaagaccuggaucgacaucgagggccggccggaggaccccgucgagaucgcgcucuaccagcccaugagcgggugcuacauccacuucuuccgcgagcccacggaccugaagcaguucaagcaggacgccaaguacucccacggcaucgacguggccgaccuguucccggcccagcccggccucaccagcgccgucaucgaggcgcugccccggaacauggugcugaccugccaggggagcgacgacaucaagaagcuccuggacucccagggccgccgcgacaucaagcugaucgacaucgcccucagcaaggccgacucccggaaguucgagaacgccgugugggaccagugcaaggaccugugccacaugcacaccggggucgugguggagaagaagaagcgcggcgggaaggaggagaucacgccccacugcgcccugauggacugcaucauguacgacgcggccgucagcggcggccucaacaucccggugcugcgggccgugcugccccgcgacauggucuuccggaccuccagccccaagguggugcucuga

SEQ ID NO: 18018 - RNA, 1773 nt, Artificial Sequence
  derived and/or modified CDS sequence (opt1) from LASV(LASV1000-NIG-2009;Clade II)__AIT17783__SP-HsPLAT_NP(2-569)
auggacgccaugaagcgcggccugugcugcgugcuccugcugugcggggccgucuucgugagccccagcgccuccaaggaggugaaguccuuccuguggacccagagccuccgccgggagcugagcggcuacugcuccaacaucaagcugcaggucgugaaggacgcccaggcgcuccugcacgggcuggacuucagcgagguguccaacguccagcgccucaugcggaagcagaagcgcgacgacagcgaccugaagcggcugcgcgaccucaaccaggccgugaacaaccugguggagcugaaguccacccagcagaaguccauccuccgggucggcacgcugaccagcgacgaccugcucacccuggccgccgaccuggagaagcucaagagcaaggugauccgcaccgagcggccccuguccagcgggguguacaugggcaaccuguccacgcagcagcucgagcagcgccgggcccugcugaacaugaucgggauggucggcggcgcgcaggggacccagccgggccgcgacgggguggugcgggucugggacgugaagaaccccgaccuccugaacaaccaguucggcaccaugcccagccugacccucgccugccugacgaagcagggccagguggaccugaacgacgucgugcucgcccugaccgaccuggggcucaucuacaccgccaaguaccccaacuccagcgaccuggaccgccugucccagagccacccgauccucaacaugguggacaccaagaaguccagccugaacaucagcggcuacaacuucucccugggggcggccgucaaggccggcgccugcaugcucgacgggggcaacaugcuggagacgaucaaggugacgccccagaccauggacggcauccucaagagcauccugaaggugaagaagucccuggggauguucgucagcgacacccccggcgagcggaaccccuacgagaacauccuguacaagaucugccucuccggggacggcuggccguacaucgccagccgcaccuccaucguggggcgggcgugggagaacaccaccguggaccuggagagcgacggcaagccccagaaggucggcaccgccggguccaacaagagccugcaguccgccggcuuccccacggggcucaccuacagccagcugaugacccugaaggacuccaugaugcagcuggaccccagcgccaagaccuggaucgacaucgagggccgcccggaggaccccguggagaucgcccucuaccagcccgucuccgggugcuacauccacuucuuccgggagcccacggaccugaagcaguucaagcaggacgcgaaguacagccacggcaucgacguggccgaccuguucccggcccagcccggccucaccuccgccgugaucgaggcccugccccgcaacaugguccugaccugccaggggagcgacgacaucaagcggcuccuggacagccagggccgccgcgacaucaagcugaucgacaucgcgcucuccaaggccgacagccggcgcuucgagaacgccgugugggaccagugcaaggaccugugccacaugcacaccgggguggucguggagaagaagaagcggggcgggaaggaggagaucacgccccacugcgcccugauggacugcaucauguacgacgccgcgguguccggcggccucaacaucccgguccugcgcgccgugcugccccgggacaugguguuccgcaccagcucccccaaggucgugcucuga

SEQ ID NO: 18019 - RNA, 1773 nt, Artificial Sequence
  derived and/or modified CDS sequence (opt1) from LASV(LASV221-NIG-2010;Clade II)__AIT17625__SP-HsPLAT_NP(2-569)
auggacgccaugaagcgcggccugugcugcgugcuccugcugugcggggccgucuucgugagccccagcgccuccaaggaggugaaguccuuccuguggacccagagccuccgccgggagcugagcggcuacugcuccagcaucaagcugcaggucgugaaggacgcccaggcgcuccugcacgggcuggacuucuccgaggugagcaacguccagcgccucaugcggaagcagcgccgggacgacuccgaccugaagcgccugcgggaccucaaccaggccgugaacaaccugguggagcucaagagcacccagcagaaguccauccugcgcgucggcacgcugaccagcgacgaccugcucacccuggccgccgaccuggagaagcucaaguccaaggugauccggaccgagcgcccccugagcuccgggguguacaugggcaaccugagcacgcagcagcucgagcagcggcgcgcccugcugaacaugaucgggauggucggcggcgcgcaggggacccagccgggccgggacgggguggugcgcgucugggacgugaagaaccccgaccuccugaacaaccaguucggcaccaugcccucccugacccucgccugccugacgaagcagggccagguggaccugaacgacgccguccucgcccugaccgaccuggggcucaucuacaccgcgaaguaccccaacagcuccgaccuggaccggcugagccagagccacccgauccucaacaugguggacaccaagaaguccagccugaacaucuccggcuacaacuucagccugggggccgccgugaaggccggcgccugcaugcucgacgggggcaacaugcuggagacgaucaaggucacgccccagaccguggacggcauccugaaguccauccucaaggugaagcgcagccuggggauguucgucuccgacacccccggcgagcggaaccccuacgagaacauccuguacaagaucugccucagcggggacggcuggccguacaucgcgucccgcaccagcaucguggggcgggccugggagaacaccaccguggaccuggaguccgacggcaagccccagaaggucggcaccgccgggagcaacaagucccugcagagcgccggcuuccccacggggcucaccuacucccagcugaugacccugaaggacagcaugaugcagcuggaccccuccgccaagaccuggaucgacaucgagggccgcccggaggaccccguggagaucgcgcucuaccagcccaugagcgggugcuacauccacuucuuccgggagcccacggaccugaagcaguucaagcaggacgccaaguacucccacggcaucgacgucgccgaccuguucccggcccagcccggccucaccagcgccgugaucgaggcgcugccccgcaacauggugcugaccugccaggggagcgacgacaucaagcgccuccuggacucccagggccggcgcgacaucaagcugaucgacaucgcccucagcaaggccgacucccggaaguucgagaacgccgucugggaccagugcaaggaccugugccacaugcacaccggggugguggucgagaagaagaagcgcggcgggaaggaggagaucacgccccacugcgcccugauggacugcaucauguacgacgcggccgugagcggcggccucaacaucccggugcugcgggccguccugccccgcgacaugguguuccggaccuccagccccaaggugguccucuga

SEQ ID NO: 18020 - RNA, 1773 nt, Artificial Sequence
  derived and/or modified CDS sequence (opt1) from LASV(LASV237-NIG-2010;Clade II)__AIT17639__SP-HsPLAT_NP(2-569)
auggacgccaugaagcgcggccugugcugcgugcuccugcugugcggggccgucuucgugagccccagcgccuccaaggaggugaaguccuuccuguggacccagagccuccgccgggagcugagcggcuacugcuccaacaucaagcugcaggucgugaaggacgcccaggcgcuccugcacgggcuggacuucagcgagguguccaacguccagcgccucaugcggaagcagaagcgcgacgacagcgaccugaagcggcugcgcgaccucaaccaggccgugaacaaccugguggagcugaaguccacccagcagaaguccauccuccgggucggcacccugaccagcgacgaccugcucacccuggccgccgaccuggagaagcucaagagcaaggugauccgcaccgagcggccccuguccagcgggguguacaugggcaaccuguccacgcagcagcucgagcagcgccgggcccugcugaacaugaucgggauggucggcggcgcgcaggggacccagccgggccgcgacgggguggugcgggucugggacgugaagaaccccgaccuccugaacaaccaguucggcaccaugcccagccugacccucgccugccugacgaagcagggccagguggaccugaacgacgccguccucgcccugaccgaccuggggcucaucuacaccgcgaaguaccccaacuccagcgaccuggaccgccugucccagagccacccgauccucaacaugguggacaucaagaaguccagccugaacaucagcggcuacaacuucucccugggggccgccgugaaggccggcgccugcaugcucgacgggggcaacaugcuggagaccaucaaggucacgccccagaccauggacggcauccucaagagcauccugaaggugaagcggucccuggggauguucgugagcgacacccccggcgagcgcaaccccuacgagaacauccuguacaagaucugccucuccggggacggcuggccguacaucgcgagccggaccuccaucgucgggcgcgccugggagaacacgaccguggaccuggagagcgacggcaagccccagaaggugggcuccgccgggagcaacaagucccugcagagcgccggcuuccccaccgggcucaccuacucccagcugaugacgcugaaggacagcaugaugcagcuggaccccuccgccaagaccuggaucgacaucgagggccggccggaggaccccgucgagaucgcgcucuaccagcccaugagcgggugcuacauccacuucuuccgcgagcccaccgaccugaagcaguucaagcaggacgccaaguacucccacggcaucgacguggccgaccuguucccggcccagcccggccucaccagcgccgucaucgaggcgcugccccggaacauggugcugacgugccaggggagcgacgacaucaagcgccuccuggacucccagggccgccgggacaucaagcugaucgacaucgcccucagcaaggccgacucccgccgguucgagaacgccgugugggaccagugcaaggaccugugccacaugcacaccggggucgugguggagaagaagaagcgcggcgggaaggaggagaucacgccccacugcgcccugauggacugcaucauguacgacgcggccgucagcggcggccucaacaucccggugcugcgggccgugcugccccgcgacauggucuuccggaccuccagccccaagguggugcucuga

SEQ ID NO: 18021 - RNA, 1773 nt, Artificial Sequence
  derived and/or modified CDS sequence (opt1) from LASV(LASV253-NIG-2011;Clade II)__AIT17671__SP-HsPLAT_NP(2-569)
auggacgccaugaagcgcggccugugcugcgugcuccugcugugcggggccgucuucgugagccccagcgccuccaaggaggugaaguccuuccuguggacccagagccuccgccgggagcugagcggcuacugcuccagcaucaagcugcaggucgugaaggacgcccaggcgcuccugcacgggcuggacuucuccgaggugagcaacguccagcgccucaugcggaagcagaagcgcgacgacuccgaccugaagcggcugcgcgaccucaaccaggccgugaacaaccugguggagcucaagagcacccagcagaaguccguccugcgggugggcacccugaccagcgacgaccugcucacccuggccgccgaccuggagaagcucaaguccaaggugauccgcaccgagcggccccugagcuccggggucuacaugggcaaccugagcacgcagcagcucgagcagcgccgggcccugcugaacaugaucgggauggugggcggcgcgcaggggacccagccgggccgcgacggggugguccgggugugggacgugaagaaccccgaccuccugaacaaccaguucggcaccaugcccucccugacccucgccugccugacgaagcaggggcaggucgaccugaacgacguggugcucgcccugaccgaccugggccucaucuacaccgccaaguaccccaacagcuccgaccuggaccgccugagccagagccacccgauccucaacauggucgacaccaagaaguccagccugaacaucuccggcuacaacuucagccugggggcggccgugaaggccggcgccugcaugcucgacgggggcaacaugcuggagacgaucaaggugacgccccagaccauggacggcauccugaaguccauccucaaggucaagaagucccuggggauguucgugagcgacacccccggcgagcggaaccccuacgagaacauccuguacaagaucugccucagcggggacggcuggccguacaucgccucccgcaccagcaucguggggcgggcgugggagaacaccaccgucgaccuggaguccgacggcaagccccagaaggugggcaccgccgggagcaacaagucccugcagagcgccggcuuccccacggggcucaccuacucccagcugaugacccugaaggacagcaugaugcagcuggaccccuccgccaagaccuggaucgacaucgagggccgcccggaggaccccgucgagaucgcccucuaccagcccaugagcgggugcuacauccacuucuuccgggagcccacggaccugaagcaguucaagcaggacgcgaaguacucccacggcaucgacgugaccgaccuguucccggcccagcccggccucaccagcgccgugaucgaggcccugccccgcaacaugguccugaccugccaggggagcgacgacaucaagcggcuccuggacucccagggccgccgcgacaucaagcugaucgacaucgcccucagcaaggcggacucccggcgcuucgagaacgccgugugggaccagugcaaggaccugugccacaugcacacggggguggucguggagaagaagaagcggggcgggaaggaggagaucacgccccacugcgcccugauggacugcaucauguacgacgccgccgugagcggcggccucaacaucccgguccugcgcgcggugcugccccgggacaugguguuccgcaccuccagccccaaggucgugcucuga

SEQ ID NO: 18022 - RNA, 1773 nt, Artificial Sequence
  derived and/or modified CDS sequence (opt1) from LASV(LASV254-NIG-2011;Clade II)__AIT17675__SP-HsPLAT_NP(2-569)
auggacgccaugaagcgcggccugugcugcgugcuccugcugugcggggccgucuucgugagccccagcgccuccaaggaggugaaguccuuccuguggacccagagccuccgccgggagcugagcggcuacugcuccagcaucaagcugcaggucgugaaggacgcccaggcgcuccugcacgggcuggacuucuccgaggugagcaacguccagcgccucaugcggaagcagaagcgcgacgacuccgaccugaagcggcugcgcgaccucaaccaggccgugaacaaccugguggagcucaagagcacccagcagaaguccguccugcgggugggcacgcugaccagcgacgaccugcucacccuggccgccgaccuggagaagcucaaguccaaggugauccgcaccgagcggccccugagcuccggggucuacaugggcaaccugagcacgcagcagcucgagcagcgccgggcccugcugaacaugaucgggauggugggcggcgcgcaggggacccagccgggccgcgacggggugguccgggugugggacgugaagaaccccgaccuccugaacaaccaguucggcaccaugcccucccugacccucgccugccugacgaagcaggggcaggucgaccugaacgacgccgugcucgcccugaccgaccugggccucaucuacaccgcgaaguaccccaacagcuccgaccuggaccgccugagccagagccacccgauccucaacaugguggacaccaagaaguccagccugaacaucuccggcuacaacuucagccugggggccgccgucaaggccggcgccugcaugcucgacgggggcaacaugcuggagacgaucaaggugacgccccagaccauggacggcauccugaaguccauccucaaggugaagaagucccuggggauguucgucagcgacacccccggcgagcggaaccccuacgagaacauccuguacaagaucugccucagcggggacggcuggccguacaucgcgucccgcaccagcaucguggggcgggccugggagaacaccaucguggaccuggaguccgacggcaagccccagaaggucggcaccgccgggagcaacaagucccugcagagcgccggcuuccccaccgggcucacguacucccagcugaugacccugaaggacagcaugaugcagcuggaccccuccgccaagaccuggaucgacaucgagggccgcccggaggaccccguggagaucgcgcucuaccagcccaugagcgggugcuacauccacuucuuccgggagcccaccgaccugaagcaguucaagcaggacgccaaguacucccacggcaucgacgucgccgaccuguucccggcccagcccggccucacgagcgccgugaucgaggcgcugccccgcaacauggugcugaccugccaggggagcgacgacaucaagcggcuccuggacucccagggccgccgcgacaucaagcugaucgacaucgcccucagcaaggccgacucccggcgcuucgagaacgccgucugggaccagugcaaggaccugugccacaugcacaccggggugguggucgagaagaagaagcggggcgggaaggaggagaucacgccccacugcgcccugauggacugcaucauguacgacgcggccgugagcggcggccucaacaucccggugcugcgcgccguccugccccgggacaugguguuccgcaccuccagccccaaggugguccucuga

SEQ ID NO: 18023 - RNA, 1773 nt, Artificial Sequence
  derived and/or modified CDS sequence (opt1) from LASV(Nig08-04;Clade II)__ADU56611__SP-HsPLAT_NP(2-569)
auggacgccaugaagcgcggccugugcugcgugcuccugcugugcggggccgucuucgugagccccagcgccuccaaggaggugaaguccuuccuguggacccagagccuccgccgggagcugagcggcuacugcuccaacaucaagcugcaggucgugaaggacgcccaggcgcuccugcacgggcuggacuucagcgagguguccaacguccagcgccucaugcggaagcagaagcgcgacgacggcgaccugaagcggcugcgcgaccucaaccaggccgugaacaaccugguggagcucaagagcacccagcagaaguccguccugcggguggggacccugaccagcgacgaccugcucacccuggccgccgaccuggagaagcucaaguccaaggugauccgcaccgagcggccccugagcuccggcgucuacauggggaaccugagcacgcagcagcucgagcagcgcaaggcccugcuguccaugaucggcauggugggcggggcgcagggcacccagccggggcgggacggcgugguccgcgugugggacgugaagaaccccgaccuccugaacaaccaguucgggaccaugcccagccugacccucgccugccugacgaagcagggccaggucgaccugaacgacgccgugcucgcccugaccgaccugggccucaucuacaccgcgaaguaccccaacuccagcgaccuggaccggcugucccagagccacccgauccucaacaugguggacaccaagaaguccagccugaacaucagcggguacaacuucucccugggcgccgccgucaaggccggggccugcaugcucgacggcggcaacaugcuggagacgaucaaggugacgccccagaccauggacgggauccucaagagcauccugaaggugaagcgcucccugggcauguucgucagcgacacccccggggagcggaaccccuacgagaacauccuguacaagaucugccucuccggcgacggguggccguacaucgcgagccgcaccuccaucgugggccgggccugggagaacaccaccguggaccuggagagcgacggcaagccccagaaggucgggaccgccggcuccaacaagagccugcaguccgccggguuccccacgggccucaccuacagccagcugaugacccugaaggacuccaugaugcagcuggaccccagcgccaagaccuggaucgacaucgaggggcgcccggaggaccccguggagaucgcgcucuaccagcccauguccggcugcuacauccacuucuuccgggagcccacggaccugaagcaguucaagcaggacgccaaguacagccacggcaucgacgucaccgaccuguucuccgcccagccggggcucaccagcgccgugaucgaggcccugccccgcaacauggugcugaccugccagggcagcgacgacaucaagaagcuccuggacucccaggggcggcgcgacaucaagcugaucgacaucagccucaacaaggcggacucccgccgguucgagaacgccgucugggaccagugcaaggaccugugccacaugcacacgggcgugguggucgagaagaagaagcgcgggggcaaggaggagaucacgccccacugcgcccugauggacugcaucauguucgacgccgccgugagcggcgggcucaacauccccauccugcgggcggugcugccgcgcgacauggucuuccggaccuccagccccaagguggugcucuga

SEQ ID NO: 18024 - RNA, 1776 nt, Artificial Sequence
  derived and/or modified CDS sequence (opt1) from LASV(GA391;Clade III)__AAA46284__SP-HsPLAT_NP(2-570)
auggacgccaugaagcgcggccugugcugcgugcuccugcugugcggggccgucuucgugagccccagcgccuccaaggaggugcgcagcugccuguggacccagucccuccggcgcgagcugagcggcuacugcuccaacaucaagcugcaggucgugaaggacgcccaggcgcuccugcacgggcuggacuucagcgagguguccaacguccagcggcucaugcgcaagcagaagcgggacgacggcgaccugaagcgccugcgggaccucaaccaggccgugaacaaccugguggagcugaaguccacccagcagaaguccguccuccgcguggggacgcugagcuccgacgaccugcucauccuggccgccgaccuggagaagcucaagagcaaggugacccggaccgagcgcccccuguccagcggcgucuacauggggaaccuguccagccagcagcucgaccagcggcgcgcccugcugaacaugaucggcaugaccggcguguccgggggcgggaagggcgcgagcaacgggaucgugcgggucugggacgugaagaacgccgagcuccugaacaaccaguucggcacgaugccgucccugacccucgccugccugaccaagcagggccagguggaccugaacgacgccguccaggcgcucaccgaccuggggcugaucuacacggccaaguaccccaacagcagcgaccucgaccgccugucccagagccaccccauccugaacaugaucgacaccaagaaguccagccucaacaucuccggcuacaacuucagccugggggccgccgugaaggccggcgcgugcaugcuggacggcgggaacaugcucgagaccaucaaggugagcccccagaccauggacggcauccucaagagcauccugaaggucaagaagucccuggggauguucgugagcgacacgccgggcgagcggaaccccuacgagaacauccuguacaagaucugccuguccggggacggcuggagcuacaucgccucccgcaccagcaucgugggccgggccugggagaacaccgucguggaccucgagcaggacaacaagccccagaagaucgggaacggcggguccaacaagagccugcaguccgccggcuucgccgcggggcugaucuacagccagcucaugacccugaaggacuucaagugcuucaaccugauccccaacgccaagacguggauggacaucgagggccgcccggaggaccccguggagaucgcccuguaccagcccuccagcggcugcuacguccacuucuuccgggagcccaccgaccucaagcaguucaagcaggacgccaaguacagccacgggcgcgacgugaccgaccuguucgccgcgcagccgggccugaccuccgccgucaucgaggcccucccccggaacauggugaucacgugccaggggagcgaggacauccgcaagcugcuggagucccagggccgccgggacaucaagcucaucgacaucacccugagcaaggccgacucccgcaaguucgagaacgccgugugggaccaguucaaggaccugugccacaugcacaccggggucgugguggagaagaagaagcggggcggcaaggaggagaucacgccccacugcgcgcucauggacugcaucauguucgacgccgccgucagcgggggccuggacgccaaggugcugcgcgugguccucccccgggacaugguguuccgcaccuccaccccgaaggugguccuguga

SEQ ID NO: 18025 - RNA, 1773 nt, Artificial Sequence
  derived and/or modified CDS sequence (opt1) from LASV(Nig08-A19;Clade III)__ADU56619__SP-HsPLAT_NP(2-569)
auggacgccaugaagcgcggccugugcugcgugcuccugcugugcggggccgucuucgugagccccagcgccuccaaggaggugaaguccuuccuguggacccagucccuccgccgggagcugagcggcuacugcuccaacaucaagcugcaggucgugaaggacgcccaggcgcuccugcacgggcuggacuucagcgagguguccaacguccagcgccucaugcggaagcagaagcgcgacgacggcgaccugaagcggcugcgcgaccucaaccaggccgugaacaaccugguggagcucaagagcacccagcagaaguccguccugcggguggggacccugagcuccgacgaccugcucgugcuggccgccgaccuggagaagcucaagagcaaggucgugcgcaccgagcggccccuguccagcggcaucuacauggggaaccuguccagccagcagcucgaccagcgcaaggcccugcugaacaugaucggcaugaccggcgggaacggcgggcggaacaccacguccgacggcaucgugcgcgucugggacgugaagaacgcggagcuccugaacaaccaguucgggaccaugccgagccugacccucgccugccugaccaagcagggccagguggaccugaacgacgccguccaggcccucacggaccugggccugaucuacaccgcgaaguaccccaacuccagcgaccucgaccggcuggcccagagccaccccauccugaacaugaucgacaccaagaaguccagccucaacaucuccggguacaacuucagccugggcgccgccgugaaggccggggcgugcaugcuggacggcggcaacaugcucgagaccaucaaggugagcccccagacgauggacgggauccucaagagcauccugaaggucaagcgcucccugggcauguucaucagcgacaccccgggggagcggaaccccuacgagaacauccuguacaagaucugccuguccggcgacggguggcccuacaucgccagccgcaccuccaucgugggccgggccugggagaacaccguggucgaccucgagagcgacaacaagccccagaagacgggcaacgggggcuccaacaagagccugcaguccgccggguucgccgcgggccugaccuacagccagcucaugacccugaaggacuccaugcugcagcuggacccgaacgccaagaccuggauggacaucgaggggcgccccgaggaccccguggagaucgcccucuaccagcccagcuccggcugcuacauccacuucuuccgggagccgacggaccugaagcaguucaagcaggacgccaaguacagccacggcaucgacgugaccgaccuguucgccgcgcagcccgggcucaccagcgccgucaucgaggcccugccccgcaacauggugaucacgugccagggcuccgaggacauccggaagcugcucgagagccaggggcgccgcgacaucaagcugaucgacaucucccugagcaaggucgacucccggaaguucgagaacgccgugugggaccaguucaaggaccucugccacaugcacaccggcaucguggucgagaagaagaagcgcgggggcaaggaggagaucacgccccacugcgcccugauggacugcaucauguucgacgcggccgugagcggcgggguggacgccaagguccugcgggccgugcucccgcgcgacaugguguuccggaccuccacccccaaggucgugcuguga

SEQ ID NO: 18026 - RNA, 1773 nt, Artificial Sequence
  derived and/or modified CDS sequence (opt1) from LASV(G1180-SLE-2010;Clade IV)__AIT17169__SP-HsPLAT_NP(2-569)
auggacgccaugaagcgcggccugugcugcgugcuccugcugugcggggccgucuucgugagccccagcgccuccaaggagaucaagagcuuccuguggacccagucccuccgccgggagcugagcggcuacugcuccaacaucaagcuccagguggucaaggacgcccaggcgcugcugcacgggcuggacuucagcgagguguccaacgugcagcgccucaugcggaaggagcgccgggacgacaacgaccugaagcgccugcgggaccucaaccaggccgucaacaaccugguggagcucaagagcacccagcagaaguccauccugcgcgugggcacccugaccagcgacgaccugcucauccuggccgccgaccuggagaagcucaaguccaaggucauccggaccgagcgcccccugagcgccgggguguacaugggcaaccuguccagccagcagcucgaccagcggcgcgcgcugcuguccaugaucgggaugagcuccggcaaccagcgggcccaggccggccgcgacggggugguccgggugugggacgugaagaacgucgagcuccugaacaaccaguucggcaccaugccgagccugacgcucgccugccugaccaagcagggccagguggaccugaacgacgcggugcaggcccucaccgaccuggggcugaucuacaccgccaaguaccccaacacguccgaccucgaccgccugacccagagccaccccauccugaacaugaucgacaccaagaaguccagccucaacaucagcggguacaacuucucccugggcgccgccgucaaggcgggcgccugcaugcuggacgggggcaacaugcucgagaccaucaaggugagcccccagacgauggacgggauccugaaguccauccugaaggugaagaaggcccucggcauguucaucagcgacaccccgggcgagcggaaccccuacgagaacauccuguacaagaucugccuguccggggacggcuggcccuacaucgccagccgcaccuccaucaccgggcgggccugggagaacacggucguggaccucgagagcgacggcaagccccagaaggcgggguccaacaacagcaacaagucccugcagagcgugggcuucaccgccggccugaccuacucccagcucaugacccugaaggacgccaugcugcagcuggacccgaacgccaagacguggauggacaucgaggggcgccccgaggaccccgucgagaucgcccucuaccagcccagcuccggcugcuacauccacuucuuccgggagccgaccgaccugaagcaguucaagcaggacgcgaaguacagccacgggaucgacgugaccgaccuguucgccgcccagcccggccucaccuccgccgugaucgacgcccugccccgcaacauggucaucacgugccaggggagcgacgacauccgcaagcugcucgagagccagggccggaaggacaucaagcugaucgacaucgcgcuguccaagaccgacagccgcaaguacgagaacgccgugugggaccaguacaaggaccucugccacaugcacaccggcgucgugguggagaagaagaagcgcgggggcaaggaggagaucacgccccacugcgcccugauggacugcaucauguucgacgccgcggucuccgggggccugaacaccagcgugcuccgggccgugcugccgcgggacauggucuuccgcaccuccacgccccggguggugcuguga

SEQ ID NO: 18027 - RNA, 1773 nt, Artificial Sequence
  derived and/or modified CDS sequence (opt1) from LASV(G1442-SLE-2011;Clade IV)__AIT17181__SP-HsPLAT_NP(2-569)
auggacgccaugaagcgcggccugugcugcgugcuccugcugugcggggccgucuucgugagccccagcgccuccaaggaggugaaguccuuccuguggacccagagccuccgccgggagcugagcggcuacugcuccaacaucaagcugcaggucgugaaggacgcccaggcgcuccugcacgggcuggacuucagcgagguguccaacguccagcgccucaugcggaagcagcgccgggacgacaacgaccugaagcgccugcgggaccucaaccaggccgugaacaaccugguggagcucaagagcacccagcagaaguccguccugcgcgugggcacccugaccagcgacgaccugcucgugcuggccgccgaccuggagaagcucaaguccaaggucauccggaccgagcgcccccugagcgccgggguguacaugggcaaccuguccagccagcagcucgaccagcggcgcgcgcugcugaacaugaucgggauguccggcggcauccaggggacccggacgggccgcgacggggugguccgggugugggacgugaagaacgccgaccuccugaacaaccaguucggcaccaugccgagccugacccucgccugccugaccaagcaggggcaggucgaccugaacgacguggugcaggcccucacggaccugggccugaucuacaccgcgaaguaccccaacgccuccgaccucgaccgccugacccagagccaccccauccugaacaugaucgacaccaagaaguccagccucaacaucagcggcuacaacuucucccugggggccgccgucaaggccggcgcgugcaugcuggacgggggcaacaugcucgagacgaucaaggugagcccccagaccauggacggcauccugaaguccauccugaaggugaagaagacccucgggauguucaucagcgacaccccgggcgagcggaaccccuacgagaacauccuguacaagaucugccuguccggggacggcuggcccuacaucgccagccgcacguccaucaccgggcgggccugggagaacaccgucguggaccucgagagcgacggcaagccccagaaggccggcuccaacaacagcaacaagucccugcagagcgccggguucgcggccggccugaccuacucccagcucaugacgcugaaggacgccaugcugcagcuggacccgaacgccaagaccuggauggacaucgaggggcgccccgaggaccccguggagaucgcccucuaccagcccagcuccggcugcuacauccacuucuuccgggagccgaccgaccugaagcaguucaagcaggacgcgaaguacagccacgggaucgacgucaccgaccuguucgccgcccagcccggccucacguccgccgugaucgaggcccugccccgcaacauggucaucacgugccagggcagcgacgacaucaagaagcugcucgagucccaggggcgcaaggacaucaagcugaucgacaucgcgcugagcaagaccgacagccggaaguacgagaacgccgugugggaccaguacaaggaccucugccacaugcacaccggcguggucguggagaagaagaagcgcgggggcaaggaggagaucaccccgcacugcgcccugauggacugcaucauguucgacgccgcgguguccgggggccugaacacccucguccugcgggccgugcugccccgcgacaugguguuccggaccagcacgccccgcgucgugcucuga

SEQ ID NO: 18028 - RNA, 1773 nt, Artificial Sequence
  derived and/or modified CDS sequence (opt1) from LASV(G3010-SLE-2013;Clade IV)__AIT17345__SP-HsPLAT_NP(2-569)
auggacgccaugaagcgcggccugugcugcgugcuccugcugugcggggccgucuucgugagccccagcgccuccaaggagaucaagagcuuccuguggacccagucccuccgccgggagcugagcggcuacugcuccaacaucaagcuccagguggucaaggacgcccaggcgcugcugcacgggcuggacuucagcgagguguccaacgugcagcgccucaugcggaaggagcgccgggacgacaacgaccugaagcgccugcgggaccucaaccaggccgucaacaaccugguggagcucaagagcacccagcagaaguccauccugcgcgugggcacccugaccagcgacgaccugcucauccuggccgccgaccuggagaagcucaaguccaaggucacccggaccgagcgcccccugagcgccgggguguacaugggcaaccuguccagccagcagcucgaccagcggcgcgcgcugcuguccaugaucgggaugagcuccggcgugcagggcgcccgggccgggcgcgacggcgucgugcgggugugggacgucaagaacgccgagcuccugaacaaccaguucgggacgaugccgagccugacccucgcgugccugaccaagcagggccagguggaccugaacgacgugguccaggcccucaccgaccuggggcugaucuacacggccaaguaccccaacaccuccgaccucgaccgccugacccagagccaccccauccugaacaugaucgacaccaagaaguccagccucaacaucagcggcuacaacuucucccugggcgccgccgugaaggcgggggccugcaugcuggacggcgggaacaugcucgagacgaucaaggugagcccccagaccauggacggcauccugaaguccauccugaaggucaagaaggcccucggcauguucaucagcgagaccccgggggagcggaaccccuacgagaacauccuguacaagaucugccuguccggcgacggguggcccuacaucgccagccgcaccuccaucacgggccgggccugggagaacaccgugguggaccucgagagcgacgggaagccccagaaggcgggcuccaacaacagcaacaagucccugcagagcgccggcuucaccgccgggcugaccuacucccagcucaugacgcugaaggacgccaugcugcagcuggacccgaacgccaagaccuggauggacaucgagggccgccccgaggaccccgucgagguggcgcucuaccagcccagcuccgggugcuacauccacuucuuccgggagccgaccgaccugaagcaguucaagcaggacgccaaguacagccacggcaucgacgugaccgaccuguucgccgcccagcccgggcucacguccgccgucaucgacgcgcugccccgcaacauggugaucacgugccagggcagcgacgacaucaagaagcugcucgagagccagggccgcaaggacaucaagcugaucgacaucgcccuguccaagaccgacagccggaaguacgagaacgccgucugggaccaguacaaggaccucugccacaugcacaccggggugguggucgagaagaagaagcgcggcgggaaggaggagaucaccccgcacugcgcccugauggacugcaucauguucgacgcggccguguccggcgggcugaacaccagcgugcuccgggccguccugccccgcgacaugguguuccggaccuccacgccccgcgugguccuguga

SEQ ID NO: 18029 - RNA, 1773 nt, Artificial Sequence
  derived and/or modified CDS sequence (opt1) from LASV(G502-SLE-2009;Clade IV)__AIT17127__SP-HsPLAT_NP(2-569)
auggacgccaugaagcgcggccugugcugcgugcuccugcugugcggggccgucuucgugagccccagcgccuccaaggagaucaagagcuuccuguggacccagucccuccgccgggagcugagcggcuacugcuccaacaucaagcuccagguggucaaggacgcccaggcgcugcugcacgggcuggacuucagcgagguguccaacgugcagcgccucaugcggaaggagcgccgggacgacaacgaccugaagcgccugcgggaccucaaccaggccgucaacaaccugguggagcucaagagcacccagcagaaguccauccugcgcgugggcacccugaccagcgacgaccugcucauccuggccgccgaccuggagaagcucaaguccaaggucauccggaccgagcgcccccugagcgccgggguguacaugggcaaccuguccagccagcagcucgaccagcggcgcgcgcugcuguccaugaucgggaugagcggcggcaaccagggggugcgggccggcaaggacggggucgugcgcgugugggacgucaagaacgccgagcuccugaacaaccaguucggcaccaugccgucccugacgcucgccugccugaccaagcagggccagguggaccugaacgacgcggugcaggcccucaccgaccuggggcugaucuacaccgccaaguaccccaacacgagcgaccucgaccggcugacccagucccaccccauccugaacaugaucgacaccaagaaguccagccucaacaucuccggcuacaacuucagccugggggccgccgucaaggcgggcgccugcaugcuggacgggggcaacaugcucgagaccaucaaggugagcccccagacgauggacggcauccucaagagcauccugaaggugaagaaggcccuggggauguucaucuccgacaccccgggcgagcgcaaccccuacgagaacauccuguacaagaucugccugagcggggacggcuggcccuacaucgccucccggaccagcaucaccgggcgcgccugggagaacacggucguggaccucgaguccgacggcaagccccagaaggcgggcagcaacaacuccaacaagagccugcaguccgccggguucaccgccggccugaccuacagccagcucaugacccugaaggacgccaugcugcagcuggacccgaacacgaagaccuggauggacaucgaggggcggcccgaggaccccguggagaucgcccucuaccagcccuccagcggcugcuacauccacuucuuccgcgagccgaccgaccugaagcaguucaagcaggacgcgaaguacucccacgggaucgacgucaccgaccuguucgccgcccagcccggccucacgagcgccgugaucgacgcccugccccggaacauggugaucacgugccagggcuccgacgacauccgcaagcugcucgagagccaggggcgcaaggacaucaagcugaucgacaucgcgcugaacaagaccgacagccggaaguacgagaacgccgucugggaccaguacaaggaccucugccacaugcacaccggcguggucguggagaagaagaagcgcgggggcaaggaggagaucaccccgcacugcgcccugauggacugcaucauguucgacgccgcgguguccgggggccugaacaccagcguccuccgggccgugcugccccgcgacaugguguuccggaccuccacgccccgcgucgugcuguga

SEQ ID NO: 18030 - RNA, 1773 nt, Artificial Sequence
  derived and/or modified CDS sequence (opt1) from LASV(G733-SLE-2010;Clade IV)__AIT17155__SP-HsPLAT_NP(2-569)
auggacgccaugaagcgcggccugugcugcgugcuccugcugugcggggccgucuucgugagccccagcgccuccaaggagaucaagagcuuccuguggacccagucccuccgccgggagcugagcggcuacugcuccaacaucaagcuccagguggucaaggacgcccaggcgcugcugcacgggcuggacuucagcgagguguccaacgugcagcgccucaugcggaaggagcgccgggacgacaacgaccugaagcgccugcgggaccucaaccaggccgucaacaaccugguggagcucaagagcacccagcagaaguccgugcugcgcgucggcacccugaccagcgacgagcugcucgugcuggccgccgaccuggagaagcucaaguccaaggugauccggaccgagcgcccccugagcgccggggucuacaugggcaaccuguccagccagcagcucgaccagcggcgcgcgcugcuguccaugaucgggaugagcggcggcaaccagggggcccggaccggccgcgacgggguggugcgggucugggacgugaagaacgccgagcuccugaacaaccaguucggcaccaugccgucccugacccucgccugccugaccaagcagggccagguggaccugaacgacgcgguccaggcccucaccgaccuggggcugaucuacacggccaaguaccccaacaccagcgaccucgaccgccugacccagucccaccccauccugaacaugaucgacaccaagaaguccagccucaacaucuccggcuacaacuucagccugggggccgccgugaaggcgggcgccugcaugcuggacgggggcaacaugcucgagacgaucaaggugagcccccagaccauggacggcauccucaagagcauccugaaggucaagaaggcccuggggauguucaucuccgacaccccgggcgagcggaaccccuacgagaacauccuguacaagaucugccugagcggggacggcuggcccuacaucgccucccgcaccagcaucacggggcgggccugggagaacaccgugguggaccucgaguccgacggcaagccccagaaggcgggcagcaacaacuccaacaagagccugcaguccgccggguucaccgccggccugaccuacagccagcucaugacgcugaaggacgccaugcugcagcuggacccgaacgccaagaccuggauggacaucgaggggcgccccgaggaccccgucgagaucgcgcucuaccagcccuccagcggcugcuacauccacuucuuccgggagccgaccgaccugaagcaguucaagcaggacgccaaguacucccacgggaucgacgugaccgaccuguucgccgcccagcccggccucacgagcgccgugaucgacgcgcugccccgcaacauggucaucacgugccagggcuccgacgacauccgcaagcugcucgagagccaggggcggaaggacaucaagcugaucgacaucgcccugagcaagaucgacucccgcaaguacgagaacgccgugugggaccaguacaaggaccucugccacaugcacaccggcgucgugguggagaagaagaagcgcgggggcaaggaggagaucacgccccacugcgcccugauggacugcaucauguucgacgcggccgucagcgggggccugaacucccucgugcugcgggccgugcugccgcgggacauggucuuccgcaccagcacgccccggguggugcucuga

SEQ ID NO: 18031 - RNA, 1773 nt, Artificial Sequence
  derived and/or modified CDS sequence (opt1) from MOPV/LASV reassortant(IGS-1;Clade IV)__AFY05578__SP-HsPLAT_NP(2-569)
auggacgccaugaagcgcggccugugcugcgugcuccugcugugcggggccgucuucgugagccccagcgccuccaaggagaucaagagcuuccuguggacccagucccuccgccgggagcugagcggcuacugcuccaacaucaagcuccagguggucaaggacgcccaggcgcugcugcacgggcuggacuucagcgagguguccaacgugcagcgccucaugcggaaggagcgccgggacgacaacgaccugaagcgccugcgggaccucaaccaggccgucaacaaccugguggagcucaagagcacccagcagaaguccauccugcgcgugggcacccugaccagcgacgaccugcucauccuggccgccgaccuggagaagcuccgguccaaggucauccgcaccgagcggccccugagcgccgggguguacaugggcaaccuguccagccagcagcucgaccagcgccgggcgcugcugaacaugaucgggauguccggcggcaaccagggggcccgcgccggccgggacggggugguccgcgugugggacgugaagaacgccgagcuccugagcaaccaguucggcaccaugccgucccugacgcucgcgugccugaccaagcaggggcaggucgaccugaacgacgccgugcaggcccucaccgaccugggccugaucuacaccgccaaguaccccaacacgagcgaccucgaccggcugacccagucccaccccauccugaacaugaucgacaccaagaaguccagccucaacaucuccggcuacaacuucagccugggggccgcggugaaggccggcgccugcaugcuggacgggggcaacaugcucgagaccaucaaggucagcccccagacgauggacggcauccucaagagcauccugaaggugaagaaggcccuggggauguucaucuccgacaccccgggcgagcgcaaccccuacgagaacauccuguacaagaucugccugagcggggacggcuggcccuacaucgccucccggaccagcaucaccgggcgcgcgugggagaacacgguggucgaccucgaguccgacggcaagccccagaaggccgacagcaacaacuccagcaagucccugcagagcgccggcuucaccgccgggcugaccuacucccagcucaugacccugaaggacgccaugcugcagcuggacccgaacgcgaagacguggauggacaucgagggccggcccgaggaccccguggagaucgcccucuaccagcccagcuccgggugcuacauccacuucuuccgcgagccgaccgaccugaagcaguucaagcaggacgccaaguacagccacggcaucgacgugaccgaccuguucgccacccagcccgggcucacguccgccgucaucgacgcgcugccccgcaacauggugaucacgugccagggcagcgacgacauccggaagcugcucgagagccagggccgcaaggacaucaagcugaucgacaucgaccuguccaagaccgacagccggaaguacgagaacgccgugugggaccaguacaaggaccucugccacaugcacaccggggucguggucgagaagaagaagcgcggcgggaaggaggagaucaccccgcacugcgcccugauggacugcaucauguucgacgccgcgguguccggcgggcugaacaccagcgugcuccgggccguccugccccgcgacaugguguuccggaccuccacgccccgcgugguccuguga

SEQ ID NO: 18032 - RNA, 1773 nt, Artificial Sequence
  derived and/or modified CDS sequence (opt1) from LASV(LM765-SLE-2012;Clade IV)__AIT17815__SP-HsPLAT_NP(2-569)
auggacgccaugaagcgcggccugugcugcgugcuccugcugugcggggccgucuucgugagccccagcgccuccaaggagaucaagagcuuccuguggacccagucccuccgccgggagcugagcggcuacugcuccaacaucaagcuccagguggucaaggacgcccaggcgcugcugcacgggcuggacuucagcgagguguccaacgugcagcgccucaugcggaaggagcgccgggacgacaacgaccugaagcgccugcgggaccucaaccaggccgucaacaaccugguggagcucaagagcacccagcagaaguccauccugcgcgugggcacccugaccagcgacgaccugcucauccuggccgccgaccuggagaagcucaaguccaaggucacccggaccgagcgcccccugagcgccgggguguacaugggcaaccuguccagccagcagcucgaccagcggcgcgcgcugcuggacaugaucgggauguccggcagcaaccagggcgcccgggccgggcgcgacggcgugguccgggugugggacgugaagaacgccgagcuccugaacaaccaguucgggacgaugccgucccugacccucgcgugccugaccaagcagggccaggucgaccugaacgacgccgugcaggcccucaccgaccuggggcugaucuacacggccaaguaccccaacaccagcgaccucgaccgccugacccagucccaccccauccugaacaugaucgacaccaagaaguccagccucaacaucuccggcuacaacuucagccugggcgccgcggugaaggccggggccugcaugcuggacggcgggaacaugcucgagacgaucaaggucagcccccagaccauggacggcauccucaagagcauccugaaggugaagaaggcccugggcauguucaucuccgacgccccgggggagcggaaccccuacgagaacauccuguacaagaucugccugagcggcgacggguggcccuacaucgcgucccgcaccagcaucaccggccgggccugggagaacacgguggucgaccucgaguccgacgggaagccccagaaggccggcagcaacggcuccaacaagagccugcaguccgccggguucaccgccggccugaccuacagccagcucaugacccugaaggacgcgaugcugcagcuggacccgaacgccaagacguggauggacaucgaggggcgccccgaggaccccguggagaucgcccucuaccagcccuccagcggcugcuacauccacuucuuccgggagccgaccgaccugaagcaguucaagcaggacgccaaguacucccacgggaucgacgugaccgaccuguucgccgcgcagcccggccucaccagcgccgucaucgacgcccugccccgcaacauggugaucacgugccagggcuccgacgacauccgcaagcuguucgagagccaggggcggaaggacaucaagcucaucgacaucgcccugagcaagaccgacucccgcaaguacgagaacgcggugugggaccaguacaaggaccugugccacaugcacaccggcaucgucguggagaagaagaagcgcgggggcaaggaggagaucacgccccacugcgcccucauggacugcaucauguucgacgccgccgucagcgggggccugaacaccuccgugcugcgggccgugcucccgcgggacauggucuuccgcaccagcacgccccggguggugcuguga

SEQ ID NO: 18033 - RNA, 1773 nt, Artificial Sequence
  derived and/or modified CDS sequence (opt1) from LASV(LM776-SLE-2012;Clade IV)__AIT17825__SP-HsPLAT_NP(2-569)
auggacgccaugaagcgcggccugugcugcgugcuccugcugugcggggccgucuucgugagccccagcgccuccaaggagaucaagagcuuccuguggacccagucccuccgccgggagcugagcuccuacugcagcaacaucaagcuccagguggucaaggacgcccaggcgcugcugcacggccuggacuucuccgaggugagcaacgugcagcgccucaugcggaaggagcgccgggacgacaacgaccugaagcgccugcgggaccucaaccaggccgucaacaaccugguggagcugaaguccacccagcagaaguccauccuccgcguggggacccugaccuccgacgaccugcucauccuggccgccgaccuggagaagcucaagagcaaggucacccggaccgagcgcccccuguccgccggcguguacauggggaaccugagcucccagcagcucgaccagcggcgcgcgcugcugagcaugaucggcauguccgggagcaaccagggcgcccgggccggccgcgacggggugguccgggugugggacgugaagaacgccgagcuccugaacaaccaguucggcacgaugccgucccugacccucgcgugccugaccaagcaggggcaggucgaccugaacgacgccgugcaggcccucaccgaccugggccugaucuacacggccaaguaccccaacaccagcgaccucgaccgccugacccagagccaccccauccugaacaugaucgacaccaagaaguccagccucaacaucuccggguacaacuucagccugggcgccgcggugaaggccggcgccugcaugcuggacgggggcaacaugcucgagacgaucaaggucagcccccagaccauggacgggauccucaagagcauccugaaggugaagaaggcccugggcauguucaucuccgacaccccgggcgagcggaaccccuacgagaacauccuguacaagaucugccugagcggggacggcuggcccuacaucgccucccgcaccagcaucacggggcgggcgugggagaacaccguggucgaccucgaguccgacggcaagccccagaaggccgggagcaacaacuccaacaagagccugcaguccgccggcuucaccgccggccugaccuacagccagcucaugacgcugaaggacgccaugcugcagcuggacccgaacgcgaagaccuggauggacaucgaggggcgccccgaggaccccguggagguggcccucuaccagcccuccagcggcugcuacauccacuucuuccgggagccgaccgaccugaagcaguucaagcaggacgccaaguacucccacgggaucgacgucaccgaccuguucgccgcccagcccggccucacgagcgcggugaucgacgcccugccccgcaacauggugaucacgugccaggggagcgacgacauccgcaagcugcucgagucccagggccggaaggacaucaagcugaucgacaucgcccugagcaagaccgacucccgcaaguacgagaacgccgucugggaccaguacaaggaccucugccacaugcacaccggcguggucguggagaagaagaagcgcgggggcaaggaggagaucaccccgcacugcgcgcugauggacugcaucauguucgacgccgccgugagcgggggccugaacaccuccguccuccgggccgugcugccccgggacaugguguuccgcaccagcacgccccgggucgugcuguga

SEQ ID NO: 18034 - RNA, 1773 nt, Artificial Sequence
  derived and/or modified CDS sequence (opt1) from LASV(Mad39;Clade IV)__ANH09723__SP-HsPLAT_NP(2-569)
auggacgccaugaagcgcggccugugcugcgugcuccugcugugcggggccgucuucgugagccccagcgccuccaaggagaucaagagcuuccuguggacccagucccuccgccgggagcugagcggcuacugcuccaacaucaagcuccagguggucaaggacgcccaggcgcugcugcacgggcuggacuucagcgagguguccaacgugcagcgccucaugcggaagcagcgccgggacgacaacgaccugaagcgccugcgggaccucaaccaggccgucaacaaccugguggagcugaaguccacccagcagaaguccgugcuccgcgucggcacgcugaccagcgacgaccugcucacccuggccgccgaccuggagaagcucaaguccaaggugacccggacggagcgcccccugaccgccgggguguacaugggcaaccugagcucccagcagcucgaccagcggcgcgcgcugcugaacaugaucgggaugagcggcggcaaccagggggcccggaccggccgcgacggggucgugcgggugugggacgucaagaacgccgagcuccugaacaaccaguucggcaccaugccgucccugacgcucgccugccugaccaagcagggccagguggaccugaacgacgugguccaggcgcucaccgaccuggggcugaucuacaccgccaaguaccccaacacgagcgaccucgaccgccugacccagucccaccccauccugaacaugaucgacaccaacaagagcucccucaacaucagcggcuacaacuucagccugggggccgccgugaaggccggcgcgugcaugcuggacgggggcaacaugcucgagaccaucaaggugagcccccagacgauggacggcauccucaagagcauccugaaggucaagaagucccuggggauguucaucagcgacaccccgggcgagcggaaccccuacgagaacauccuguacaagaucugccuguccggggacggcuggcccuacaucgccagccgcaccuccaucaccgggcgggccugggagaacacggugguggaccucgagagcggcggcaagccccagaaggccggguccaacaacagcaacaagucccugcagagcgccggcuucgcggccgggcugaccuacucccagcucaugacccugaaggacgccaugcugcagcuggacccgaacgccaagaccuggauggacaucgagggccgccccgaggaccccgucgagaucgcccucuaccagcccaucagcgggugcuacauccacuucuuccgggagccgacggaccugaagcaguucaagcaggacgcgaaguacucccacggcaucgacgugaccgaccuguucgccgcccagcccggccucaccagcgccgugaucgaggcccugccccgcaacauggucaucacgugccagggguccgacgacauccgcaagcuguucgagagccagggccggaaggacaucaagcucaucgacaucgcgcuguccaagaccgacagccgcaaguacgagaacgccgugugggaccaguacaaggaccugugccacaugcacaccggggucgugguggagaagaagaagaagggcgggaaggaggagaucacgccccacugcgcccucauggacugcaucauguucgacgccgcggucagcggcggccugaacacccuggugcuccgggccgugcugccgcgcgacauggucuuccggaccuccacccccaagguggugcuguga

SEQ ID NO: 18035 - RNA, 1773 nt, Artificial Sequence
  derived and/or modified CDS sequence (opt1) from LASV(Z0947-SLE-2011;Clade IV)__AIT17841__SP-HsPLAT_NP(2-569)
auggacgccaugaagcgcggccugugcugcgugcuccugcugugcggggccgucuucgugagccccagcgccuccaaggagaucaagagcuuccuguggacccagucccuccgccgggagcugagcggcuacugcuccaacaucaagcuccagguggucaaggacgcccaggcgcugcugcacgggcuggacuucagcgagguguccaacgugcagcgccucaugcggaaggagcgccgggacgacaacgaccugaagcgccugcgggaccucaaccaggccgucaacaaccugguggagcucaagagcacccagcagaaguccauccugcgcgugggcacccugaccagcgacgaccugcucauccuggccgccgaccuggagaagcucaaguccaaggucacccggaccgagcgcccccugagcgccgggguguacaugggcaaccuguccagccagcagcucgaccagcggcgcgcgcugcugaacaugaucgggauguccggcagcaaccagggcgcccggacggggcgcgacggcgugguccgggugugggacgugaagaacgccgagcuccugaacaaccaguucgggaccaugccgucccugacccucgccugccugaccaagcagggccaggucgaccugaacgacgcggugcaggcccucacggaccuggggcugaucuacaccgccaaguaccccaacaccagcgaccucgaccgccugacccagucccaccccauccugaacaugaucgacacgaagaaguccagccucaacaucuccggcuacaacuucagccugggcgccgccgugaaggcgggggccugcaugcuggacggcgggaacaugcucgagaccaucaaggucagcccccagaccauggacggcauccucaagagcauccugaaggugaagaaggcccugggcauguucaucuccgacgccccgggggagcggaaccccuacgagaacauccuguacaagaucugccugagcggcgacggguggcccuacaucgccucccgcaccagcaucacgggccgggcgugggagaacaccguggucgaccucgaguccgacgggaagccccagaaggccggcagcaacggcuccaacaagagccugcaguccgccggguucaccgccggccugaccuacagccagcucaugacgcugaaggacgccaugcugcagcuggacccgaacgcgaagaccuggauggacaucgaggggcgccccgaggaccccguggagaucgcccucuaccagcccuccagcggcugcuacauccacuucuuccgggagccgaccgaccugaagcaguucaagcaggacgccaaguacucccacgggaucgacgugaccgaccuguucgccgcccagcccggccucacgagcgcggucaucgacgcccugccccgcaacauggugaucacgugccagggcuccgacgacauccgcaagcuguucgagagccaggggcggaaggacaucaagcucaucgacaucgcccugagcaagaccgacucccgcaaguacgagaacgccgugugggaccaguacaaggaccugugccacaugcacaccggcaucgucguggagaagaagaagcgcgggggcaaggaggagaucaccccgcacugcgcgcucauggacugcaucauguucgacgccgccgucagcgggggccugaacaccuccgugcugcgggccgugcucccccgggacauggucuuccgcaccagcacgccccggguggugcuguga

SEQ ID NO: 18036 - RNA, 1773 nt, Artificial Sequence
  derived and/or modified CDS sequence (opt4) from LASV(Josiah;Clade IV)__NP_694869__SP-HsPLAT_NP(2-569)
auggacgccaugaagagaggccugugcugcgugcugcugcugugcggcgccguguucgugagccccagcgccagcaaggagaucaagagcuuccuguggacccagagccugagaagagagcugagcggcuacugcagcaacaucaagcugcagguggugaaggacgcccaggcccugcugcacggccuggacuucagcgaggugagcaacgugcagagacugaugagaaaggagagaagagacgacaacgaccugaagagacugagagaccugaaccaggccgugaacaaccugguggagcugaagagcacccagcagaagagcauccugagagugggcacccugaccagcgacgaccugcugauccuggccgccgaccuggagaagcugaagagcaaggugaucagaaccgagagaccccugagcgccggcguguacaugggcaaccugagcagccagcagcuggaccagagaagagcccugcugaacaugaucggcaugagcggcggcaaccagggcgccagagccggcagagacggcguggugagagugugggacgugaagaacgccgagcugcugaacaaccaguucggcaccaugcccagccugacccuggccugccugaccaagcagggccagguggaccugaacgacgccgugcaggcccugaccgaccugggccugaucuacaccgccaaguaccccaacaccagcgaccuggacagacugacccagagccaccccauccugaacaugaucgacaccaagaagagcagccugaacaucagcggcuacaacuucagccugggcgccgccgugaaggccggcgccugcaugcuggacggcggcaacaugcuggagaccaucaaggugagcccccagaccauggacggcauccugaagagcauccugaaggugaagaaggcccugggcauguucaucagcgacacccccggcgagagaaaccccuacgagaacauccuguacaagaucugccugagcggcgacggcuggcccuacaucgccagcagaaccagcaucaccggcagagccugggagaacaccgugguggaccuggagagcgacggcaagccccagaaggccgacagcaacaacagcagcaagagccugcagagcgccggcuucaccgccggccugaccuacagccagcugaugacccugaaggacgccaugcugcagcuggaccccaacgccaagaccuggauggacaucgagggcagacccgaggaccccguggagaucgcccuguaccagcccagcagcggcugcuacauccacuucuucagagagcccaccgaccugaagcaguucaagcaggacgccaaguacagccacggcaucgacgugaccgaccuguucgccacccagcccggccugaccagcgccgugaucgacgcccugcccagaaacauggugaucaccugccagggcagcgacgacaucagaaagcugcuggagagccagggcagaaaggacaucaagcugaucgacaucgcccugagcaagaccgacagcagaaaguacgagaacgccgugugggaccaguacaaggaccugugccacaugcacaccggcguggugguggagaagaagaagagaggcggcaaggaggagaucaccccccacugcgcccugauggacugcaucauguucgacgccgccgugagcggcggccugaacaccagcgugcugagagccgugcugcccagagacaugguguucagaaccagcacccccagaguggugcuguga

SEQ ID NO: 18037 - RNA, 1773 nt, Artificial Sequence
  derived and/or modified CDS sequence (opt4) from LASV(LP;Clade I)__AAF86702__SP-HsPLAT_NP(2-569)
auggacgccaugaagagaggccugugcugcgugcugcugcugugcggcgccguguucgugagccccagcaacagcaaggagaucaagagcuuccuguggacccagagccugagaagagagcugagcggcuacugcagcaacaucaagcugcagguggugaaggacgcccaggcccugcugcacggccuggacuucagcgaggugagcaacgugcagagacugaugagaaagcagaagagagacgacgccgaccugaagagacugagagaccugaaccaggccgugaacaaccugguggagcugaagagcacccagcagaagaacgugcugagagugggcacccugagcagcgacgaccugaucacccuggccgccgaccuggagaagcugaagagcaaggugaucagaaccgagagaccccugagcagcggcguguacaugggcaaccugagcagccagcagcuggaccagagaagagcccugcugagcaugaucggcaugagcggcggcccccagggcaacagaaccggcggcgacggcguggugagagugugggacgugaagaacgccgagcugcugaacaaccaguucggcaccaugcccagccugacccuggccugccugaccaagcagggccagguggaccugaacgacgccgugcaggcccugaccgaccugggccugaucuacaccgccaaguaccccaacagcagcgaccuggacaugcugacccagagccaccccauccugggcaugguggacaccaagaagagcagccugaacaucagcggcuacaacuucagccugggcgccgccgugaaggccggcgccugcaugcuggacggcggcaacaugcuggagaccaucaaggugagcccccagaccauggacggcauccugaagagcauccugaaggugaagagaagccugggcauguucaucagcgacacccccggcgagagaaaccccuacgagaacauccuguacaagaucugccugagcggcgagggcuggcccuacaucgccagcagaaccagcaucaccggcagagccugggagaacacccugguggaccuggagagcgacaacaagccccccaagcugaacagcgccggcagcaacaagagccugcaggccgccggccugaacgccggccugaccuacagccagcugaugacccugaaggacugcaugcugcagcuggaccccagcagcaagaccuggaucgacaucgagggcagacccgaggaccccguggagaucgcccuguuccagcccagcagcggcugcuacauccacuucuucagagagcccaccgaccugaagcaguucaagcaggacgccaaguacagccacggcaucgacgugaccgaccuguucagcacccagcccggccugaccagcgccgugaucgaggcccugcccagaaacauggugcugaccugccagggcagcgacgacaucaagaagcugcuggagagccagggcagaagagacaucaagcugaucgacaucagccugagcaaggccgacagcagaaaguucgagaacgccgugugggaccaguacaaggaccugugccacaugcacaccggcguggugguggagaagaagaagagaggcggcaaggaggagaucaccccccacugcgcccugcuggacugcaucauguucgacgccgccaccaccggcagccugaacaucaccacccugagagccgugcugcccagagacaugguguucagaaccagcacccccaagguggugcuguga

SEQ ID NO: 18038 - RNA, 1773 nt, Artificial Sequence
  derived and/or modified CDS sequence (opt4) from LASV(803213;Clade II)__AAF86704__SP-HsPLAT_NP(2-569)
auggacgccaugaagagaggccugugcugcgugcugcugcugugcggcgccguguucgugagccccagcgccagcaaggaggugaagagcuuccuguggacccagagccugagaagagagcugagcggcuacugcagcaacaucaagcugcagguggugaaggacgcccaggcccugcugcacggccuggacuucagcgaggugaacaacgugcagagacugaugagaaagcagaagagagacgacggcgaccugaagagacugagagaccugaaccaggccgugaacaaccugguggagcugaagagcacccagcagaagagcauccugagagugggcacccugaccagcgacgaccugcugacccuggccgccgaccuggagaagcugaagagcaaggugaucagaaccgagagaccccugagcagcggcguguacaugggcaaccugagcacccagcagcuggagcagagaagagcccugcugaacaugaucggcauggugggcggcgcccagggcacccagcccggcagagacggcguggugagagugugggacgugaagaaccccgaccugcugaacaaccaguucggcaccaugcccagccugacccuggccugccugaccaagcagggccagguggaccugaacgacgccgugcuggcccugaccgaccugggccugaucuacaccgccaaguaccccaacagcagcgaccuggacagacugagccagagccaccccauccugaacaugguggacaccaagaagagcagccugaacaucagcggcuacaacuucagccugggcgccgccgugaaggccggcgccugcaugcuggacggcggcaacaugcuggagaccaucaaggugaccccccagaccauggacggcauccugaagagcauccugaaggugaagagaagccugggcauguucgugagcgacacccccggcgagagaaaccccuacgagaacauccuguacaagaucugccugagcggcgacggcuggcccuacaucgccagcagaaccagcaucgugggcagagccugggagaacaccaccguggaccuggagagcgacggcaagccccagaaggugggcaccgccggcagcaacaagagccugcagagcgccggcuuccccaccggccugaccuacagccagcugaugacccugaaggacagcaugaugcagcuggaccccagcgccaagaccuggaucgacaucgagggcagacccgaggaccccguggagaucgcccuguaccagcccaugagcggcugcuacauccacuucuucagagagcccaccgaccugaagcaguucaagcaggacgccaaguacagccacggcaucgacguggccgaccuguuccccgcccagcccggccugaccagcgccgugaucgaggcccugcccagaaacauggugcugaccugccagggcagcgacgacaucaagaagcugcuggacagccagggcagaagagacaucaagcugaucgacaucagccugagcaagguggacagcagaaaguucgagaacgccgugugggaccagugcaaggaccugugccacaugcacaccggcguggugguggagaagaagaagagaggcggcaaggaggagaucaccccccacugcgcccugauggacugcaucauguucgacgccgccgugagcggcggccugaacauccccgugcugagagccgugcugcccagagacaugguguucagaaccagcagccccaagguggugcuguga

SEQ ID NO: 18039 - RNA, 1776 nt, Artificial Sequence
  derived and/or modified CDS sequence (opt4) from LASV(GA391;Clade III)__CAA36646__SP-HsPLAT_NP(2-570)
auggacgccaugaagagaggccugugcugcgugcugcugcugugcggcgccguguucgugagccccagcgccagcaaggaggugagaagcuuccuguggacccagagccugagaagagagcugagcggcuacugcagcaacaucaagcugcagguggugaaggacgcccaggcccugcugcacggccuggacuucagcgaggugagcaacgugcagagacugaugagaaagcagaagagagacgacggcgaccugaagagacugagagaccugaaccaggccgugaacaaccugguggagcugaagagcacccagcagaagagcgugcugagagugggcacccugagcagcgacgaccugcugauccuggccgccgaccuggagaagcugaagagcaaggugaccagaaccgagagaccccugagcagcggcguguacaugggcaaccugagcagccagcagcuggaccagagaagagcccugcugaacaugaucggcaugaccggcgugagcggcggcggcaagggcgccagcgacggcaucgugagagugugggacgugaagaacgccgagcugcugaacaaccaguucggcaccaugcccagccugacccuggccugccugaccaagcagggccagguggaccugaacgacgccgugcaggcccugaccgaccugggccugaucuacaccgccaaguaccccaacagcagcgaccuggacagacugagccagagccaccccauccugaacaugaucgacaccaagaagagcagccugaacaucagcggcuacaacuucagccugggcgccgccgugaaggccggcgccugcaugcuggacggcggcaacaugcuggagaccaucaaggugagcccccagaccauggacggcauccugaagagcauccugaaggugaagaagagccugggcauguucgugagcgacacccccggcgagagaaaccccuacgagaacauccuguacaagaucugccugagcggcgacggcuggcccuacaucgccagcagaaccagcaucgugggcagagccugggagaacaccgugguggaccuggagcaggacaacaagccccagaagaucggcaacggcggcagcaacaagagccugcagagcgccggcuucgccgccggccugaccuacagccagcugaugacccugaaggacuucaagugcuucaaccugauccccaacgccaagaccuggauggacaucgagggcagacccgaggaccccguggagaucgcccuguaccagcccagcagcggcugcuacgugcacuucuucagagagcccaccgaccugaagcaguucaagcaggacgccaaguacagccacggcaucgacgugaccgaccuguucgccgcccagcccggccugaccagcgccgugaucgaggcccugcccagaaacauggugaucaccugccagggcagcgaggacaucagaaagcugcuggagagccagggcagaagagacaucaagcugaucgacaucacccugagcaaggccgacagcagaaaguucgagaacgccgugugggaccaguucaaggaccugugccacaugcacaccggcguggugguggagaagaagaagagaggcggcaaggaggagaucaccccccacugcgcccugauggacugcaucauguucgacgccgccgugagcggcggccuggacgccaaggugcugagaguggugcugcccagagacaugguguucagaaccagcacccccaagguggugcuguga

SEQ ID NO: 18040 - RNA, 1773 nt, Artificial Sequence
  derived and/or modified CDS sequence (opt4) from LASV(AV;Clade V)__CCA30315__SP-HsPLAT_NP(2-569)
auggacgccaugaagagaggccugugcugcgugcugcugcugugcggcgccguguucgugagccccagcgccagcaaggaggugaagagcuuccuguggacccagagccugagaagagagcugagcggcuacugcagcaacaucaagcugcagguggugaaggacgcccaggcccugcugcacggccuggacuucagcgaggugagcaacgugcagagacugaugagaaagcagagaagagacgacagcgaccugaagagacugagagaccugaaccaggccgugaacaaccugguggagcugaagagcacccagcagaagagcgugcugagagugggcacccugagcagcgacgaccugcugacccuggccgccgaccuggagaagcugaagagcaaggugaccagaaccgagagaccccugagcagcggcguguacaugggcaaccugagcagccagcagcuggaccagagaagagcccugcugaaccugaucggcaugaccaacggcagccagggcagccaggccggcagagacggcguggugagagugugggacgugaagaacgccgagcugcugaacaaccaguucggcaccaugcccagccugacccuggccugccugaccaagcagggccagguggaccugaacgacguggugcaggcccugaccgaccugggccugaucuacaccgccaaguaccccaacaccagcgaccuggacagacugacccagagccaccccauccugaacaugaucgacaccaagaagagcagccugaacaucagcggcuacaacuucagccugggcgccgccgugaaggccggcgccugcaugcuggacggcggcaacaugcuggagaccaucaaggugagcccccagagcauggacggcauccugaagagcauccugaaggugaagagagcccugggcauguucgugagcgacacccccggcgagagaaaccccuacgagaacauccuguacaagaucugccugagcggcgacggcuggcccuacaucgccagcagaaccagcaucgugggcagagccugggagaacaccgugguggaccuggagaccgacggcaagccccagaagaucggcagcggcaacagcaacaagagccugcagagcgccggcuucagcgccggccugaccuacagccagcugaugacccugaaggacgccaugcugcagcuggaccccaacgccaagaccuggauggacaucgagggcagacccgaggaccccguggagguggcccuguaccagcccaucagcggcugcuacauccacuucuucagagagcccaccgaccugaagcaguucaagcaggacgccaaguacagccacggcaucgacaucgccgaccuguucgccgcccagcccggccugaccagcgccgugaucgaggcccugcccagaaacauggugaucaccugccagggcagcgaggacaucaagaagcugcuggagagccagggcagaaaggacaucaagcugaucgacaucgcccugagcaagaucgacagcagaaaguucgagaacgccgugugggaccaguacaaggaccugugccacaugcacaccggcguggugguggagaagaagaagagaggcggcaaggaggagaucaccccccacugcgcccugauggacugcaucauguucgacgccgccgugagcggcggccugaacacccuggugcugagagccgugcugcccagagacaugguguucagaaccagcacccccagaguggugcuguga

SEQ ID NO: 18041 - RNA, 1773 nt, Artificial Sequence
  derived and/or modified CDS sequence (opt4) from LASV(Togo/2016/7082;Clade VI)__AMR44578__SP-HsPLAT_NP(2-569)
auggacgccaugaagagaggccugugcugcgugcugcugcugugcggcgccguguucgugagccccagcaacagcaaggaggugaagagcuuccuguggacccagagccugagaagagagcugagcggcuacugcagcaacaucaagcugcagguggugaaggacgcccaggcccugcugcacggccuggacuucagcgaggugagcaacgugcagagacugaugagaaagcagaagagagacgacggcgaccugaagagacugagagaccugaaccaggccgugaacaaccugguggagcugaagagcgugcagcagaagagcauccugagagugggcacccugaccagcgacgaccugcugacccuggccgccgaccuggagaagcugaagagcaaggugaccagaaccgagagaccccugagcagcggcguguacaugggcaaccugagcagccagcagcuggaccagagaagagcccugcugagcaugaucggcaugagcggcggcaaccagaacagccagcccaagggcgacggcguggugagagugugggacgugaagaacgccgaccugcugaacaaccaguucggcaccaugcccagccugacccuggccugccugaccaagcagggccagguggaccugaacgacgccgugcaggcccugaccgaccugggccugaucuacaccgccaaguaccccaacagcagcgaccuggacagacugagccagagccaccccauccugaacaugaucgacaccaagaagagcagccugaacaucagcggcuacaacuucagccugggcgccgccaucaagaccggcgccugcaugcuggacggcggcaacaugcuggagaccaucaaggugaccccccagaccauggacggcauccugaagagcauccugaaggugaagagaagccugggcauguucaucagcgacacccccggcgagagaaaccccuacgagaacauccuguacaagaucugccugagcggcgacggcuggcccuacaucgccagcagaaccgccaucaucggcagagccugggagaacaccgugguggaccuggagagcgacagcaagccccagaagaucggcagcaacggcagcaacaagagccugcagagcgccggcuucgcccccggccugaccuacagccagcugaugacccugaaggacagcaugcugcagcuggaccccaacgccaagaccuggaucgacaucgagggcagacccgaggaccccguggagguggcccuguuccagcccaucagcggcugcuacauccacuucuucagagagcccaccgaccugaagcaguucaagcaggacgccaaguacagccacggcaucgacgugaccgaccuguucgccgcccagcccggccugaccagcgccgugaucgaggcccugcccagaaacauggugcugaccugccagggcagcgacgacaucaagaagcugcuggacagccagggcagaagagacaucaagcugaucgacgugagccugaacaagaucgacagcagaaaguucgagaacgccgugugggaccaguacaaggaccugugccacaugcacaccggcguggugguggagaagaagaagaagggcggcaaggaggagaucaccccccacugcgcccugcuggacugcaucauguucgacgccgccgugagcggcggccugaacgccaccgugcugagagccgugcugcccagagacaugguguucagaaccagcagccccaagguggugcuguga

SEQ ID NO: 18042 - RNA, 1773 nt, Artificial Sequence
  derived and/or modified CDS sequence (opt4) from LASV(KAK-428;Clade n.d. (VII))__ANH09741__SP-HsPLAT_NP(2-569)
auggacgccaugaagagaggccugugcugcgugcugcugcugugcggcgccguguucgugagccccagcaacagcaaggaggugaagagcuuccuguggacccagagccugagaagagagcugagcggcuacugcaccaacaucaagcugcagguggugaaggacgcccaggcccugcugcacggccuggacuucagcgaggugagcaacgugcagagacugaugagaaagcagaagagagacgacaacgaccugaagagacugagagaccugaaccaggccgugaacaaccugguggagcugaagagcgugcagcagaagagcgugcugaaggugggcacccugaacagcgacgaccugcugacccuggccgccgaccuggagaagcugaagagcaagguggugagaaccgagagaccccugagcagcggcguguacaugggcaaccugagcagccagcagcuggaccagagaagagcccugcugaacaugaucggcauggccggcggcagccagggcaaccagcccagcagagacggcguggugagagugugggacgugaagaacgccgaccugcugaacaaccaguucggcaccaugcccagccugacccuggccugccugaccaagcagggccagguggaccugaacgacguggugcuggcccugaccgaccugggccugaucuacaccgccaaguaccccaacagcagcgaccuggacagacugagccagaaccaccccgugcugaacaugaucgacgugaacaagagcagccugaacaucagcggcuacaacuucagccugggcgccgccgugaaggccggcgccugcaugcuggacggcggcaacaugcuggagaccaucaagaucagcccccagaccguggacggcauccugaagagcauccugaaggugaagagagcccugggcauguucgugagcgacacccccggcgagagaaaccccuacgagaacauccuguacaaggugugccugagcggcaacggcuggcccuacaucgccagcagaaccagcaucgugggcagagccugggagaacaccgugguggaccuggagagcaacaagaaccagcccaaggugggcaacaacggcagcaacaagaugcugcagagcagcggcuucgccaccggccugaccuacagccagcugaugacccugagagacagcaugcugcagcuggaccccaccgccaagaccuggaucgacaucgagggcagacccgaggaccccguggagcuggcccuguuccagcccagcagcggcugcuacauccacuucuucagagagcccaccgaccugaagcaguucaagcaggacgccaaguacagccacggcaucgacgugaacgaccuguucagcgcccagcccggccugaccagcgccgugcuggaggcccugcccagaaacauggugcugaccugccagggcagcgacgacaucagaaagcugcuggacagccaggacagaaaggacaucaagcugaucgacaucagccugagcaaggccgacgccagaaaguucgagaacgacgugugggaccaguucaaggaccugugccacaugcacaccggcaucgugguggagaagaagaagaagggcggcaagcaggagaugaccccccacugcgcccugcuggacugcaucauguucgacgccgccgugagcggcggccugaacgugcccacccugagagccgugcugcccaccgacaugguguucagaaccaucaccaccaagguggugcuguga

SEQ ID NO: 18043 - RNA, 1773 nt, Artificial Sequence; identical to SEQ ID NO: 18037
  derived and/or modified CDS sequence (opt4) from LASV(Pinneo-NIG-1969;Clade I)__AIT17837__SP-HsPLAT_NP(2-569)

SEQ ID NO: 18044 - RNA, 1773 nt, Artificial Sequence
  derived and/or modified CDS sequence (opt4) from LASV(ISTH0009-NIG-2011;Clade II)__AIT17405__SP-HsPLAT_NP(2-569)
auggacgccaugaagagaggccugugcugcgugcugcugcugugcggcgccguguucgugagccccagcgugagcaaggaggugaagagcuuccuguggacccagagccugagaagagagcugagcggcuacugcagcaacaucaagcugcagguggugaaggacgcccaggcccugcugcacggccuggacuucagcgaggugagcaacgugcagagacugaugagaaagcagaagagagacgacagcgaccugaagagacugagagaccugaaccaggccgugaacaaccugguggagcugaagagcacccagcagaagagcauccugagagugggcacccugaccagcgacgaccugcugacccuggccgccgaccuggagaagcugaagagcaaggugaucagaaccgagagaccccugagcagcggcguguacaugggcaaccugagcacccagcagcuggagcagagaagagcccugcugaacaugaucggcauggugggcggcgcccagggcacccagcccggcagagacggcguggugagagugugggacgugaagaaccccgaccugcugaacaaccaguucggcaccaugcccagccugacccuggccugccugaccaagcagggccagguggaccugaacgacgccgugcuggcccugaccgaccugggccugaucuacaccgccaaguaccccaacagcagcgaccuggacagacugagccagagccaccccauccugaacaugguggacaucaagaagagcagccugaacaucagcggcuacaacuucagccugggcgccgccgugaaggccggcgccugcaugcuggacggcggcaacaugcuggagaccaucaaggugaccccccagaccauggacggcauccugaagagcauccugaaggugaagagaagccugggcauguucgugagcgacacccccggcgagagaaaccccuacgagaacauccuguacaagaucugccugagcggcgacggcuggcccuacaucgccagcagaaccagcaucgugggcagagccugggagaacaccaccguggaccuggagagcgacggcaagccccagaaggugggcagcgccggcagcaacaagagccugcagagcgccggcuuccccaccggccugaccuacagccagcugaugacccugaaggacagcaugaugcagcuggaccccagcgccaagaccuggaucgacaucgagggcagacccgaggaccccguggagaucgcccuguaccagcccaugagcggcugcuacauccacuucuucagagagcccaccgaccugaagcaguucaagcaggacgccaaguacagccacggcaucgacguggccgaccuguuccccgcccagcccggccugaccagcgccgugaucgaggcccugcccagaaacauggugcugaccugccagggcagcgacgacaucaagagacugcuggacagccagggcagaagagacaucaagcugaucgacaucgcccugagcaaggccgacagcagaagauucgagaacgccgugugggaccagugcaaggaccugugccacaugcacaccggcguggugguggagaagaagaagagaggcggcaaggaggagaucaccccccacugcgcccugauggacugcaucauguacgacgccgccgugagcggcggccugaacauccccgugcugagagccgugcugcccagagacaugguguucagaaccagcagccccaagguggugcuguga

SEQ ID NO: 18045 - RNA, 1773 nt, Artificial Sequence
  derived and/or modified CDS sequence (opt4) from LASV(ISTH2010-NIG-2012;Clade II)__AIT17483__SP-HsPLAT_NP(2-569)
auggacgccaugaagagaggccugugcugcgugcugcugcugugcggcgccguguucgugagccccagcgccagcaaggaggugaagagcuuccuguggacccagagccugagaagagagcugagcggcuacugcagcaacaucaagcugcagguggugaaggacgcccaggcccugcugcacggccuggacuucagcgaggugagcaacgugcagagacugaugagaaagcagaagagagacgacagcgaccugaagagacugagagaccugaaccaggccgugaacaaccugguggagcugaagagcacccagcagaagagcauccugagagugggcacccugaccagcgacgaccugcugacccuggccgccgaccuggagaagcugaagagcaaggugaucagaaccgagagaccccugagcagcggcguguacaugggcaaccugagcacccagcagcuggagcagagaagagcccugcugaaccugaucggcauggugggcggcgcccagggcacccagcccggcagagacggcguggugagagugugggacgugaagaaccccgaccugcugaacaaccaguucggcaccaugcccagccugacccuggccugccugaccaagcagggccagguggaccugaacgacgccgugcuggcccugaccgaccugggccugaucuacaccgccaaguaccccaacagcagcgaccuggacagacugagccagagccaccccauccugaacaugguggacaccaagaagagcagccugaacaucagcggcuucaacuucagccugggcgccgccgugaaggccggcgccugcaugcuggacggcggcaacaugcuggagaccaucaaggugaccccccagaccauggacggcauccugaagagcauccugaaggugaagaagagccugggcauguucgugagcgacacccccggcgagagaaaccccuacgagaacauccuguacaagaucugccugagcggcgacggcuggcccuacaucgccagcagaaccagcaucgugggcagagccugggagaacaccaccguggaccuggagagcgacggcaagccccacaaggugggcaccgccggcagcaacaagagccugcagagcgccggcuuccccaccggccugaccuacagccagcugaugacccugaaggacagcaugaugcagcuggaccccagcgccaagaccuggaucgacaucgagggcagacccgaggaccccguggagaucgcccuguaccagcccaugagcggcugcuacauccacuucuucagagagcccaccgaccugaagcaguucaagcaggacgccaaguacagccacggcaucgacguggccgaccuguuccccgcccagcccggccugaccagcgccgugaucgaggcccugcccagaaacauggugcugaccugccagggcagcgacgacaucaagagacugcuggacagccagggcagaagagacaucaagcugaucgacaucgcccugagcaaggccgacagcagaagauucgagaacgccgugugggaccagugcaaggaccugugccacaugcacaccggcguggugguggagaagaagaagagaggcggcaaggaggagaucaccccccacugcgcccugauggacugcaucauguacgacgccgccgugagcggcggccugaacauccccgugcugagagccgugcugcccagagacaugguguucagaaccagcagccccaagguggugcuguga

SEQ ID NO: 18046 - RNA, 1773 nt, Artificial Sequence
  derived and/or modified CDS sequence (opt4) from LASV(Lassa virus/H.sapiens-wt/NGA/2015/ISTH_0543;Clade II)__AVO03640__SP-HsPLAT_NP(2-569)
auggacgccaugaagagaggccugugcugcgugcugcugcugugcggcgccguguucgugagccccagcgccagcaaggaggugaagagcuuccuguggacccagagccugagaagagagcugagcggcuacugcagcaacaucaagcugcagguggugaaggacgcccaggcccugcugcacggccuggacuucagcgaggugagcaacgugcagagacugaugagaaagcagaagagagacgacagcgaccugaagagacugagagaccugaaccaggccgugaacaaccugguggagcugaagagcacccagcagaagagcauccugagagugggcacccugaccagcgacgaccugcugacccuggccgccgaccuggagaagcugaagagcaaggugaucagaaccgagagaccccugagcagcggcguguacaugggcaaccugagcacccagcagcuggagcagagaagagcccugcugaacaugaucggcauggugggcggcgcccagggcacccagcccggcagagacggcguggugagagugugggacgugaagaaccccgaccugcugaacaaccaguucggcaccaugcccagccugacccuggccugccugaccaagcagggccagguggaccugaacgacgccgugcuggcccugaccgaccugggccugaucuacaccgccaaguaccccaacagcagcgaccuggacagacugagccagagccaccccauccugaacaugguggacaccaagaagagcagccugaacaucagcggcuacaacuucagccugggcgccgccgugaaggccggcgccugcaugcuggacggcggcaacaugcuggagaccaucaaggugaccccccagaccauggacggcauccugaagagcauccugaaggugaagaagagccugggcauguucgugagcgacacccccggcgagagaaaccccuacgagaacauccuguacaagaucugccugagcggcgacggcuggcccuacaucgccagcagaaccagcaucgugggcagagccugggagaacaccaccguggaccuggagagcgacggcaagccccagaaggugggcagcgccggcagcaacaagagccugcagagcgccggcuuccccaccggccugaccuacagccagcugaugacccugaaggacagcaugaugcagcuggaccccagcgccaagaccuggaucgacaucgagggcagacccgaggaccccguggagaucgcccuguaccagcccaugagcggcugcuacauccacuucuucagagagcccaccgaccugaagcaguucaagcaggacgccaaguacagccacggcaucgacguggccgaccuguuccccgcccagcccggccugaccagcgccgugaucgaggcccugcccagaaacauggugcugaccugccagggcagcgacgacaucaagagacugcuggacagccagggcagaaaggacaucaagcugaucgacaucgcccugagcaaggccgacagcagaagauucgagaacgccgugugggaccagugcaaggaccugugccacaugcacaccggcguggugguggagaagaagaagagaggcggcaaggaggagaucaccccccacugcgcccugauggacugcaucauguacgacgccgccgugagcggcggccugaacauccccgugcugagagccgugcugcccagagacaugguguucagaaccagcagccccaagguggugcuguga

SEQ ID NO: 18047 - RNA, 1773 nt, Artificial Sequence
  derived and/or modified CDS sequence (opt4) from LASV(Lassa virus/H.sapiens-wt/NGA/2016/ISTH_0009;Clade II)__AVO03572__SP-HsPLAT_NP(2-569)
auggacgccaugaagagaggccugugcugcgugcugcugcugugcggcgccguguucgugagccccagcgccagcaaggaggugaagagcuuccuguggacccagagccugagaagagagcugagcggcuacugcagcaacaucaagcugcagguggugaaggacgcccaggcccugcugcacggccuggacuucagcgaggugagcaacgugcagagacugaugagaaagcagaagagagacgacagcgaccugaagagacugagagaccugaaccaggccgugaacaaccugguggagcugaagagcacccagcagaagagcauccugagagugggcacccugaccagcgacgaccugcugacccuggccgccgaccuggagaagcugaagagcaaggugaucagaaccgagagaccccugagcagcggcguguacaugggcaaccugagcacccagcagcuggagcagagaagagcccugcugaacaugaucggcauggugggcggcgcccagggcacccagcccggcagagacggcguggugagagugugggacgugaagaaccccgaccugcugaacaaccaguucggcaccaugcccagccugacccuggccugccugaccaagcagggccagguggaccugaacgacgccgugcuggcccugaccgaccugggccugaucuacaccgccaaguaccccaacagcagcgaccuggacagacugagccagagccaccccauccugaacaugguggacaccaagaagagcagccugaacaucagcggcuacaacuucagccugggcgccgccgugaaggccggcgccugcaugcuggacggcggcaacaugcuggagaccaucaaggugaccccccagaccauggacggcauccugaagagcauccugaaggugaagaagagccugggcauguucgugagcgacacccccggcgagagaaaccccuacgagaacauccuguacaagaucugccugagcggcgacggcuggcccuacaucgccagcagaaccagcaucgugggcagagccugggagaacaccaccguggaccuggagagcgacggcaagccccagaaggugggcagcgccggcagcaacaagagccugcagagcgccggcuuccccaccggccugaccuacagccagcugaugacccugaaggacagcaugaugcagcuggaccccagcgccaagaccuggaucgacaucgagggcagacccgaggaccccguggagaucgcccuguaccagcccaugagcggcugcuacauccacuucuucagagagcccaccgaccugaagcaguucaagcaggacgccaaguacagccacggcaucgacguggccgaccuguuccccgcccagcccggccugaccagcgccgugaucgaggcccugcccagaaacauggugcugaccugccagggcagcgacgacaucaagagacugcuggacagccagggcagaagagacaucaagcugaucgacaucgcccugagcaaggccgacagcagaagauucgagaacgccgugugggaccagugcaaggaccugugccacaugcacaccggcguggugguggagaagaagaagagaggcggcaaggaggagaucaccccccacugcgcccugauggacugcaucauguacgacgccgccgugagcggcggccugaacauccccgugcugagagccgugcugcccagagacaugguguucagaaccagcagccccaagguggugcuguga

SEQ ID NO: 18048 - RNA, 1773 nt, Artificial Sequence
  derived and/or modified CDS sequence (opt4) from LASV(Lassa virus/H.sapiens-wt/NGA/2016/ISTH_0017;Clade II)__AVO03568__SP-HsPLAT_NP(2-569)
auggacgccaugaagagaggccugugcugcgugcugcugcugugcggcgccguguucgugagccccagcgccagcaaggaggugaagagcuuccuguggacccagagccugagaagagagcugagcggcuacugcagcagcaucaagcugcagguggugaaggacgcccaggcccugcugcacggccuggacuucagcgaggugagcaacgugcagagacugaugagaaagcagaagagagacgacagcgaccugaagagacugagagaccugaaccaggccgugaacaaccugguggagcugaagagcacccagcagaagagcauccugagagugggcacccugaccagcgacgaccugcugacccuggccgccgaccuggagaagcugaagagcaaggugaucagaaccgagagaccccugagcagcggcguguacaugggcaaccugagcacccagcagcuggagcagagaagagcccugcugaacaugaucggcauggccggcggcgcccagggcacccagcccggcagagacggcguggugagagugugggacgugaagaaccccgaccugcugaacaaccaguucggcaccaugcccagccugacccuggccugccugaccaagcagggccagguggaccugaacgacgccgugcuggcccugaccgaccugggccugaucuacaccgccaaguaccccaacagcagcgaccuggacagacugagccagagccaccccauccugaacaugguggacaccaagaagagcagccugaacaucagcggcuacaacuucagccugggcgccgccgugaaggccggcgccugcaugcuggacggcggcaacaugcuggagaccaucaaggugaccccccagaccauggacggcauccugaagagcauccugaaggugaagagaagccugggcauguucgugagcgacgcccccggcgagagaaaccccuacgagaacauccuguacaagaucugccugagcggcgacggcuggcccuacaucgccagcagaaccagcaucgugggcagagccugggagaacaccaccguggaccuggagagcgacggcaagccccagaaggugggcgccaccggcagcaacaagagccugcagagcgccggcuuccccaccggccugaccuacagccagcugaugacccugaaggacagcaugaugcagcuggaccccagcgccaagaccuggaucgacaucgagggcagacccgaggaccccguggagguggcccuguaccagcccgugagcggcugcuacauccacuucuucagagagcccaccgaccugaagcaguucaagcaggacgccaaguacagccacggcaucgacguggccgaccuguuccccgcccagcccggccugaccagcgccgugaucgaggcccugcccagaaacauggugcugaccugccagggcagcgacgacaucaagaagcugcuggacagccagggcagaaaggacaucaagcugaucgacaucgcccugagcaaggccgacagcagaagauucgagaacgccgugugggaccagugcaaggaccugugccacaugcacaccggcguggugguggagaagaagaagagaggcggcaaggaggagaucaccccccacugcgcccugauggacugcaucauguacgacgccgccgugagcggcggccugaacauccccgugcugagagccgugcugcccagagacaugguguucagaaccagcagccccaagguggugcuguga

SEQ ID NO: 18049 - RNA, 1773 nt, Artificial Sequence
  derived and/or modified CDS sequence (opt4) from LASV(Lassa virus/H.sapiens-wt/NGA/2018/ISTH_0959;Clade II)__AVV65100__SP-HsPLAT_NP(2-569)
auggacgccaugaagagaggccugugcugcgugcugcugcugugcggcgccguguucgugagccccagcgccagcaaggaggugaagagcuuccuguggacccagagccugagaagagagcugagcggcuacugcagcaacaucaagcugcagguggugaaggacgcccaggcccugcugcacggccuggacuucagcgaggugagcaacgugcagagacugaugagaaagcagaagagagacgacagcgaccugaagagacugagagaccugaaccaggccgugaacaaccugguggagcugaagagcacccagcagaagagcauccugagagugggcacccugaccagcgacgaccugcugacccuggccgccgaccuggagaagcugaagagcaaggugaucagaaccgagagaccccugagcagcggcguguacaugggcaaccugagcacccagcagcuggagcagagaagagcccugcugaaccugaucggcauggugggcggcgcccagggcacccagcccggcagagacggcguggugagagugugggacgugaagaaccccgaccugcugaacaaccaguucggcaccaugcccagccugacccuggccugccugaccaagcagggccagguggaccugaacgacguggugcuggcccugaccgaccugggccugaucuacaccgccaaguaccccaacagcagcgaccuggacagacugagccagagccaccccauccugaacaugguggacaccaagaagagcagccugaacaucagcggcuucaacuucagccugggcgccgccgugaaggccggcgccugcaugcuggacggcggcaacaugcuggagaccaucaaggugaccccccagaccauggacggcauccugaagagcauccugaaggugaagaagagccugggcauguucgugagcgacacccccggcgagagaaaccccuacgagaacauccuguacaagaucugccugagcggcgacggcuggcccuacaucgccagcagaaccagcaucgugggcagagccugggagaacaccaccguggaccuggagagcgacggcaagccccacaaggugggcaccgccggcagcaacaagagccugcagagcgccggcuuccccaccggccugaccuacagccagcugaugacccugaaggacagcaugaugcagcuggaccccagcgccaagaccuggaucgacaucgagggcagacccgaggaccccguggagaucgcccuguaccagcccaugagcggcugcuacauccacuucuucagagagcccaccgaccugaagcaguucaagcaggacgccaaguacagccacggcaucgacguggccgaccuguuccccgcccagcccggccugaccagcgccgugaucgaggcccugcccagaaacauggugcugaccugccagggcagcgacgacaucaagagacugcuggacagccagggcagaaaggacaucaagcugaucgacaucgcccugagcaagaccgacagcagaagauucgagaacgccgugugggaccagugcaaggaccugugccacaugcacaccggcguggugguggagaagaagaagagaggcggcaaggaggagaucaccccccacugcgcccugauggacugcaucauguacgacgccgccgugagcggcggccugaacauccccgugcugagagccgugcugcccagagacaugguguucagaaccagcagccccaagguggugcuguga

SEQ ID NO: 18050 - RNA, 1773 nt, Artificial Sequence
  derived and/or modified CDS sequence (opt4) from LASV(LASV003-NIG-2008;Clade II)__AIT17581__SP-HsPLAT_NP(2-569)
auggacgccaugaagagaggccugugcugcgugcugcugcugugcggcgccguguucgugagccccagcgccagcaaggaggugaagagcuuccuguggacccagagccugagaagagagcugagcggcuacugcagcagcaucaagcugcagguggugaaggacgcccaggcccugcugcacggccuggacuucagcgaggugagcaacgugcagagacugaugagaaagcagaagagagacgacagcgaccugaagagacugagagaccugaaccaggccgugaacaaccugguggagcugaagagcacccagcagaagagcgugcugagagugggcacccugaccagcgacgaccugcugacccuggccgccgaccuggagaagcugaagagcaaggugaucagaaccgagagaccccugagcagcggcguguacaugggcaaccugagcgcccagcagcuggagcagagaagaacccugcugaacaugaucggcauggugggcggcgcccagggcacccagcccggcagagacggcguggugagagugugggacgugaagaaccccgaccugcugaacaaccaguucggcaccaugcccagccugacccuggccugccugaccaagcagggccagguggaccugaacgacguggugcuggcccugaccgaccugggccugaucuacaccgccaaguaccccaacagcagcgaccuggacagacugagccagagccaccccauccugagcaugguggacaccaagaagagcagccugaacaucagcggcuacaacuucagccugggcgccgccgugaaggccggcgccugcaugcuggacggcggcaacaugcuggagaccaucaaggugaccccccagaccauggacggcauccugaagagcauccugaaggugaagaagagccugggcauguucgugagcgacacccccggcgagagaaaccccuacgagaacauccuguacaagaucugccugagcggcgacggcuggcccuacaucgccagcagaaccagcaucgugggcagagccugggagaacaccaccguggaccuggagagcgacggcaagccccagaaggugggcaccgccggcagcaacaagagccugcagagcgccggcuuccccaccggccugaccuacagccagcugaugacccugaaggacagcaugaugcagcuggaccccagcgccaagaccuggaucgacaucgagggcagacccgaggaccccguggagaucgcccuguaccagcccaugagcggcugcuacauccacuucuucagagagcccaccgaccugaagcaguucaagcaggacgccaaguacagccacggcaucgacgugaccgaccuguuccccgcccagcccggccugaccagcgccgugaucgaggcccugcccagaaacauggugcugaccugccagggcagcgacgacaucaagagacugcuggacagccagggcagaagagacaucaagcugaucgacaucgcccugagcaaggccgacagcagaagauucgagaacgccgugugggaccagugcaaggaccugugccacaugcacaccggcguggugguggagaagaagaagagaggcggcaaggaggagaucaccccccacugcgcccugauggacugcaucauguacgacgccgccgugagcggcggccugaacauccccgugcugagagccgugcugcccagagacaugguguucagaaccagcagccccaagguggugcuguga

SEQ ID NO: 18051 - RNA, 1773 nt, Artificial Sequence
  derived and/or modified CDS sequence (opt4) from LASV(LASV035-NIG-2009;Clade II)__AIT17589__SP-HsPLAT_NP(2-569)
auggacgccaugaagagaggccugugcugcgugcugcugcugugcggcgccguguucgugagccccagcgccagcaaggaggugaagagcuuccuguggacccagagccugagaagagagcugagcggcuacugcagcagcaucaagcugcagguggugaaggacgcccaggcccugcugcacggccuggacuucagcgaggugagcaacgugcagagacugaugagaaagcagaagagagacgacagcgaccugaagagacugagagaccugaaccaggccgugaacaaccugguggagcugaagagcacccagcagaagagcauccugagagugggcacccugaccagcgacgaccugcugacccuggccgccgaccuggagaagcugaagagcaaggugaucagaaccgagagaccccugagcagcggcguguacaugggcaaccugagcgcccagcagcuggagcagagaagagcccugcugaacaugaucggcauggugggcggcgcccagggcacccagcccggcagagacggcguggugagagugugggacgugaagaaccccgaccugcugaacaaccaguucggcaccaugcccagccugacccuggccugccugaccaagcagggccagguggaccugaacgacgccgugcuggcccugaccgaccugggccugaucuacaccgccaaguaccccaacagcagcgaccuggacagacugagccagagccaccccauccugaacaugguggacaccaagaagagcagccugaacaucagcggcuacaacuucagccugggcgccgccgugaaggccggcgccugcaugcuggacggcggcaacaugcuggagaccaucaaggugaccccccagaccauggacggcauccugaagagcauccugaaggugaagagaagccugggcauguucgugagcgacacccccggcgagagaaaccccuacgagaacauccuguacaagaucugccugagcggcgacggcuggcccuacaucgccagcagaaccagcaucgugggcagagccugggagaacaccaccguggaccuggagagcgacggcaagccccagaaggugggcaccaccggcagcaacaagagccugcagagcgccggcuuccccaccggccugaccuacagccagcugaugacccugaaggacagcaugaugcagcuggaccccagcgccaagaccuggaucgacaucgagggcagacccgaggaccccguggagaucgcccuguaccagcccaugagcggcugcuacauccacuucuucagagagcccaccgaccugaagcaguucaagcaggacgccaaguacagccacggcaucgacguggccgaccuguuccccgcccagcccggccugaccagcgccgugaucgaggcccugcccagaaacauggugcugaccugccagggcagcgacgacaucaagaagcugcuggacagccagggcagaagagacaucaagcugaucgacaucgcccugagcaaggccgacagcagaaaguucgagaacgccgugugggaccagugcaaggaccugugccacaugcacaccggcguggugguggagaagaagaagagaggcggcaaggaggagaucaccccccacugcgcccugauggacugcaucauguacgacgccgccgugagcggcggccugaacauccccgugcugagagccgugcugcccagagacaugguguucagaaccagcagccccaagguggugcuguga

SEQ ID NO: 18052 - RNA, 1773 nt, Artificial Sequence
  derived and/or modified CDS sequence (opt4) from LASV(LASV1000-NIG-2009;Clade II)__AIT17783__SP-HsPLAT_NP(2-569)
auggacgccaugaagagaggccugugcugcgugcugcugcugugcggcgccguguucgugagccccagcgccagcaaggaggugaagagcuuccuguggacccagagccugagaagagagcugagcggcuacugcagcaacaucaagcugcagguggugaaggacgcccaggcccugcugcacggccuggacuucagcgaggugagcaacgugcagagacugaugagaaagcagaagagagacgacagcgaccugaagagacugagagaccugaaccaggccgugaacaaccugguggagcugaagagcacccagcagaagagcauccugagagugggcacccugaccagcgacgaccugcugacccuggccgccgaccuggagaagcugaagagcaaggugaucagaaccgagagaccccugagcagcggcguguacaugggcaaccugagcacccagcagcuggagcagagaagagcccugcugaacaugaucggcauggugggcggcgcccagggcacccagcccggcagagacggcguggugagagugugggacgugaagaaccccgaccugcugaacaaccaguucggcaccaugcccagccugacccuggccugccugaccaagcagggccagguggaccugaacgacguggugcuggcccugaccgaccugggccugaucuacaccgccaaguaccccaacagcagcgaccuggacagacugagccagagccaccccauccugaacaugguggacaccaagaagagcagccugaacaucagcggcuacaacuucagccugggcgccgccgugaaggccggcgccugcaugcuggacggcggcaacaugcuggagaccaucaaggugaccccccagaccauggacggcauccugaagagcauccugaaggugaagaagagccugggcauguucgugagcgacacccccggcgagagaaaccccuacgagaacauccuguacaagaucugccugagcggcgacggcuggcccuacaucgccagcagaaccagcaucgugggcagagccugggagaacaccaccguggaccuggagagcgacggcaagccccagaaggugggcaccgccggcagcaacaagagccugcagagcgccggcuuccccaccggccugaccuacagccagcugaugacccugaaggacagcaugaugcagcuggaccccagcgccaagaccuggaucgacaucgagggcagacccgaggaccccguggagaucgcccuguaccagcccgugagcggcugcuacauccacuucuucagagagcccaccgaccugaagcaguucaagcaggacgccaaguacagccacggcaucgacguggccgaccuguuccccgcccagcccggccugaccagcgccgugaucgaggcccugcccagaaacauggugcugaccugccagggcagcgacgacaucaagagacugcuggacagccagggcagaagagacaucaagcugaucgacaucgcccugagcaaggccgacagcagaagauucgagaacgccgugugggaccagugcaaggaccugugccacaugcacaccggcguggugguggagaagaagaagagaggcggcaaggaggagaucaccccccacugcgcccugauggacugcaucauguacgacgccgccgugagcggcggccugaacauccccgugcugagagccgugcugcccagagacaugguguucagaaccagcagccccaagguggugcuguga

SEQ ID NO: 18053 - RNA, 1773 nt, Artificial Sequence
  derived and/or modified CDS sequence (opt4) from LASV(LASV221-NIG-2010;Clade II)__AIT17625__SP-HsPLAT_NP(2-569)
auggacgccaugaagagaggccugugcugcgugcugcugcugugcggcgccguguucgugagccccagcgccagcaaggaggugaagagcuuccuguggacccagagccugagaagagagcugagcggcuacugcagcagcaucaagcugcagguggugaaggacgcccaggcccugcugcacggccuggacuucagcgaggugagcaacgugcagagacugaugagaaagcagagaagagacgacagcgaccugaagagacugagagaccugaaccaggccgugaacaaccugguggagcugaagagcacccagcagaagagcauccugagagugggcacccugaccagcgacgaccugcugacccuggccgccgaccuggagaagcugaagagcaaggugaucagaaccgagagaccccugagcagcggcguguacaugggcaaccugagcacccagcagcuggagcagagaagagcccugcugaacaugaucggcauggugggcggcgcccagggcacccagcccggcagagacggcguggugagagugugggacgugaagaaccccgaccugcugaacaaccaguucggcaccaugcccagccugacccuggccugccugaccaagcagggccagguggaccugaacgacgccgugcuggcccugaccgaccugggccugaucuacaccgccaaguaccccaacagcagcgaccuggacagacugagccagagccaccccauccugaacaugguggacaccaagaagagcagccugaacaucagcggcuacaacuucagccugggcgccgccgugaaggccggcgccugcaugcuggacggcggcaacaugcuggagaccaucaaggugaccccccagaccguggacggcauccugaagagcauccugaaggugaagagaagccugggcauguucgugagcgacacccccggcgagagaaaccccuacgagaacauccuguacaagaucugccugagcggcgacggcuggcccuacaucgccagcagaaccagcaucgugggcagagccugggagaacaccaccguggaccuggagagcgacggcaagccccagaaggugggcaccgccggcagcaacaagagccugcagagcgccggcuuccccaccggccugaccuacagccagcugaugacccugaaggacagcaugaugcagcuggaccccagcgccaagaccuggaucgacaucgagggcagacccgaggaccccguggagaucgcccuguaccagcccaugagcggcugcuacauccacuucuucagagagcccaccgaccugaagcaguucaagcaggacgccaaguacagccacggcaucgacguggccgaccuguuccccgcccagcccggccugaccagcgccgugaucgaggcccugcccagaaacauggugcugaccugccagggcagcgacgacaucaagagacugcuggacagccagggcagaagagacaucaagcugaucgacaucgcccugagcaaggccgacagcagaaaguucgagaacgccgugugggaccagugcaaggaccugugccacaugcacaccggcguggugguggagaagaagaagagaggcggcaaggaggagaucaccccccacugcgcccugauggacugcaucauguacgacgccgccgugagcggcggccugaacauccccgugcugagagccgugcugcccagagacaugguguucagaaccagcagccccaagguggugcuguga

SEQ ID NO: 18054 - RNA, 1773 nt, Artificial Sequence
  derived and/or modified CDS sequence (opt4) from LASV(LASV237-NIG-2010;Clade II)__AIT17639__SP-HsPLAT_NP(2-569)
auggacgccaugaagagaggccugugcugcgugcugcugcugugcggcgccguguucgugagccccagcgccagcaaggaggugaagagcuuccuguggacccagagccugagaagagagcugagcggcuacugcagcaacaucaagcugcagguggugaaggacgcccaggcccugcugcacggccuggacuucagcgaggugagcaacgugcagagacugaugagaaagcagaagagagacgacagcgaccugaagagacugagagaccugaaccaggccgugaacaaccugguggagcugaagagcacccagcagaagagcauccugagagugggcacccugaccagcgacgaccugcugacccuggccgccgaccuggagaagcugaagagcaaggugaucagaaccgagagaccccugagcagcggcguguacaugggcaaccugagcacccagcagcuggagcagagaagagcccugcugaacaugaucggcauggugggcggcgcccagggcacccagcccggcagagacggcguggugagagugugggacgugaagaaccccgaccugcugaacaaccaguucggcaccaugcccagccugacccuggccugccugaccaagcagggccagguggaccugaacgacgccgugcuggcccugaccgaccugggccugaucuacaccgccaaguaccccaacagcagcgaccuggacagacugagccagagccaccccauccugaacaugguggacaucaagaagagcagccugaacaucagcggcuacaacuucagccugggcgccgccgugaaggccggcgccugcaugcuggacggcggcaacaugcuggagaccaucaaggugaccccccagaccauggacggcauccugaagagcauccugaaggugaagagaagccugggcauguucgugagcgacacccccggcgagagaaaccccuacgagaacauccuguacaagaucugccugagcggcgacggcuggcccuacaucgccagcagaaccagcaucgugggcagagccugggagaacaccaccguggaccuggagagcgacggcaagccccagaaggugggcagcgccggcagcaacaagagccugcagagcgccggcuuccccaccggccugaccuacagccagcugaugacccugaaggacagcaugaugcagcuggaccccagcgccaagaccuggaucgacaucgagggcagacccgaggaccccguggagaucgcccuguaccagcccaugagcggcugcuacauccacuucuucagagagcccaccgaccugaagcaguucaagcaggacgccaaguacagccacggcaucgacguggccgaccuguuccccgcccagcccggccugaccagcgccgugaucgaggcccugcccagaaacauggugcugaccugccagggcagcgacgacaucaagagacugcuggacagccagggcagaagagacaucaagcugaucgacaucgcccugagcaaggccgacagcagaagauucgagaacgccgugugggaccagugcaaggaccugugccacaugcacaccggcguggugguggagaagaagaagagaggcggcaaggaggagaucaccccccacugcgcccugauggacugcaucauguacgacgccgccgugagcggcggccugaacauccccgugcugagagccgugcugcccagagacaugguguucagaaccagcagccccaagguggugcuguga

SEQ ID NO: 18055 - RNA, 1773 nt, Artificial Sequence
  derived and/or modified CDS sequence (opt4) from LASV(LASV253-NIG-2011;Clade II)__AIT17671__SP-HsPLAT_NP(2-569)
auggacgccaugaagagaggccugugcugcgugcugcugcugugcggcgccguguucgugagccccagcgccagcaaggaggugaagagcuuccuguggacccagagccugagaagagagcugagcggcuacugcagcagcaucaagcugcagguggugaaggacgcccaggcccugcugcacggccuggacuucagcgaggugagcaacgugcagagacugaugagaaagcagaagagagacgacagcgaccugaagagacugagagaccugaaccaggccgugaacaaccugguggagcugaagagcacccagcagaagagcgugcugagagugggcacccugaccagcgacgaccugcugacccuggccgccgaccuggagaagcugaagagcaaggugaucagaaccgagagaccccugagcagcggcguguacaugggcaaccugagcacccagcagcuggagcagagaagagcccugcugaacaugaucggcauggugggcggcgcccagggcacccagcccggcagagacggcguggugagagugugggacgugaagaaccccgaccugcugaacaaccaguucggcaccaugcccagccugacccuggccugccugaccaagcagggccagguggaccugaacgacguggugcuggcccugaccgaccugggccugaucuacaccgccaaguaccccaacagcagcgaccuggacagacugagccagagccaccccauccugaacaugguggacaccaagaagagcagccugaacaucagcggcuacaacuucagccugggcgccgccgugaaggccggcgccugcaugcuggacggcggcaacaugcuggagaccaucaaggugaccccccagaccauggacggcauccugaagagcauccugaaggugaagaagagccugggcauguucgugagcgacacccccggcgagagaaaccccuacgagaacauccuguacaagaucugccugagcggcgacggcuggcccuacaucgccagcagaaccagcaucgugggcagagccugggagaacaccaccguggaccuggagagcgacggcaagccccagaaggugggcaccgccggcagcaacaagagccugcagagcgccggcuuccccaccggccugaccuacagccagcugaugacccugaaggacagcaugaugcagcuggaccccagcgccaagaccuggaucgacaucgagggcagacccgaggaccccguggagaucgcccuguaccagcccaugagcggcugcuacauccacuucuucagagagcccaccgaccugaagcaguucaagcaggacgccaaguacagccacggcaucgacgugaccgaccuguuccccgcccagcccggccugaccagcgccgugaucgaggcccugcccagaaacauggugcugaccugccagggcagcgacgacaucaagagacugcuggacagccagggcagaagagacaucaagcugaucgacaucgcccugagcaaggccgacagcagaagauucgagaacgccgugugggaccagugcaaggaccugugccacaugcacaccggcguggugguggagaagaagaagagaggcggcaaggaggagaucaccccccacugcgcccugauggacugcaucauguacgacgccgccgugagcggcggccugaacauccccgugcugagagccgugcugcccagagacaugguguucagaaccagcagccccaagguggugcuguga

SEQ ID NO: 18056 - RNA, 1773 nt, Artificial Sequence
  derived and/or modified CDS sequence (opt4) from LASV(LASV254-NIG-2011;Clade II)__AIT17675__SP-HsPLAT_NP(2-569)
auggacgccaugaagagaggccugugcugcgugcugcugcugugcggcgccguguucgugagccccagcgccagcaaggaggugaagagcuuccuguggacccagagccugagaagagagcugagcggcuacugcagcagcaucaagcugcagguggugaaggacgcccaggcccugcugcacggccuggacuucagcgaggugagcaacgugcagagacugaugagaaagcagaagagagacgacagcgaccugaagagacugagagaccugaaccaggccgugaacaaccugguggagcugaagagcacccagcagaagagcgugcugagagugggcacccugaccagcgacgaccugcugacccuggccgccgaccuggagaagcugaagagcaaggugaucagaaccgagagaccccugagcagcggcguguacaugggcaaccugagcacccagcagcuggagcagagaagagcccugcugaacaugaucggcauggugggcggcgcccagggcacccagcccggcagagacggcguggugagagugugggacgugaagaaccccgaccugcugaacaaccaguucggcaccaugcccagccugacccuggccugccugaccaagcagggccagguggaccugaacgacgccgugcuggcccugaccgaccugggccugaucuacaccgccaaguaccccaacagcagcgaccuggacagacugagccagagccaccccauccugaacaugguggacaccaagaagagcagccugaacaucagcggcuacaacuucagccugggcgccgccgugaaggccggcgccugcaugcuggacggcggcaacaugcuggagaccaucaaggugaccccccagaccauggacggcauccugaagagcauccugaaggugaagaagagccugggcauguucgugagcgacacccccggcgagagaaaccccuacgagaacauccuguacaagaucugccugagcggcgacggcuggcccuacaucgccagcagaaccagcaucgugggcagagccugggagaacaccaucguggaccuggagagcgacggcaagccccagaaggugggcaccgccggcagcaacaagagccugcagagcgccggcuuccccaccggccugaccuacagccagcugaugacccugaaggacagcaugaugcagcuggaccccagcgccaagaccuggaucgacaucgagggcagacccgaggaccccguggagaucgcccuguaccagcccaugagcggcugcuacauccacuucuucagagagcccaccgaccugaagcaguucaagcaggacgccaaguacagccacggcaucgacguggccgaccuguuccccgcccagcccggccugaccagcgccgugaucgaggcccugcccagaaacauggugcugaccugccagggcagcgacgacaucaagagacugcuggacagccagggcagaagagacaucaagcugaucgacaucgcccugagcaaggccgacagcagaagauucgagaacgccgugugggaccagugcaaggaccugugccacaugcacaccggcguggugguggagaagaagaagagaggcggcaaggaggagaucaccccccacugcgcccugauggacugcaucauguacgacgccgccgugagcggcggccugaacauccccgugcugagagccgugcugcccagagacaugguguucagaaccagcagccccaagguggugcuguga

SEQ ID NO: 18057 - RNA, 1773 nt, Artificial Sequence
  derived and/or modified CDS sequence (opt4) from LASV(Nig08-04;Clade II)__ADU56611__SP-HsPLAT_NP(2-569)
auggacgccaugaagagaggccugugcugcgugcugcugcugugcggcgccguguucgugagccccagcgccagcaaggaggugaagagcuuccuguggacccagagccugagaagagagcugagcggcuacugcagcaacaucaagcugcagguggugaaggacgcccaggcccugcugcacggccuggacuucagcgaggugagcaacgugcagagacugaugagaaagcagaagagagacgacggcgaccugaagagacugagagaccugaaccaggccgugaacaaccugguggagcugaagagcacccagcagaagagcgugcugagagugggcacccugaccagcgacgaccugcugacccuggccgccgaccuggagaagcugaagagcaaggugaucagaaccgagagaccccugagcagcggcguguacaugggcaaccugagcacccagcagcuggagcagagaaaggcccugcugagcaugaucggcauggugggcggcgcccagggcacccagcccggcagagacggcguggugagagugugggacgugaagaaccccgaccugcugaacaaccaguucggcaccaugcccagccugacccuggccugccugaccaagcagggccagguggaccugaacgacgccgugcuggcccugaccgaccugggccugaucuacaccgccaaguaccccaacagcagcgaccuggacagacugagccagagccaccccauccugaacaugguggacaccaagaagagcagccugaacaucagcggcuacaacuucagccugggcgccgccgugaaggccggcgccugcaugcuggacggcggcaacaugcuggagaccaucaaggugaccccccagaccauggacggcauccugaagagcauccugaaggugaagagaagccugggcauguucgugagcgacacccccggcgagagaaaccccuacgagaacauccuguacaagaucugccugagcggcgacggcuggcccuacaucgccagcagaaccagcaucgugggcagagccugggagaacaccaccguggaccuggagagcgacggcaagccccagaaggugggcaccgccggcagcaacaagagccugcagagcgccggcuuccccaccggccugaccuacagccagcugaugacccugaaggacagcaugaugcagcuggaccccagcgccaagaccuggaucgacaucgagggcagacccgaggaccccguggagaucgcccuguaccagcccaugagcggcugcuacauccacuucuucagagagcccaccgaccugaagcaguucaagcaggacgccaaguacagccacggcaucgacgugaccgaccuguucagcgcccagcccggccugaccagcgccgugaucgaggcccugcccagaaacauggugcugaccugccagggcagcgacgacaucaagaagcugcuggacagccagggcagaagagacaucaagcugaucgacaucagccugaacaaggccgacagcagaagauucgagaacgccgugugggaccagugcaaggaccugugccacaugcacaccggcguggugguggagaagaagaagagaggcggcaaggaggagaucaccccccacugcgcccugauggacugcaucauguucgacgccgccgugagcggcggccugaacauccccauccugagagccgugcugcccagagacaugguguucagaaccagcagccccaagguggugcuguga

SEQ ID NO: 18058 - RNA, 1776 nt, Artificial Sequence
  derived and/or modified CDS sequence (opt4) from LASV(GA391;Clade III)__AAA46284__SP-HsPLAT_NP(2-570)
auggacgccaugaagagaggccugugcugcgugcugcugcugugcggcgccguguucgugagccccagcgccagcaaggaggugagaagcugccuguggacccagagccugagaagagagcugagcggcuacugcagcaacaucaagcugcagguggugaaggacgcccaggcccugcugcacggccuggacuucagcgaggugagcaacgugcagagacugaugagaaagcagaagagagacgacggcgaccugaagagacugagagaccugaaccaggccgugaacaaccugguggagcugaagagcacccagcagaagagcgugcugagagugggcacccugagcagcgacgaccugcugauccuggccgccgaccuggagaagcugaagagcaaggugaccagaaccgagagaccccugagcagcggcguguacaugggcaaccugagcagccagcagcuggaccagagaagagcccugcugaacaugaucggcaugaccggcgugagcggcggcggcaagggcgccagcaacggcaucgugagagugugggacgugaagaacgccgagcugcugaacaaccaguucggcaccaugcccagccugacccuggccugccugaccaagcagggccagguggaccugaacgacgccgugcaggcccugaccgaccugggccugaucuacaccgccaaguaccccaacagcagcgaccuggacagacugagccagagccaccccauccugaacaugaucgacaccaagaagagcagccugaacaucagcggcuacaacuucagccugggcgccgccgugaaggccggcgccugcaugcuggacggcggcaacaugcuggagaccaucaaggugagcccccagaccauggacggcauccugaagagcauccugaaggugaagaagagccugggcauguucgugagcgacacccccggcgagagaaaccccuacgagaacauccuguacaagaucugccugagcggcgacggcuggagcuacaucgccagcagaaccagcaucgugggcagagccugggagaacaccgugguggaccuggagcaggacaacaagccccagaagaucggcaacggcggcagcaacaagagccugcagagcgccggcuucgccgccggccugaucuacagccagcugaugacccugaaggacuucaagugcuucaaccugauccccaacgccaagaccuggauggacaucgagggcagacccgaggaccccguggagaucgcccuguaccagcccagcagcggcugcuacgugcacuucuucagagagcccaccgaccugaagcaguucaagcaggacgccaaguacagccacggcagagacgugaccgaccuguucgccgcccagcccggccugaccagcgccgugaucgaggcccugcccagaaacauggugaucaccugccagggcagcgaggacaucagaaagcugcuggagagccagggcagaagagacaucaagcugaucgacaucacccugagcaaggccgacagcagaaaguucgagaacgccgugugggaccaguucaaggaccugugccacaugcacaccggcguggugguggagaagaagaagagaggcggcaaggaggagaucaccccccacugcgcccugauggacugcaucauguucgacgccgccgugagcggcggccuggacgccaaggugcugagaguggugcugcccagagacaugguguucagaaccagcacccccaagguggugcuguga

SEQ ID NO: 18059 - RNA, 1773 nt, Artificial Sequence
  derived and/or modified CDS sequence (opt4) from LASV(Nig08-A19;Clade III)__ADU56619__SP-HsPLAT_NP(2-569)
auggacgccaugaagagaggccugugcugcgugcugcugcugugcggcgccguguucgugagccccagcgccagcaaggaggugaagagcuuccuguggacccagagccugagaagagagcugagcggcuacugcagcaacaucaagcugcagguggugaaggacgcccaggcccugcugcacggccuggacuucagcgaggugagcaacgugcagagacugaugagaaagcagaagagagacgacggcgaccugaagagacugagagaccugaaccaggccgugaacaaccugguggagcugaagagcacccagcagaagagcgugcugagagugggcacccugagcagcgacgaccugcuggugcuggccgccgaccuggagaagcugaagagcaagguggugagaaccgagagaccccugagcagcggcaucuacaugggcaaccugagcagccagcagcuggaccagagaaaggcccugcugaacaugaucggcaugaccggcggcaacggcggcagaaacaccaccagcgacggcaucgugagagugugggacgugaagaacgccgagcugcugaacaaccaguucggcaccaugcccagccugacccuggccugccugaccaagcagggccagguggaccugaacgacgccgugcaggcccugaccgaccugggccugaucuacaccgccaaguaccccaacagcagcgaccuggacagacuggcccagagccaccccauccugaacaugaucgacaccaagaagagcagccugaacaucagcggcuacaacuucagccugggcgccgccgugaaggccggcgccugcaugcuggacggcggcaacaugcuggagaccaucaaggugagcccccagaccauggacggcauccugaagagcauccugaaggugaagagaagccugggcauguucaucagcgacacccccggcgagagaaaccccuacgagaacauccuguacaagaucugccugagcggcgacggcuggcccuacaucgccagcagaaccagcaucgugggcagagccugggagaacaccgugguggaccuggagagcgacaacaagccccagaagaccggcaacggcggcagcaacaagagccugcagagcgccggcuucgccgccggccugaccuacagccagcugaugacccugaaggacagcaugcugcagcuggaccccaacgccaagaccuggauggacaucgagggcagacccgaggaccccguggagaucgcccuguaccagcccagcagcggcugcuacauccacuucuucagagagcccaccgaccugaagcaguucaagcaggacgccaaguacagccacggcaucgacgugaccgaccuguucgccgcccagcccggccugaccagcgccgugaucgaggcccugcccagaaacauggugaucaccugccagggcagcgaggacaucagaaagcugcuggagagccagggcagaagagacaucaagcugaucgacaucagccugagcaagguggacagcagaaaguucgagaacgccgugugggaccaguucaaggaccugugccacaugcacaccggcaucgugguggagaagaagaagagaggcggcaaggaggagaucaccccccacugcgcccugauggacugcaucauguucgacgccgccgugagcggcggcguggacgccaaggugcugagagccgugcugcccagagacaugguguucagaaccagcacccccaagguggugcuguga

SEQ ID NO: 18060 - RNA, 1773 nt, Artificial Sequence
  derived and/or modified CDS sequence (opt4) from LASV(G1180-SLE-2010;Clade IV)__AIT17169__SP-HsPLAT_NP(2-569)
auggacgccaugaagagaggccugugcugcgugcugcugcugugcggcgccguguucgugagccccagcgccagcaaggagaucaagagcuuccuguggacccagagccugagaagagagcugagcggcuacugcagcaacaucaagcugcagguggugaaggacgcccaggcccugcugcacggccuggacuucagcgaggugagcaacgugcagagacugaugagaaaggagagaagagacgacaacgaccugaagagacugagagaccugaaccaggccgugaacaaccugguggagcugaagagcacccagcagaagagcauccugagagugggcacccugaccagcgacgaccugcugauccuggccgccgaccuggagaagcugaagagcaaggugaucagaaccgagagaccccugagcgccggcguguacaugggcaaccugagcagccagcagcuggaccagagaagagcccugcugagcaugaucggcaugagcagcggcaaccagagagcccaggccggcagagacggcguggugagagugugggacgugaagaacguggagcugcugaacaaccaguucggcaccaugcccagccugacccuggccugccugaccaagcagggccagguggaccugaacgacgccgugcaggcccugaccgaccugggccugaucuacaccgccaaguaccccaacaccagcgaccuggacagacugacccagagccaccccauccugaacaugaucgacaccaagaagagcagccugaacaucagcggcuacaacuucagccugggcgccgccgugaaggccggcgccugcaugcuggacggcggcaacaugcuggagaccaucaaggugagcccccagaccauggacggcauccugaagagcauccugaaggugaagaaggcccugggcauguucaucagcgacacccccggcgagagaaaccccuacgagaacauccuguacaagaucugccugagcggcgacggcuggcccuacaucgccagcagaaccagcaucaccggcagagccugggagaacaccgugguggaccuggagagcgacggcaagccccagaaggccggcagcaacaacagcaacaagagccugcagagcgugggcuucaccgccggccugaccuacagccagcugaugacccugaaggacgccaugcugcagcuggaccccaacgccaagaccuggauggacaucgagggcagacccgaggaccccguggagaucgcccuguaccagcccagcagcggcugcuacauccacuucuucagagagcccaccgaccugaagcaguucaagcaggacgccaaguacagccacggcaucgacgugaccgaccuguucgccgcccagcccggccugaccagcgccgugaucgacgcccugcccagaaacauggugaucaccugccagggcagcgacgacaucagaaagcugcuggagagccagggcagaaaggacaucaagcugaucgacaucgcccugagcaagaccgacagcagaaaguacgagaacgccgugugggaccaguacaaggaccugugccacaugcacaccggcguggugguggagaagaagaagagaggcggcaaggaggagaucaccccccacugcgcccugauggacugcaucauguucgacgccgccgugagcggcggccugaacaccagcgugcugagagccgugcugcccagagacaugguguucagaaccagcacccccagaguggugcuguga

SEQ ID NO: 18061 - RNA, 1773 nt, Artificial Sequence
  derived and/or modified CDS sequence (opt4) from LASV(G1442-SLE-2011;Clade IV)__AIT17181__SP-HsPLAT_NP(2-569)
auggacgccaugaagagaggccugugcugcgugcugcugcugugcggcgccguguucgugagccccagcgccagcaaggaggugaagagcuuccuguggacccagagccugagaagagagcugagcggcuacugcagcaacaucaagcugcagguggugaaggacgcccaggcccugcugcacggccuggacuucagcgaggugagcaacgugcagagacugaugagaaagcagagaagagacgacaacgaccugaagagacugagagaccugaaccaggccgugaacaaccugguggagcugaagagcacccagcagaagagcgugcugagagugggcacccugaccagcgacgaccugcuggugcuggccgccgaccuggagaagcugaagagcaaggugaucagaaccgagagaccccugagcgccggcguguacaugggcaaccugagcagccagcagcuggaccagagaagagcccugcugaacaugaucggcaugagcggcggcauccagggcaccagaaccggcagagacggcguggugagagugugggacgugaagaacgccgaccugcugaacaaccaguucggcaccaugcccagccugacccuggccugccugaccaagcagggccagguggaccugaacgacguggugcaggcccugaccgaccugggccugaucuacaccgccaaguaccccaacgccagcgaccuggacagacugacccagagccaccccauccugaacaugaucgacaccaagaagagcagccugaacaucagcggcuacaacuucagccugggcgccgccgugaaggccggcgccugcaugcuggacggcggcaacaugcuggagaccaucaaggugagcccccagaccauggacggcauccugaagagcauccugaaggugaagaagacccugggcauguucaucagcgacacccccggcgagagaaaccccuacgagaacauccuguacaagaucugccugagcggcgacggcuggcccuacaucgccagcagaaccagcaucaccggcagagccugggagaacaccgugguggaccuggagagcgacggcaagccccagaaggccggcagcaacaacagcaacaagagccugcagagcgccggcuucgccgccggccugaccuacagccagcugaugacccugaaggacgccaugcugcagcuggaccccaacgccaagaccuggauggacaucgagggcagacccgaggaccccguggagaucgcccuguaccagcccagcagcggcugcuacauccacuucuucagagagcccaccgaccugaagcaguucaagcaggacgccaaguacagccacggcaucgacgugaccgaccuguucgccgcccagcccggccugaccagcgccgugaucgaggcccugcccagaaacauggugaucaccugccagggcagcgacgacaucaagaagcugcuggagagccagggcagaaaggacaucaagcugaucgacaucgcccugagcaagaccgacagcagaaaguacgagaacgccgugugggaccaguacaaggaccugugccacaugcacaccggcguggugguggagaagaagaagagaggcggcaaggaggagaucaccccccacugcgcccugauggacugcaucauguucgacgccgccgugagcggcggccugaacacccuggugcugagagccgugcugcccagagacaugguguucagaaccagcacccccagaguggugcuguga

SEQ ID NO: 18062 - RNA, 1773 nt, Artificial Sequence
  derived and/or modified CDS sequence (opt4) from LASV(G3010-SLE-2013;Clade IV)__AIT17345__SP-HsPLAT_NP(2-569)
auggacgccaugaagagaggccugugcugcgugcugcugcugugcggcgccguguucgugagccccagcgccagcaaggagaucaagagcuuccuguggacccagagccugagaagagagcugagcggcuacugcagcaacaucaagcugcagguggugaaggacgcccaggcccugcugcacggccuggacuucagcgaggugagcaacgugcagagacugaugagaaaggagagaagagacgacaacgaccugaagagacugagagaccugaaccaggccgugaacaaccugguggagcugaagagcacccagcagaagagcauccugagagugggcacccugaccagcgacgaccugcugauccuggccgccgaccuggagaagcugaagagcaaggugaccagaaccgagagaccccugagcgccggcguguacaugggcaaccugagcagccagcagcuggaccagagaagagcccugcugagcaugaucggcaugagcagcggcgugcagggcgccagagccggcagagacggcguggugagagugugggacgugaagaacgccgagcugcugaacaaccaguucggcaccaugcccagccugacccuggccugccugaccaagcagggccagguggaccugaacgacguggugcaggcccugaccgaccugggccugaucuacaccgccaaguaccccaacaccagcgaccuggacagacugacccagagccaccccauccugaacaugaucgacaccaagaagagcagccugaacaucagcggcuacaacuucagccugggcgccgccgugaaggccggcgccugcaugcuggacggcggcaacaugcuggagaccaucaaggugagcccccagaccauggacggcauccugaagagcauccugaaggugaagaaggcccugggcauguucaucagcgagacccccggcgagagaaaccccuacgagaacauccuguacaagaucugccugagcggcgacggcuggcccuacaucgccagcagaaccagcaucaccggcagagccugggagaacaccgugguggaccuggagagcgacggcaagccccagaaggccggcagcaacaacagcaacaagagccugcagagcgccggcuucaccgccggccugaccuacagccagcugaugacccugaaggacgccaugcugcagcuggaccccaacgccaagaccuggauggacaucgagggcagacccgaggaccccguggagguggcccuguaccagcccagcagcggcugcuacauccacuucuucagagagcccaccgaccugaagcaguucaagcaggacgccaaguacagccacggcaucgacgugaccgaccuguucgccgcccagcccggccugaccagcgccgugaucgacgcccugcccagaaacauggugaucaccugccagggcagcgacgacaucaagaagcugcuggagagccagggcagaaaggacaucaagcugaucgacaucgcccugagcaagaccgacagcagaaaguacgagaacgccgugugggaccaguacaaggaccugugccacaugcacaccggcguggugguggagaagaagaagagaggcggcaaggaggagaucaccccccacugcgcccugauggacugcaucauguucgacgccgccgugagcggcggccugaacaccagcgugcugagagccgugcugcccagagacaugguguucagaaccagcacccccagaguggugcuguga

SEQ ID NO: 18063 - RNA, 1773 nt, Artificial Sequence
  derived and/or modified CDS sequence (opt4) from LASV(G502-SLE-2009;Clade IV)__AIT17127__SP-HsPLAT_NP(2-569)
auggacgccaugaagagaggccugugcugcgugcugcugcugugcggcgccguguucgugagccccagcgccagcaaggagaucaagagcuuccuguggacccagagccugagaagagagcugagcggcuacugcagcaacaucaagcugcagguggugaaggacgcccaggcccugcugcacggccuggacuucagcgaggugagcaacgugcagagacugaugagaaaggagagaagagacgacaacgaccugaagagacugagagaccugaaccaggccgugaacaaccugguggagcugaagagcacccagcagaagagcauccugagagugggcacccugaccagcgacgaccugcugauccuggccgccgaccuggagaagcugaagagcaaggugaucagaaccgagagaccccugagcgccggcguguacaugggcaaccugagcagccagcagcuggaccagagaagagcccugcugagcaugaucggcaugagcggcggcaaccagggcgugagagccggcaaggacggcguggugagagugugggacgugaagaacgccgagcugcugaacaaccaguucggcaccaugcccagccugacccuggccugccugaccaagcagggccagguggaccugaacgacgccgugcaggcccugaccgaccugggccugaucuacaccgccaaguaccccaacaccagcgaccuggacagacugacccagagccaccccauccugaacaugaucgacaccaagaagagcagccugaacaucagcggcuacaacuucagccugggcgccgccgugaaggccggcgccugcaugcuggacggcggcaacaugcuggagaccaucaaggugagcccccagaccauggacggcauccugaagagcauccugaaggugaagaaggcccugggcauguucaucagcgacacccccggcgagagaaaccccuacgagaacauccuguacaagaucugccugagcggcgacggcuggcccuacaucgccagcagaaccagcaucaccggcagagccugggagaacaccgugguggaccuggagagcgacggcaagccccagaaggccggcagcaacaacagcaacaagagccugcagagcgccggcuucaccgccggccugaccuacagccagcugaugacccugaaggacgccaugcugcagcuggaccccaacaccaagaccuggauggacaucgagggcagacccgaggaccccguggagaucgcccuguaccagcccagcagcggcugcuacauccacuucuucagagagcccaccgaccugaagcaguucaagcaggacgccaaguacagccacggcaucgacgugaccgaccuguucgccgcccagcccggccugaccagcgccgugaucgacgcccugcccagaaacauggugaucaccugccagggcagcgacgacaucagaaagcugcuggagagccagggcagaaaggacaucaagcugaucgacaucgcccugaacaagaccgacagcagaaaguacgagaacgccgugugggaccaguacaaggaccugugccacaugcacaccggcguggugguggagaagaagaagagaggcggcaaggaggagaucaccccccacugcgcccugauggacugcaucauguucgacgccgccgugagcggcggccugaacaccagcgugcugagagccgugcugcccagagacaugguguucagaaccagcacccccagaguggugcuguga

SEQ ID NO: 18064 - RNA, 1773 nt, Artificial Sequence
  derived and/or modified CDS sequence (opt4) from LASV(G733-SLE-2010;Clade IV)__AIT17155__SP-HsPLAT_NP(2-569)
auggacgccaugaagagaggccugugcugcgugcugcugcugugcggcgccguguucgugagccccagcgccagcaaggagaucaagagcuuccuguggacccagagccugagaagagagcugagcggcuacugcagcaacaucaagcugcagguggugaaggacgcccaggcccugcugcacggccuggacuucagcgaggugagcaacgugcagagacugaugagaaaggagagaagagacgacaacgaccugaagagacugagagaccugaaccaggccgugaacaaccugguggagcugaagagcacccagcagaagagcgugcugagagugggcacccugaccagcgacgagcugcuggugcuggccgccgaccuggagaagcugaagagcaaggugaucagaaccgagagaccccugagcgccggcguguacaugggcaaccugagcagccagcagcuggaccagagaagagcccugcugagcaugaucggcaugagcggcggcaaccagggcgccagaaccggcagagacggcguggugagagugugggacgugaagaacgccgagcugcugaacaaccaguucggcaccaugcccagccugacccuggccugccugaccaagcagggccagguggaccugaacgacgccgugcaggcccugaccgaccugggccugaucuacaccgccaaguaccccaacaccagcgaccuggacagacugacccagagccaccccauccugaacaugaucgacaccaagaagagcagccugaacaucagcggcuacaacuucagccugggcgccgccgugaaggccggcgccugcaugcuggacggcggcaacaugcuggagaccaucaaggugagcccccagaccauggacggcauccugaagagcauccugaaggugaagaaggcccugggcauguucaucagcgacacccccggcgagagaaaccccuacgagaacauccuguacaagaucugccugagcggcgacggcuggcccuacaucgccagcagaaccagcaucaccggcagagccugggagaacaccgugguggaccuggagagcgacggcaagccccagaaggccggcagcaacaacagcaacaagagccugcagagcgccggcuucaccgccggccugaccuacagccagcugaugacccugaaggacgccaugcugcagcuggaccccaacgccaagaccuggauggacaucgagggcagacccgaggaccccguggagaucgcccuguaccagcccagcagcggcugcuacauccacuucuucagagagcccaccgaccugaagcaguucaagcaggacgccaaguacagccacggcaucgacgugaccgaccuguucgccgcccagcccggccugaccagcgccgugaucgacgcccugcccagaaacauggugaucaccugccagggcagcgacgacaucagaaagcugcuggagagccagggcagaaaggacaucaagcugaucgacaucgcccugagcaagaucgacagcagaaaguacgagaacgccgugugggaccaguacaaggaccugugccacaugcacaccggcguggugguggagaagaagaagagaggcggcaaggaggagaucaccccccacugcgcccugauggacugcaucauguucgacgccgccgugagcggcggccugaacagccuggugcugagagccgugcugcccagagacaugguguucagaaccagcacccccagaguggugcuguga

SEQ ID NO: 18065 - RNA, 1773 nt, Artificial Sequence
  derived and/or modified CDS sequence (opt4) from MOPV/LASV reassortant(IGS-1;Clade IV)__AFY05578__SP-HsPLAT_NP(2-569)
auggacgccaugaagagaggccugugcugcgugcugcugcugugcggcgccguguucgugagccccagcgccagcaaggagaucaagagcuuccuguggacccagagccugagaagagagcugagcggcuacugcagcaacaucaagcugcagguggugaaggacgcccaggcccugcugcacggccuggacuucagcgaggugagcaacgugcagagacugaugagaaaggagagaagagacgacaacgaccugaagagacugagagaccugaaccaggccgugaacaaccugguggagcugaagagcacccagcagaagagcauccugagagugggcacccugaccagcgacgaccugcugauccuggccgccgaccuggagaagcugagaagcaaggugaucagaaccgagagaccccugagcgccggcguguacaugggcaaccugagcagccagcagcuggaccagagaagagcccugcugaacaugaucggcaugagcggcggcaaccagggcgccagagccggcagagacggcguggugagagugugggacgugaagaacgccgagcugcugagcaaccaguucggcaccaugcccagccugacccuggccugccugaccaagcagggccagguggaccugaacgacgccgugcaggcccugaccgaccugggccugaucuacaccgccaaguaccccaacaccagcgaccuggacagacugacccagagccaccccauccugaacaugaucgacaccaagaagagcagccugaacaucagcggcuacaacuucagccugggcgccgccgugaaggccggcgccugcaugcuggacggcggcaacaugcuggagaccaucaaggugagcccccagaccauggacggcauccugaagagcauccugaaggugaagaaggcccugggcauguucaucagcgacacccccggcgagagaaaccccuacgagaacauccuguacaagaucugccugagcggcgacggcuggcccuacaucgccagcagaaccagcaucaccggcagagccugggagaacaccgugguggaccuggagagcgacggcaagccccagaaggccgacagcaacaacagcagcaagagccugcagagcgccggcuucaccgccggccugaccuacagccagcugaugacccugaaggacgccaugcugcagcuggaccccaacgccaagaccuggauggacaucgagggcagacccgaggaccccguggagaucgcccuguaccagcccagcagcggcugcuacauccacuucuucagagagcccaccgaccugaagcaguucaagcaggacgccaaguacagccacggcaucgacgugaccgaccuguucgccacccagcccggccugaccagcgccgugaucgacgcccugcccagaaacauggugaucaccugccagggcagcgacgacaucagaaagcugcuggagagccagggcagaaaggacaucaagcugaucgacaucgaccugagcaagaccgacagcagaaaguacgagaacgccgugugggaccaguacaaggaccugugccacaugcacaccggcguggugguggagaagaagaagagaggcggcaaggaggagaucaccccccacugcgcccugauggacugcaucauguucgacgccgccgugagcggcggccugaacaccagcgugcugagagccgugcugcccagagacaugguguucagaaccagcacccccagaguggugcuguga

SEQ ID NO: 18066 - RNA, 1773 nt, Artificial Sequence
  derived and/or modified CDS sequence (opt4) from LASV(LM765-SLE-2012;Clade IV)__AIT17815__SP-HsPLAT_NP(2-569)
auggacgccaugaagagaggccugugcugcgugcugcugcugugcggcgccguguucgugagccccagcgccagcaaggagaucaagagcuuccuguggacccagagccugagaagagagcugagcggcuacugcagcaacaucaagcugcagguggugaaggacgcccaggcccugcugcacggccuggacuucagcgaggugagcaacgugcagagacugaugagaaaggagagaagagacgacaacgaccugaagagacugagagaccugaaccaggccgugaacaaccugguggagcugaagagcacccagcagaagagcauccugagagugggcacccugaccagcgacgaccugcugauccuggccgccgaccuggagaagcugaagagcaaggugaccagaaccgagagaccccugagcgccggcguguacaugggcaaccugagcagccagcagcuggaccagagaagagcccugcuggacaugaucggcaugagcggcagcaaccagggcgccagagccggcagagacggcguggugagagugugggacgugaagaacgccgagcugcugaacaaccaguucggcaccaugcccagccugacccuggccugccugaccaagcagggccagguggaccugaacgacgccgugcaggcccugaccgaccugggccugaucuacaccgccaaguaccccaacaccagcgaccuggacagacugacccagagccaccccauccugaacaugaucgacaccaagaagagcagccugaacaucagcggcuacaacuucagccugggcgccgccgugaaggccggcgccugcaugcuggacggcggcaacaugcuggagaccaucaaggugagcccccagaccauggacggcauccugaagagcauccugaaggugaagaaggcccugggcauguucaucagcgacgcccccggcgagagaaaccccuacgagaacauccuguacaagaucugccugagcggcgacggcuggcccuacaucgccagcagaaccagcaucaccggcagagccugggagaacaccgugguggaccuggagagcgacggcaagccccagaaggccggcagcaacggcagcaacaagagccugcagagcgccggcuucaccgccggccugaccuacagccagcugaugacccugaaggacgccaugcugcagcuggaccccaacgccaagaccuggauggacaucgagggcagacccgaggaccccguggagaucgcccuguaccagcccagcagcggcugcuacauccacuucuucagagagcccaccgaccugaagcaguucaagcaggacgccaaguacagccacggcaucgacgugaccgaccuguucgccgcccagcccggccugaccagcgccgugaucgacgcccugcccagaaacauggugaucaccugccagggcagcgacgacaucagaaagcuguucgagagccagggcagaaaggacaucaagcugaucgacaucgcccugagcaagaccgacagcagaaaguacgagaacgccgugugggaccaguacaaggaccugugccacaugcacaccggcaucgugguggagaagaagaagagaggcggcaaggaggagaucaccccccacugcgcccugauggacugcaucauguucgacgccgccgugagcggcggccugaacaccagcgugcugagagccgugcugcccagagacaugguguucagaaccagcacccccagaguggugcuguga

SEQ ID NO: 18067 - RNA, 1773 nt, Artificial Sequence
  derived and/or modified CDS sequence (opt4) from LASV(LM776-SLE-2012;Clade IV)__AIT17825__SP-HsPLAT_NP(2-569)
auggacgccaugaagagaggccugugcugcgugcugcugcugugcggcgccguguucgugagccccagcgccagcaaggagaucaagagcuuccuguggacccagagccugagaagagagcugagcagcuacugcagcaacaucaagcugcagguggugaaggacgcccaggcccugcugcacggccuggacuucagcgaggugagcaacgugcagagacugaugagaaaggagagaagagacgacaacgaccugaagagacugagagaccugaaccaggccgugaacaaccugguggagcugaagagcacccagcagaagagcauccugagagugggcacccugaccagcgacgaccugcugauccuggccgccgaccuggagaagcugaagagcaaggugaccagaaccgagagaccccugagcgccggcguguacaugggcaaccugagcagccagcagcuggaccagagaagagcccugcugagcaugaucggcaugagcggcagcaaccagggcgccagagccggcagagacggcguggugagagugugggacgugaagaacgccgagcugcugaacaaccaguucggcaccaugcccagccugacccuggccugccugaccaagcagggccagguggaccugaacgacgccgugcaggcccugaccgaccugggccugaucuacaccgccaaguaccccaacaccagcgaccuggacagacugacccagagccaccccauccugaacaugaucgacaccaagaagagcagccugaacaucagcggcuacaacuucagccugggcgccgccgugaaggccggcgccugcaugcuggacggcggcaacaugcuggagaccaucaaggugagcccccagaccauggacggcauccugaagagcauccugaaggugaagaaggcccugggcauguucaucagcgacacccccggcgagagaaaccccuacgagaacauccuguacaagaucugccugagcggcgacggcuggcccuacaucgccagcagaaccagcaucaccggcagagccugggagaacaccgugguggaccuggagagcgacggcaagccccagaaggccggcagcaacaacagcaacaagagccugcagagcgccggcuucaccgccggccugaccuacagccagcugaugacccugaaggacgccaugcugcagcuggaccccaacgccaagaccuggauggacaucgagggcagacccgaggaccccguggagguggcccuguaccagcccagcagcggcugcuacauccacuucuucagagagcccaccgaccugaagcaguucaagcaggacgccaaguacagccacggcaucgacgugaccgaccuguucgccgcccagcccggccugaccagcgccgugaucgacgcccugcccagaaacauggugaucaccugccagggcagcgacgacaucagaaagcugcuggagagccagggcagaaaggacaucaagcugaucgacaucgcccugagcaagaccgacagcagaaaguacgagaacgccgugugggaccaguacaaggaccugugccacaugcacaccggcguggugguggagaagaagaagagaggcggcaaggaggagaucaccccccacugcgcccugauggacugcaucauguucgacgccgccgugagcggcggccugaacaccagcgugcugagagccgugcugcccagagacaugguguucagaaccagcacccccagaguggugcuguga

SEQ ID NO: 18068 - RNA, 1773 nt, Artificial Sequence
  derived and/or modified CDS sequence (opt4) from LASV(Mad39;Clade IV)__ANH09723__SP-HsPLAT_NP(2-569)
auggacgccaugaagagaggccugugcugcgugcugcugcugugcggcgccguguucgugagccccagcgccagcaaggagaucaagagcuuccuguggacccagagccugagaagagagcugagcggcuacugcagcaacaucaagcugcagguggugaaggacgcccaggcccugcugcacggccuggacuucagcgaggugagcaacgugcagagacugaugagaaagcagagaagagacgacaacgaccugaagagacugagagaccugaaccaggccgugaacaaccugguggagcugaagagcacccagcagaagagcgugcugagagugggcacccugaccagcgacgaccugcugacccuggccgccgaccuggagaagcugaagagcaaggugaccagaaccgagagaccccugaccgccggcguguacaugggcaaccugagcagccagcagcuggaccagagaagagcccugcugaacaugaucggcaugagcggcggcaaccagggcgccagaaccggcagagacggcguggugagagugugggacgugaagaacgccgagcugcugaacaaccaguucggcaccaugcccagccugacccuggccugccugaccaagcagggccagguggaccugaacgacguggugcaggcccugaccgaccugggccugaucuacaccgccaaguaccccaacaccagcgaccuggacagacugacccagagccaccccauccugaacaugaucgacaccaacaagagcagccugaacaucagcggcuacaacuucagccugggcgccgccgugaaggccggcgccugcaugcuggacggcggcaacaugcuggagaccaucaaggugagcccccagaccauggacggcauccugaagagcauccugaaggugaagaagagccugggcauguucaucagcgacacccccggcgagagaaaccccuacgagaacauccuguacaagaucugccugagcggcgacggcuggcccuacaucgccagcagaaccagcaucaccggcagagccugggagaacaccgugguggaccuggagagcggcggcaagccccagaaggccggcagcaacaacagcaacaagagccugcagagcgccggcuucgccgccggccugaccuacagccagcugaugacccugaaggacgccaugcugcagcuggaccccaacgccaagaccuggauggacaucgagggcagacccgaggaccccguggagaucgcccuguaccagcccaucagcggcugcuacauccacuucuucagagagcccaccgaccugaagcaguucaagcaggacgccaaguacagccacggcaucgacgugaccgaccuguucgccgcccagcccggccugaccagcgccgugaucgaggcccugcccagaaacauggugaucaccugccagggcagcgacgacaucagaaagcuguucgagagccagggcagaaaggacaucaagcugaucgacaucgcccugagcaagaccgacagcagaaaguacgagaacgccgugugggaccaguacaaggaccugugccacaugcacaccggcguggugguggagaagaagaagaagggcggcaaggaggagaucaccccccacugcgcccugauggacugcaucauguucgacgccgccgugagcggcggccugaacacccuggugcugagagccgugcugcccagagacaugguguucagaaccagcacccccaagguggugcuguga

SEQ ID NO: 18069 - RNA, 1773 nt, Artificial Sequence
  derived and/or modified CDS sequence (opt4) from LASV(Z0947-SLE-2011;Clade IV)__AIT17841__SP-HsPLAT_NP(2-569)
auggacgccaugaagagaggccugugcugcgugcugcugcugugcggcgccguguucgugagccccagcgccagcaaggagaucaagagcuuccuguggacccagagccugagaagagagcugagcggcuacugcagcaacaucaagcugcagguggugaaggacgcccaggcccugcugcacggccuggacuucagcgaggugagcaacgugcagagacugaugagaaaggagagaagagacgacaacgaccugaagagacugagagaccugaaccaggccgugaacaaccugguggagcugaagagcacccagcagaagagcauccugagagugggcacccugaccagcgacgaccugcugauccuggccgccgaccuggagaagcugaagagcaaggugaccagaaccgagagaccccugagcgccggcguguacaugggcaaccugagcagccagcagcuggaccagagaagagcccugcugaacaugaucggcaugagcggcagcaaccagggcgccagaaccggcagagacggcguggugagagugugggacgugaagaacgccgagcugcugaacaaccaguucggcaccaugcccagccugacccuggccugccugaccaagcagggccagguggaccugaacgacgccgugcaggcccugaccgaccugggccugaucuacaccgccaaguaccccaacaccagcgaccuggacagacugacccagagccaccccauccugaacaugaucgacaccaagaagagcagccugaacaucagcggcuacaacuucagccugggcgccgccgugaaggccggcgccugcaugcuggacggcggcaacaugcuggagaccaucaaggugagcccccagaccauggacggcauccugaagagcauccugaaggugaagaaggcccugggcauguucaucagcgacgcccccggcgagagaaaccccuacgagaacauccuguacaagaucugccugagcggcgacggcuggcccuacaucgccagcagaaccagcaucaccggcagagccugggagaacaccgugguggaccuggagagcgacggcaagccccagaaggccggcagcaacggcagcaacaagagccugcagagcgccggcuucaccgccggccugaccuacagccagcugaugacccugaaggacgccaugcugcagcuggaccccaacgccaagaccuggauggacaucgagggcagacccgaggaccccguggagaucgcccuguaccagcccagcagcggcugcuacauccacuucuucagagagcccaccgaccugaagcaguucaagcaggacgccaaguacagccacggcaucgacgugaccgaccuguucgccgcccagcccggccugaccagcgccgugaucgacgcccugcccagaaacauggugaucaccugccagggcagcgacgacaucagaaagcuguucgagagccagggcagaaaggacaucaagcugaucgacaucgcccugagcaagaccgacagcagaaaguacgagaacgccgugugggaccaguacaaggaccugugccacaugcacaccggcaucgugguggagaagaagaagagaggcggcaaggaggagaucaccccccacugcgcccugauggacugcaucauguucgacgccgccgugagcggcggccugaacaccagcgugcugagagccgugcugcccagagacaugguguucagaaccagcacccccagaguggugcuguga

SEQ ID NO: 18070 - RNA, 1773 nt, Artificial Sequence
  derived and/or modified CDS sequence (opt5) from LASV(Josiah;Clade IV)__NP_694869__SP-HsPLAT_NP(2-569)
auggacgccaugaagagaggccugugcugugugcuccugcuuugcggggcugucuucguuagccccagcgccuccaaggagaucaaaucuuuccuguggacccagagccucagacgggaacuguccggcuacugcucuaacauuaagcugcaaguggucaaagacgcucaggcccugcuccacgggcuggauuuuagcgagguuuccaaugugcagcgccuuaugagaaaggaacggcgcgacgauaacgaccugaaaagacuccgggaucugaaucaggcggugaacaaucuggucgagcucaagucuacacaacaaaagagcauccugcgcgugggaacgcuuaccuccgacgaucugcucauucuggcugccgaccuugaaaaacuuaagagcaaaguuaucagaacagagcggccccucucugccggcguguauauggggaaccuguccagccagcagcuggaucagcgcagagcucuccugaauaugauuggaaugucuggcgggaaccagggagcccgggcuggccgcgacggcgucgugagaguuugggaugugaagaaugccgagcuucugaacaaucaguucgggaccaugccuucccucacacuggcgugucuuaccaaacagggacaagucgaccugaacgaugccgugcaggcucucacagaccugggccugaucuacaccgccaaguauccgaauacgagcgaccucgaucggcugacccagucucaucccauccuuaacaugauugacacaaagaaauccagccugaauaucuccggguacaacuuuucucucggagcugccgugaaggcgggcgccugcaugcuggaugggggaaacaugcuugaaaccauuaaagucagcccucaaacaauggacggcauccugaaguccauucucaaaguuaagaaagcucugggcauguucaucagcgauacccccggggagcgcaauccuuaugaaaacauucuguacaagaucugucucucuggagacggcuggcccuauaucgccuccagaacgagcauuacagggcgggcuugggagaauaccgugguggaucuggagucugacggaaagccucagaaagccgauagcaacaauuccucuaagagccuucaguccgccggcuuuacagcugggcugaccuacagccagcucaugacccugaaagacgcgaugcugcaacuugauccgaacgccaagacauggauggacaucgaaggaagacccgaggacccugucgaaauugcucucuaccagcccucuuccggcugcuauauccacuucuuucgcgagccuacggaucugaaacaguucaagcaggacgccaaguacagccauggcauugaugugaccgaccuguuugccacacaacccgggcucaccucugcuguuaucgaugcccugccgcggaauauggugaucacaugucagggauccgacgauauuagaaaacuucuggaaagccagggccgcaaggacaucaaacucauugauaucgcgcuguccaagaccgacucucggaaauaugagaacgcugucugggaucaguacaaggaccugugccacaugcauacgggggugguuguggagaagaaaaagagaggaggcaaagaagagauuacaccucacugugcccuuauggauugcaucauguucgacgccgcugucagcgggggccucaauaccuccgugcugcgcgccguccugccccgggacaugguguuuagaaccucuacaccucgcguugugcucuga

SEQ ID NO: 18071 - RNA, 1773 nt, Artificial Sequence
  derived and/or modified CDS sequence (opt5) from LASV(LP;Clade I)__AAF86702__SP-HsPLAT_NP(2-569)
auggacgccaugaagagaggccugugcugugugcuccugcuuugcggggcugucuucguuagccccagcaacuccaaggagaucaaaucuuuccuguggacccagagccucagacgggaacuguccggcuacugcucuaauauuaagcuccaaguggucaaagacgcccaggcucugcuccacgggcuggauuuuagcgagguuuccaacgugcagcgccuuaugagaaagcagaaacgggacgaugccgaccugaagcgccucagagaucugaaucaagcggugaacaaucuggucgaacucaagucuacacagcagaaaaacgugcugcggguuggaacgcuuagcuccgacgaucugaucacccucgcugccgaccuggagaaacuuaaaagcaaggugauucgcacagaaagaccccugucuuccggcgucuauauggggaaucucagcucucagcaacuggaucagcggcgcgcccugcucuccaugaucggaaugagcggcgggccucagggaaacagaaccggcggcgacggggugguucgggugugggaugucaaaaaugcugagcugcuuaacaaucaguucggaacaaugccgucucugacccucgccugucugacaaagcaaggccagguggaccuuaacgaugcugugcaggcccugaccgaccucgggcugauuuacacggcgaaguaucccaauuccagcgaccuggauaugcucacccaaucccauccuauccugggaauggucgacacaaagaagucuagccuuaacaucuccggcuacaauuuuagccugggggccgcuguuaaagccggagcuugcaugcucgauggcggcaacaugcuggagaccauuaaggugucuccccagacaauggacgggauccuuaaauccauucugaaggugaaacgcagccucggaauguucaucucugauaccccuggcgaaagaaaccccuaugagaauauucuguacaagaucugucugagcggggaaggauggccuuauauugccucccggacgucuaucacaggccgcgcgugggagaacacccucgucgaccuggagagcgauaauaagccgcccaaacuuaacuccgccgggagcaauaagucucugcaggcugccggacucaacgcuggccugacauacucccagcugaugacccuuaaagacugcaugcuccaacuggauccuagcucuaagaccuggaucgacauugaaggcagacccgaggauccuguggaaaucgcccuguuucagcccuccagcggguguuacauucacuucuuucgggagccgacagaccucaaacaguucaagcaggacgccaaguauucccauggaaucgauguuacggaccuguuuucuacccaaccuggccuuacaagcgcugugauugaagcgcugcccagaaauaugguccuuaccugccagggguccgaugacaucaaaaagcugcuggagucucagggacgccgggauaucaaacuuauugacaucagccucuccaaggccgauagcagaaaauucgagaacgcugugugggaccaguacaaggaucugugucacaugcauacaggcguuguggucgaaaagaaaaagcgcgggggcaaagaggaaauuaccccucacugcgcccugcucgacuguaucauguuugaugccgcuacgacaggaucucugaauauuaccacccuucgggccgugcugcccagagacauggucuuccgcacauccacccccaaggugguucucuga

SEQ ID NO: 18072 - RNA, 1773 nt, Artificial Sequence
  derived and/or modified CDS sequence (opt5) from LASV(803213;Clade II)__AAF86704__SP-HsPLAT_NP(2-569)
auggacgccaugaagagaggccugugcugugugcuccugcuuugcggggcugucuucguuagccccagcgccuccaaggaggugaaaucuuuccuguggacccagagccucagacgggaacuguccggcuacugcucuaacaucaaacuucaagucguuaaggacgcucaggcccugcuccacgggcuggauuuuagcgaggugaauaacgugcagcgccuuaugagaaagcagaaacgggacgauggagaccugaagcgccucagagaucugaaucaagcggucaacaaucugguggaacucaaguccacacagcagaaaucuauucugcggguuggcacgcuuaccagcgacgaucugcucacacuggcugccgaccuugagaagcugaaauccaaggugauccgcaccgaaagaccccucagcucuggggucuauaugggaaaccuguccacacagcaacuggagcagcggcgcgcccuccugaauaugauuggcauggugggaggagcucagggcacccagccuggcagagaugggguugugcgggucugggacgugaaaaacccggaucuucugaauaaccaauucggaacaaugcccagccucacccuggccugucuuacgaagcagggccagguggaccugaaugaugcuguccucgcccugaccgaccuggggcucaucuacacagcgaaguauccuaacucuuccgaccuggaucgccuuagccaaucucaucccauucugaauaugguugacaccaaaaaguccagccucaacaucuccggauacaauuuuucucugggcgccgcugugaaagccggggcuugcaugcuugauggaggcaacaugcuggagacaaucaaggugaccccucagacgauggacggcauucucaaaagcauccugaaggucaaaagaucccuggggauguucgugagcgauacacccggagaacggaacccuuaugagaauauucucuacaagaucugucugucuggcgacggguggccguauauugccucccgcaccagcaucguugggagagcgugggaaaacacaaccguggaucuugagucugacggcaagccccagaaagucgggaccgccggaagcaauaagucccugcagucugcuggcuuuccuacaggccucacguacagccaacugaugacccugaaagauuccaugaugcagcuugaccccagcgccaagacauggauugauaucgaggggcggccugaagaccccguggagaucgcucucuaccagccgaugucuggaugcuauauucacuucuuuagagaaccuaccgaccugaaacaguucaagcaagaugccaaguacucccauggcaucgacguugccgaucuguuucccgcucagccugggcucacaagcgcggugauugaggcccugccccgcaacaugguccuuaccugucagggaucugacgauaucaaaaagcugcucgacucccagggccggagagauauuaaacugaucgacaucagccuguccaagguggauucucgcaaauucgaaaaugcugucugggaccaaugcaaggaucuuugucacaugcauacgggggugguuguggagaagaaaaagcggggcggaaaagaggaaauuacaccccacugcgcccucauggacuguaucauguuugaugccgcugucagcggcgggcugaacauuccugugcugagagccguucucccgcgcgacaugguguuccggaccuccucucccaaggucgugcuguga

SEQ ID NO: 18073 - RNA, 1776 nt, Artificial Sequence
  derived and/or modified CDS sequence (opt5) from LASV(GA391;Clade III)__CAA36646__SP-HsPLAT_NP(2-570)
auggacgccaugaagagaggccugugcugugugcuccugcuuugcggggcugucuucguuagccccagcgccuccaaggaggugagaucuuuccuguggacccagagccuccggcgcgaacuguccggcuacugcucuaacaucaaacuucaagucguuaaggacgcucaggcccugcuccacgggcuggauuuuagcgagguguccaaugugcagagacuuaugcggaaacagaagcgcgacgauggagaccugaaaagacuccgggaucugaaccaagcggucaauaaccugguggaacucaagucuacacagcagaaaagcguucugcgcgugggcacgcuuuccagcgacgaucugcucauucuggcugccgaccuugagaaacugaagucuaaagucaccagaacagaacggccccucuccagcgggguguauaugggaaaucugucuucccagcaacuggaucagcgcagagcccuccugaacaugaucggcaugaccgggguuagcggaggcggcaagggggcuucugacggaauugugcgggucugggaugugaaaaaugccgagcuucugaacaaucaguucggcacaaugccuucccucacccuggcuugucuuacaaagcaggggcaaguggaccugaacgaugccguccaggcgcucaccgaccugggacugaucuacacggccaaguauccgaauagcuccgaccucgaucgccugucucagagccaucccauucuuaacaugaucgacaccaaaaaguccagccugaauaucucuggcuacaacuuuucccucggggcugccguuaaagcuggagccugcaugcuggauggcggcaauaugcuugagacaauuaaggugagcccucaaaccauggacgggauccugaaaucuauucucaaggugaaaaagagccugggaauguucgucuccgauacacccggcgaaagaaacccuuaugagaacauccuguacaagauuugucucucuggggacggauggcccuauaucgcgagccggaccuccauugugggccgcgccugggaaaauacgguuguggaucuggagcaggacaacaaaccucagaagaucgggaauggaggcagcaacaaaucucuucaguccgcuggcuuugccgcugggcugacauacagccaacucaugacccugaaggauuucaaaugcuuuaaucugaucccgaacgccaagacauggauggacauugagggaagacccgaagauccugucgagaucgcccuuuaccagcccucuuccggcuguuaugugcacuucuuucgggaaccuaccgaccucaagcaguucaaacaggacgcuaaguacagccaugggauugauguuaccgaccuguuugcggcccaacccggacugacauccgcugugaucgaggcccucccgagaaauauggucauuacgugccagggcucugaagauauccgcaaacugcuugagagccaggggcggagagacaucaagcugauugauaucacccucuccaaagccgacucucgcaaguucgagaacgcugugugggaucaguuuaaggaccugugucacaugcauacaggcgucgugguugaaaagaagaaacggggaggcaaggaggaaauuaccccucacugcgcccugauggauuguaucauguucgacgcggcugugagcgggggacuugaugccaaaguccucagagugguucugccccgcgacaugguguuccggacauccaccccuaaggucgugcuguga

SEQ ID NO: 18074 - RNA, 1773 nt, Artificial Sequence
  derived and/or modified CDS sequence (opt5) from LASV(AV;Clade V)__CCA30315__SP-HsPLAT_NP(2-569)
auggacgccaugaagagaggccugugcugugugcuccugcuuugcggggcugucuucguuagccccagcgccuccaaggaggugaaaucuuuccuguggacccagagccucagacgggaacuguccggcuacugcucuaacaucaaacuucaagucguuaaggacgcucaggcccugcuccacgggcuggauuuuagcgagguguccaaugugcagcgccuuaugagaaagcagcggcgcgacgauucugaccugaaaagacuccgggaucugaaccaagcggucaauaaccugguggaacucaagagcacacagcagaaguccguucugcgcgugggaacgcuuagcucugacgaucugcucacccuggcugccgaccuugagaaacugaaguccaaagucacaagaaccgaacggccccucagcucuggcguguauauggggaaucuguccagccagcaacuggaucagcgcagagcccuccugaaccuuauuggaaugacaaauggcucucaggggucccaggcuggacgggacggcguugugcgcgucugggaugugaagaacgccgagcugcucaauaaccaauucggcaccaugccuagccugacacuugcuugucugaccaaacagggacagguggaccucaaugaugucguucaagcccugacggaccuggggcucaucuacaccgcgaaguauccgaacacauccgaccuggauagacuuacccagucucaucccauucugaauaugaucgacacaaagaaaagcucccucaacauuagcggcuacaauuuuucucugggggccgcugugaaggccggagcuugcaugcuugauggcgggaacaugcuggagaccaucaaaguguccccucagagcauggacggaauccucaagucuauucugaaagucaagcgggcccugggcauguucgugagcgauacgcccggcgaacgcaacccuuaugagaauauccucuacaaaauuugucuguccggggacggauggcccuauaucgcgucuagaacaagcauuguuggccgggccugggaaaacaccguggucgaucuugagacagacgggaagccucagaagaucggauccggcaauagcaacaaaucucugcaauccgcuggguuuagcgccggacucaccuacucucagcugaugacccugaaggaugcuaugcuucagcucgacccgaaugccaaaacauggauggauauugagggcagacccgaagacccuguggagguugcccuguaccagcccaucuccggcugcuauauccacuucuuucgcgaaccuacggaccugaagcaauucaaacaggaugcuaaguacagccaugggauugacaucgcggaucucuuugccgcucagcccggacugaccuccgccgugauugaggcccuuccgcggaacauggucaucacaugucagggcucugaagacauuaagaaacugcucgagagccaagggagaaaggauaucaaacugaucgacauugcucuguccaagaucgauucucgcaaauucgagaaugccgugugggaccaguauaaggaucuuugccacaugcauaccggagucgugguugaaaagaaaaagcggggcgggaaagaggaaauuacaccucacugugcgcucauggacugcaucauguuugaugcugccgugagcggcggacugaacacccugguccucagagccgugcugccccgcgacaugguuuuccggacguccacaccuagagugguccuuuga

SEQ ID NO: 18075 - RNA, 1773 nt, Artificial Sequence
  derived and/or modified CDS sequence (opt5) from LASV(Togo/2016/7082;Clade VI)__AMR44578__SP-HsPLAT_NP(2-569)
auggacgccaugaagagaggccugugcugugugcuccugcuuugcggggcugucuucguuagccccagcaacuccaaggaggugaaaucuuuccuguggacccagagccucagacgggaacuguccggcuacugcucuaauaucaaacuucaagucguuaaagacgcccaggcucugcuccacgggcuggauuuuagcgagguguccaacgugcagcgccuuaugagaaagcagaaacgggacgauggagaccugaagcgccucagagaucugaaucaagccgucaacaaucugguggaacucaagucuguucagcagaaaagcauucugcgggugggcacacuuacguccgacgaucugcucacccuggcggcugaccuugagaagcugaaaagcaaggucacacgcaccgaaagaccccucucuuccgggguguauaugggaaaccugagcucucagcaacuggaucagcggcgcgcccuccuguccaugaucggcaugagcgggggaaaucagaacucucagccuaaaggcgacggcguugugagagucugggaugugaagaaugccgaccuucugaacaaucaauucgggacaaugccgucccucacccuggcuugucuuacaaagcagggacagguggaucugaacgacgccguccaagcucucaccgaccugggccugauuuacacggccaaauaucccaauagcuccgaucucgaccggcugucucagagccauccuauccuuaacaugauugauaccaagaaauccagccugaauaucucuggguacaacuuuucccucggagcggccaucaagacaggcgcuugcaugcuggacgggggaaacaugcuugagaccauuaaaguuacaccccagaccauggauggcauccucaagagcauucugaaagugaagcgcucucugggcauguucaucagcgacacgccuggggagagaaaucccuaugaaaacauucuguacaagaucugucucuccggagauggcuggccuuauauugccucucggacagcuaucaucgggcgcgccugggagaauaccguggucgaccuggaaagcgauuccaaaccgcagaagauuggaagcaacggcucuaauaaaucccuucaaagcgcgggguuugcccccggacugacauacucucagcucaugacccugaaggacuccaugcugcagcuugauccuaacgcuaaaaccuggaucgacauugagggcagacccgaggacccuguggaaguugcccucuuccagcccaucagcggcugcuacauucacuuuuuccgggagccgacagaucugaagcaauuuaagcaggacgcuaaauauucccaugggaucgaugugacggaccuguucgccgcccagccuggacucaccucugcugucaucgaagcgcugcccagaaauauggugcuuacaugucagggcagcgaugacauuaagaaacugcucgauucccaagggcgccgggacaucaagcugauugauguuucucugaacaaaaucgacagcagaaaguuugagaaugccgugugggaucaguacaaggaccuuugccacaugcauaccggagucguggucgaaaagaagaaaaagggcgggaaagaggagauuacaccucacugugcucuccuggauugcaucauguucgacgccgccguguccggcggacugaacgcuaccguucuccgcgccgugcugccccgggacauggucuuuagaacgagcucucccaaggugguucuuuga

SEQ ID NO: 18076 - RNA, 1773 nt, Artificial Sequence
  derived and/or modified CDS sequence (opt5) from LASV(KAK-428;Clade n.d. (VII))__ANH09741__SP-HsPLAT_NP(2-569)
auggacgccaugaagagaggccugugcugugugcuccugcuuugcggggcugucuucguuagccccagcaacuccaaggaggugaaaucuuuccuguggacccagagccucagacgggaacuguccggcuacugcacaaauaucaaacuucaagucguuaaggacgcccaggcucugcuccacgggcuggauuuuucugaggugagcaacgugcagcgccuuaugagaaagcagaaacgggacgauaaugaccugaagcgccucagagaucugaaccaagccgucaauaaccugguggaacucaaguccguucagcagaaaucugugcugaaggucggaacgcuuaauagcgacgaucugcucacccuggcggcugaccuugagaaacugaaguccaaagugguucggacagaacgcccccucagcucuggcguguauauggggaaccuguccagccagcaacuggaucagagacgggcccuccugaauaugauuggaauggccggcgggucucagggaaaccagccuucccgcgacggcgucgugagagugugggaugucaagaaugcugaccuucugaacaaucaauucggcaccaugccgagccucacacuggccugucuuaccaagcaggggcagguugaucugaacgacguggugcucgcucugacagaccugggacucaucuacaccgccaaauaucccaauucuuccgaucuggaccggcuuagccaaaaccauccuguccugaacaugauugaugugaauaaguccucucucaacaucagcggcuacaauuuuucccugggggcggccguuaaagcuggagccugcaugcuugacggcgggaacaugcuggagacgauuaagaucagcccccagaccguggauggaauccucaaaucuauucugaaggucaaacgcgcucugggcauguucguguccgacacaccuggcgagagaaaucccuaugaaaacauccucuacaagguuugucugagcgggaauggauggccuuauauugccucucggaccagcaucgugggccgcgcgugggagaacacagucguggaucuugaauccaauaagaaccagccgaaagucgggaauaacggaucuaauaagaugcugcagagcuccggcuuugccaccgggcucacguacagccaacugaugacacugagagacucuaugcuucagcucgaucccaccgcuaaaacauggauugacaucgagggacggccugaggaucccguggaacuggcccuguuccagccuuccagcggcugcuacauucacuuuuucagagagcccaccgaccucaagcaguuuaaacaagacgcuaaguauucucauggcaucgauguuaacgaccuguucuccgcccagccggggcuuaccagcgccgugcuggaagcucucccucgcaauaugguccugacaugucagggauccgaugacauccggaagcugcuugauucucaggacagaaaagauauuaagcucaucgacauuagccuguccaaagcggaugcccgcaaguuugagaacgacgugugggaucaauucaaagaccugugccacaugcauacgggcaucguuguggaaaagaagaaaaagggagggaaacaggagaugacaccccacugugcucuccuggauugcauuauguuugacgccgccgucucuggcgggcuuaacgugccuacccugcgggcugugcuccccaccgacaugguuuucagaacaaucaccacgaaggucgugcuguga

SEQ ID NO: 18077 - RNA, 1773 nt, Artificial Sequence; identical to SEQ ID NO: 18071
  derived and/or modified CDS sequence (opt5) from LASV(Pinneo-NIG-1969;Clade I)__AIT17837__SP-HsPLAT_NP(2-569)

SEQ ID NO: 18078 - RNA, 1773 nt, Artificial Sequence
  derived and/or modified CDS sequence (opt5) from LASV(ISTH0009-NIG-2011;Clade II)__AIT17405__SP-HsPLAT_NP(2-569)
auggacgccaugaagagaggccugugcugugugcuccugcuuugcggggcugucuucguuagccccagcguguccaaggaggucaaaucuuuccuguggacccagagccucagacgggaacuguccggcuacugcucuaacaucaaacuucaaguugugaaggacgcccaggcucugcuccacgggcuggauuuuagcgagguguccaauguccagcgccuuaugagaaagcagaaacgggacgauucugaccugaagcgccucagagaucugaaccaagccgugaauaaccugguugaacucaagagcacacagcagaaauccauucugcgggugggaacgcuuaccagcgacgaucugcucacacuggcggcugaccuugagaagcugaaaucuaaggucauccgcaccgaaagaccccucuccagcggcguguauauggggaaucugucuacacagcaacuggagcagcggcgcgcccuccugaacaugauuggaaugguuggcggggcccagggaacccagccuggcagagauggcgugguccgggugugggacgugaaaaauccggaucuucugaacaaucaauucgggacaaugcccucccucacccuggcuugucuuacgaagcagggacaggucgaccugaacgaugccguucucgcucugaccgaccugggccucaucuacacagccaaguauccuaauagcucugaccuggaucgccuuucccaaagccaucccauucugaacaugguggacaucaaaaaguccucucucaauaucagcggguacaacuuuucccugggagcggccgugaaagcuggcgccugcaugcuugaugggggaaauaugcuggagaccauuaaggucacaccucagaccauggacggcauccucaaaagcauucugaaggugaaaagaucucugggcauguucguuuccgauacgcccggggaacggaacccuuaugagaacauccucuacaagauuugucugagcggagacggcuggccguauaucgcuucucgcacaagcauuguggggagagccugggaaaauaccacagucgaucuugaguccgacggaaagccccagaaagugggcucugcggggagcaacaagucccugcagagcgccggauuuccuaccggccucaccuacucucaacugaugacacugaaagauuccaugaugcagcuugaccccagcgcuaagacguggaucgauaucgagggccggccugaagaccccguugagauugcccucuaccagccgaugucugggugcuauauccacuucuuuagagaaccuaccgaccugaaacaguucaagcaagaugcuaaguacucccauggaauugacguggccgaucuguuucccgcccagccuggccucacaagcgcugucaucgaggcgcugccccgcaauauggugcuuaccugucagggguccgacgauauuaaacggcugcucgacucucagggaagacgcgauaucaagcugaucgacauugcccugagcaaagcugauucccggagauucgaaaacgccgucugggaccaaugcaaggaucuuugucacaugcauacaggcgugguuguggagaaaaagaagcgcgggggcaaagaggaaaucacgccccacugcgcccucauggacuguauuauguaugaugcugccgucucuggaggccugaauaucccugugcugcgggcgguucucccgagagacaugguguuucgcaccagcucccccaaggucgugcuguga

SEQ ID NO: 18079 - RNA, 1773 nt, Artificial Sequence
  derived and/or modified CDS sequence (opt5) from LASV(ISTH2010-NIG-2012;Clade II)__AIT17483__SP-HsPLAT_NP(2-569)
auggacgccaugaagagaggccugugcugugugcuccugcuuugcggggcugucuucguuagccccagcgccuccaaggaggugaaaucuuuccuguggacccagagccucagacgggaacuguccggcuacugcucuaacaucaaacuucaagucguuaaggacgcucaggcccugcuccacgggcuggauuuuagcgagguguccaaugugcagcgccuuaugagaaagcagaaacgggacgauucugaccugaagcgccucagagaucugaaccaagcggucaauaaccugguggaacucaagagcacacagcagaaauccauucugcggguuggaacgcuuaccagcgacgaucugcucacacuggcugccgaccuugagaagcugaaaucuaaggugauccgcaccgaaagaccccucuccagcggcgucuauauggggaaucugucuacacagcaacuggagcagcggcgcgcccuccugaaccuuauuggaauggugggcggggcucagggaacccagccuggcagagauggcguugugcgggucugggacgugaaaaauccggaucugcucaacaaucaauucgggacaaugcccucccugacccuugccugucugacgaagcagggacagguggaccucaacgaugcuguccuggcccugaccgaccucggccugaucuacacagcgaaguauccuaauagcucugaccuugaucgccugucccaaagccaucccauucucaacaugguugacaccaaaaaguccucucugaauaucagcggguuuaacuucucccuuggagccgcugugaaagccggcgcuugcaugcuggaugggggaaauaugcucgagacaaucaaggugaccccucagacgauggacggcauucugaaaagcauccugaaggucaaaaagucucucggcauguuuguguccgauacacccggggaaagaaacccuuacgagaacauucuguauaagaucugucuuagcggagacggcuggccguacauugccucucggaccagcaucguugggcgcgcgugggaaaauacaaccguggaucuggaguccgacggaaaaccccacaaggucggcaccgccgggucuaacaaaagccuccaguccgcuggauucccuacaggccugacguauagccagcugaugacccuuaaggauucuaugaugcaacucgaccccuccgccaaaacauggauugauaucgagggcagaccugaagaccccguggagaucgcucuguaccagccgaugagcgggugcuacauucacuuuuuccgggaaccuaccgaccugaagcaguuuaagcaggaugccaaauauucucauggaaucgacguugccgaucucuuccccgcucaaccuggccugacauccgcggugauugaggcccuucccagaaauaugguccugaccugucaggggagcgacgauaucaagcgccuccuggacucccagggacggagagauauuaaacugaucgacaucgcucuuucuaaggccgauagccgccgguuugaaaacgccgugugggaccagugcaaagaucucugucauaugcacacgggcgucgugguugagaagaagaaaagagggggcaaggaggaaauuacaccccacugcgcucugauggacuguaucauguacgaugccgcgguguccggaggccugaauauuccuguccuccgcgcugugcugccgcgggacaugguuuucagaaccucuagccccaaagugguccuuuga

SEQ ID NO: 18080 - RNA, 1773 nt, Artificial Sequence
  derived and/or modified CDS sequence (opt5) from LASV(Lassa virus/H.sapiens-wt/NGA/2015/ISTH_0543;Clade II)__AVO03640__SP-HsPLAT_NP(2-569)
auggacgccaugaagagaggccugugcugugugcuccugcuuugcggggcugucuucguuagccccagcgccuccaaggaggugaaaucuuuccuguggacccagagccucagacgggaacuguccggcuacugcucuaacaucaaacuucaagucguuaaggacgcucaggcccugcuccacgggcuggauuuuagcgagguguccaaugugcagcgccuuaugagaaagcagaaacgggacgauucugaccugaagcgccucagagaucugaaccaagcggucaauaaccugguggaacucaagagcacacagcagaaauccauucugcggguuggaacgcuuaccagcgacgaucugcucacacuggcugccgaccuugagaagcugaaaucuaaggugauccgcaccgaaagaccccucuccagcggcgucuauauggggaaucugucuacacagcaacuggagcagcggcgcgcccuccugaacaugauuggaauggugggcggggcucagggaacccagccuggcagagauggcguugugcgggucugggacgugaaaaauccggaucuucugaacaaucaauucgggacaaugcccucccucacccuggccugucuuacgaagcagggacagguggaccugaacgaugcuguccucgcccugaccgaccugggccucaucuacacagcgaaguauccuaauagcucugaccuggaucgccuuucccaaagccaucccauucugaacaugguugacaccaaaaaguccucucucaauaucagcggguacaacuuuucccugggagccgcugugaaagccggcgcuugcaugcuugaugggggaaauaugcuggagacaaucaaggugaccccucagacgauggacggcauucucaaaagcauccugaaggucaaaaagucucugggcauguucguguccgauacacccggggaaagaaacccuuaugagaacauucucuacaagaucugucugagcggagacggcuggccguauauugccucucggaccagcaucguugggcgcgcgugggaaaauacaaccguggaucuugaguccgacggaaaaccccagaaggucggcucugccgggagcaacaaaucccugcagagcgcuggauuuccuaccggccucacauacucucaacugaugacgcugaaggauuccaugaugcagcuugaccccagcgccaaaaccuggauugauaucgagggcagaccugaagaccccguggagaucgcucucuaccagccgaugucugggugcuauauucacuucuuucgggaaccuacagaccugaagcaguucaagcaagaugccaaauacucccauggaaucgacguugccgaucuguuucccgcucagccuggccucaccagcgcggugauugaggcccugcccagaaauaugguccuuacaugucagggguccgacgauaucaagcgccugcucgacucucagggacggaaagauauuaagcugaucgacaucgcucugagcaaagccgauuccagacgcuucgaaaacgccgugugggaccaaugcaaggaucuuugucacaugcauaccggcgucgugguugagaagaaaaagagagggggcaaagaggaaauuacgccccacugcgcucucauggacuguaucauguaugaugccgcggugucuggaggccugaauauuccuguccugcgggcugugcucccgcgcgacaugguuuuucggacaagcucccccaaggugguccuguga

SEQ ID NO: 18081 - RNA, 1773 nt, Artificial Sequence
  derived and/or modified CDS sequence (opt5) from LASV(Lassa virus/H.sapiens-wt/NGA/2016/ISTH_0009;Clade II)__AVO03572__SP-HsPLAT_NP(2-569)
auggacgccaugaagagaggccugugcugugugcuccugcuuugcggggcugucuucguuagccccagcgccuccaaggaggugaaaucuuuccuguggacccagagccucagacgggaacuguccggcuacugcucuaacaucaaacuucaagucguuaaggacgcucaggcccugcuccacgggcuggauuuuagcgagguguccaaugugcagcgccuuaugagaaagcagaaacgggacgauucugaccugaagcgccucagagaucugaaccaagcggucaauaaccugguggaacucaagagcacacagcagaaauccauucugcggguuggaacgcuuaccagcgacgaucugcucacacuggcugccgaccuugagaagcugaaaucuaaggugauccgcaccgaaagaccccucuccagcggcgucuauauggggaaucugucuacacagcaacuggagcagcggcgcgcccuccugaacaugauuggaauggugggcggggcucagggaacccagccuggcagagauggcguugugcgggucugggacgugaaaaauccggaucuucugaacaaucaauucgggacaaugcccucccucacccuggccugucuuacgaagcagggacagguggaccugaacgaugcuguccucgcccugaccgaccugggccucaucuacacagcgaaguauccuaauagcucugaccuggaucgccuuucccaaagccaucccauucugaacaugguugacaccaaaaaguccucucucaauaucagcggguacaacuuuucccugggagccgcugugaaagccggcgcuugcaugcuugaugggggaaauaugcuggagacaaucaaggugaccccucagacgauggacggcauucucaaaagcauccugaaggucaaaaagucucugggcauguucguguccgauacacccggggaaagaaacccuuaugagaacauucucuacaagaucugucugagcggagacggcuggccguauauugccucucggaccagcaucguugggcgcgcgugggaaaauacaaccguggaucuugaguccgacggaaaaccccagaaggucggcucugccgggagcaacaaaucccugcagagcgcuggauuuccuaccggccucacauacucucaacugaugacgcugaaggauuccaugaugcagcuugaccccagcgccaaaaccuggauugauaucgagggcagaccugaagaccccguggagaucgcucucuaccagccgaugucugggugcuauauucacuucuuucgggaaccuacagaccugaagcaguucaagcaagaugccaaauacucccauggaaucgacguugccgaucuguuucccgcucagccuggccucaccagcgcggugauugaggcccugcccagaaauaugguccuuacaugucagggguccgacgauaucaagcgccugcucgacucucagggacggagagauauuaaacugaucgacaucgcucugagcaaggccgauucccgccgguucgaaaacgccgugugggaccaaugcaaagaucuuugucacaugcauaccggcgucgugguugagaagaagaaaagagggggcaaggaggaaauuacgccccacugcgcucucauggacuguaucauguaugaugccgcggugucuggaggccugaauauuccuguccugcgcgcugugcucccgcgggacaugguuuuuagaacaagcucccccaaagugguccuguga

SEQ ID NO: 18082 - RNA, 1773 nt, Artificial Sequence
  derived and/or modified CDS sequence (opt5) from LASV(Lassa virus/H.sapiens-wt/NGA/2016/ISTH_0017;Clade II)__AVO03568__SP-HsPLAT_NP(2-569)
auggacgccaugaagagaggccugugcugugugcuccugcuuugcggggcugucuucguuagccccagcgccuccaaggaggugaaaucuuuccuguggacccagagccucagacgggaacuguccggcuacugcucuagcaucaaacuucaagucguuaaggacgcucaggcccugcuccacgggcuggauuuuuccgaggugucuaacgugcagcgccuuaugagaaagcagaaacgggacgauagcgaccugaagcgccucagagaucugaaucaagcggucaacaaucugguggaacucaaguccacacagcagaaaagcauucugcggguuggaacgcuuaccucugacgaucugcucacacuggcugccgaccuugagaagcugaaauccaaggugauccgcaccgaaagaccccucagcucuggcgucuauauggggaaccuguccacacagcaacuggagcagcggcgcgcccuccugaauaugauuggaauggcuggcggggcccagggaacccagccuggcagagauggcgugguucgggugugggacgucaaaaacccggaucuucugaauaaccaauucgggacaaugcccagccucacccuggcuugucuuacgaagcagggacagguggaccugaaugaugccgugcucgcgcugaccgaccugggccucaucuacacagccaaguauccuaacucuuccgaccuggaucgccuuagccaaucccaucccauucugaauauggucgacaccaaaaagucuagccucaacaucuccggguacaauuuuagccugggagcugccguuaaagcuggcgccugcaugcuugaugggggaaacaugcuggagacaaucaaggugaccccucagacgauggacggcauucucaaaucuauccugaaggugaaaagaucccugggcauguucgucagcgaugcgcccggggaacggaauccuuaugagaacauucucuacaagaucugucugucuggagacggcuggccguauauugccagccgcacauccaucguggggagagcuugggaaaacaccacaguugaucuugagucugacggaaagccccagaaagugggcgccaccgggagcaauaagucccugcagagcgcuggauuuccuaccggccucacauacucucaacugaugacgcugaaagauuccaugaugcagcuugaccccagcgccaagaccuggauugauaucgagggccggccugaagaccccgucgagguggcccucuaccagccgguuucugggugcuauauccacuucuuuagagaaccuacagaccugaaacaguucaagcaagaugcuaaguacucccauggaauugacguggcggaucuguuucccgcccagccuggccucaccagcgcugucaucgaggcccugccccgcaacauggugcuuacaugucagggguccgacgauauuaaaaagcugcucgacucucagggacggaaagauaucaagcugauugacaucgcccugagcaaagcugauuccagacgcuucgaaaaugccgucugggaccaaugcaaggaucuuugucacaugcauaccggcgugguuguggagaagaaaaagagagggggcaaagaggaaaucacgccccacugcgcgcucauggacuguauuauguaugaugcugccgucucuggaggccugaacaucccugugcugcgggccguucucccgcgcgacaugguguuucggacaagcucccccaaggucgugcuguga

SEQ ID NO: 18083 - RNA, 1773 nt, Artificial Sequence
  derived and/or modified CDS sequence (opt5) from LASV(Lassa virus/H.sapiens-wt/NGA/2018/ISTH_0959;Clade II)__AVV65100__SP-HsPLAT_NP(2-569)
auggacgccaugaagagaggccugugcugugugcuccugcuuugcggggcugucuucguuagccccagcgccuccaaggaggugaaaucuuuccuguggacccagagccucagacgggaacuguccggcuacugcucuaacaucaaacuucaagucguuaaggacgcucaggcccugcuccacgggcuggauuuuagcgagguguccaaugugcagcgccuuaugagaaagcagaaacgggacgauucugaccugaagcgccucagagaucugaaccaagcggucaauaaccugguggaacucaagagcacccagcagaaauccauucugcggguuggaacgcuuaccagcgacgaucugcucacacuggcugccgaccuugagaagcugaaaucuaaggugauccgcaccgaaagaccccucuccagcggcgucuauauggggaaucugucuacacagcaacuggagcagcggcgcgcccuccugaaccuuauuggaauggugggcggggcucagggaacccagccuggcagagauggcguugugcgggucugggacgugaaaaauccggaucugcucaacaaucaauucgggacaaugcccucccugacccuugccugucugacgaagcagggacagguggaccucaacgaugucguucuggcucugaccgaccucggccugaucuacacagccaaguauccuaauagcucugaccuugaucgccugucccaaagccaucccauucucaacaugguggacaccaaaaaguccucucugaauaucagcggguuuaacuucucccuuggagcggccgugaaagcuggcgccugcaugcuggaugggggaaauaugcucgagacaaucaaggucaccccucagacgauggacggcauucugaaaagcauccugaaggugaaaaagucucucggcauguuuguuuccgauacacccggggaaagaaacccuuacgagaacauucuguauaagaucugucuuagcggagacggcuggccguacauugcuucucggaccagcaucguggggcgcgccugggaaaauacaaccgucgaucuggaguccgacggaaaaccccacaaggugggcaccgcggggucuaacaaaagccuccaguccgccggauucccuacaggccugacguauagccagcugaugacccuuaaggauucuaugaugcaacucgaccccuccgcuaaaacauggauugauaucgagggcagaccugaagaccccguugagaucgcccuguaccagccgaugagcgggugcuacauucacuuuuuccgggaaccuaccgaccugaagcaguuuaagcaggaugcuaaauauucucauggaaucgacguggccgaucucuuccccgcccaaccuggccugacauccgcugucauugaggcgcuucccagaaauauggugcugaccugucaggggagcgacgauaucaagcgccuccuggacucccagggacggaaagauauuaagcugaucgacaucgcccuuucuaaaacggauagcagacgcuuugaaaacgcugucugggaccagugcaaggaucucugucauaugcacacaggcgugguuguggagaagaaaaagagagggggcaaagaggaaauuacaccccacugcgcccugauggacuguaucauguacgaugccgcugucuccggaggccugaauauuccugugcuccgggccguucugccgcgcgacaugguguuccggaccucuagccccaaggucgugcuuuga

SEQ ID NO: 18084 - RNA, 1773 nt, Artificial Sequence
  derived and/or modified CDS sequence (opt5) from LASV(LASV003-NIG-2008;Clade II)__AIT17581__SP-HsPLAT_NP(2-569)
auggacgccaugaagagaggccugugcugugugcuccugcuuugcggggcugucuucguuagccccagcgccuccaaggaggugaaaucuuuccuguggacccagagccucagacgggaacuguccggcuacugcucuagcaucaaacuucaagucguuaaggacgcucaggcccugcuccacgggcuggauuuuuccgaggugucuaacgugcagcgccuuaugagaaagcagaaacgggacgauagcgaccugaagcgccucagagaucugaaucaagcggucaacaaucugguggaacucaaguccacccagcagaaaagcguucugcgggugggaacgcuuaccucugacgaucugcucacacuggcugccgaccuugagaagcugaaauccaaggucauucgcaccgaaagaccccucagcucuggcguguauauggggaaccuguccgcccagcaacuggagcagcggcgcacacuccugaauaugaucggaaugguuggcggggcucagggaacccagccuggcagagauggcgugguccgggugugggacgugaaaaacccggaucuucugaauaaccaauucgggacaaugcccagccucacccuggccugucuuacgaagcagggacaggucgaccugaaugauguugugcucgcucugaccgaccugggccucauuuacacagccaaguauccuaacucuuccgaccuggaucgccuuagccaaucccaucccauccugucuaugguggacaccaaaaagagcucccucaauauuagcggguacaacuuuucucugggagcggccgucaaagcuggcgccugcaugcuugaugggggaaauaugcuggagacaaucaaggugaccccucagacgauggacggcauccucaaauccauucugaagguuaaaaagagccugggcauguucgugucugauacacccggggaaagaaacccuuaugagaauauccucuacaagauuugucugagcggagacggcuggccguauaucgcuucccggaccucuauugucgggcgcgccugggaaaacacaaccguggaucuugagagcgacggaaaaccccagaagguuggcaccgcgggguccaacaaaagccugcagucugccggauuuccuacaggccucacguacucccaacugaugacccugaaggauagcaugaugcagcuugaccccucugcuaaaacauggaucgauauugagggcagaccugaagaccccguggagaucgcccucuaccagccgauguccgggugcuauauccacuucuuucgggaaccuaccgaccugaagcaguucaagcaagaugcuaaauacagccauggaauugacgucacagaucuguuucccgcccagccuggccucaccuccgccgugaucgaggcucugcccagaaauaugguccuuacgugucaggggucugacgauauuaagcgccugcucgacagccagggacggagagauaucaaacugauugacaucgcgcuguccaaggccgauucucgccgguucgaaaacgcugugugggaccaaugcaaagaucuuugucacaugcauacaggcguuguggucgagaagaagaaaagagggggcaaggaggaaaucacaccccacugcgcccucauggacuguauuauguaugaugccgcugugagcggaggccugaauaucccuguucugcgcgccgugcucccgcgggacauggucuuuagaaccuccagccccaaaguggugcuguga

SEQ ID NO: 18085 - RNA, 1773 nt, Artificial Sequence
  derived and/or modified CDS sequence (opt5) from LASV(LASV035-NIG-2009;Clade II)__AIT17589__SP-HsPLAT_NP(2-569)
auggacgccaugaagagaggccugugcugugugcuccugcuuugcggggcugucuucguuagccccagcgccuccaaggaggugaaaucuuuccuguggacccagagccucagacgggaacuguccggcuacugcucuagcaucaaacuucaagucguuaaagacgcucaggcccugcuccacgggcuggauuuuuccgaggugucuaacgugcagcgccuuaugagaaagcagaaacgggacgauagcgaccugaagcgccucagagaucugaaucaagcggucaacaaucugguggaacucaaguccacacagcagaaaagcauucugcggguuggaacgcuuaccucugacgaucugcucacacuggcugccgaccuugagaagcugaaauccaaggugauccgcaccgaaagaccccucagcucuggcgucuauauggggaaccuguccgcccagcaacuggagcagcggcgcgcucuccugaauaugauuggaauggugggcggggcccagggaacacagccuggcagagauggcguugugcgggucugggacgugaaaaacccggaucuucugaauaaccaauucgggaccaugcccagccucacacuggcuugucuuaccaagcagggacagguggaccugaaugaugccguccucgcgcugacggaccugggccucaucuacaccgccaaguauccuaacucuuccgaccuggaucgccuuagccaaucccaucccauucugaauaugguugacacaaagaagucuagccucaacaucuccggguacaauuuuagccugggagcugccgugaaagcuggcgccugcaugcuugaugggggaaacaugcuggagaccaucaaggugacaccucagaccauggacggcauucucaaaucuauccugaaggucaaaagaucccugggcauguucgugagcgauacgcccggggaacggaauccuuaugagaacauucucuacaagaucugucugucuggagacggcuggccguauauugcgagccgcacauccaucguugggagagccugggaaaacaccacaguggaucuugagucugacggaaagccccagaaagucggcaccaccgggagcaauaagucccugcagagcgcuggauuuccuacaggccucacguacucucaacugaugacccugaaagauuccaugaugcagcuugaccccagcgccaagacauggauugauaucgagggccggccugaagaccccguggagaucgcucucuaccagccgaugucugggugcuauauucacuucuuuagagaaccuaccgaccugaaacaguucaagcaagaugccaaguacucccauggaaucgacguugccgaucuguuucccgcucagccuggccucacaagcgcggugauugaggcccugccccgcaacaugguccuuaccugucagggguccgacgauaucaaaaagcugcucgacucucagggacggagagauauuaaacugaucgacaucgcucugagcaaggccgauucccgcaaauucgaaaaugccgugugggaccaaugcaaggaucuuugucacaugcauacgggcgucgugguugagaagaaaaagagagggggcaaagaggaaauuacaccccacugcgcucucauggacuguaucauguaugaugccgcggugucuggaggccugaacauuccuguccugcgggcugugcucccgcgcgacaugguuuuucggaccagcucccccaaggugguccuguga

SEQ ID NO: 18086 - RNA, 1773 nt, Artificial Sequence
  derived and/or modified CDS sequence (opt5) from LASV(LASV1000-NIG-2009;Clade II)__AIT17783__SP-HsPLAT_NP(2-569)
auggacgccaugaagagaggccugugcugugugcuccugcuuugcggggcugucuucguuagccccagcgccuccaaggaggugaaaucuuuccuguggacccagagccucagacgggaacuguccggcuacugcucuaacaucaaacuucaagucguuaaggacgcucaggcccugcuccacgggcuggauuuuagcgagguguccaaugugcagcgccuuaugagaaagcagaaacgggacgauucugaccugaagcgccucagagaucugaaccaagcggucaauaaccugguggaacucaagagcacacagcagaaauccauucugcggguuggaacgcuuaccagcgacgaucugcucacacuggcugccgaccuugagaagcugaaaucuaaggugauccgcaccgaaagaccccucuccagcggcgucuauauggggaaucugucuacacagcaacuggagcagcggcgcgcccuccugaacaugauuggaauggugggcggggcucagggaacccagccuggcagagauggcguugugcgggucugggacgugaaaaauccggaucuucugaacaaucaauucgggacaaugcccucccucacccuggccugucuuacgaagcagggacagguggaccugaacgaugucguucucgcucugaccgaccugggccucaucuacacagccaaguauccuaauagcucugaccuggaucgccuuucccaaagccaucccauucugaacaugguggacaccaaaaaguccucucucaauaucagcggguacaacuuuucccugggagcggccgugaaagcuggcgccugcaugcuugaugggggaaauaugcuggagacaaucaaggucaccccucagacgauggacggcauucucaaaagcauccugaaggugaaaaagucucugggcauguucguuuccgauacacccggggaaagaaacccuuaugagaacauucucuacaagaucugucugagcggagacggcuggccguauauugcuucucggaccagcaucguggggcgcgccugggaaaauacaaccgucgaucuugaguccgacggaaaaccccagaaggugggcaccgcggggucuaacaaaagccugcaguccgccggauuuccuacaggccucacguacagccaacugaugacccugaaggauucuaugaugcagcuugaccccuccgcuaaaacauggauugauaucgagggcagaccugaagaccccguugagaucgcccucuaccagccggugagcgggugcuauauucacuucuuucgggaaccuaccgaccugaagcaguucaagcaagaugcuaaauacucucauggaaucgacgucgccgaucuguuucccgcccagccuggccucacauccgcugugauugaggcgcugcccagaaauaugguccuuaccugucaggggagcgacgauaucaagcgccugcucgacucccagggacggagagauauuaaacugaucgacaucgcccugucuaaggcugauagccgccgguucgaaaacgccgugugggaccaaugcaaagaucuuugucacaugcauacgggcguuguggucgagaagaagaaaagagggggcaaggaggaaauuacaccccacugcgcccucauggacuguaucauguaugaugcugccguguccggaggccugaauauuccuguucugcgcgcggugcucccgcgggacauggucuuuagaaccucuagccccaaaguggugcuguga

SEQ ID NO: 18087 - RNA, 1773 nt, Artificial Sequence
  derived and/or modified CDS sequence (opt5) from LASV(LASV221-NIG-2010;Clade II)__AIT17625__SP-HsPLAT_NP(2-569)
auggacgccaugaagagaggccugugcugugugcuccugcuuugcggggcugucuucguuagccccagcgccuccaaggaggugaaaucuuuccuguggacccagagccucagacgggaacuguccggcuacugcucuagcaucaaacuucaagucguuaaggacgcucaggcccugcuccacgggcuggauuuuuccgaggugucuaacgugcagcgccuuaugagaaagcagcggcgcgacgauagcgaccugaaaagacuccgggaucugaaucaagcggucaacaaucugguggaacucaaguccacacagcaaaagagcauucugcgcguuggaacgcuuaccucugacgaucugcucacacuggcugccgaccuugagaaacugaaguccaaagugaucagaaccgaacggccccucagcucuggcgucuauauggggaaccuguccacacagcagcuggagcagcgcagagcccuccugaauaugauuggaauggugggcggggcucagggaacccagccuggccgggauggcguugugcgcgucugggacgugaagaacccggaucuucugaauaaccaauucgggacaaugcccagccucacccuggccugucuuacgaaacagggacagguggaccugaaugaugcuguccucgcccugaccgaccugggccucaucuacacagcgaaguauccuaacucuuccgaccuggauagacuuagccaaucccaucccauucugaauaugguugacaccaagaaaucuagccucaacaucuccggguacaauuuuagccugggagccgcugugaaggccggcgcuugcaugcuugaugggggaaacaugcuggagacaaucaaagugaccccucagacggucgacggcauucucaagucuauccugaaagugaagcggucccugggcauguucguuagcgauacacccggggaacgcaauccuuaugagaacauucucuacaaaaucugucugucuggagacggcuggccguauauugccagcagaaccuccaucguggggcgggcgugggaaaacacaaccgucgaucuugagucugacggaaagccccagaaggugggcaccgccgggagcaauaaaucccugcagagcgcuggauuuccuacaggccucacguacucucaacugaugacccugaaggauuccaugaugcagcuugaccccagcgccaaaacauggauugauaucgagggcagaccugaagaccccguugagaucgcucucuaccagccgaugucugggugcuauauucacuucuuucgcgaaccuaccgaccugaagcaguucaaacaagaugccaaguacucccauggaaucgacguggccgaucuguuucccgcucagccuggccucacaagcgcggucauugaggcccugccccggaacauggugcuuaccugucagggguccgacgauaucaagagacugcucgacucucagggacgccgggauauuaaacugaucgacaucgcucugagcaaggccgauuccagaaaauucgaaaaugccgucugggaccaaugcaaggaucuuugucacaugcauacgggcgugguuguggagaaaaagaagcgcgggggcaaagaggaaauuacaccccacugcgcucucauggacuguaucauguaugaugccgcggucucuggaggccugaacauuccugugcugcgggcuguucucccgagagacaugguguuucgcaccagcucccccaaggucgugcuguga

SEQ ID NO: 18088 - RNA, 1773 nt, Artificial Sequence
  derived and/or modified CDS sequence (opt5) from LASV(LASV237-NIG-2010;Clade II)__AIT17639__SP-HsPLAT_NP(2-569)
auggacgccaugaagagaggccugugcugugugcuccugcuuugcggggcugucuucguuagccccagcgccuccaaggaggugaaaucuuuccuguggacccagagccucagacgggaacuguccggcuacugcucuaacaucaaacuucaagucguuaaggacgcucaggcccugcuccacgggcuggauuuuagcgagguguccaaugugcagcgccuuaugagaaagcagaaacgggacgauucugaccugaagcgccucagagaucugaaccaagcggucaauaaccugguggaacucaagagcacacagcagaaauccauucugcggguuggaacgcuuaccagcgacgaucugcucacacuggcugccgaccuugagaagcugaaaucuaaggugauccgcaccgaaagaccccucuccagcggcgucuauauggggaaucugucuacacagcaacuggagcagcggcgcgcccuccugaacaugauuggaauggugggcggggcucagggaacccagccuggcagagauggcguugugcgggucugggacgugaaaaauccggaucuucugaacaaucaauucgggacaaugcccucccucacccuggccugucuuacgaagcagggacagguggaccugaacgaugcuguccucgcccugaccgaccugggccucaucuacacagcgaaguauccuaauagcucugaccuggaucgccuuucccaaagccaucccauucugaacaugguugacaucaaaaaguccucucucaauaucagcggguacaacuuuucccugggagccgcugugaaagccggcgcuugcaugcuugaugggggaaauaugcuggagaccauuaaggugacaccucagaccauggacggcauccucaaaagcauucugaaggucaaaagaucucugggcauguucguguccgauacgcccggggaacggaacccuuaugagaacauccucuacaagauuugucugagcggagacggcuggccguauaucgccucucgcacaagcauuguugggagagcgugggaaaauaccacaguggaucuugaguccgacggaaagccccagaaagucggcucugccgggagcaacaagucccugcagagcgcuggauuuccuaccggccucaccuacucucaacugaugacacugaaagauuccaugaugcagcuugaccccagcgccaagacguggaucgauaucgagggccggccugaagaccccguggagauugcucucuaccagccgaugucugggugcuauauccacuucuuuagagaaccuaccgaccugaaacaguucaagcaagaugccaaguacucccauggaauugacguugccgaucuguuucccgcucagccuggccucacaagcgcggugaucgaggcccugccccgcaauaugguccuuaccugucagggguccgacgauauuaaacggcugcucgacucucagggaagacgcgauaucaagcugaucgacauugcucugagcaaagccgauucccggagauucgaaaacgccgugugggaccaaugcaaggaucuuugucacaugcauacaggcgucgugguugagaaaaagaagcgcgggggcaaagaggaaaucacgccccacugcgcucucauggacuguauuauguaugaugccgcggugucuggaggccugaauaucccuguccugcgggcugugcucccgagagacaugguuuuucgcaccagcucccccaaggugguccuguga

SEQ ID NO: 18089 - RNA, 1773 nt, Artificial Sequence
  derived and/or modified CDS sequence (opt5) from LASV(LASV253-NIG-2011;Clade II)__AIT17671__SP-HsPLAT_NP(2-569)
auggacgccaugaagagaggccugugcugugugcuccugcuuugcggggcugucuucguuagccccagcgccuccaaggaggugaaaucuuuccuguggacccagagccucagacgggaacuguccggcuacugcucuagcaucaaacuucaagucguuaaggacgcucaggcccugcuccacgggcuggauuuuuccgaggugucuaacgugcagcgccuuaugagaaagcagaaacgggacgauagcgaccugaagcgccucagagaucugaaucaagcggucaacaaucugguggaacucaaguccacccagcagaaaagcguucugcgggugggaacgcuuaccucugacgaucugcucacacuggcugccgaccuugagaagcugaaauccaaggucauucgcaccgaaagaccccucagcucuggcguguauauggggaaccuguccacacagcaacuggagcagcggcgcgcccuccugaauaugaucggaaugguuggcggggcucagggaacccagccuggcagagauggcgugguccgggugugggacgugaaaaacccggaucuucugaauaaccaauucgggacaaugcccagccucacccuggccugucuuacgaagcagggacaggucgaccugaaugauguugugcucgcucugaccgaccugggccucauuuacacagccaaguauccuaacucuuccgaccuggaucgccuuagccaaucccaucccauccugaauaugguggacaccaaaaagucuagccucaacauuuccggguacaauuuuagccugggagcggccgucaaagcuggcgccugcaugcuugaugggggaaacaugcuggagacaaucaaggugaccccucagacgauggacggcauccucaaaucuauucugaagguuaaaaagucccugggcauguucgugagcgauacacccggggaaagaaauccuuaugagaacauccucuacaagauuugucugucuggagacggcuggccguauaucgcuagccggaccuccauugucgggcgcgccugggaaaacacaaccguggaucuugagucugacggaaaaccccagaagguuggcaccgcggggagcaauaaaucccugcagagcgccggauuuccuacaggccucacguacucucaacugaugacccugaaggauuccaugaugcagcuugaccccagcgcuaaaacauggaucgauauugagggcagaccugaagaccccguggagaucgcccucuaccagccgaugucugggugcuauauccacuucuuucgggaaccuaccgaccugaagcaguucaagcaagaugcuaaauacucccauggaauugacgucacagaucuguuucccgcccagccuggccucaccagcgccgugaucgaggcucugcccagaaacaugguccuuacgugucagggguccgacgauauuaagcgccugcucgacucucagggacggagagauaucaaacugauugacaucgcgcugagcaaggccgauucccgccgguucgaaaaugcugugugggaccaaugcaaagaucuuugucacaugcauacaggcguuguggucgagaagaagaaaagagggggcaaggaggaaaucacaccccacugcgcccucauggacuguauuauguaugaugccgcugugucuggaggccugaacaucccuguucugcgcgccgugcucccgcgggacauggucuuuagaaccagcucccccaaaguggugcuguga

SEQ ID NO: 18090 - RNA, 1773 nt, Artificial Sequence
  derived and/or modified CDS sequence (opt5) from LASV(LASV254-NIG-2011;Clade II)__AIT17675__SP-HsPLAT_NP(2-569)
auggacgccaugaagagaggccugugcugugugcuccugcuuugcggggcugucuucguuagccccagcgccuccaaggaggugaaaucuuuccuguggacccagagccucagacgggaacuguccggcuacugcucuagcaucaaacuucaagucguuaaggacgcucaggcccugcuccacgggcuggauuuuuccgaggugucuaacgugcagcgccuuaugagaaagcagaaacgggacgauagcgaccugaagcgccucagagaucugaaucaagcggucaacaaucugguggaacucaaguccacacagcagaaaagcguucugcgggugggaacgcuuaccucugacgaucugcucacacuggcugccgaccuugagaagcugaaauccaaggucauucgcaccgaaagaccccucagcucuggcguguauauggggaaccuguccacacagcaacuggagcagcggcgcgcccuccugaauaugaucggaaugguuggcggggcucagggaacccagccuggcagagauggcgugguccgggugugggacgugaaaaacccggaucuucugaauaaccaauucgggacaaugcccagccucacccuggccugucuuacgaagcagggacaggucgaccugaaugaugcuguucucgcccugaccgaccugggccucauuuacacagcgaaguauccuaacucuuccgaccuggaucgccuuagccaaucccaucccauccugaauaugguggacaccaaaaagucuagccucaacauuuccggguacaauuuuagccugggagccgcugugaaagccggcgcuugcaugcuugaugggggaaacaugcuggagacaaucaaggucaccccucagacgauggacggcauccucaaaucuauucugaaggugaaaaagucccugggcauguucguuagcgauacacccggggaaagaaauccuuaugagaacauccucuacaagauuugucugucuggagacggcuggccguauaucgccagccggaccuccauuguggggcgcgcgugggaaaacacaaucgucgaucuugagucugacggaaaaccccagaaggugggcaccgccgggagcaauaaaucccugcagagcgcuggauuuccuaccggccucacauacucucaacugaugacgcugaaggauuccaugaugcagcuugaccccagcgccaaaaccuggauugauaucgagggcagaccugaagaccccguugagaucgcucucuaccagccgaugucugggugcuauauucacuucuuucgggaaccuacagaccugaagcaguucaagcaagaugccaaauacucccauggaaucgacguggccgaucuguuucccgcucagccuggccucaccagcgcggucauugaggcccugcccagaaacauggugcuuacaugucagggguccgacgauaucaagcgccugcucgacucucagggacggagagauauuaaacugaucgacaucgcucugagcaaggccgauucccgccgguucgaaaaugccgucugggaccaaugcaaagaucuuugucacaugcauaccggcgugguuguggagaagaagaaaagagggggcaaggaggaaauuacgccccacugcgcucucauggacuguaucauguaugaugccgcggucucuggaggccugaacauuccugugcugcgcgcuguucucccgcgggacaugguguuuagaacaagcucccccaaagucgugcuguga

SEQ ID NO: 18091 - RNA, 1773 nt, Artificial Sequence
  derived and/or modified CDS sequence (opt5) from LASV(Nig08-04;Clade II)__ADU56611__SP-HsPLAT_NP(2-569)
auggacgccaugaagagaggccugugcugugugcuccugcuuugcggggcugucuucguuagccccagcgccuccaaggaggugaaaucuuuccuguggacccagagccucagacgggaacuguccggcuacugcucuaacaucaaacuucaagucguuaaggacgcucaggcccugcuccacgggcuggauuuuagcgagguguccaaugugcagcgccuuaugagaaagcagaaacgggacgauggagaccugaagcgccucagagaucugaaccaagcggucaauaaccugguggaacucaagucuacccagcagaaaagcguucugcgggugggcacgcuuaccuccgacgaucugcucacacuggcugccgaccuugagaagcugaaaagcaaggucauucgcaccgaaagaccccucucuuccgggguguauaugggaaaucugagcacacagcaacuggagcagcggaaagcccuccugucuaugaucggcaugguugggggagcucagggcacccagccuggccgcgaugggguggucagagugugggacgugaagaacccggaucuucugaauaaccaauucggaacaaugcccucccucacccuggccugucuuacgaagcagggccaggucgaccugaaugaugcuguucucgcccugaccgaccuggggcucauuuacacagcgaaauauccuaacagcucugaccuggaucggcuuucccaaagccaucccauccugaauaugguggacaccaagaaauccucucucaacauuagcggauacaauuuuucccugggcgccgcugugaaggccggggcuugcaugcuugauggaggcaacaugcuggagacaaucaaagucaccccucagacgauggacggcauccucaagagcauucugaaagugaagcgcucucuggggauguucguuuccgauacacccggagaaagaaauccuuaugagaacauccucuacaagauuugucugagcggcgacggguggccguauaucgccucucggaccagcauugugggacgcgcgugggaaaacacaaccgucgaucuugaguccgacggcaaaccccagaagguggggaccgccggaucuaauaaaagccugcaguccgcuggcuuuccuacaggccucacguacagccaacugaugacccugaaggauucuaugaugcagcuugaccccuccgccaaaacauggaucgauauugaggggagaccugaagaccccguugagaucgcucucuaccagccgaugagcggaugcuauauccacuucuuucgggaaccuaccgaccugaagcaguucaagcaagaugccaaauacucucauggcauugacgugacagaucuguuuuccgcccagcccgggcucaccagcgcugucaucgaggcgcugccuagaaacauggugcuuacgugucagggauccgacgauauuaagaaacugcucgacucucagggccgccgggauaucaagcugauugacaucagccugaauaaagccgauuccagacgcuucgaaaacgcugucugggaccaaugcaaggaucuuugucacaugcauacaggggugguuguggagaagaaaaagcggggcggaaaagaggaaaucacaccccacugcgcccucauggacuguauuauguuugaugccgcugucucuggcgggcugaauauccccauucugagagccgugcucccucgcgacaugguuuuccggaccagcuccccgaaggugguccuguga

SEQ ID NO: 18092 - RNA, 1776 nt, Artificial Sequence
  derived and/or modified CDS sequence (opt5) from LASV(GA391;Clade III)__AAA46284__SP-HsPLAT_NP(2-570)
auggacgccaugaagagaggccugugcugugugcuccugcuuugcggggcugucuucguuagccccagcgccuccaaggaggugagaucuugccuguggacccagagccuccggcgcgaacuguccggcuacuguucuaacaucaaacuucaagucguuaaggacgcucaggcccugcuccacgggcuggauuucagcgagguguccaaugugcagagacuuaugcggaaacagaagcgcgacgauggagaccugaaaagacuccgggaucugaaccaagcggucaauaaccugguggaacucaagucuacacagcagaaaagcguucugcgcgugggcacgcuuuccagcgacgaucugcucauucuggcugccgaccuugagaaacugaagucuaaagucaccagaacagaacggccccucuccagcgggguguauaugggaaaucugucuucccagcaacuggaucagcgcagagcccuccugaacaugaucggcaugaccgggguuagcggaggcggcaagggggcuucuaauggaauugugcgggucugggacgugaaaaacgccgagcuucugaauaaccaguuuggcacaaugccuucccucacccuggcuugccuuacaaagcaggggcaaguggaucugaaugacgccguccaggcgcucaccgaucugggacugaucuacacggccaaguauccgaacagcuccgaccucgaccgccugucucagagccaucccauucuuaauaugaucgauaccaaaaaguccagccugaacaucucuggcuacaauuucucccucggggcugccguuaaagcuggagccuguaugcuggacggcggcaacaugcuugagacaauuaaggugagcccucaaaccauggaugggauccugaaaucuauucucaaggugaaaaagagccugggaauguuugucuccgacacacccggcgaaagaaacccuuaugagaauauccuguacaagauuugccucucuggggauggauggagcuauaucgcgucccggaccagcauugugggccgcgccugggaaaacacgguuguggaccuggagcaggauaauaaaccccagaagaucgggaacggaggcucuaauaaaucccuucagagcgcuggcuucgccgcugggcugaucuacucucaacucaugacacugaaggacuuuaaauguuucaaccugauuccuaaugccaagaccuggauggauaucgagggaagaccggaagaccccgucgagauugcccuuuaccagccuuccagcggcugcuaugugcacuuuuuccgggaacccacagaucucaagcaguuuaaacaggacgcuaaguacucccaugggagagacguuaccgaucuguucgcggcccaaccuggacugaccucugcugugaucgaggcccucccccgcaacauggucauuacaugucagggcagcgaagacauccggaaacugcuugagucccaggggagacgcgauaucaagcugauugacaucacgcucucuaaagccgauagccggaaguuugagaaugcugugugggaccaguucaaggaucugugccacaugcauaccggcgucgugguugaaaagaagaaaagaggaggcaaggaggaaauuacaccgcacugugcccugauggacugcaucauguuugaugcggcuguguccgggggacuugacgccaaaguccuccgcgugguucugccucgggauaugguguucagaaccagcacacccaaggucgugcuguga

SEQ ID NO: 18093 - RNA, 1773 nt, Artificial Sequence
  derived and/or modified CDS sequence (opt5) from LASV(Nig08-A19;Clade III)__ADU56619__SP-HsPLAT_NP(2-569)
auggacgccaugaagagaggccugugcugugugcuccugcuuugcggggcugucuucguuagccccagcgccuccaaggaggugaaaucuuuccuguggacccagagccucagacgggaacuguccggcuacugcucuaacaucaaacuucaagucguuaaggacgcucaggcccugcuccacgggcuggauuuuagcgagguguccaaugugcagcgccuuaugagaaagcagaaacgggacgauggagaccugaagcgccucagagaucugaaccaagcggucaauaaccugguggaacucaagucuacacagcagaaaagcguucugcgggugggcacgcuuuccagcgacgaucugcucguccuggcugccgaccuugagaagcugaaaucuaaggugguucgcaccgaaagaccccucuccagcgggauuuauaugggaaaucugucuucccagcaacuggaucagcggaaagcccuccugaacaugaucggcaugacagggggaaauggcggccgcaacaccacaagcgacgggauugugagagucugggaugugaagaaugcugagcuucugaacaaucaguucggaaccaugccuucucucacacuggccugucuuaccaagcagggccaaguggaccugaacgaugcuguccaggcccucacggaccuggggcugaucuacaccgcgaaauaucccaauuccagcgaccucgaucggcuggcccagucccauccgauucuuaacaugaucgacacaaagaaaucuagccugaauaucuccggauacaacuuuagccucggcgcugccguuaaggcuggggccugcaugcuggauggaggcaacaugcuugagaccauuaaagugucuccucaaacaauggacggcauccugaaguccauucucaaagugaagcgcagccuggggauguucaucucugauacccccggagaaagaaauccuuaugagaacauucuguacaagaucugucucagcggcgacggguggcccuauauugcgucccggacgucuaucgucggacgcgccugggaaaauacagugguugaucuggagagcgacaacaaaccucagaagaccggcaaugggggauccaacaaaagccuucagucugcuggcuuugccgcuggccugacauacucccagcucaugacccugaaggauagcaugcugcaacuugacccgaaugccaaaaccuggauggauaucgaggggagacccgaagacccuguggagauugcccucuaccagcccucuuccggaugcuauauccacuucuuucgggaaccuacagaccugaagcaguucaagcaggaugcuaaauacagccauggcauugacgucacggaucuguuugcggcccaacccgggcucaccuccgcugugaucgaggcccugccgagaaacaugguuauuacaugucagggaucugaagacauccgcaaacuucuggagagccagggccggagagauaucaagcucauugacaucucccugucuaagguggauagccgcaaauucgagaaugccgucugggaccaguuuaaggaucugugccacaugcauaccgggauuguggucgaaaagaaaaagcggggcggaaaagaggaaaucacaccucacugugcucuuauggacugcauuauguucgaugccgcgguguccggcgggguugacgcuaaggugcucagagccguccugccccgcgauaugguguuucggaccagcacgccuaaaguugugcuguga

SEQ ID NO: 18094 - RNA, 1773 nt, Artificial Sequence
  derived and/or modified CDS sequence (opt5) from LASV(G1180-SLE-2010;Clade IV)__AIT17169__SP-HsPLAT_NP(2-569)
auggacgccaugaagagaggccugugcugugugcuccugcuuugcggggcugucuucguuagccccagcgccuccaaggagaucaaaucuuuccuguggacccagagccucagacgggaacuguccggcuacugcucuaacauuaagcugcaaguggucaaagacgcucaggcccugcuccacgggcuggauuuuagcgagguuuccaaugugcagcgccuuaugagaaaggaacggcgcgacgauaacgaccugaaaagacuccgggaucugaaucaggcggugaacaaucuggucgagcucaagucuacacaacaaaagagcauccugcgcgugggaacgcuuaccuccgacgaucugcucauucuggcugccgaccuugaaaaacuuaagagcaaaguuaucagaacagagcggccccucucugccggcguguauauggggaaccuguccagccagcagcuggaucagcgcagagcucuccugucuaugauuggaauguccagcggcaaucagcgggcccaggcugggcgcgacggagucgugagaguuugggaugugaagaacgucgagcuucugaauaaccaguucggcaccaugccuucucucacacuggccugucuuaccaaacaaggccagguggaccugaaugaugcggugcaggcccucacagaccuggggcugaucuacaccgcuaaguauccgaacacguccgaccucgaucggcugacccaaagccaucccauccuuaauaugauugacacaaagaaauccucucugaacaucagcggauacaauuuuucccucggcgccgcugucaaggccggggcgugcaugcuggauggaggcaacaugcuugaaaccauuaaaguuagcccucagacaauggacgggauccugaagucuauucucaaagugaagaaagcccugggaauguucaucuccgauacccccggcgagcgcaacccuuaugaaaauauucuguacaagaucugucucagcggcgacggguggcccuauaucgcuucuagaacgagcauuacaggacgggccugggagaacaccguggucgaucuggaguccgacggcaagccucagaaagcugggucuaauaacagcaauaagucccuucagagcgugggauuuacagccggccugaccuacucucaacucaugacccugaaagaugccaugcugcagcuugacccgaacgcuaagacauggauggauaucgaagggagacccgaggacccuguugaaauugcgcucuaccagcccuccagcggaugcuauauccacuucuuucgcgagccuacggaccugaaacaguucaagcaagaugccaaguacucucauggcauugacgugaccgaucuguuugcugcccagcccggccucacauccgccgucaucgacgcucugccgcggaauauggugaucaccugucaggggagcgaugacauuagaaaacuucuggaaucccagggacgcaaggauaucaaacucauugacaucgcccugucuaagacagauagccggaaauaugagaacgcgguuugggaccaauacaaggaucugugccacaugcauaccggcguggucguggagaagaaaaagagagggggaaaagaagagauuacgccucacugugcucuuauggacugcaucauguucgaugccgccgucuccggcgggcucaauacaucugugcugcgcgcuguucugccccgggacaugguguuuagaaccagcaccccucgcgucgugcucuga

SEQ ID NO: 18095 - RNA, 1773 nt, Artificial Sequence
  derived and/or modified CDS sequence (opt5) from LASV(G1442-SLE-2011;Clade IV)__AIT17181__SP-HsPLAT_NP(2-569)
auggacgccaugaagagaggccugugcugugugcuccugcuuugcggggcugucuucguuagccccagcgccuccaaggaggugaaaucuuuccuguggacccagagccucagacgggaacuguccggcuacugcucuaacaucaaacuucaagucguuaaggacgcucaggcccugcuccacgggcuggauuuuagcgagguguccaaugugcagcgccuuaugagaaagcagcggcgcgacgauaacgaccugaaaagacuccgggaucugaaucaagcggucaacaaucugguggaacucaagucuacacagcaaaagagcguucugcgcgugggaacgcuuaccuccgacgaucugcucguccuggcugccgaccuugagaaacuuaagagcaaagugauuagaacagaacggccccucucugccggcguuuauauggggaaccuguccagccagcagcuggaucagcgcagagcucuccugaauaugaucggaaugucuggcgggauucagggaacccggacaggccgcgacggcguggucagagugugggaugugaagaacgccgaccuucugaauaaccaguucgggaccaugccuucccucacacuggcuugucuuaccaaacaaggacaggucgaucugaaugacguugugcaggcccucacggaccugggccugaucuacaccgcgaaguauccgaacgccagcgaucucgaccggcugacacaaucucaucccauucuuaauaugaucgauaccaagaaauccagccugaacaucuccggguacaauuuuucucucggagcugccgugaaggcuggcgccugcaugcuggacgggggaaacaugcuugagacaauuaaagucagcccucagaccauggauggcauccugaaguccauucucaaagugaagaaaacgcugggcauguucaucagcgacacacccggggagcgcaacccuuaugaaaauauucuguacaagaucugucucucuggagauggcuggcccuauauugcguccagaaccagcaucacagggcgggccugggagaacaccguuguggaccuggaaucugauggaaagccucagaaagcuggcagcaauaacuccaauaagucucuucagagcgccggguuugcugccggacugaccuacucccaacucaugacacugaaagacgccaugcugcagcuugauccgaacgcuaagacguggauggacaucgagggcagacccgaggacccugucgaaauugcgcucuaccagcccagcucuggcugcuauauccacuucuuucgcgagccuaccgaucugaaacaguucaagcaagacgccaaguacucccaugggauugaugugacagaccuguuugcugcccagcccggacucaccagcgccguuaucgaagcucugccgcggaauauggugauuacaugucagggcucugaugacaucaaaaagcugcuggagucccaggggagaaaagauaucaagcucauugacaucgcccugagcaaaaccgauucccgcaaguaugaaaacgcggucugggaccaauacaaggaucugugccacaugcauacgggaguggucguggagaaaaagaaacggggcgggaaggaggaaauuacaccucacugugcucuuauggacugcaucauguucgaugccgccguuucuggcggacucaauacccuggugcugagagcuguccucccccgcgacaugguguuucggaccagcacaccuagaguugugcuguga

SEQ ID NO: 18096 - RNA, 1773 nt, Artificial Sequence
  derived and/or modified CDS sequence (opt5) from LASV(G3010-SLE-2013;Clade IV)__AIT17345__SP-HsPLAT_NP(2-569)
auggacgccaugaagagaggccugugcugugugcuccugcuuugcggggcugucuucguuagccccagcgccuccaaggagaucaaaucuuuccuguggacccagagccucagacgggaacuguccggcuacugcucuaacauuaaacuucaaguggucaaagacgcucaggcccugcuccacgggcuggauuuuagcgagguuuccaaugugcagcgccuuaugagaaaggaacggcgcgacgauaacgaccugaaaagacuccgggaucugaaucaggcggugaacaaucuggucgagcucaagucuacacaacaaaagagcauccugcgcgugggaacgcuuaccuccgacgaucugcucauucuggcugccgaccuugaaaaacuuaagagcaaaguuacaagaaccgagcggccccucucugccggcguguauauggggaaccuguccagccagcagcuggaucagcgcagagcucuccugucuaugaucggaauguccagcggcguccagggggcccgggcuggacgcgacggcgugguuagagugugggaugucaagaaugccgagcuucugaacaaucaguucggcacaaugccuucucucacccuggcgugucuuacaaaacaggggcaaguggaccugaacgaugugguccaggcccucaccgaccugggacugauuuacacggcuaaguauccgaauaccuccgaccucgaucggcugacacagagccaucccauccuuaacaugaucgacaccaagaaauccucucugaauauuagcggcuacaacuuuucccucggggccgcuguuaaggccggagcgugcaugcuggauggcgggaauaugcuugaaacaaucaaagugagcccucaaaccauggacggcauucugaagucuauccucaaagugaagaaagcccugggaauguucauuuccgagacgcccggcgaacgcaacccuuaugagaacauccuguacaagauuugucucagcggggauggauggcccuauaucgcuucuagaacaagcaucaccggccgggccugggagaauacagucguggaccuggaauccgaugggaagccucagaaagcuggaucuaacaauagcaacaagucccuucagagcgccggcuuuaccgccgggcugaccuacucucagcucaugacacugaaagacgcuaugcugcaacuugauccgaaugcgaagacguggauggacauugagggaagacccgaagauccuguugagguggcccucuaccagcccuccagcggcugcuauauccacuucuuucgcgaaccuaccgaccugaaacaguucaagcaggacgcuaaguacucucauggcauugaugucacagaccuguuugccgcccaacccgggcucaccuccgcugugaucgaugcccugccgcggaacaugguuauuacaugucagggaagcgacgauaucaaaaagcugcuggagucccagggcagaaaagacaucaagcucauugauaucgcgcugucuaaaaccgacagccgcaaguaugagaaugcugugugggaucaguacaaggaccugugccacaugcauacgggggucguggucgaaaagaagaaacggggaggcaaggaggaaauuacaccucacugugcccuuauggauugcaucauguucgacgccgcuguguccgggggccucaacaccucuguucugagagccgugcugccccgcgauauggucuuucggaccagcacaccuagagugguucucuga

SEQ ID NO: 18097 - RNA, 1773 nt, Artificial Sequence
  derived and/or modified CDS sequence (opt5) from LASV(G502-SLE-2009;Clade IV)__AIT17127__SP-HsPLAT_NP(2-569)
auggacgccaugaagagaggccugugcugugugcuccugcuuugcggggcugucuucguuagccccagcgccuccaaggagaucaaaucuuuccuguggacccagagccucagacgggaacuguccggcuacugcucuaacauuaagcugcaaguggucaaagacgcucaggcccugcuccacgggcuggauuuuagcgagguuuccaaugugcagcgccuuaugagaaaggaacggcgcgacgauaacgaccugaaaagacuccgggaucugaaucaggcggugaacaaucuggucgagcucaagucuacacaacaaaagagcauccugcgcgugggaacgcuuaccuccgacgaucugcucauucuggcugccgaccuugaaaaacuuaagagcaaaguuaucagaacagagcggccccucucugccggcguguauauggggaaccuguccagccagcagcuggaucagcgcagagcucuccugucuaugauuggaauguccggcgggaaucagggaguccgggccggcaaggacggcgugguucgcgugugggaugucaaaaacgcugagcuucugaauaaccaguucgggaccaugccuagccucacacuggccugucuuaccaagcagggacaaguggaccugaaugaugcggugcaggcccucacagaccugggccugaucuacaccgcuaaguauccgaacacgucugaccucgauagacugacccagucccaucccauccuuaauaugauugacaccaaaaagagcucccugaacaucucuggguacaauuuuagccucggagccgcugucaaagccggcgcgugcaugcuggaugggggaaacaugcuugaaacaauuaagguuuccccucaaacaauggacggcauccugaaaagcauucucaaggugaaaaaggcccugggcauguucaucucugauacccccggggagcggaacccuuaugaaaauauucuguacaagaucugucucuccggagacggcuggcccuauaucgcuagccgcacgucuauuacagggagagccugggagaacaccguggucgaucuggagagcgacggaaaaccucagaaggcuggcuccaauaacucuaauaaaagccuucaguccgccggguuuacagccggacugaccuacagccagcucaugacccugaaggaugcuaugcugcaacuugacccgaacacaaaaacguggauggauaucgaaggccggcccgaggacccuguggaaauugcgcucuaccagcccucuuccggcugcuauauccacuucuuuagagagccuaccgaccugaagcaguucaagcaggaugccaaauacagccaugggauugacguuacagaucuguuugcugcccaacccggacucaccucugccgugaucgacgcucugccgcgcaauauggucaucacaugucagggcuccgaugacauucggaaacuucuggaaagccaggggagaaaggauaucaagcucauugacaucgcccugaacaaaaccgauucccgcaaguaugagaaugcggugugggaccaguacaaggaucugugccacaugcauacgggaguuguggucgagaaaaagaaacggggcgggaaggaagagauuacaccucacugugcucuuauggacugcaucauguucgaugccgccgugucuggcggacucaacaccagcguccugagagcugugcugccccgcgacaugguuuuucggaccuccacaccuagagugguccucuga

SEQ ID NO: 18098 - RNA, 1773 nt, Artificial Sequence
  derived and/or modified CDS sequence (opt5) from LASV(G733-SLE-2010;Clade IV)__AIT17155__SP-HsPLAT_NP(2-569)
auggacgccaugaagagaggccugugcugugugcuccugcuuugcggggcugucuucguuagccccagcgccuccaaggagaucaaaucuuuccuguggacccagagccucagacgggaacuguccggcuacugcucuaacauuaagcugcaaguggucaaagacgcucaggcccugcuccacgggcuggauuuuagcgagguuuccaaugugcagcgccuuaugagaaaggaacggcgcgacgauaacgaccugaaaagacuccgggaucugaaucaggcggugaacaaucuggucgagcucaagucuacacaacaaaagagcgugcugcgcguuggaacgcuuaccuccgacgaacugcucgugcuggcugccgaucuugagaaacuuaagagcaaagucaucagaacagagcggccccucucugccggcguguauauggggaaccuguccagccagcagcuggaccagcgcagagcucuccugucuaugauuggaauguccggcgggaaucagggagcccggaccggccgcgauggcguugugagagucugggacgugaagaacgcugaacuucugaauaaccaguucgggacaaugccuagccucacccuggccugucuuacaaaacagggacaaguggaucugaaugacgcgguccaggcccucaccgaucugggccugaucuacacggcuaaguauccgaacaccucugaccucgaccggcugacacagucccaucccauucuuaauaugaucgauaccaagaaaagcucccugaacaucucuggguacaauuuuagccucggagccgcuguuaaggccggcgcgugcaugcuggacgggggaaacaugcuugagacaauuaaaguguccccucaaaccauggauggcauccucaagagcauucugaaagugaagaaagcccugggcauguucaucucugacacgcccggggaacgcaacccuuaugagaauauucuguacaagaucugucucuccggagauggcuggcccuauauugcuagcagaacaucuaucaccgggcgggccugggagaacacagucguggaccuggaaagcgauggaaagccucagaaagcuggcuccaauaacucuaauaagagccuucaguccgccggguuuaccgccggacugaccuacagccagcucaugacacugaaagacgcuaugcugcaacuugauccgaacgcgaagacguggauggacaucgagggcagacccgaagauccuguugagauugcccucuaccagcccucuuccggcugcuauauccacuucuuucgcgaaccuaccgaccugaaacaguucaagcaggacgcuaaguacagccaugggauugaugugacagaccuguuugccgcccaacccggacucaccucugcugucaucgaugcccugccgcggaauauggugauuacaugucagggcuccgacgauaucagaaaacuucuggagagccaggggcgcaaggacaucaaacucauugauaucgcgcuguccaagauugacucucggaaauaugagaacgcuguuugggaucaguacaaggaccugugccacaugcauaccggaguggucguggaaaagaaaaagagaggcgggaaagaggaaaucacgccucacugugcccuuauggauugcauuauguucgacgccgcugucagcggcggacucaauucccuggugcugcgcgccguucucccccgggauaugguguuuagaacaucuaccccucgcgucgugcuguga

SEQ ID NO: 18099 - RNA, 1773 nt, Artificial Sequence
  derived and/or modified CDS sequence (opt5) from MOPV/LASV reassortant(IGS-1;Clade IV)__AFY05578__SP-HsPLAT_NP(2-569)
auggacgccaugaagagaggccugugcugugugcuccugcuuugcggggcugucuucguuagccccagcgccuccaaggagaucaaaucuuuccuguggacccagagccucagacgggaacuguccggcuacugcucuaacauuaaacuucaaguggucaaggacgcucaggcccugcuccacgggcuggauuuuagcgagguuuccaaugugcagcgccuuaugagaaaggaacggcgcgacgauaacgaccugaaaagacuccgggaucugaaucaggcggugaacaaucuggucgagcucaagucuacacaacaaaagagcauccugcgcgugggaacgcuuaccuccgacgaucugcucauucuggcugccgaccuugaaaaacugagaagcaagguuauccggacagagcgcccccucucugccggcguguauauggggaaccuguccagccagcagcuggaucagagacgggcucuccugaauaugauuggaaugucuggcgggaaccagggagcccgcgcuggcagagacggcgucgugcggguuugggaugugaaaaaugccgagcuucuguccaaccaguucgggaccaugccuagccucacacuggcgugucuuaccaagcagggacaagucgaccugaaugaugccgugcaggcucucacagaccugggccugaucuacaccgccaaauauccgaacacgucugaccucgaucgccugacccagucccaucccauccuuaauaugauugacacaaagaaaagcucccugaacaucucuggguacaauuuuagccucggagcugccgugaaggcgggcgccugcaugcuggaugggggaaacaugcuugaaaccauuaaggucuccccucaaacaauggacggcauccugaaaagcauucucaagguuaaaaaggcucugggcauguucaucucugauacccccggggagagaaacccuuaugaaaauauucuguacaaaaucugucucuccggagacggcuggcccuauaucgccagccggacgucuauuacagggagagcuugggagaacaccgugguggaucuggagagcgacggaaagccucagaaggccgauuccaauaacucuagcaaaucccuucagagcgccggcuuuacagcugggcugaccuacucucagcucaugacccugaaggacgcgaugcugcaacuugauccgaaugccaaaacauggauggacaucgaaggacgccccgaggacccugucgaaauugcucucuaccagcccuccagcggcugcuauauccacuucuuucgggagccuacggaucugaagcaguucaaacaggacgccaaguacucucauggcauugaugugaccgaccuguuugccacacaacccgggcucaccuccgcuguuaucgaugcccugccgagaaacauggugaucacaugucagggaagcgacgauauucgcaaacuucuggaaucccagggccggaaggacaucaagcucauugauaucgaccugucuaaaaccgauagcagaaaguaugagaaugcggucugggaccaguacaaagaucugugccacaugcauacgggggugguuguggagaagaagaaacgcggaggcaaggaagagauuacaccucacugugcucuuauggacugcaucauguucgacgccgccgucuccgggggccucaacaccucugugcugcgggcuguccugcccagagauaugguguuucgcaccagcacaccucggguugugcucuga

SEQ ID NO: 18100 - RNA, 1773 nt, Artificial Sequence
  derived and/or modified CDS sequence (opt5) from LASV(LM765-SLE-2012;Clade IV)__AIT17815__SP-HsPLAT_NP(2-569)
auggacgccaugaagagaggccugugcugugugcuccugcuuugcggggcugucuucguuagccccagcgccuccaaggagaucaaaucuuuccuguggacccagagccucagacgggaacuguccggcuacugcucuaacauuaagcugcaaguggucaaagacgcucaggcccugcuccacgggcuggauuuuagcgagguuuccaaugugcagcgccuuaugagaaaggaacggcgcgacgauaacgaccugaaaagacuccgggaucugaaucaggcggugaacaaucuggucgagcucaagucuacacaacaaaagagcauccugcgcgugggaacgcuuaccuccgacgaucugcucauucuggcugccgaccuugaaaaacuuaagagcaaaguuacaagaaccgagcggccccucucugccggcguguauauggggaaccuguccagccagcagcuggaucagcgcagagcucuccuggacaugaucggaaugucuggcuccaaucagggggcccgggcuggacgcgauggcgucgugagaguuugggacgugaagaacgccgagcuucugaauaaccaguucggcacaaugccuagccucacccuggcgugucuuacaaaacaggggcaagucgaucugaaugacgccgugcaggcucucaccgaccugggacugauuuacacggccaaguauccgaacaccucugaucucgaccggcugacacagucccaucccauccuuaauaugaucgauaccaagaaaagcucccugaacauuucuggcuacaauuuuagccucggggcugccgugaaggcgggagccugcaugcuggacggcgggaacaugcuugaaacaaucaaagucuccccucaaaccauggauggcauucucaagagcauccugaaaguuaagaaagcucugggaauguucauuucugacgcccccggcgagcgcaacccuuaugaaaauauccuguacaagauuugucucuccggggauggauggcccuauaucgcuagcagaacgucuaucacaggccgggccugggagaacaccgugguggaccuggagagcgaugggaagccucagaaagccggauccaauggcucuaacaagagccuucaguccgcuggguuuacagcgggacugaccuacagccagcucaugacccugaaagacgccaugcugcaacuugauccgaaugcuaagacauggauggacauugaaggcagacccgaggacccugucgaaaucgcccucuaccagcccucuuccggcugcuauauucacuucuuucgcgagccuacggaucugaaacaguucaagcaggacgccaaguacagccaugggaucgaugugaccgaccuguuugcugcccaacccggacucacaucugcgguuauugaugcucugccgcggaacauggugaucaccugucagggcuccgacgauaucagaaaacuuuucgaaagccaggggcgcaaggacauuaaacugaucgauauugcccucuccaagacagacucucggaaauaugagaaugccgucugggaucaguacaaggaccugugccacaugcauaccggaaucgugguugagaagaaaaagagaggcgggaaagaagagauuacgccucacugugcucugauggauugcaucauguuugacgccgcugugagcggcggacuuaacacauccguccuccgcgccgugcugccccgggacauggucuucagaaccucuaccccucgcgugguucuguga

SEQ ID NO: 18101 - RNA, 1773 nt, Artificial Sequence
  derived and/or modified CDS sequence (opt5) from LASV(LM776-SLE-2012;Clade IV)__AIT17825__SP-HsPLAT_NP(2-569)
auggacgccaugaagagaggccugugcugugugcuccugcuuugcggggcugucuucguuagccccagcgccuccaaggagaucaaaucuuuccuguggacccagagccucagacgggaacuguccucuuacugcagcaacauuaaacuucaaguggucaaggacgcucaggcccugcuccacggccuggauuuuuccgagguuucuaaugugcagcgccuuaugagaaaggaacggcgcgacgauaacgaccugaaaagacuccgggaucugaaucaggcggugaacaaucuggucgagcucaagagcacacaacagaaguccauccugcgcguggggacgcuuaccagcgacgaucugcucauucuggcugccgaccuugaaaaacugaagucuaaaguuacaagaaccgagcggccccucuccgccggaguguauaugggcaaccugagcucucagcagcuggaucaacgcagagcucuccuguccaugaucgggaugagcggaucuaaucagggcgcccgggcugggcgcgacggagucgugagaguuugggaugugaagaacgccgagcuucugaauaaccaguucggcacaaugccuucccucacccuggcgugucuuacaaaacagggccaagucgaccugaaugaugccgugcaggcucucaccgaccuggggcugauuuacacggccaaguauccgaacaccagcgaccucgaucggcugacacagucccaucccauccuuaauaugaucgacaccaagaaaucuagccugaacauuuccggauacaauuuuagccucggcgcugccgugaaggcgggggccugcaugcuggauggaggcaacaugcuugaaacaaucaaagucucuccucaaaccauggacgggauucugaaguccauccucaaaguuaagaaagcucugggaauguucauuagcgauacgcccggcgagcgcaacccuuaugaaaauauccuguacaagauuugucucucuggcgacggguggcccuauaucgccagcagaacauccaucaccggacgggcuugggagaacacagugguggaucuggagucugacggcaagccucagaaagccgggagcaauaacuccaauaagagccuucagucugccggauuuaccgcuggccugaccuacucccagcucaugacacugaaagaugcgaugcugcaacuugacccgaacgccaagacguggauggauauugaagggagacccgaggacccugucgaaguggcucucuaccagcccagcucuggaugcuauauccacuucuuucgcgagccuaccgaccugaaacaguucaagcaggaugccaaguacucccauggcauugacguuacagaucuguuugccgcucaacccggccucaccagcgccgugaucgacgcgcugccgcggaauauggucauuacaugucagggguccgaugacaucagaaaacuucuggaaucucagggacgcaaggauaucaaacucauugacaucgcucugagcaagaccgauucccggaaauaugagaacgccgugugggaccaguacaaggaucugugccacaugcauacgggcguuguggucgagaagaaaaagagagggggaaaagaagagauuacaccucacugugcccuuauggacugcaucauguucgaugcugccgugucuggcgggcucaauaccagcguccugcgcgcugugcugccccgggacaugguuuuuagaaccuccacaccucgcgugguccucuga

SEQ ID NO: 18102 - RNA, 1773 nt, Artificial Sequence
  derived and/or modified CDS sequence (opt5) from LASV(Mad39;Clade IV)__ANH09723__SP-HsPLAT_NP(2-569)
auggacgccaugaagagaggccugugcugugugcuccugcuuugcggggcugucuucguuagccccagcgccuccaaggagaucaaaucuuuccuguggacccagagccucagacgggaacuguccggcuacugcucuaacauuaagcugcaaguggucaaagacgcucaggcccugcuccacgggcuggauuuuagcgagguuuccaaugugcagcgccuuaugagaaagcagcggcgcgacgauaacgaccugaaaagacuccgggaucugaaucaagcggugaacaaucuggucgaacucaagucuacacagcaaaagagcgugcugcgcguuggaacgcuuaccuccgacgaucugcucacacuggcugccgaccuugagaaacuuaagagcaaagugaccagaacagaacggccccucaccgccggcgucuauauggggaaccugucuucccagcagcuggaucagcgcagagcucuccugaauaugaucggaaugagcggcgggaaccagggagcccggacaggccgcgacggcgugguuagagugugggaugucaagaaugcugagcuucugaacaaucaguucgggaccaugccuucucucacgcuggccugucuuaccaaacaaggacagguggaccugaacgaugugguccaggcgcucacagaccugggccugauuuacaccgccaaguauccgaauacauccgaccucgaucggcugacccaaagccaucccauccuuaacaugauugacacgaauaagucuucccugaacaucagcggguacaacuuuucccucggagcugccguuaaagcuggcgccugcaugcuggaugggggaaauaugcuugagacaaucaaggugucuccucagaccauggacggcauucugaaaagcauccucaaggugaaaaagucccugggcauguucauuagcgauacacccggggaacgcaacccuuaugagaauauccuguacaaaauuugucucucuggagacggcuggcccuauaucgcguccagaaccagcauuaccgggcgggccugggaaaacacagucguggaucuggagucuggaggcaagccucagaaggcugggagcaauaacuccaauaaaucucuucagagcgccggauuugcugccggccugacguacucccaacucaugacccugaaggacgccaugcugcagcuugauccgaacgcuaaaacauggauggacaucgagggcagacccgaagauccuguugagaucgcgcucuaccagcccauuagcgggugcuauauccacuucuuucgcgaaccuaccgaccugaagcaguucaaacaagacgccaaguacucucauggaauugaugugacagaccuguuugcugcccagcccggccucaccuccgccgucaucgaggcucugccgcggaauauggugauuacgugucaggggagcgaugacaucagaaaacuuuucgaaucucagggacgcaaggauaucaagcugauugacaucgcccucuccaaaacagauagccggaaguaugagaacgcgguuugggaccaauacaaagaucugugccacaugcauaccggcguggucguggagaagaagaaaaagggcgggaaagaagagauuaccccucacugugcucugauggacugcaucauguuugaugccgccgucuccggaggccuuaauacacucgugcugagagcuguucugccccgcgacaugguguuccggaccucuacaccuaaggucgugcucuga

SEQ ID NO: 18103 - RNA, 1773 nt, Artificial Sequence
  derived and/or modified CDS sequence (opt5) from LASV(Z0947-SLE-2011;Clade IV)__AIT17841__SP-HsPLAT_NP(2-569)
auggacgccaugaagagaggccugugcugugugcuccugcuuugcggggcugucuucguuagccccagcgccuccaaggagaucaaaucuuuccuguggacccagagccucagacgggaacuguccggcuacugcucuaacauuaagcugcaaguggucaaagacgcucaggcccugcuccacgggcuggauuuuagcgagguuuccaaugugcagcgccuuaugagaaaggaacggcgcgacgauaacgaccugaaaagacuccgggaucugaaucaggcggugaacaaucuggucgagcucaagucuacacaacaaaagagcauccugcgcgugggaacgcuuaccuccgacgaucugcucauucuggcugccgaccuugaaaaacuuaagagcaaaguuacaagaaccgagcggccccucucugccggcguguauauggggaaccuguccagccagcagcuggaucagcgcagagcucuccugaauaugaucggaaugucuggcuccaaccagggggcccggacaggacgcgacggcgucgugagaguuugggaugugaagaaugcugagcuucugaacaaucaguucggcaccaugccuagccucacacuggccugucuuaccaaacaggggcaagucgaccugaacgaugcggugcaggcccucacggaccugggacugauuuacaccgcuaaguauccgaauacaucugaccucgaucggcugacccagucccaucccauccuuaacaugaucgacacaaagaaaagcucccugaauauuucuggcuacaacuuuagccucggggccgcugugaaggccggagcgugcaugcuggauggcgggaacaugcuugaaaccaucaaagucuccccucaaacgauggacggcauucucaagagcauccugaaaguuaagaaagcccugggaauguucauuucugaugcucccggcgagcgcaauccuuaugaaaacauccuguacaagauuugucucuccggggacggauggcccuauaucgccagcagaacaucuaucaccggccgggcuugggagaauacagugguggaucuggagagcgacgggaagccucagaaagccggauccaacggcucuaauaagagccuucaguccgccggguuuaccgcuggacugaccuacagccagcucaugacacugaaagaugcgaugcugcaacuugacccgaacgccaagacguggauggauauugaaggcagacccgaggacccugucgaaaucgcucucuaccagcccucuuccggcugcuauauucacuucuuucgcgagccuaccgaccugaaacaguucaagcaggaugccaaguacagccaugggaucgacgugacagaucuguuugccgcucaacccggacucaccucugccguuauugacgcgcugccgcggaauauggugaucacaugucagggcuccgaugacaucagaaaacuuuucgaaagccaggggcgcaaggauauuaaacugaucgacauugcucucuccaagaccgauucucggaaauaugagaacgccgucugggaccaguacaaggaucugugccacaugcauacgggaaucgugguugagaagaaaaagagaggcgggaaagaagagauuacaccucacugugcccugauggacugcaucauguuugaugcugccgugagcggcggacuuaauaccuccguccuccgcgcugugcugccccgggacauggucuucagaaccucuacaccucgcgugguucuguga

SEQ ID NO: 18104 - RNA, 2014 nt, Artificial Sequence
  mRNA product Design a-1 (hSL-A64-N5) comprising derived and/or modified sequence from LASV(Josiah;Clade IV)__NP_694869__SP-HsPLAT_NP(2-569) (opt1)
aggagagucccgcagucggcguccagcggcucugcuuguucgugugugugucguugcaggccuuauucaagcuuaccauggacgccaugaagcgcggccugugcugcgugcuccugcugugcggggccgucuucgugagccccagcgccuccaaggagaucaagagcuuccuguggacccagucccuccgccgggagcugagcggcuacugcuccaacaucaagcuccagguggucaaggacgcccaggcgcugcugcacgggcuggacuucagcgagguguccaacgugcagcgccucaugcggaaggagcgccgggacgacaacgaccugaagcgccugcgggaccucaaccaggccgucaacaaccugguggagcucaagagcacccagcagaaguccauccugcgcgugggcacccugaccagcgacgaccugcucauccuggccgccgaccuggagaagcucaaguccaaggucauccggaccgagcgcccccugagcgccgggguguacaugggcaaccuguccagccagcagcucgaccagcggcgcgcgcugcugaacaugaucgggauguccggcggcaaccagggggcccgggccggccgcgacggggugguccgggugugggacgugaagaacgccgagcuccugaacaaccaguucggcaccaugccgagccugacgcucgcgugccugaccaagcaggggcaggucgaccugaacgacgccgugcaggcccucaccgaccugggccugaucuacaccgccaaguaccccaacacguccgaccucgaccgccugacccagagccaccccauccugaacaugaucgacaccaagaaguccagccucaacaucagcggcuacaacuucucccugggggccgcggugaaggccggcgccugcaugcuggacgggggcaacaugcucgagaccaucaaggucagcccccagacgauggacggcauccugaaguccauccugaaggugaagaaggcccucgggauguucaucagcgacaccccgggcgagcggaaccccuacgagaacauccuguacaagaucugccuguccggggacggcuggcccuacaucgccagccgcaccuccaucaccgggcgggcgugggagaacacgguggucgaccucgagagcgacggcaagccccagaaggccgacuccaacaacagcuccaagagccugcaguccgccggcuucaccgccgggcugaccuacagccagcucaugacccugaaggacgccaugcugcagcuggacccgaacgcgaagacguggauggacaucgagggccgccccgaggaccccguggagaucgcccucuaccagcccuccagcgggugcuacauccacuucuuccgggagccgaccgaccugaagcaguucaagcaggacgccaaguacucccacggcaucgacgugaccgaccuguucgccacccagcccgggcucacgagcgccgucaucgacgcgcugccccgcaacauggugaucacgugccagggcuccgacgacauccgcaagcugcucgagagccagggccggaaggacaucaagcugaucgacaucgcccugagcaagaccgacucccgcaaguacgagaacgccgugugggaccaguacaaggaccucugccacaugcacaccggggucguggucgagaagaagaagcggggcgggaaggaggagaucaccccgcacugcgcccugauggacugcaucauguucgacgcggccgugagcggcgggcugaacaccuccgugcuccgcgccguccugccccgggacaugguguuccgcaccagcacgccccgggugguccugugaggacuagucccuguucccagagcccacuuuuuuuucuuuuuuugaaauaaaauagccugucuuucagaucucaaaggcucuuuucagagccaccaaaaaaaaaaaaaaaaaaaaaaaaaaaaaaaaaaaaaaaaaaaaaaaaaaaaaaaaaaaaaaaaagaauu

SEQ ID NO: 18105 - RNA, 2014 nt, Artificial Sequence
  mRNA product Design a-1 (hSL-A64-N5) comprising derived and/or modified sequence from LASV(LP;Clade I)__AAF86702__SP-HsPLAT_NP(2-569) (opt1)
aggagagucccgcagucggcguccagcggcucugcuuguucgugugugugucguugcaggccuuauucaagcuuaccauggacgccaugaagcgcggccugugcugcgugcuccugcugugcggggccgucuucgugagccccagcaacuccaaggagaucaagagcuuccuguggacccagucccuccgccgggagcugagcggcuacugcuccaacaucaagcuccagguggucaaggacgcccaggcccugcugcacgggcuggacuucagcgagguguccaacgugcagcgccucaugcggaagcagaagcgcgacgacgcggaccugaagcggcugcgcgaccucaaccaggccgucaacaaccugguggagcucaagagcacccagcagaagaacgugcugcgggucggcacgcuguccagcgacgaccugaucacccucgccgccgaccuggagaagcugaaguccaaggugauccgcaccgagcggccccucagcuccgggguguacaugggcaaccugagcucccagcagcuggaccagcgccgggcccuccugagcaugaucgggauguccggcggcccgcaggggaaccgcaccggcggggacggcgucgugcgggugugggacgucaagaacgcggagcugcucaacaaccaguucgggacgaugcccagccugacccuggccugccucaccaagcagggccagguggaccugaacgacgccgugcaggcccugaccgaccucggccugaucuacacggcgaaguaccccaacuccagcgaccuggacaugcucacccagagccaccccauccuggggauggucgacaccaagaaguccagccugaacaucuccggcuacaacuucagccucggggccgccgugaaggccggcgccugcaugcuggacggcgggaacaugcuggagaccaucaagguguccccgcagacgauggacggcauccucaagagcauccugaaggucaagcgcucccuggggauguucaucagcgacacccccggcgagcggaaccccuacgagaacauccucuacaagaucugccuguccggggagggcuggcccuacaucgcgagccgcaccuccaucaccggccgggccugggagaacacgcugguggaccucgagagcgacaacaagccgcccaagcugaacuccgccgggagcaacaagucccugcaggccgccggccucaacgcggggcugaccuacagccagcugaugacccugaaggacugcaugcuccagcuggaccccuccagcaagaccuggaucgacaucgagggccgccccgaggacccgguggagaucgcccuguuccagcccuccagcgggugcuacauccacuucuuccgggagcccacggaccucaagcaguucaagcaggacgccaaguacagccacggcaucgacgucaccgaccuguucuccacccagcccggccugaccagcgccgugaucgaggcccucccgcgcaacauggugcugacgugccagggguccgacgacaucaagaagcugcucgagagccagggccggcgcgacaucaagcugaucgacaucucccugagcaaggcggacucccgcaaguucgagaacgccgucugggaccaguacaaggaccucugccacaugcacaccgggguggucguggagaagaagaagcggggcgggaaggaggagaucacgccccacugcgcccugcuggacugcaucauguucgacgccgccaccaccggcagccucaacaucaccacccugcgcgcggugcugccccgggacauggucuuccgcaccuccacgcccaagguggugcucugaggacuagucccuguucccagagcccacuuuuuuuucuuuuuuugaaauaaaauagccugucuuucagaucucaaaggcucuuuucagagccaccaaaaaaaaaaaaaaaaaaaaaaaaaaaaaaaaaaaaaaaaaaaaaaaaaaaaaaaaaaaaaaaaagaauu

SEQ ID NO: 18106 - RNA, 2014 nt, Artificial Sequence
  mRNA product Design a-1 (hSL-A64-N5) comprising derived and/or modified sequence from LASV(803213;Clade II)__AAF86704__SP-HsPLAT_NP(2-569) (opt1)
aggagagucccgcagucggcguccagcggcucugcuuguucgugugugugucguugcaggccuuauucaagcuuaccauggacgccaugaagcgcggccugugcugcgugcuccugcugugcggggccgucuucgugagccccagcgccuccaaggaggugaaguccuuccuguggacccagagccuccgccgggagcugagcggcuacugcuccaacaucaagcugcaggucgugaaggacgcccaggcgcuccugcacgggcuggacuucagcgaggugaacaacguccagcgccucaugcggaagcagaagcgcgacgacggcgaccugaagcggcugcgcgaccucaaccaggccgugaacaaccugguggagcugaaguccacccagcagaaguccauccuccgggucgggacgcugaccagcgacgaccugcucacccuggccgccgaccuggagaagcucaagagcaaggugauccgcaccgagcggccccuguccagcggcguguacauggggaaccuguccacgcagcagcucgagcagcgccgggcccugcugaacaugaucggcauggucggcggggcgcagggcacccagccggggcgcgacggcguggugcgggucugggacgugaagaaccccgaccuccugaacaaccaguucgggaccaugcccagccugacccucgccugccugacgaagcagggccagguggaccugaacgacgccguccucgcccugaccgaccugggccucaucuacaccgcgaaguaccccaacuccagcgaccuggaccgccugucccagagccacccgauccucaacaugguggacaccaagaaguccagccugaacaucagcggguacaacuucucccugggcgccgccgugaaggccggggccugcaugcucgacggcggcaacaugcuggagacgaucaaggucacgccccagaccauggacgggauccucaagagcauccugaaggugaagcggucccugggcauguucgugagcgacacccccggggagcgcaaccccuacgagaacauccuguacaagaucugccucuccggcgacggguggccguacaucgcgagccggaccuccaucgucggccgcgccugggagaacaccaccguggaccuggagagcgacggcaagccccagaagguggggaccgccggcuccaacaagagccugcaguccgccggguuccccacgggccucaccuacagccagcugaugacccugaaggacuccaugaugcagcuggaccccagcgccaagaccuggaucgacaucgaggggcggccggaggaccccgucgagaucgcgcucuaccagcccauguccggcugcuacauccacuucuuccgcgagcccacggaccugaagcaguucaagcaggacgccaaguacagccacggcaucgacguggccgaccuguucccggcccagcccgggcucaccuccgccgucaucgaggcgcugccccggaacauggugcugaccugccagggcagcgacgacaucaagaagcuccuggacucccaggggcgccgcgacaucaagcugaucgacaucagccucagcaagguggacucccggaaguucgagaacgccgucugggaccagugcaaggaccugugccacaugcacaccggcgugguggucgagaagaagaagcgcgggggcaaggaggagaucacgccccacugcgcccugauggacugcaucauguucgacgccgccgugagcggcgggcucaacaucccggugcugcgggcgguccugccccgcgacaugguguuccggaccuccagccccaaggugguccucugaggacuagucccuguucccagagcccacuuuuuuuucuuuuuuugaaauaaaauagccugucuuucagaucucaaaggcucuuuucagagccaccaaaaaaaaaaaaaaaaaaaaaaaaaaaaaaaaaaaaaaaaaaaaaaaaaaaaaaaaaaaaaaaaagaauu

SEQ ID NO: 18107 - RNA, 2017 nt, Artificial Sequence
  mRNA product Design a-1 (hSL-A64-N5) comprising derived and/or modified sequence from LASV(GA391;Clade III)__CAA36646__SP-HsPLAT_NP(2-570) (opt1)
aggagagucccgcagucggcguccagcggcucugcuuguucgugugugugucguugcaggccuuauucaagcuuaccauggacgccaugaagcgcggccugugcugcgugcuccugcugugcggggccgucuucgugagccccagcgccuccaaggaggugcgcagcuuccuguggacccagucccuccggcgcgagcugagcggcuacugcuccaacaucaagcugcaggucgugaaggacgcccaggcgcuccugcacgggcuggacuucagcgagguguccaacguccagcggcucaugcgcaagcagaagcgggacgacggcgaccugaagcgccugcgggaccucaaccaggccgugaacaaccugguggagcucaagagcacccagcagaaguccguccugcgcguggggacccugagcuccgacgaccugcucauccuggccgccgaccuggagaagcucaagagcaaggugacccggaccgagcgcccccuguccagcggcgucuacauggggaaccuguccagccagcagcucgaccagcggcgcgcccugcugaacaugaucggcaugaccggcguguccgggggcgggaagggcgcgagcgacgggaucgugcgggucugggacgugaagaacgccgagcuccugaacaaccaguucggcacgaugccgucccugacccucgccugccugaccaagcagggccagguggaccugaacgacgccguccaggcgcucaccgaccuggggcugaucuacacggccaaguaccccaacagcagcgaccucgaccgccugucccagagccaccccauccugaacaugaucgacaccaagaaguccagccucaacaucuccggcuacaacuucagccugggggccgccgugaaggccggcgcgugcaugcuggacggcgggaacaugcucgagaccaucaaggugagcccccagaccauggacggcauccucaaguccauccugaaggucaagaagucccuggggauguucgugagcgacacgccgggcgagcggaaccccuacgagaacauccuguacaagaucugccuguccggggacggcuggcccuacaucgccagccgcaccuccaucgugggccgggccugggagaacaccgucguggaccucgagcaggacaacaagccccagaagaucgggaacggcgggagcaacaagucccugcagagcgccggcuucgccgcggggcugaccuacucccagcucaugacgcugaaggacuucaagugcuucaaccugaucccgaacgccaagaccuggauggacaucgagggccgccccgaggaccccguggagaucgcccuguaccagcccagcuccggcugcuacguccacuucuuccgggagccgaccgaccucaagcaguucaagcaggacgccaaguacagccacgggaucgacgugaccgaccuguucgccgcgcagcccggccugacgagcgccgucaucgaggcccucccccgcaacauggugaucacgugccagggguccgaggacauccggaagcugcuggagagccagggccgccgcgacaucaagcucaucgacaucacccuguccaaggccgacagccggaaguucgagaacgccgugugggaccaguucaaggaccugugccacaugcacaccggggucgugguggagaagaagaagcgcggcggcaaggaggagaucacgccccacugcgcgcucauggacugcaucauguucgacgccgccgucuccgggggccuggacgccaaggugcugcgggugguccucccgcgcgacaugguguuccggaccagcacccccaaggugguccugugaggacuagucccuguucccagagcccacuuuuuuuucuuuuuuugaaauaaaauagccugucuuucagaucucaaaggcucuuuucagagccaccaaaaaaaaaaaaaaaaaaaaaaaaaaaaaaaaaaaaaaaaaaaaaaaaaaaaaaaaaaaaaaaaagaauu

SEQ ID NO: 18108 - RNA, 2014 nt, Artificial Sequence
  mRNA product Design a-1 (hSL-A64-N5) comprising derived and/or modified sequence from LASV(AV;Clade V)__CCA30315__SP-HsPLAT_NP(2-569) (opt1)
aggagagucccgcagucggcguccagcggcucugcuuguucgugugugugucguugcaggccuuauucaagcuuaccauggacgccaugaagcgcggccugugcugcgugcuccugcugugcggggccgucuucgugagccccagcgccuccaaggaggugaaguccuuccuguggacccagagccuccgccgggagcugagcggcuacugcuccaacaucaagcugcaggucgugaaggacgcccaggcgcuccugcacgggcuggacuucagcgagguguccaacguccagcgccucaugcggaagcagcgccgggacgacagcgaccugaagcgccugcgggaccucaaccaggccgugaacaaccugguggagcugaaguccacccagcagaaguccguccuccgcgugggcacgcugagcagcgacgaccugcucacccuggccgccgaccuggagaagcucaaguccaaggugacccggaccgagcgcccccugagcuccggggucuacaugggcaaccugagcucccagcagcucgaccagcggcgcgcccugcugaaccucaucgggaugacgaacggcagccagggcucccaggcggggcgggacggcguggugcgcgucugggacgugaagaacgccgagcugcugaacaaccaguucgggaccaugccgagccucacccuggccugccugaccaagcagggccagguggaccucaacgacgucgugcaggcccugacggaccuggggcucaucuacaccgcgaaguaccccaacaccagcgaccuggaccggcugacccagucccaccccauccucaacaugaucgacacgaagaaguccagccugaacaucagcggcuacaacuucucccugggcgccgccgugaaggccggggccugcaugcucgacggcgggaacaugcuggagaccaucaaggucagcccccaguccauggacggcauccucaagagcauccugaaggugaagcgcgcgcugggcauguucguguccgacaccccgggggagcggaaccccuacgagaacauccuguacaagaucugccucagcggcgacggguggcccuacaucgccucccgcaccagcaucgucggccgggccugggagaacacggugguggaccuggagaccgacgggaagccccagaagaucggcuccggcaacagcaacaagucccugcagagcgccggguucuccgccggccucaccuacagccagcugaugacccugaaggacgcgaugcugcagcucgacccgaacgccaagacguggauggacaucgaggggcgccccgaggaccccgucgagguggcccuguaccagcccaucuccggcugcuacauccacuucuuccgggagccgaccgaccugaagcaguucaagcaggacgccaaguacagccacgggaucgacaucgccgaccucuucgcggcccagcccggccugaccagcgccgucaucgaggcccugccccgcaacauggugaucacgugccagggcuccgaggacaucaagaagcuccuggagagccaggggcgcaaggacaucaagcugaucgacaucgcccucuccaagaucgacagccggaaguucgagaacgcggugugggaccaguacaaggaccugugccacaugcacaccggcgucgugguggagaagaagaagcgcgggggcaaggaggagaucaccccgcacugcgcccugauggacugcaucauguucgacgccgccgucuccgggggccucaacacccuggugcugcgggcggugcucccccgcgacauggucuuccggaccagcacgccccgcguggugcugugaggacuagucccuguucccagagcccacuuuuuuuucuuuuuuugaaauaaaauagccugucuuucagaucucaaaggcucuuuucagagccaccaaaaaaaaaaaaaaaaaaaaaaaaaaaaaaaaaaaaaaaaaaaaaaaaaaaaaaaaaaaaaaaaagaauu

SEQ ID NO: 18109 - RNA, 2014 nt, Artificial Sequence
  mRNA product Design a-1 (hSL-A64-N5) comprising derived and/or modified sequence from LASV(Togo/2016/7082;Clade VI)__AMR44578__SP-HsPLAT_NP(2-569) (opt1)
aggagagucccgcagucggcguccagcggcucugcuuguucgugugugugucguugcaggccuuauucaagcuuaccauggacgccaugaagcgcggccugugcugcgugcuccugcugugcggggccgucuucgugagccccagcaacuccaaggaggugaaguccuuccuguggacccagagccuccgccgggagcugagcggcuacugcuccaacaucaagcugcaggucgugaaggacgcccaggcccuccugcacgggcuggacuucagcgagguguccaacguccagcgccucaugcggaagcagaagcgcgacgacggcgaccugaagcggcugcgcgaccucaaccaggcggugaacaaccugguggagcucaagagcguccagcagaaguccauccugcggguggggacccugaccagcgacgaccugcucacccuggccgccgaccuggagaagcucaaguccaaggugacccgcaccgagcggccccugagcuccggcgucuacauggggaaccugagcucccagcagcucgaccagcgccgggcccugcugagcaugaucggcauguccggcgggaaccagaacagccagccgaagggcgacgggguggugcgcgucugggacgugaagaacgccgaccuccugaacaaccaguucggcacgaugcccucccugacccucgcgugccugaccaagcagggccagguggaccugaacgacgccguccaggcccucaccgaccuggggcugaucuacacggccaaguaccccaacagcagcgaccucgaccggcugucccagagccaccccauccugaacaugaucgacaccaagaaguccagccucaacaucuccggcuacaacuucagccugggggcggccaucaagaccggcgccugcaugcuggacgggggcaacaugcucgagaccaucaaggugacgccgcagaccauggacggcauccugaaguccauccugaaggugaagcgcagccucgggauguucaucuccgacacccccggcgagcggaaccccuacgagaacauccuguacaagaucugccugagcggggacggcuggcccuacaucgccucccgcaccgccaucaucgggcgggcgugggagaacacggucguggaccucgagagcgacuccaagccgcagaagaucggcagcaacggcuccaacaagagccugcaguccgccggguucgcccccggccugaccuacagccagcucaugacccugaaggacuccaugcugcagcuggaccccaacgccaagaccuggaucgacaucgaggggcgccccgaggacccgguggaggucgcccucuuccagcccaucagcggcugcuacauccacuucuuccgggagcccacggaccugaagcaguucaagcaggacgcgaaguacagccacgggaucgacgugaccgaccuguucgccgcccagcccggccucaccuccgccgugaucgaggcccugccgcgcaacaugguccugaccugccagggcagcgacgacaucaagaagcuccuggacucccaggggcggcgcgacaucaagcugaucgacgugagccucaacaagaucgacucccgcaaguucgagaacgcggucugggaccaguacaaggaccugugccacaugcacacgggcgugguggucgagaagaagaagaagggcgggaaggaggagaucacgccccacugcgcccugcucgacugcaucauguucgacgccgccgugagcgggggccugaacgccaccgugcugcgggcgguccucccccgcgacaugguguuccggaccuccagccccaaggugguccugugaggacuagucccuguucccagagcccacuuuuuuuucuuuuuuugaaauaaaauagccugucuuucagaucucaaaggcucuuuucagagccaccaaaaaaaaaaaaaaaaaaaaaaaaaaaaaaaaaaaaaaaaaaaaaaaaaaaaaaaaaaaaaaaaagaauu

SEQ ID NO: 18110 - RNA, 2014 nt, Artificial Sequence
  mRNA product Design a-1 (hSL-A64-N5) comprising derived and/or modified sequence from LASV(KAK-428;Clade n.d. (VII))__ANH09741__SP-HsPLAT_NP(2-569) (opt1)
aggagagucccgcagucggcguccagcggcucugcuuguucgugugugugucguugcaggccuuauucaagcuuaccauggacgccaugaagcgcggccugugcugcgugcuccugcugugcggggccgucuucgugagccccagcaacuccaaggaggugaaguccuuccuguggacccagagccuccgccgggagcugagcggcuacugcaccaacaucaagcugcaggucgugaaggacgcccaggcccuccugcacgggcuggacuucuccgaggugagcaacguccagcgccucaugcggaagcagaagcgcgacgacaacgaccugaagcggcugcgcgaccucaaccaggcggugaacaaccugguggagcugaaguccguccagcagaaguccgugcucaaggugggcacgcugaacagcgacgaccugcucacccuggccgccgaccuggagaagcucaagagcaaggucgugcggaccgagcgcccccuguccagcgggguguacaugggcaaccuguccagccagcagcucgaccagcggcgcgcccugcugaacaugaucgggauggccggcggcucccaggggaaccagccgagccgggacggcgucgugcgcgugugggacgucaagaacgcggaccuccugaacaaccaguucgggaccaugcccucccugacgcucgccugccugaccaagcagggccagguggaccugaacgacgugguccucgcccugaccgaccuggggcucaucuacaccgccaaguaccccaacagcuccgaccuggaccggcugagccagaaccaccccgugcucaacaugaucgacgugaacaagagcucccugaacaucagcggcuacaacuucucccugggcgcggccgucaaggccggggccugcaugcucgacggcgggaacaugcuggagacgaucaagaucagcccgcagaccguggacggcauccugaaguccauccucaaggugaagcgcgcccugggcauguucgucagcgacacccccggggagcggaaccccuacgagaacauccuguacaaggugugccucuccggcaacggguggcccuacaucgcgagccgcaccuccaucgucggccgggccugggagaacacggugguggaccuggagagcaacaagaaccagccgaaggucgggaacaacggcuccaacaagaugcugcagagcuccggcuucgccaccgggcucaccuacagccagcugaugacccugcgcgacuccaugcugcagcucgaccccacggccaagaccuggaucgacaucgagggccggcccgaggaccccguggagcuggcccuguuccagccgagcuccgggugcuacauccacuucuuccgcgagcccaccgaccucaagcaguucaagcaggacgcgaaguacagccacggcaucgacgugaacgaccuguucuccgcccagcccgggcugaccagcgccguccucgaggcccugccccggaacauggugcugacgugccagggcagcgacgacauccgcaagcuccuggacucccaggaccgcaaggacaucaagcugaucgacaucagccucuccaaggccgacgcgcggaaguucgagaacgacgugugggaccaguucaaggaccugugccacaugcacaccggcaucgucguggagaagaagaagaagggcgggaagcaggagaugaccccgcacugcgcccugcucgacugcaucauguucgacgccgccgugagcgggggccugaacguccccacccugcgcgccgugcuccccacggacaugguguuccggaccaucaccaccaaggucgugcugugaggacuagucccuguucccagagcccacuuuuuuuucuuuuuuugaaauaaaauagccugucuuucagaucucaaaggcucuuuucagagccaccaaaaaaaaaaaaaaaaaaaaaaaaaaaaaaaaaaaaaaaaaaaaaaaaaaaaaaaaaaaaaaaaagaauu

SEQ ID NO: 18111 - RNA, 2014 nt, Artificial Sequence; identical to SEQ ID NO: 18105
  mRNA product Design a-1 (hSL-A64-N5) comprising derived and/or modified sequence from LASV(Pinneo-NIG-1969;Clade I)__AIT17837__SP-HsPLAT_NP(2-569) (opt1)

SEQ ID NO: 18112 - RNA, 2014 nt, Artificial Sequence
  mRNA product Design a-1 (hSL-A64-N5) comprising derived and/or modified sequence from LASV(ISTH0009-NIG-2011;Clade II)__AIT17405__SP-HsPLAT_NP(2-569) (opt1)
aggagagucccgcagucggcguccagcggcucugcuuguucgugugugugucguugcaggccuuauucaagcuuaccauggacgccaugaagcgcggccugugcugcgugcuccugcugugcggggccgucuucgugagccccagcguguccaaggaggucaagagcuuccuguggacccagucccuccgccgggagcugagcggcuacugcuccaacaucaagcuccagguggugaaggacgcccaggcccugcugcacgggcuggacuucagcgaggucuccaacgugcagcgccucaugcggaagcagaagcgcgacgacagcgaccugaagcggcugcgcgaccucaaccaggcggugaacaaccuggucgagcugaaguccacccagcagaaguccauccuccgggugggcacccugaccagcgacgaccugcucacccuggccgccgaccuggagaagcucaagagcaaggugauccgcaccgagcggccccuguccagcggggucuacaugggcaaccuguccacgcagcagcucgagcagcgccgggcccugcugaacaugaucgggauggugggcggcgcccaggggacccagccgggccgcgacggggugguccgggugugggacgugaagaaccccgaccuccugaacaaccaguucggcaccaugcccagccugacccucgcgugccugacgaagcaggggcaggucgaccugaacgacgccgugcucgcccugaccgaccugggccucaucuacaccgccaaguaccccaacuccagcgaccuggaccgccugucccagagccacccgauccucaacaugguggacaucaagaaguccagccugaacaucagcggcuacaacuucucccugggggcggccgucaaggccggcgccugcaugcucgacgggggcaacaugcuggagaccaucaaggugacgccccagaccauggacggcauccucaagagcauccugaaggugaagcggucccuggggauguucgucagcgacacccccggcgagcgcaaccccuacgagaacauccuguacaagaucugccucuccggggacggcuggccguacaucgccagccggaccuccaucguggggcgcgcgugggagaacacgaccguggaccuggagagcgacggcaagccccagaaggucggcuccgccgggagcaacaagucccugcagagcgccggcuuccccaccgggcucaccuacucccagcugaugacgcugaaggacagcaugaugcagcuggaccccuccgccaagaccuggaucgacaucgagggccggccggaggaccccguggagaucgcccucuaccagcccaugagcgggugcuacauccacuucuuccgcgagcccaccgaccugaagcaguucaagcaggacgcgaaguacucccacggcaucgacgucgccgaccuguucccggcccagcccggccucaccagcgccgugaucgaggcccugccccggaacauggugcugacgugccaggggagcgacgacaucaagcgccuccuggacucccagggccgccgggacaucaagcugaucgacaucgcgcucagcaaggccgacucccgccgguucgagaacgccgucugggaccagugcaaggaccugugccacaugcacaccggggugguggucgagaagaagaagcgcggcgggaaggaggagaucacgccccacugcgcccugauggacugcaucauguacgacgccgcggugagcggcggccucaacaucccggugcugcgggccguccugccccgcgacaugguguuccggaccuccagccccaaggugguccucugaggacuagucccuguucccagagcccacuuuuuuuucuuuuuuugaaauaaaauagccugucuuucagaucucaaaggcucuuuucagagccaccaaaaaaaaaaaaaaaaaaaaaaaaaaaaaaaaaaaaaaaaaaaaaaaaaaaaaaaaaaaaaaaaagaauu

SEQ ID NO: 18113 - RNA, 2014 nt, Artificial Sequence
  mRNA product Design a-1 (hSL-A64-N5) comprising derived and/or modified sequence from LASV(ISTH2010-NIG-2012;Clade II)__AIT17483__SP-HsPLAT_NP(2-569) (opt1)
aggagagucccgcagucggcguccagcggcucugcuuguucgugugugugucguugcaggccuuauucaagcuuaccauggacgccaugaagcgcggccugugcugcgugcuccugcugugcggggccgucuucgugagccccagcgccuccaaggaggugaaguccuuccuguggacccagagccuccgccgggagcugagcggcuacugcuccaacaucaagcugcaggucgugaaggacgcccaggcgcuccugcacgggcuggacuucagcgagguguccaacguccagcgccucaugcggaagcagaagcgcgacgacagcgaccugaagcggcugcgcgaccucaaccaggccgugaacaaccugguggagcugaaguccacccagcagaaguccauccuccgggucggcacgcugaccagcgacgaccugcucacccuggccgccgaccuggagaagcucaagagcaaggugauccgcaccgagcggccccuguccagcgggguguacaugggcaaccuguccacgcagcagcucgagcagcgccgggcccugcugaaccucaucgggauggucggcggcgcgcaggggacccagccgggccgcgacgggguggugcgggucugggacgugaagaaccccgaccugcugaacaaccaguucggcaccaugcccagccucacccuggccugccugacgaagcagggccagguggaccucaacgacgccguccuggcccugaccgaccucgggcugaucuacaccgcgaaguaccccaacuccagcgaccuggaccgccucucccagagccacccgauccugaacaugguggacaccaagaaguccagccugaacaucagcggcuucaacuucucccucggggccgccgugaaggccggcgccugcaugcuggacgggggcaacaugcuggagacgaucaaggucacgccccagaccauggacggcauccucaagagcauccugaaggugaagaagucccuggggauguucgugagcgacacccccggcgagcggaaccccuacgagaacauccucuacaagaucugccuguccggggacggcuggccguacaucgcgagccgcaccuccaucgucgggcgggccugggagaacaccaccguggaccuggagagcgacggcaagccccacaaggugggcaccgccggguccaacaagagccuccaguccgccggcuuccccacggggcugaccuacagccagcugaugacccugaaggacuccaugaugcagcucgaccccagcgccaagaccuggaucgacaucgagggccgcccggaggaccccgucgagaucgcgcuguaccagcccauguccgggugcuacauccacuucuuccgggagcccacggaccugaagcaguucaagcaggacgccaaguacagccacggcaucgacguggccgaccucuucccggcccagcccggccugaccuccgccgucaucgaggcgcugccccgcaacauggugcugaccugccaggggagcgacgacaucaagcggcuccuggacagccagggccgccgcgacaucaagcucaucgacaucgcccuguccaaggccgacagccggcgcuucgagaacgccgugugggaccagugcaaggaccugugccacaugcacaccggggucgugguggagaagaagaagcggggcgggaaggaggagaucacgccccacugcgcccucauggacugcaucauguacgacgcggccgucuccggcggccugaacaucccggugcugcgcgccgugcucccccgggacauggucuuccgcaccagcucccccaagguggugcugugaggacuagucccuguucccagagcccacuuuuuuuucuuuuuuugaaauaaaauagccugucuuucagaucucaaaggcucuuuucagagccaccaaaaaaaaaaaaaaaaaaaaaaaaaaaaaaaaaaaaaaaaaaaaaaaaaaaaaaaaaaaaaaaaagaauu

SEQ ID NO: 18114 - RNA, 2014 nt, Artificial Sequence
  mRNA product Design a-1 (hSL-A64-N5) comprising derived and/or modified sequence from LASV(Lassa virus/H.sapiens-wt/NGA/2015/ISTH_0543;Clade II)__AVO03640__SP-HsPLAT_NP(2-569) (opt1)
aggagagucccgcagucggcguccagcggcucugcuuguucgugugugugucguugcaggccuuauucaagcuuaccauggacgccaugaagcgcggccugugcugcgugcuccugcugugcggggccgucuucgugagccccagcgccuccaaggaggugaaguccuuccuguggacccagagccuccgccgggagcugagcggcuacugcuccaacaucaagcugcaggucgugaaggacgcccaggcgcuccugcacgggcuggacuucagcgagguguccaacguccagcgccucaugcggaagcagaagcgcgacgacagcgaccugaagcggcugcgcgaccucaaccaggccgugaacaaccugguggagcugaaguccacccagcagaaguccauccuccgggucggcacgcugaccagcgacgaccugcucacccuggccgccgaccuggagaagcucaagagcaaggugauccgcaccgagcggccccuguccagcgggguguacaugggcaaccuguccacgcagcagcucgagcagcgccgggcccugcugaacaugaucgggauggucggcggcgcgcaggggacccagccgggccgcgacgggguggugcgggucugggacgugaagaaccccgaccuccugaacaaccaguucggcaccaugcccagccugacccucgccugccugacgaagcagggccagguggaccugaacgacgccguccucgcccugaccgaccuggggcucaucuacaccgcgaaguaccccaacuccagcgaccuggaccgccugucccagagccacccgauccucaacaugguggacaccaagaaguccagccugaacaucagcggcuacaacuucucccugggggccgccgugaaggccggcgccugcaugcucgacgggggcaacaugcuggagacgaucaaggucacgccccagaccauggacggcauccucaagagcauccugaaggugaagaagucccuggggauguucgugagcgacacccccggcgagcggaaccccuacgagaacauccuguacaagaucugccucuccggggacggcuggccguacaucgcgagccgcaccuccaucgucgggcgggccugggagaacaccaccguggaccuggagagcgacggcaagccccagaaggugggcuccgccgggagcaacaagucccugcagagcgccggcuuccccaccgggcucacguacucccagcugaugacccugaaggacagcaugaugcagcuggaccccuccgccaagaccuggaucgacaucgagggccgcccggaggaccccgucgagaucgcgcucuaccagcccaugagcgggugcuacauccacuucuuccgggagcccaccgaccugaagcaguucaagcaggacgccaaguacucccacggcaucgacguggccgaccuguucccggcccagcccggccucacgagcgccgucaucgaggcgcugccccgcaacauggugcugaccugccaggggagcgacgacaucaagcggcuccuggacucccagggccgcaaggacaucaagcugaucgacaucgcccucagcaaggccgacucccgccgguucgagaacgccgugugggaccagugcaaggaccugugccacaugcacaccggggucgugguggagaagaagaagcgcggcgggaaggaggagaucacgccccacugcgcccugauggacugcaucauguacgacgcggccgucagcggcggccucaacaucccggugcugcgggccgugcugccccgcgacauggucuuccggaccuccagccccaagguggugcucugaggacuagucccuguucccagagcccacuuuuuuuucuuuuuuugaaauaaaauagccugucuuucagaucucaaaggcucuuuucagagccaccaaaaaaaaaaaaaaaaaaaaaaaaaaaaaaaaaaaaaaaaaaaaaaaaaaaaaaaaaaaaaaaaagaauu

SEQ ID NO: 18115 - RNA, 2014 nt, Artificial Sequence
  mRNA product Design a-1 (hSL-A64-N5) comprising derived and/or modified sequence from LASV(Lassa virus/H.sapiens-wt/NGA/2016/ISTH_0009;Clade II)__AVO03572__SP-HsPLAT_NP(2-569) (opt1)
aggagagucccgcagucggcguccagcggcucugcuuguucgugugugugucguugcaggccuuauucaagcuuaccauggacgccaugaagcgcggccugugcugcgugcuccugcugugcggggccgucuucgugagccccagcgccuccaaggaggugaaguccuuccuguggacccagagccuccgccgggagcugagcggcuacugcuccaacaucaagcugcaggucgugaaggacgcccaggcgcuccugcacgggcuggacuucagcgagguguccaacguccagcgccucaugcggaagcagaagcgcgacgacagcgaccugaagcggcugcgcgaccucaaccaggccgugaacaaccugguggagcugaaguccacccagcagaaguccauccuccgggucggcacgcugaccagcgacgaccugcucacccuggccgccgaccuggagaagcucaagagcaaggugauccgcaccgagcggccccuguccagcgggguguacaugggcaaccuguccacgcagcagcucgagcagcgccgggcccugcugaacaugaucgggauggucggcggcgcgcaggggacccagccgggccgcgacgggguggugcgggucugggacgugaagaaccccgaccuccugaacaaccaguucggcaccaugcccagccugacccucgccugccugacgaagcagggccagguggaccugaacgacgccguccucgcccugaccgaccuggggcucaucuacaccgcgaaguaccccaacuccagcgaccuggaccgccugucccagagccacccgauccucaacaugguggacaccaagaaguccagccugaacaucagcggcuacaacuucucccugggggccgccgugaaggccggcgccugcaugcucgacgggggcaacaugcuggagacgaucaaggucacgccccagaccauggacggcauccucaagagcauccugaaggugaagaagucccuggggauguucgugagcgacacccccggcgagcggaaccccuacgagaacauccuguacaagaucugccucuccggggacggcuggccguacaucgcgagccgcaccuccaucgucgggcgggccugggagaacaccaccguggaccuggagagcgacggcaagccccagaaggugggcuccgccgggagcaacaagucccugcagagcgccggcuuccccaccgggcucacguacucccagcugaugacccugaaggacagcaugaugcagcuggaccccuccgccaagaccuggaucgacaucgagggccgcccggaggaccccgucgagaucgcgcucuaccagcccaugagcgggugcuacauccacuucuuccgggagcccaccgaccugaagcaguucaagcaggacgccaaguacucccacggcaucgacguggccgaccuguucccggcccagcccggccucacgagcgccgucaucgaggcgcugccccgcaacauggugcugaccugccaggggagcgacgacaucaagcggcuccuggacucccagggccgccgcgacaucaagcugaucgacaucgcccucagcaaggccgacucccggcgcuucgagaacgccgugugggaccagugcaaggaccugugccacaugcacaccggggucgugguggagaagaagaagcggggcgggaaggaggagaucacgccccacugcgcccugauggacugcaucauguacgacgcggccgucagcggcggccucaacaucccggugcugcgcgccgugcugccccgggacauggucuuccgcaccuccagccccaagguggugcucugaggacuagucccuguucccagagcccacuuuuuuuucuuuuuuugaaauaaaauagccugucuuucagaucucaaaggcucuuuucagagccaccaaaaaaaaaaaaaaaaaaaaaaaaaaaaaaaaaaaaaaaaaaaaaaaaaaaaaaaaaaaaaaaaagaauu

SEQ ID NO: 18116 - RNA, 2014 nt, Artificial Sequence
  mRNA product Design a-1 (hSL-A64-N5) comprising derived and/or modified sequence from LASV(Lassa virus/H.sapiens-wt/NGA/2016/ISTH_0017;Clade II)__AVO03568__SP-HsPLAT_NP(2-569) (opt1)
aggagagucccgcagucggcguccagcggcucugcuuguucgugugugugucguugcaggccuuauucaagcuuaccauggacgccaugaagcgcggccugugcugcgugcuccugcugugcggggccgucuucgugagccccagcgccuccaaggaggugaaguccuuccuguggacccagagccuccgccgggagcugagcggcuacugcuccagcaucaagcugcaggucgugaaggacgcccaggcgcuccugcacgggcuggacuucuccgaggugagcaacguccagcgccucaugcggaagcagaagcgcgacgacuccgaccugaagcggcugcgcgaccucaaccaggccgugaacaaccugguggagcucaagagcacccagcagaaguccauccugcgggucggcacgcugaccagcgacgaccugcucacccuggccgccgaccuggagaagcucaaguccaaggugauccgcaccgagcggccccugagcuccgggguguacaugggcaaccugagcacgcagcagcucgagcagcgccgggcccugcugaacaugaucgggauggcgggcggcgcccaggggacccagccgggccgcgacggggucgugcgggugugggacgucaagaaccccgaccuccugaacaaccaguucggcaccaugcccucccugacccucgccugccugacgaagcagggccagguggaccugaacgacgccgugcucgcgcugaccgaccuggggcucaucuacaccgccaaguaccccaacagcuccgaccuggaccgccugagccagagccacccgauccucaacauggucgacaccaagaaguccagccugaacaucuccggcuacaacuucagccugggggccgccgugaaggccggcgcgugcaugcucgacgggggcaacaugcuggagacgaucaaggugacgccccagaccauggacggcauccugaaguccauccucaaggucaagcggagccuggggauguucguguccgacgcccccggcgagcgcaaccccuacgagaacauccuguacaagaucugccucagcggggacggcuggccguacaucgccucccggaccagcaucguggggcgcgccugggagaacaccaccgucgaccuggaguccgacggcaagccccagaaggugggcgccaccgggagcaacaagucccugcagagcgcgggcuuccccaccgggcucacguacucccagcugaugacccugaaggacagcaugaugcagcuggaccccuccgccaagaccuggaucgacaucgagggccggccggaggaccccguggaggucgcccucuaccagcccgugagcgggugcuacauccacuucuuccgcgagcccaccgaccugaagcaguucaagcaggacgccaaguacucccacggcaucgacgucgccgaccuguucccggcgcagcccggccucacgagcgccgugaucgaggcccugccccggaacauggugcugaccugccaggggagcgacgacaucaagaagcuccuggacucccagggccgcaaggacaucaagcugaucgacaucgcccucagcaaggccgacucccgccgguucgagaacgcggucugggaccagugcaaggaccugugccacaugcacaccggggugguggucgagaagaagaagcgcggcgggaaggaggagaucacgccccacugcgcccugauggacugcaucauguacgacgccgccgugagcggcggccucaacaucccggugcugcgggcgguccugccccgcgacaugguguuccggaccuccagccccaaggugguccucugaggacuagucccuguucccagagcccacuuuuuuuucuuuuuuugaaauaaaauagccugucuuucagaucucaaaggcucuuuucagagccaccaaaaaaaaaaaaaaaaaaaaaaaaaaaaaaaaaaaaaaaaaaaaaaaaaaaaaaaaaaaaaaaaagaauu

SEQ ID NO: 18117 - RNA, 2014 nt, Artificial Sequence
  mRNA product Design a-1 (hSL-A64-N5) comprising derived and/or modified sequence from LASV(Lassa virus/H.sapiens-wt/NGA/2018/ISTH_0959;Clade II)__AVV65100__SP-HsPLAT_NP(2-569) (opt1)
aggagagucccgcagucggcguccagcggcucugcuuguucgugugugugucguugcaggccuuauucaagcuuaccauggacgccaugaagcgcggccugugcugcgugcuccugcugugcggggccgucuucgugagccccagcgccuccaaggaggugaaguccuuccuguggacccagagccuccgccgggagcugagcggcuacugcuccaacaucaagcugcaggucgugaaggacgcccaggcgcuccugcacgggcuggacuucagcgagguguccaacguccagcgccucaugcggaagcagaagcgcgacgacagcgaccugaagcggcugcgcgaccucaaccaggccgugaacaaccugguggagcugaaguccacccagcagaaguccauccuccgggucggcacccugaccagcgacgaccugcucacccuggccgccgaccuggagaagcucaagagcaaggugauccgcaccgagcggccccuguccagcgggguguacaugggcaaccuguccacgcagcagcucgagcagcgccgggcccugcugaaccucaucgggauggucggcggcgcgcaggggacccagccgggccgcgacgggguggugcgggucugggacgugaagaaccccgaccugcugaacaaccaguucggcaccaugcccagccucacccuggccugccugacgaagcagggccagguggaccucaacgacgucgugcuggcccugaccgaccucgggcugaucuacaccgccaaguaccccaacuccagcgaccuggaccgccucucccagagccacccgauccugaacaugguggacaccaagaaguccagccugaacaucagcggcuucaacuucucccucggggcggccgucaaggccggcgccugcaugcuggacgggggcaacaugcuggagacgaucaaggugacgccccagaccauggacggcauccucaagagcauccugaaggugaagaagucccuggggauguucgucagcgacacccccggcgagcggaaccccuacgagaacauccucuacaagaucugccuguccggggacggcuggccguacaucgccagccgcaccuccaucguggggcgggcgugggagaacaccaccguggaccuggagagcgacggcaagccccacaaggucggcaccgccggguccaacaagagccuccaguccgccggcuuccccacggggcugaccuacagccagcugaugacccugaaggacuccaugaugcagcucgaccccagcgccaagaccuggaucgacaucgagggccgcccggaggaccccguggagaucgcccuguaccagcccauguccgggugcuacauccacuucuuccgggagcccacggaccugaagcaguucaagcaggacgcgaaguacagccacggcaucgacgucgccgaccucuucccggcccagcccggccugaccuccgccgugaucgaggcccugccccgcaacauggugcugaccugccaggggagcgacgacaucaagcggcuccuggacagccagggccgcaaggacaucaagcucaucgacaucgcgcuguccaagaccgacagccgccgguucgagaacgccgucugggaccagugcaaggaccugugccacaugcacacgggggugguggucgagaagaagaagcgcggcgggaaggaggagaucacgccccacugcgcccucauggacugcaucauguacgacgccgccguguccggcggccugaacaucccggugcugcgggcgguccucccccgcgacaugguguuccggaccagcucccccaaggugguccugugaggacuagucccuguucccagagcccacuuuuuuuucuuuuuuugaaauaaaauagccugucuuucagaucucaaaggcucuuuucagagccaccaaaaaaaaaaaaaaaaaaaaaaaaaaaaaaaaaaaaaaaaaaaaaaaaaaaaaaaaaaaaaaaaagaauu

SEQ ID NO: 18118 - RNA, 2014 nt, Artificial Sequence
  mRNA product Design a-1 (hSL-A64-N5) comprising derived and/or modified sequence from LASV(LASV003-NIG-2008;Clade II)__AIT17581__SP-HsPLAT_NP(2-569) (opt1)
aggagagucccgcagucggcguccagcggcucugcuuguucgugugugugucguugcaggccuuauucaagcuuaccauggacgccaugaagcgcggccugugcugcgugcuccugcugugcggggccgucuucgugagccccagcgccuccaaggaggugaaguccuuccuguggacccagagccuccgccgggagcugagcggcuacugcuccagcaucaagcugcaggucgugaaggacgcccaggcgcuccugcacgggcuggacuucuccgaggugagcaacguccagcgccucaugcggaagcagaagcgcgacgacuccgaccugaagcggcugcgcgaccucaaccaggccgugaacaaccugguggagcucaagagcacccagcagaaguccguccugcgggugggcacccugaccagcgacgaccugcucacccuggccgccgaccuggagaagcucaaguccaaggugauccgcaccgagcggccccugagcuccggggucuacaugggcaaccugagcgcccagcagcucgagcagcgccggacgcugcugaacaugaucgggauggugggcggcgcgcaggggacccagccgggccgcgacggggugguccgggugugggacgugaagaaccccgaccuccugaacaaccaguucggcaccaugcccucccugacccucgccugccugacgaagcaggggcaggucgaccugaacgacguggugcucgcccugaccgaccugggccucaucuacaccgccaaguaccccaacagcuccgaccuggaccgccugagccagagccacccgauccucuccauggucgacaccaagaaguccagccugaacaucagcggcuacaacuucucccugggggcggccgugaaggccggcgccugcaugcucgacgggggcaacaugcuggagacgaucaaggugacgccccagaccauggacggcauccucaagagcauccugaaggucaagaagucccuggggauguucgugagcgacacccccggcgagcggaaccccuacgagaacauccuguacaagaucugccucuccggggacggcuggccguacaucgccagccgcaccuccaucguggggcgggcgugggagaacaccaccgucgaccuggagagcgacggcaagccccagaaggugggcaccgccggguccaacaagagccugcaguccgccggcuuccccacggggcucaccuacagccagcugaugacccugaaggacuccaugaugcagcuggaccccagcgccaagaccuggaucgacaucgagggccgcccggaggaccccgucgagaucgcccucuaccagcccauguccgggugcuacauccacuucuuccgggagcccacggaccugaagcaguucaagcaggacgcgaaguacagccacggcaucgacgugaccgaccuguucccggcccagcccggccucaccagcgccgugaucgaggcccugccccgcaacaugguccugaccugccagggguccgacgacaucaagcggcuccuggacagccagggccgccgcgacaucaagcugaucgacaucgcccucuccaaggcggacagccggcgcuucgagaacgccgugugggaccagugcaaggaccugugccacaugcacacggggguggucguggagaagaagaagcggggcgggaaggaggagaucacgccccacugcgcccugauggacugcaucauguacgacgccgccguguccggcggccucaacaucccgguccugcgcgcggugcugccccgggacaugguguuccgcaccagcucccccaaggucgugcucugaggacuagucccuguucccagagcccacuuuuuuuucuuuuuuugaaauaaaauagccugucuuucagaucucaaaggcucuuuucagagccaccaaaaaaaaaaaaaaaaaaaaaaaaaaaaaaaaaaaaaaaaaaaaaaaaaaaaaaaaaaaaaaaaagaauu

SEQ ID NO: 18119 - RNA, 2014 nt, Artificial Sequence
  mRNA product Design a-1 (hSL-A64-N5) comprising derived and/or modified sequence from LASV(LASV035-NIG-2009;Clade II)__AIT17589__SP-HsPLAT_NP(2-569) (opt1)
aggagagucccgcagucggcguccagcggcucugcuuguucgugugugugucguugcaggccuuauucaagcuuaccauggacgccaugaagcgcggccugugcugcgugcuccugcugugcggggccgucuucgugagccccagcgccuccaaggaggugaaguccuuccuguggacccagagccuccgccgggagcugagcggcuacugcuccagcaucaagcugcaggucgugaaggacgcccaggcgcuccugcacgggcuggacuucuccgaggugagcaacguccagcgccucaugcggaagcagaagcgcgacgacuccgaccugaagcggcugcgcgaccucaaccaggccgugaacaaccugguggagcucaagagcacccagcagaaguccauccugcgggucggcacgcugaccagcgacgaccugcucacccuggccgccgaccuggagaagcucaaguccaaggugauccgcaccgagcggccccugagcuccgggguguacaugggcaaccugagcgcccagcagcucgagcagcgccgggcgcugcugaacaugaucgggauggucggcggcgcccaggggacgcagccgggccgcgacgggguggugcgggucugggacgugaagaaccccgaccuccugaacaaccaguucggcaccaugcccucccugacccucgccugccugaccaagcagggccagguggaccugaacgacgccguccucgcgcugacggaccuggggcucaucuacaccgccaaguaccccaacagcuccgaccuggaccgccugagccagagccacccgauccucaacaugguggacaccaagaaguccagccugaacaucuccggcuacaacuucagccugggggccgccgugaaggccggcgcgugcaugcucgacgggggcaacaugcuggagaccaucaaggucacgccccagaccauggacggcauccugaaguccauccucaaggugaagcggagccuggggauguucguguccgacacccccggcgagcgcaaccccuacgagaacauccuguacaagaucugccucagcggggacggcuggccguacaucgccucccggaccagcaucgucgggcgcgccugggagaacacgaccguggaccuggaguccgacggcaagccccagaaggugggcaccaccgggagcaacaagucccugcagagcgccggcuuccccacggggcucaccuacucccagcugaugacccugaaggacagcaugaugcagcuggaccccuccgccaagaccuggaucgacaucgagggccggccggaggaccccgucgagaucgcgcucuaccagcccaugagcgggugcuacauccacuucuuccgcgagcccacggaccugaagcaguucaagcaggacgccaaguacucccacggcaucgacguggccgaccuguucccggcccagcccggccucaccagcgccgucaucgaggcgcugccccggaacauggugcugaccugccaggggagcgacgacaucaagaagcuccuggacucccagggccgccgcgacaucaagcugaucgacaucgcccucagcaaggccgacucccggaaguucgagaacgccgugugggaccagugcaaggaccugugccacaugcacaccggggucgugguggagaagaagaagcgcggcgggaaggaggagaucacgccccacugcgcccugauggacugcaucauguacgacgcggccgucagcggcggccucaacaucccggugcugcgggccgugcugccccgcgacauggucuuccggaccuccagccccaagguggugcucugaggacuagucccuguucccagagcccacuuuuuuuucuuuuuuugaaauaaaauagccugucuuucagaucucaaaggcucuuuucagagccaccaaaaaaaaaaaaaaaaaaaaaaaaaaaaaaaaaaaaaaaaaaaaaaaaaaaaaaaaaaaaaaaaagaauu

SEQ ID NO: 18120 - RNA, 2014 nt, Artificial Sequence
  mRNA product Design a-1 (hSL-A64-N5) comprising derived and/or modified sequence from LASV(LASV1000-NIG-2009;Clade II)__AIT17783__SP-HsPLAT_NP(2-569) (opt1)
aggagagucccgcagucggcguccagcggcucugcuuguucgugugugugucguugcaggccuuauucaagcuuaccauggacgccaugaagcgcggccugugcugcgugcuccugcugugcggggccgucuucgugagccccagcgccuccaaggaggugaaguccuuccuguggacccagagccuccgccgggagcugagcggcuacugcuccaacaucaagcugcaggucgugaaggacgcccaggcgcuccugcacgggcuggacuucagcgagguguccaacguccagcgccucaugcggaagcagaagcgcgacgacagcgaccugaagcggcugcgcgaccucaaccaggccgugaacaaccugguggagcugaaguccacccagcagaaguccauccuccgggucggcacgcugaccagcgacgaccugcucacccuggccgccgaccuggagaagcucaagagcaaggugauccgcaccgagcggccccuguccagcgggguguacaugggcaaccuguccacgcagcagcucgagcagcgccgggcccugcugaacaugaucgggauggucggcggcgcgcaggggacccagccgggccgcgacgggguggugcgggucugggacgugaagaaccccgaccuccugaacaaccaguucggcaccaugcccagccugacccucgccugccugacgaagcagggccagguggaccugaacgacgucgugcucgcccugaccgaccuggggcucaucuacaccgccaaguaccccaacuccagcgaccuggaccgccugucccagagccacccgauccucaacaugguggacaccaagaaguccagccugaacaucagcggcuacaacuucucccugggggcggccgucaaggccggcgccugcaugcucgacgggggcaacaugcuggagacgaucaaggugacgccccagaccauggacggcauccucaagagcauccugaaggugaagaagucccuggggauguucgucagcgacacccccggcgagcggaaccccuacgagaacauccuguacaagaucugccucuccggggacggcuggccguacaucgccagccgcaccuccaucguggggcgggcgugggagaacaccaccguggaccuggagagcgacggcaagccccagaaggucggcaccgccggguccaacaagagccugcaguccgccggcuuccccacggggcucaccuacagccagcugaugacccugaaggacuccaugaugcagcuggaccccagcgccaagaccuggaucgacaucgagggccgcccggaggaccccguggagaucgcccucuaccagcccgucuccgggugcuacauccacuucuuccgggagcccacggaccugaagcaguucaagcaggacgcgaaguacagccacggcaucgacguggccgaccuguucccggcccagcccggccucaccuccgccgugaucgaggcccugccccgcaacaugguccugaccugccaggggagcgacgacaucaagcggcuccuggacagccagggccgccgcgacaucaagcugaucgacaucgcgcucuccaaggccgacagccggcgcuucgagaacgccgugugggaccagugcaaggaccugugccacaugcacaccgggguggucguggagaagaagaagcggggcgggaaggaggagaucacgccccacugcgcccugauggacugcaucauguacgacgccgcgguguccggcggccucaacaucccgguccugcgcgccgugcugccccgggacaugguguuccgcaccagcucccccaaggucgugcucugaggacuagucccuguucccagagcccacuuuuuuuucuuuuuuugaaauaaaauagccugucuuucagaucucaaaggcucuuuucagagccaccaaaaaaaaaaaaaaaaaaaaaaaaaaaaaaaaaaaaaaaaaaaaaaaaaaaaaaaaaaaaaaaaagaauu

SEQ ID NO: 18121 - RNA, 2014 nt, Artificial Sequence
  mRNA product Design a-1 (hSL-A64-N5) comprising derived and/or modified sequence from LASV(LASV221-NIG-2010;Clade II)__AIT17625__SP-HsPLAT_NP(2-569) (opt1)
aggagagucccgcagucggcguccagcggcucugcuuguucgugugugugucguugcaggccuuauucaagcuuaccauggacgccaugaagcgcggccugugcugcgugcuccugcugugcggggccgucuucgugagccccagcgccuccaaggaggugaaguccuuccuguggacccagagccuccgccgggagcugagcggcuacugcuccagcaucaagcugcaggucgugaaggacgcccaggcgcuccugcacgggcuggacuucuccgaggugagcaacguccagcgccucaugcggaagcagcgccgggacgacuccgaccugaagcgccugcgggaccucaaccaggccgugaacaaccugguggagcucaagagcacccagcagaaguccauccugcgcgucggcacgcugaccagcgacgaccugcucacccuggccgccgaccuggagaagcucaaguccaaggugauccggaccgagcgcccccugagcuccgggguguacaugggcaaccugagcacgcagcagcucgagcagcggcgcgcccugcugaacaugaucgggauggucggcggcgcgcaggggacccagccgggccgggacgggguggugcgcgucugggacgugaagaaccccgaccuccugaacaaccaguucggcaccaugcccucccugacccucgccugccugacgaagcagggccagguggaccugaacgacgccguccucgcccugaccgaccuggggcucaucuacaccgcgaaguaccccaacagcuccgaccuggaccggcugagccagagccacccgauccucaacaugguggacaccaagaaguccagccugaacaucuccggcuacaacuucagccugggggccgccgugaaggccggcgccugcaugcucgacgggggcaacaugcuggagacgaucaaggucacgccccagaccguggacggcauccugaaguccauccucaaggugaagcgcagccuggggauguucgucuccgacacccccggcgagcggaaccccuacgagaacauccuguacaagaucugccucagcggggacggcuggccguacaucgcgucccgcaccagcaucguggggcgggccugggagaacaccaccguggaccuggaguccgacggcaagccccagaaggucggcaccgccgggagcaacaagucccugcagagcgccggcuuccccacggggcucaccuacucccagcugaugacccugaaggacagcaugaugcagcuggaccccuccgccaagaccuggaucgacaucgagggccgcccggaggaccccguggagaucgcgcucuaccagcccaugagcgggugcuacauccacuucuuccgggagcccacggaccugaagcaguucaagcaggacgccaaguacucccacggcaucgacgucgccgaccuguucccggcccagcccggccucaccagcgccgugaucgaggcgcugccccgcaacauggugcugaccugccaggggagcgacgacaucaagcgccuccuggacucccagggccggcgcgacaucaagcugaucgacaucgcccucagcaaggccgacucccggaaguucgagaacgccgucugggaccagugcaaggaccugugccacaugcacaccggggugguggucgagaagaagaagcgcggcgggaaggaggagaucacgccccacugcgcccugauggacugcaucauguacgacgcggccgugagcggcggccucaacaucccggugcugcgggccguccugccccgcgacaugguguuccggaccuccagccccaaggugguccucugaggacuagucccuguucccagagcccacuuuuuuuucuuuuuuugaaauaaaauagccugucuuucagaucucaaaggcucuuuucagagccaccaaaaaaaaaaaaaaaaaaaaaaaaaaaaaaaaaaaaaaaaaaaaaaaaaaaaaaaaaaaaaaaaagaauu

SEQ ID NO: 18122 - RNA, 2014 nt, Artificial Sequence
  mRNA product Design a-1 (hSL-A64-N5) comprising derived and/or modified sequence from LASV(LASV237-NIG-2010;Clade II)__AIT17639__SP-HsPLAT_NP(2-569) (opt1)
aggagagucccgcagucggcguccagcggcucugcuuguucgugugugugucguugcaggccuuauucaagcuuaccauggacgccaugaagcgcggccugugcugcgugcuccugcugugcggggccgucuucgugagccccagcgccuccaaggaggugaaguccuuccuguggacccagagccuccgccgggagcugagcggcuacugcuccaacaucaagcugcaggucgugaaggacgcccaggcgcuccugcacgggcuggacuucagcgagguguccaacguccagcgccucaugcggaagcagaagcgcgacgacagcgaccugaagcggcugcgcgaccucaaccaggccgugaacaaccugguggagcugaaguccacccagcagaaguccauccuccgggucggcacccugaccagcgacgaccugcucacccuggccgccgaccuggagaagcucaagagcaaggugauccgcaccgagcggccccuguccagcgggguguacaugggcaaccuguccacgcagcagcucgagcagcgccgggcccugcugaacaugaucgggauggucggcggcgcgcaggggacccagccgggccgcgacgggguggugcgggucugggacgugaagaaccccgaccuccugaacaaccaguucggcaccaugcccagccugacccucgccugccugacgaagcagggccagguggaccugaacgacgccguccucgcccugaccgaccuggggcucaucuacaccgcgaaguaccccaacuccagcgaccuggaccgccugucccagagccacccgauccucaacaugguggacaucaagaaguccagccugaacaucagcggcuacaacuucucccugggggccgccgugaaggccggcgccugcaugcucgacgggggcaacaugcuggagaccaucaaggucacgccccagaccauggacggcauccucaagagcauccugaaggugaagcggucccuggggauguucgugagcgacacccccggcgagcgcaaccccuacgagaacauccuguacaagaucugccucuccggggacggcuggccguacaucgcgagccggaccuccaucgucgggcgcgccugggagaacacgaccguggaccuggagagcgacggcaagccccagaaggugggcuccgccgggagcaacaagucccugcagagcgccggcuuccccaccgggcucaccuacucccagcugaugacgcugaaggacagcaugaugcagcuggaccccuccgccaagaccuggaucgacaucgagggccggccggaggaccccgucgagaucgcgcucuaccagcccaugagcgggugcuacauccacuucuuccgcgagcccaccgaccugaagcaguucaagcaggacgccaaguacucccacggcaucgacguggccgaccuguucccggcccagcccggccucaccagcgccgucaucgaggcgcugccccggaacauggugcugacgugccaggggagcgacgacaucaagcgccuccuggacucccagggccgccgggacaucaagcugaucgacaucgcccucagcaaggccgacucccgccgguucgagaacgccgugugggaccagugcaaggaccugugccacaugcacaccggggucgugguggagaagaagaagcgcggcgggaaggaggagaucacgccccacugcgcccugauggacugcaucauguacgacgcggccgucagcggcggccucaacaucccggugcugcgggccgugcugccccgcgacauggucuuccggaccuccagccccaagguggugcucugaggacuagucccuguucccagagcccacuuuuuuuucuuuuuuugaaauaaaauagccugucuuucagaucucaaaggcucuuuucagagccaccaaaaaaaaaaaaaaaaaaaaaaaaaaaaaaaaaaaaaaaaaaaaaaaaaaaaaaaaaaaaaaaaagaauu

SEQ ID NO: 18123 - RNA, 2014 nt, Artificial Sequence
  mRNA product Design a-1 (hSL-A64-N5) comprising derived and/or modified sequence from LASV(LASV253-NIG-2011;Clade II)__AIT17671__SP-HsPLAT_NP(2-569) (opt1)
aggagagucccgcagucggcguccagcggcucugcuuguucgugugugugucguugcaggccuuauucaagcuuaccauggacgccaugaagcgcggccugugcugcgugcuccugcugugcggggccgucuucgugagccccagcgccuccaaggaggugaaguccuuccuguggacccagagccuccgccgggagcugagcggcuacugcuccagcaucaagcugcaggucgugaaggacgcccaggcgcuccugcacgggcuggacuucuccgaggugagcaacguccagcgccucaugcggaagcagaagcgcgacgacuccgaccugaagcggcugcgcgaccucaaccaggccgugaacaaccugguggagcucaagagcacccagcagaaguccguccugcgggugggcacccugaccagcgacgaccugcucacccuggccgccgaccuggagaagcucaaguccaaggugauccgcaccgagcggccccugagcuccggggucuacaugggcaaccugagcacgcagcagcucgagcagcgccgggcccugcugaacaugaucgggauggugggcggcgcgcaggggacccagccgggccgcgacggggugguccgggugugggacgugaagaaccccgaccuccugaacaaccaguucggcaccaugcccucccugacccucgccugccugacgaagcaggggcaggucgaccugaacgacguggugcucgcccugaccgaccugggccucaucuacaccgccaaguaccccaacagcuccgaccuggaccgccugagccagagccacccgauccucaacauggucgacaccaagaaguccagccugaacaucuccggcuacaacuucagccugggggcggccgugaaggccggcgccugcaugcucgacgggggcaacaugcuggagacgaucaaggugacgccccagaccauggacggcauccugaaguccauccucaaggucaagaagucccuggggauguucgugagcgacacccccggcgagcggaaccccuacgagaacauccuguacaagaucugccucagcggggacggcuggccguacaucgccucccgcaccagcaucguggggcgggcgugggagaacaccaccgucgaccuggaguccgacggcaagccccagaaggugggcaccgccgggagcaacaagucccugcagagcgccggcuuccccacggggcucaccuacucccagcugaugacccugaaggacagcaugaugcagcuggaccccuccgccaagaccuggaucgacaucgagggccgcccggaggaccccgucgagaucgcccucuaccagcccaugagcgggugcuacauccacuucuuccgggagcccacggaccugaagcaguucaagcaggacgcgaaguacucccacggcaucgacgugaccgaccuguucccggcccagcccggccucaccagcgccgugaucgaggcccugccccgcaacaugguccugaccugccaggggagcgacgacaucaagcggcuccuggacucccagggccgccgcgacaucaagcugaucgacaucgcccucagcaaggcggacucccggcgcuucgagaacgccgugugggaccagugcaaggaccugugccacaugcacacggggguggucguggagaagaagaagcggggcgggaaggaggagaucacgccccacugcgcccugauggacugcaucauguacgacgccgccgugagcggcggccucaacaucccgguccugcgcgcggugcugccccgggacaugguguuccgcaccuccagccccaaggucgugcucugaggacuagucccuguucccagagcccacuuuuuuuucuuuuuuugaaauaaaauagccugucuuucagaucucaaaggcucuuuucagagccaccaaaaaaaaaaaaaaaaaaaaaaaaaaaaaaaaaaaaaaaaaaaaaaaaaaaaaaaaaaaaaaaaagaauu

SEQ ID NO: 18124 - RNA, 2014 nt, Artificial Sequence
  mRNA product Design a-1 (hSL-A64-N5) comprising derived and/or modified sequence from LASV(LASV254-NIG-2011;Clade II)__AIT17675__SP-HsPLAT_NP(2-569) (opt1)
aggagagucccgcagucggcguccagcggcucugcuuguucgugugugugucguugcaggccuuauucaagcuuaccauggacgccaugaagcgcggccugugcugcgugcuccugcugugcggggccgucuucgugagccccagcgccuccaaggaggugaaguccuuccuguggacccagagccuccgccgggagcugagcggcuacugcuccagcaucaagcugcaggucgugaaggacgcccaggcgcuccugcacgggcuggacuucuccgaggugagcaacguccagcgccucaugcggaagcagaagcgcgacgacuccgaccugaagcggcugcgcgaccucaaccaggccgugaacaaccugguggagcucaagagcacccagcagaaguccguccugcgggugggcacgcugaccagcgacgaccugcucacccuggccgccgaccuggagaagcucaaguccaaggugauccgcaccgagcggccccugagcuccggggucuacaugggcaaccugagcacgcagcagcucgagcagcgccgggcccugcugaacaugaucgggauggugggcggcgcgcaggggacccagccgggccgcgacggggugguccgggugugggacgugaagaaccccgaccuccugaacaaccaguucggcaccaugcccucccugacccucgccugccugacgaagcaggggcaggucgaccugaacgacgccgugcucgcccugaccgaccugggccucaucuacaccgcgaaguaccccaacagcuccgaccuggaccgccugagccagagccacccgauccucaacaugguggacaccaagaaguccagccugaacaucuccggcuacaacuucagccugggggccgccgucaaggccggcgccugcaugcucgacgggggcaacaugcuggagacgaucaaggugacgccccagaccauggacggcauccugaaguccauccucaaggugaagaagucccuggggauguucgucagcgacacccccggcgagcggaaccccuacgagaacauccuguacaagaucugccucagcggggacggcuggccguacaucgcgucccgcaccagcaucguggggcgggccugggagaacaccaucguggaccuggaguccgacggcaagccccagaaggucggcaccgccgggagcaacaagucccugcagagcgccggcuuccccaccgggcucacguacucccagcugaugacccugaaggacagcaugaugcagcuggaccccuccgccaagaccuggaucgacaucgagggccgcccggaggaccccguggagaucgcgcucuaccagcccaugagcgggugcuacauccacuucuuccgggagcccaccgaccugaagcaguucaagcaggacgccaaguacucccacggcaucgacgucgccgaccuguucccggcccagcccggccucacgagcgccgugaucgaggcgcugccccgcaacauggugcugaccugccaggggagcgacgacaucaagcggcuccuggacucccagggccgccgcgacaucaagcugaucgacaucgcccucagcaaggccgacucccggcgcuucgagaacgccgucugggaccagugcaaggaccugugccacaugcacaccggggugguggucgagaagaagaagcggggcgggaaggaggagaucacgccccacugcgcccugauggacugcaucauguacgacgcggccgugagcggcggccucaacaucccggugcugcgcgccguccugccccgggacaugguguuccgcaccuccagccccaaggugguccucugaggacuagucccuguucccagagcccacuuuuuuuucuuuuuuugaaauaaaauagccugucuuucagaucucaaaggcucuuuucagagccaccaaaaaaaaaaaaaaaaaaaaaaaaaaaaaaaaaaaaaaaaaaaaaaaaaaaaaaaaaaaaaaaaagaauu

SEQ ID NO: 18125 - RNA, 2014 nt, Artificial Sequence
  mRNA product Design a-1 (hSL-A64-N5) comprising derived and/or modified sequence from LASV(Nig08-04;Clade II)__ADU56611__SP-HsPLAT_NP(2-569) (opt1)
aggagagucccgcagucggcguccagcggcucugcuuguucgugugugugucguugcaggccuuauucaagcuuaccauggacgccaugaagcgcggccugugcugcgugcuccugcugugcggggccgucuucgugagccccagcgccuccaaggaggugaaguccuuccuguggacccagagccuccgccgggagcugagcggcuacugcuccaacaucaagcugcaggucgugaaggacgcccaggcgcuccugcacgggcuggacuucagcgagguguccaacguccagcgccucaugcggaagcagaagcgcgacgacggcgaccugaagcggcugcgcgaccucaaccaggccgugaacaaccugguggagcucaagagcacccagcagaaguccguccugcggguggggacccugaccagcgacgaccugcucacccuggccgccgaccuggagaagcucaaguccaaggugauccgcaccgagcggccccugagcuccggcgucuacauggggaaccugagcacgcagcagcucgagcagcgcaaggcccugcuguccaugaucggcauggugggcggggcgcagggcacccagccggggcgggacggcgugguccgcgugugggacgugaagaaccccgaccuccugaacaaccaguucgggaccaugcccagccugacccucgccugccugacgaagcagggccaggucgaccugaacgacgccgugcucgcccugaccgaccugggccucaucuacaccgcgaaguaccccaacuccagcgaccuggaccggcugucccagagccacccgauccucaacaugguggacaccaagaaguccagccugaacaucagcggguacaacuucucccugggcgccgccgucaaggccggggccugcaugcucgacggcggcaacaugcuggagacgaucaaggugacgccccagaccauggacgggauccucaagagcauccugaaggugaagcgcucccugggcauguucgucagcgacacccccggggagcggaaccccuacgagaacauccuguacaagaucugccucuccggcgacggguggccguacaucgcgagccgcaccuccaucgugggccgggccugggagaacaccaccguggaccuggagagcgacggcaagccccagaaggucgggaccgccggcuccaacaagagccugcaguccgccggguuccccacgggccucaccuacagccagcugaugacccugaaggacuccaugaugcagcuggaccccagcgccaagaccuggaucgacaucgaggggcgcccggaggaccccguggagaucgcgcucuaccagcccauguccggcugcuacauccacuucuuccgggagcccacggaccugaagcaguucaagcaggacgccaaguacagccacggcaucgacgucaccgaccuguucuccgcccagccggggcucaccagcgccgugaucgaggcccugccccgcaacauggugcugaccugccagggcagcgacgacaucaagaagcuccuggacucccaggggcggcgcgacaucaagcugaucgacaucagccucaacaaggcggacucccgccgguucgagaacgccgucugggaccagugcaaggaccugugccacaugcacacgggcgugguggucgagaagaagaagcgcgggggcaaggaggagaucacgccccacugcgcccugauggacugcaucauguucgacgccgccgugagcggcgggcucaacauccccauccugcgggcggugcugccgcgcgacauggucuuccggaccuccagccccaagguggugcucugaggacuagucccuguucccagagcccacuuuuuuuucuuuuuuugaaauaaaauagccugucuuucagaucucaaaggcucuuuucagagccaccaaaaaaaaaaaaaaaaaaaaaaaaaaaaaaaaaaaaaaaaaaaaaaaaaaaaaaaaaaaaaaaaagaauu

SEQ ID NO: 18126 - RNA, 2017 nt, Artificial Sequence
  mRNA product Design a-1 (hSL-A64-N5) comprising derived and/or modified sequence from LASV(GA391;Clade III)__AAA46284__SP-HsPLAT_NP(2-570) (opt1)
aggagagucccgcagucggcguccagcggcucugcuuguucgugugugugucguugcaggccuuauucaagcuuaccauggacgccaugaagcgcggccugugcugcgugcuccugcugugcggggccgucuucgugagccccagcgccuccaaggaggugcgcagcugccuguggacccagucccuccggcgcgagcugagcggcuacugcuccaacaucaagcugcaggucgugaaggacgcccaggcgcuccugcacgggcuggacuucagcgagguguccaacguccagcggcucaugcgcaagcagaagcgggacgacggcgaccugaagcgccugcgggaccucaaccaggccgugaacaaccugguggagcugaaguccacccagcagaaguccguccuccgcguggggacgcugagcuccgacgaccugcucauccuggccgccgaccuggagaagcucaagagcaaggugacccggaccgagcgcccccuguccagcggcgucuacauggggaaccuguccagccagcagcucgaccagcggcgcgcccugcugaacaugaucggcaugaccggcguguccgggggcgggaagggcgcgagcaacgggaucgugcgggucugggacgugaagaacgccgagcuccugaacaaccaguucggcacgaugccgucccugacccucgccugccugaccaagcagggccagguggaccugaacgacgccguccaggcgcucaccgaccuggggcugaucuacacggccaaguaccccaacagcagcgaccucgaccgccugucccagagccaccccauccugaacaugaucgacaccaagaaguccagccucaacaucuccggcuacaacuucagccugggggccgccgugaaggccggcgcgugcaugcuggacggcgggaacaugcucgagaccaucaaggugagcccccagaccauggacggcauccucaagagcauccugaaggucaagaagucccuggggauguucgugagcgacacgccgggcgagcggaaccccuacgagaacauccuguacaagaucugccuguccggggacggcuggagcuacaucgccucccgcaccagcaucgugggccgggccugggagaacaccgucguggaccucgagcaggacaacaagccccagaagaucgggaacggcggguccaacaagagccugcaguccgccggcuucgccgcggggcugaucuacagccagcucaugacccugaaggacuucaagugcuucaaccugauccccaacgccaagacguggauggacaucgagggccgcccggaggaccccguggagaucgcccuguaccagcccuccagcggcugcuacguccacuucuuccgggagcccaccgaccucaagcaguucaagcaggacgccaaguacagccacgggcgcgacgugaccgaccuguucgccgcgcagccgggccugaccuccgccgucaucgaggcccucccccggaacauggugaucacgugccaggggagcgaggacauccgcaagcugcuggagucccagggccgccgggacaucaagcucaucgacaucacccugagcaaggccgacucccgcaaguucgagaacgccgugugggaccaguucaaggaccugugccacaugcacaccggggucgugguggagaagaagaagcggggcggcaaggaggagaucacgccccacugcgcgcucauggacugcaucauguucgacgccgccgucagcgggggccuggacgccaaggugcugcgcgugguccucccccgggacaugguguuccgcaccuccaccccgaaggugguccugugaggacuagucccuguucccagagcccacuuuuuuuucuuuuuuugaaauaaaauagccugucuuucagaucucaaaggcucuuuucagagccaccaaaaaaaaaaaaaaaaaaaaaaaaaaaaaaaaaaaaaaaaaaaaaaaaaaaaaaaaaaaaaaaaagaauu

SEQ ID NO: 18127 - RNA, 2014 nt, Artificial Sequence
  mRNA product Design a-1 (hSL-A64-N5) comprising derived and/or modified sequence from LASV(Nig08-A19;Clade III)__ADU56619__SP-HsPLAT_NP(2-569) (opt1)
aggagagucccgcagucggcguccagcggcucugcuuguucgugugugugucguugcaggccuuauucaagcuuaccauggacgccaugaagcgcggccugugcugcgugcuccugcugugcggggccgucuucgugagccccagcgccuccaaggaggugaaguccuuccuguggacccagucccuccgccgggagcugagcggcuacugcuccaacaucaagcugcaggucgugaaggacgcccaggcgcuccugcacgggcuggacuucagcgagguguccaacguccagcgccucaugcggaagcagaagcgcgacgacggcgaccugaagcggcugcgcgaccucaaccaggccgugaacaaccugguggagcucaagagcacccagcagaaguccguccugcggguggggacccugagcuccgacgaccugcucgugcuggccgccgaccuggagaagcucaagagcaaggucgugcgcaccgagcggccccuguccagcggcaucuacauggggaaccuguccagccagcagcucgaccagcgcaaggcccugcugaacaugaucggcaugaccggcgggaacggcgggcggaacaccacguccgacggcaucgugcgcgucugggacgugaagaacgcggagcuccugaacaaccaguucgggaccaugccgagccugacccucgccugccugaccaagcagggccagguggaccugaacgacgccguccaggcccucacggaccugggccugaucuacaccgcgaaguaccccaacuccagcgaccucgaccggcuggcccagagccaccccauccugaacaugaucgacaccaagaaguccagccucaacaucuccggguacaacuucagccugggcgccgccgugaaggccggggcgugcaugcuggacggcggcaacaugcucgagaccaucaaggugagcccccagacgauggacgggauccucaagagcauccugaaggucaagcgcucccugggcauguucaucagcgacaccccgggggagcggaaccccuacgagaacauccuguacaagaucugccuguccggcgacggguggcccuacaucgccagccgcaccuccaucgugggccgggccugggagaacaccguggucgaccucgagagcgacaacaagccccagaagacgggcaacgggggcuccaacaagagccugcaguccgccggguucgccgcgggccugaccuacagccagcucaugacccugaaggacuccaugcugcagcuggacccgaacgccaagaccuggauggacaucgaggggcgccccgaggaccccguggagaucgcccucuaccagcccagcuccggcugcuacauccacuucuuccgggagccgacggaccugaagcaguucaagcaggacgccaaguacagccacggcaucgacgugaccgaccuguucgccgcgcagcccgggcucaccagcgccgucaucgaggcccugccccgcaacauggugaucacgugccagggcuccgaggacauccggaagcugcucgagagccaggggcgccgcgacaucaagcugaucgacaucucccugagcaaggucgacucccggaaguucgagaacgccgugugggaccaguucaaggaccucugccacaugcacaccggcaucguggucgagaagaagaagcgcgggggcaaggaggagaucacgccccacugcgcccugauggacugcaucauguucgacgcggccgugagcggcgggguggacgccaagguccugcgggccgugcucccgcgcgacaugguguuccggaccuccacccccaaggucgugcugugaggacuagucccuguucccagagcccacuuuuuuuucuuuuuuugaaauaaaauagccugucuuucagaucucaaaggcucuuuucagagccaccaaaaaaaaaaaaaaaaaaaaaaaaaaaaaaaaaaaaaaaaaaaaaaaaaaaaaaaaaaaaaaaaagaauu

SEQ ID NO: 18128 - RNA, 2014 nt, Artificial Sequence
  mRNA product Design a-1 (hSL-A64-N5) comprising derived and/or modified sequence from LASV(G1180-SLE-2010;Clade IV)__AIT17169__SP-HsPLAT_NP(2-569) (opt1)
aggagagucccgcagucggcguccagcggcucugcuuguucgugugugugucguugcaggccuuauucaagcuuaccauggacgccaugaagcgcggccugugcugcgugcuccugcugugcggggccgucuucgugagccccagcgccuccaaggagaucaagagcuuccuguggacccagucccuccgccgggagcugagcggcuacugcuccaacaucaagcuccagguggucaaggacgcccaggcgcugcugcacgggcuggacuucagcgagguguccaacgugcagcgccucaugcggaaggagcgccgggacgacaacgaccugaagcgccugcgggaccucaaccaggccgucaacaaccugguggagcucaagagcacccagcagaaguccauccugcgcgugggcacccugaccagcgacgaccugcucauccuggccgccgaccuggagaagcucaaguccaaggucauccggaccgagcgcccccugagcgccgggguguacaugggcaaccuguccagccagcagcucgaccagcggcgcgcgcugcuguccaugaucgggaugagcuccggcaaccagcgggcccaggccggccgcgacggggugguccgggugugggacgugaagaacgucgagcuccugaacaaccaguucggcaccaugccgagccugacgcucgccugccugaccaagcagggccagguggaccugaacgacgcggugcaggcccucaccgaccuggggcugaucuacaccgccaaguaccccaacacguccgaccucgaccgccugacccagagccaccccauccugaacaugaucgacaccaagaaguccagccucaacaucagcggguacaacuucucccugggcgccgccgucaaggcgggcgccugcaugcuggacgggggcaacaugcucgagaccaucaaggugagcccccagacgauggacgggauccugaaguccauccugaaggugaagaaggcccucggcauguucaucagcgacaccccgggcgagcggaaccccuacgagaacauccuguacaagaucugccuguccggggacggcuggcccuacaucgccagccgcaccuccaucaccgggcgggccugggagaacacggucguggaccucgagagcgacggcaagccccagaaggcgggguccaacaacagcaacaagucccugcagagcgugggcuucaccgccggccugaccuacucccagcucaugacccugaaggacgccaugcugcagcuggacccgaacgccaagacguggauggacaucgaggggcgccccgaggaccccgucgagaucgcccucuaccagcccagcuccggcugcuacauccacuucuuccgggagccgaccgaccugaagcaguucaagcaggacgcgaaguacagccacgggaucgacgugaccgaccuguucgccgcccagcccggccucaccuccgccgugaucgacgcccugccccgcaacauggucaucacgugccaggggagcgacgacauccgcaagcugcucgagagccagggccggaaggacaucaagcugaucgacaucgcgcuguccaagaccgacagccgcaaguacgagaacgccgugugggaccaguacaaggaccucugccacaugcacaccggcgucgugguggagaagaagaagcgcgggggcaaggaggagaucacgccccacugcgcccugauggacugcaucauguucgacgccgcggucuccgggggccugaacaccagcgugcuccgggccgugcugccgcgggacauggucuuccgcaccuccacgccccggguggugcugugaggacuagucccuguucccagagcccacuuuuuuuucuuuuuuugaaauaaaauagccugucuuucagaucucaaaggcucuuuucagagccaccaaaaaaaaaaaaaaaaaaaaaaaaaaaaaaaaaaaaaaaaaaaaaaaaaaaaaaaaaaaaaaaaagaauu

SEQ ID NO: 18129 - RNA, 2014 nt, Artificial Sequence
  mRNA product Design a-1 (hSL-A64-N5) comprising derived and/or modified sequence from LASV(G1442-SLE-2011;Clade IV)__AIT17181__SP-HsPLAT_NP(2-569) (opt1)
aggagagucccgcagucggcguccagcggcucugcuuguucgugugugugucguugcaggccuuauucaagcuuaccauggacgccaugaagcgcggccugugcugcgugcuccugcugugcggggccgucuucgugagccccagcgccuccaaggaggugaaguccuuccuguggacccagagccuccgccgggagcugagcggcuacugcuccaacaucaagcugcaggucgugaaggacgcccaggcgcuccugcacgggcuggacuucagcgagguguccaacguccagcgccucaugcggaagcagcgccgggacgacaacgaccugaagcgccugcgggaccucaaccaggccgugaacaaccugguggagcucaagagcacccagcagaaguccguccugcgcgugggcacccugaccagcgacgaccugcucgugcuggccgccgaccuggagaagcucaaguccaaggucauccggaccgagcgcccccugagcgccgggguguacaugggcaaccuguccagccagcagcucgaccagcggcgcgcgcugcugaacaugaucgggauguccggcggcauccaggggacccggacgggccgcgacggggugguccgggugugggacgugaagaacgccgaccuccugaacaaccaguucggcaccaugccgagccugacccucgccugccugaccaagcaggggcaggucgaccugaacgacguggugcaggcccucacggaccugggccugaucuacaccgcgaaguaccccaacgccuccgaccucgaccgccugacccagagccaccccauccugaacaugaucgacaccaagaaguccagccucaacaucagcggcuacaacuucucccugggggccgccgucaaggccggcgcgugcaugcuggacgggggcaacaugcucgagacgaucaaggugagcccccagaccauggacggcauccugaaguccauccugaaggugaagaagacccucgggauguucaucagcgacaccccgggcgagcggaaccccuacgagaacauccuguacaagaucugccuguccggggacggcuggcccuacaucgccagccgcacguccaucaccgggcgggccugggagaacaccgucguggaccucgagagcgacggcaagccccagaaggccggcuccaacaacagcaacaagucccugcagagcgccggguucgcggccggccugaccuacucccagcucaugacgcugaaggacgccaugcugcagcuggacccgaacgccaagaccuggauggacaucgaggggcgccccgaggaccccguggagaucgcccucuaccagcccagcuccggcugcuacauccacuucuuccgggagccgaccgaccugaagcaguucaagcaggacgcgaaguacagccacgggaucgacgucaccgaccuguucgccgcccagcccggccucacguccgccgugaucgaggcccugccccgcaacauggucaucacgugccagggcagcgacgacaucaagaagcugcucgagucccaggggcgcaaggacaucaagcugaucgacaucgcgcugagcaagaccgacagccggaaguacgagaacgccgugugggaccaguacaaggaccucugccacaugcacaccggcguggucguggagaagaagaagcgcgggggcaaggaggagaucaccccgcacugcgcccugauggacugcaucauguucgacgccgcgguguccgggggccugaacacccucguccugcgggccgugcugccccgcgacaugguguuccggaccagcacgccccgcgucgugcucugaggacuagucccuguucccagagcccacuuuuuuuucuuuuuuugaaauaaaauagccugucuuucagaucucaaaggcucuuuucagagccaccaaaaaaaaaaaaaaaaaaaaaaaaaaaaaaaaaaaaaaaaaaaaaaaaaaaaaaaaaaaaaaaaagaauu

SEQ ID NO: 18130 - RNA, 2014 nt, Artificial Sequence
  mRNA product Design a-1 (hSL-A64-N5) comprising derived and/or modified sequence from LASV(G3010-SLE-2013;Clade IV)__AIT17345__SP-HsPLAT_NP(2-569) (opt1)
aggagagucccgcagucggcguccagcggcucugcuuguucgugugugugucguugcaggccuuauucaagcuuaccauggacgccaugaagcgcggccugugcugcgugcuccugcugugcggggccgucuucgugagccccagcgccuccaaggagaucaagagcuuccuguggacccagucccuccgccgggagcugagcggcuacugcuccaacaucaagcuccagguggucaaggacgcccaggcgcugcugcacgggcuggacuucagcgagguguccaacgugcagcgccucaugcggaaggagcgccgggacgacaacgaccugaagcgccugcgggaccucaaccaggccgucaacaaccugguggagcucaagagcacccagcagaaguccauccugcgcgugggcacccugaccagcgacgaccugcucauccuggccgccgaccuggagaagcucaaguccaaggucacccggaccgagcgcccccugagcgccgggguguacaugggcaaccuguccagccagcagcucgaccagcggcgcgcgcugcuguccaugaucgggaugagcuccggcgugcagggcgcccgggccgggcgcgacggcgucgugcgggugugggacgucaagaacgccgagcuccugaacaaccaguucgggacgaugccgagccugacccucgcgugccugaccaagcagggccagguggaccugaacgacgugguccaggcccucaccgaccuggggcugaucuacacggccaaguaccccaacaccuccgaccucgaccgccugacccagagccaccccauccugaacaugaucgacaccaagaaguccagccucaacaucagcggcuacaacuucucccugggcgccgccgugaaggcgggggccugcaugcuggacggcgggaacaugcucgagacgaucaaggugagcccccagaccauggacggcauccugaaguccauccugaaggucaagaaggcccucggcauguucaucagcgagaccccgggggagcggaaccccuacgagaacauccuguacaagaucugccuguccggcgacggguggcccuacaucgccagccgcaccuccaucacgggccgggccugggagaacaccgugguggaccucgagagcgacgggaagccccagaaggcgggcuccaacaacagcaacaagucccugcagagcgccggcuucaccgccgggcugaccuacucccagcucaugacgcugaaggacgccaugcugcagcuggacccgaacgccaagaccuggauggacaucgagggccgccccgaggaccccgucgagguggcgcucuaccagcccagcuccgggugcuacauccacuucuuccgggagccgaccgaccugaagcaguucaagcaggacgccaaguacagccacggcaucgacgugaccgaccuguucgccgcccagcccgggcucacguccgccgucaucgacgcgcugccccgcaacauggugaucacgugccagggcagcgacgacaucaagaagcugcucgagagccagggccgcaaggacaucaagcugaucgacaucgcccuguccaagaccgacagccggaaguacgagaacgccgucugggaccaguacaaggaccucugccacaugcacaccggggugguggucgagaagaagaagcgcggcgggaaggaggagaucaccccgcacugcgcccugauggacugcaucauguucgacgcggccguguccggcgggcugaacaccagcgugcuccgggccguccugccccgcgacaugguguuccggaccuccacgccccgcgugguccugugaggacuagucccuguucccagagcccacuuuuuuuucuuuuuuugaaauaaaauagccugucuuucagaucucaaaggcucuuuucagagccaccaaaaaaaaaaaaaaaaaaaaaaaaaaaaaaaaaaaaaaaaaaaaaaaaaaaaaaaaaaaaaaaaagaauu

SEQ ID NO: 18131 - RNA, 2014 nt, Artificial Sequence
  mRNA product Design a-1 (hSL-A64-N5) comprising derived and/or modified sequence from LASV(G502-SLE-2009;Clade IV)__AIT17127__SP-HsPLAT_NP(2-569) (opt1)
aggagagucccgcagucggcguccagcggcucugcuuguucgugugugugucguugcaggccuuauucaagcuuaccauggacgccaugaagcgcggccugugcugcgugcuccugcugugcggggccgucuucgugagccccagcgccuccaaggagaucaagagcuuccuguggacccagucccuccgccgggagcugagcggcuacugcuccaacaucaagcuccagguggucaaggacgcccaggcgcugcugcacgggcuggacuucagcgagguguccaacgugcagcgccucaugcggaaggagcgccgggacgacaacgaccugaagcgccugcgggaccucaaccaggccgucaacaaccugguggagcucaagagcacccagcagaaguccauccugcgcgugggcacccugaccagcgacgaccugcucauccuggccgccgaccuggagaagcucaaguccaaggucauccggaccgagcgcccccugagcgccgggguguacaugggcaaccuguccagccagcagcucgaccagcggcgcgcgcugcuguccaugaucgggaugagcggcggcaaccagggggugcgggccggcaaggacggggucgugcgcgugugggacgucaagaacgccgagcuccugaacaaccaguucggcaccaugccgucccugacgcucgccugccugaccaagcagggccagguggaccugaacgacgcggugcaggcccucaccgaccuggggcugaucuacaccgccaaguaccccaacacgagcgaccucgaccggcugacccagucccaccccauccugaacaugaucgacaccaagaaguccagccucaacaucuccggcuacaacuucagccugggggccgccgucaaggcgggcgccugcaugcuggacgggggcaacaugcucgagaccaucaaggugagcccccagacgauggacggcauccucaagagcauccugaaggugaagaaggcccuggggauguucaucuccgacaccccgggcgagcgcaaccccuacgagaacauccuguacaagaucugccugagcggggacggcuggcccuacaucgccucccggaccagcaucaccgggcgcgccugggagaacacggucguggaccucgaguccgacggcaagccccagaaggcgggcagcaacaacuccaacaagagccugcaguccgccggguucaccgccggccugaccuacagccagcucaugacccugaaggacgccaugcugcagcuggacccgaacacgaagaccuggauggacaucgaggggcggcccgaggaccccguggagaucgcccucuaccagcccuccagcggcugcuacauccacuucuuccgcgagccgaccgaccugaagcaguucaagcaggacgcgaaguacucccacgggaucgacgucaccgaccuguucgccgcccagcccggccucacgagcgccgugaucgacgcccugccccggaacauggugaucacgugccagggcuccgacgacauccgcaagcugcucgagagccaggggcgcaaggacaucaagcugaucgacaucgcgcugaacaagaccgacagccggaaguacgagaacgccgucugggaccaguacaaggaccucugccacaugcacaccggcguggucguggagaagaagaagcgcgggggcaaggaggagaucaccccgcacugcgcccugauggacugcaucauguucgacgccgcgguguccgggggccugaacaccagcguccuccgggccgugcugccccgcgacaugguguuccggaccuccacgccccgcgucgugcugugaggacuagucccuguucccagagcccacuuuuuuuucuuuuuuugaaauaaaauagccugucuuucagaucucaaaggcucuuuucagagccaccaaaaaaaaaaaaaaaaaaaaaaaaaaaaaaaaaaaaaaaaaaaaaaaaaaaaaaaaaaaaaaaaagaauu

SEQ ID NO: 18132 - RNA, 2014 nt, Artificial Sequence
  mRNA product Design a-1 (hSL-A64-N5) comprising derived and/or modified sequence from LASV(G733-SLE-2010;Clade IV)__AIT17155__SP-HsPLAT_NP(2-569) (opt1)
aggagagucccgcagucggcguccagcggcucugcuuguucgugugugugucguugcaggccuuauucaagcuuaccauggacgccaugaagcgcggccugugcugcgugcuccugcugugcggggccgucuucgugagccccagcgccuccaaggagaucaagagcuuccuguggacccagucccuccgccgggagcugagcggcuacugcuccaacaucaagcuccagguggucaaggacgcccaggcgcugcugcacgggcuggacuucagcgagguguccaacgugcagcgccucaugcggaaggagcgccgggacgacaacgaccugaagcgccugcgggaccucaaccaggccgucaacaaccugguggagcucaagagcacccagcagaaguccgugcugcgcgucggcacccugaccagcgacgagcugcucgugcuggccgccgaccuggagaagcucaaguccaaggugauccggaccgagcgcccccugagcgccggggucuacaugggcaaccuguccagccagcagcucgaccagcggcgcgcgcugcuguccaugaucgggaugagcggcggcaaccagggggcccggaccggccgcgacgggguggugcgggucugggacgugaagaacgccgagcuccugaacaaccaguucggcaccaugccgucccugacccucgccugccugaccaagcagggccagguggaccugaacgacgcgguccaggcccucaccgaccuggggcugaucuacacggccaaguaccccaacaccagcgaccucgaccgccugacccagucccaccccauccugaacaugaucgacaccaagaaguccagccucaacaucuccggcuacaacuucagccugggggccgccgugaaggcgggcgccugcaugcuggacgggggcaacaugcucgagacgaucaaggugagcccccagaccauggacggcauccucaagagcauccugaaggucaagaaggcccuggggauguucaucuccgacaccccgggcgagcggaaccccuacgagaacauccuguacaagaucugccugagcggggacggcuggcccuacaucgccucccgcaccagcaucacggggcgggccugggagaacaccgugguggaccucgaguccgacggcaagccccagaaggcgggcagcaacaacuccaacaagagccugcaguccgccggguucaccgccggccugaccuacagccagcucaugacgcugaaggacgccaugcugcagcuggacccgaacgccaagaccuggauggacaucgaggggcgccccgaggaccccgucgagaucgcgcucuaccagcccuccagcggcugcuacauccacuucuuccgggagccgaccgaccugaagcaguucaagcaggacgccaaguacucccacgggaucgacgugaccgaccuguucgccgcccagcccggccucacgagcgccgugaucgacgcgcugccccgcaacauggucaucacgugccagggcuccgacgacauccgcaagcugcucgagagccaggggcggaaggacaucaagcugaucgacaucgcccugagcaagaucgacucccgcaaguacgagaacgccgugugggaccaguacaaggaccucugccacaugcacaccggcgucgugguggagaagaagaagcgcgggggcaaggaggagaucacgccccacugcgcccugauggacugcaucauguucgacgcggccgucagcgggggccugaacucccucgugcugcgggccgugcugccgcgggacauggucuuccgcaccagcacgccccggguggugcucugaggacuagucccuguucccagagcccacuuuuuuuucuuuuuuugaaauaaaauagccugucuuucagaucucaaaggcucuuuucagagccaccaaaaaaaaaaaaaaaaaaaaaaaaaaaaaaaaaaaaaaaaaaaaaaaaaaaaaaaaaaaaaaaaagaauu

SEQ ID NO: 18133 - RNA, 2014 nt, Artificial Sequence
  mRNA product Design a-1 (hSL-A64-N5) comprising derived and/or modified sequence from MOPV/LASV reassortant(IGS-1;Clade IV)__AFY05578__SP-HsPLAT_NP(2-569) (opt1)
aggagagucccgcagucggcguccagcggcucugcuuguucgugugugugucguugcaggccuuauucaagcuuaccauggacgccaugaagcgcggccugugcugcgugcuccugcugugcggggccgucuucgugagccccagcgccuccaaggagaucaagagcuuccuguggacccagucccuccgccgggagcugagcggcuacugcuccaacaucaagcuccagguggucaaggacgcccaggcgcugcugcacgggcuggacuucagcgagguguccaacgugcagcgccucaugcggaaggagcgccgggacgacaacgaccugaagcgccugcgggaccucaaccaggccgucaacaaccugguggagcucaagagcacccagcagaaguccauccugcgcgugggcacccugaccagcgacgaccugcucauccuggccgccgaccuggagaagcuccgguccaaggucauccgcaccgagcggccccugagcgccgggguguacaugggcaaccuguccagccagcagcucgaccagcgccgggcgcugcugaacaugaucgggauguccggcggcaaccagggggcccgcgccggccgggacggggugguccgcgugugggacgugaagaacgccgagcuccugagcaaccaguucggcaccaugccgucccugacgcucgcgugccugaccaagcaggggcaggucgaccugaacgacgccgugcaggcccucaccgaccugggccugaucuacaccgccaaguaccccaacacgagcgaccucgaccggcugacccagucccaccccauccugaacaugaucgacaccaagaaguccagccucaacaucuccggcuacaacuucagccugggggccgcggugaaggccggcgccugcaugcuggacgggggcaacaugcucgagaccaucaaggucagcccccagacgauggacggcauccucaagagcauccugaaggugaagaaggcccuggggauguucaucuccgacaccccgggcgagcgcaaccccuacgagaacauccuguacaagaucugccugagcggggacggcuggcccuacaucgccucccggaccagcaucaccgggcgcgcgugggagaacacgguggucgaccucgaguccgacggcaagccccagaaggccgacagcaacaacuccagcaagucccugcagagcgccggcuucaccgccgggcugaccuacucccagcucaugacccugaaggacgccaugcugcagcuggacccgaacgcgaagacguggauggacaucgagggccggcccgaggaccccguggagaucgcccucuaccagcccagcuccgggugcuacauccacuucuuccgcgagccgaccgaccugaagcaguucaagcaggacgccaaguacagccacggcaucgacgugaccgaccuguucgccacccagcccgggcucacguccgccgucaucgacgcgcugccccgcaacauggugaucacgugccagggcagcgacgacauccggaagcugcucgagagccagggccgcaaggacaucaagcugaucgacaucgaccuguccaagaccgacagccggaaguacgagaacgccgugugggaccaguacaaggaccucugccacaugcacaccggggucguggucgagaagaagaagcgcggcgggaaggaggagaucaccccgcacugcgcccugauggacugcaucauguucgacgccgcgguguccggcgggcugaacaccagcgugcuccgggccguccugccccgcgacaugguguuccggaccuccacgccccgcgugguccugugaggacuagucccuguucccagagcccacuuuuuuuucuuuuuuugaaauaaaauagccugucuuucagaucucaaaggcucuuuucagagccaccaaaaaaaaaaaaaaaaaaaaaaaaaaaaaaaaaaaaaaaaaaaaaaaaaaaaaaaaaaaaaaaaagaauu

SEQ ID NO: 18134 - RNA, 2014 nt, Artificial Sequence
  mRNA product Design a-1 (hSL-A64-N5) comprising derived and/or modified sequence from LASV(LM765-SLE-2012;Clade IV)__AIT17815__SP-HsPLAT_NP(2-569) (opt1)
aggagagucccgcagucggcguccagcggcucugcuuguucgugugugugucguugcaggccuuauucaagcuuaccauggacgccaugaagcgcggccugugcugcgugcuccugcugugcggggccgucuucgugagccccagcgccuccaaggagaucaagagcuuccuguggacccagucccuccgccgggagcugagcggcuacugcuccaacaucaagcuccagguggucaaggacgcccaggcgcugcugcacgggcuggacuucagcgagguguccaacgugcagcgccucaugcggaaggagcgccgggacgacaacgaccugaagcgccugcgggaccucaaccaggccgucaacaaccugguggagcucaagagcacccagcagaaguccauccugcgcgugggcacccugaccagcgacgaccugcucauccuggccgccgaccuggagaagcucaaguccaaggucacccggaccgagcgcccccugagcgccgggguguacaugggcaaccuguccagccagcagcucgaccagcggcgcgcgcugcuggacaugaucgggauguccggcagcaaccagggcgcccgggccgggcgcgacggcgugguccgggugugggacgugaagaacgccgagcuccugaacaaccaguucgggacgaugccgucccugacccucgcgugccugaccaagcagggccaggucgaccugaacgacgccgugcaggcccucaccgaccuggggcugaucuacacggccaaguaccccaacaccagcgaccucgaccgccugacccagucccaccccauccugaacaugaucgacaccaagaaguccagccucaacaucuccggcuacaacuucagccugggcgccgcggugaaggccggggccugcaugcuggacggcgggaacaugcucgagacgaucaaggucagcccccagaccauggacggcauccucaagagcauccugaaggugaagaaggcccugggcauguucaucuccgacgccccgggggagcggaaccccuacgagaacauccuguacaagaucugccugagcggcgacggguggcccuacaucgcgucccgcaccagcaucaccggccgggccugggagaacacgguggucgaccucgaguccgacgggaagccccagaaggccggcagcaacggcuccaacaagagccugcaguccgccggguucaccgccggccugaccuacagccagcucaugacccugaaggacgcgaugcugcagcuggacccgaacgccaagacguggauggacaucgaggggcgccccgaggaccccguggagaucgcccucuaccagcccuccagcggcugcuacauccacuucuuccgggagccgaccgaccugaagcaguucaagcaggacgccaaguacucccacgggaucgacgugaccgaccuguucgccgcgcagcccggccucaccagcgccgucaucgacgcccugccccgcaacauggugaucacgugccagggcuccgacgacauccgcaagcuguucgagagccaggggcggaaggacaucaagcucaucgacaucgcccugagcaagaccgacucccgcaaguacgagaacgcggugugggaccaguacaaggaccugugccacaugcacaccggcaucgucguggagaagaagaagcgcgggggcaaggaggagaucacgccccacugcgcccucauggacugcaucauguucgacgccgccgucagcgggggccugaacaccuccgugcugcgggccgugcucccgcgggacauggucuuccgcaccagcacgccccggguggugcugugaggacuagucccuguucccagagcccacuuuuuuuucuuuuuuugaaauaaaauagccugucuuucagaucucaaaggcucuuuucagagccaccaaaaaaaaaaaaaaaaaaaaaaaaaaaaaaaaaaaaaaaaaaaaaaaaaaaaaaaaaaaaaaaaagaauu

SEQ ID NO: 18135 - RNA, 2014 nt, Artificial Sequence
  mRNA product Design a-1 (hSL-A64-N5) comprising derived and/or modified sequence from LASV(LM776-SLE-2012;Clade IV)__AIT17825__SP-HsPLAT_NP(2-569) (opt1)
aggagagucccgcagucggcguccagcggcucugcuuguucgugugugugucguugcaggccuuauucaagcuuaccauggacgccaugaagcgcggccugugcugcgugcuccugcugugcggggccgucuucgugagccccagcgccuccaaggagaucaagagcuuccuguggacccagucccuccgccgggagcugagcuccuacugcagcaacaucaagcuccagguggucaaggacgcccaggcgcugcugcacggccuggacuucuccgaggugagcaacgugcagcgccucaugcggaaggagcgccgggacgacaacgaccugaagcgccugcgggaccucaaccaggccgucaacaaccugguggagcugaaguccacccagcagaaguccauccuccgcguggggacccugaccuccgacgaccugcucauccuggccgccgaccuggagaagcucaagagcaaggucacccggaccgagcgcccccuguccgccggcguguacauggggaaccugagcucccagcagcucgaccagcggcgcgcgcugcugagcaugaucggcauguccgggagcaaccagggcgcccgggccggccgcgacggggugguccgggugugggacgugaagaacgccgagcuccugaacaaccaguucggcacgaugccgucccugacccucgcgugccugaccaagcaggggcaggucgaccugaacgacgccgugcaggcccucaccgaccugggccugaucuacacggccaaguaccccaacaccagcgaccucgaccgccugacccagagccaccccauccugaacaugaucgacaccaagaaguccagccucaacaucuccggguacaacuucagccugggcgccgcggugaaggccggcgccugcaugcuggacgggggcaacaugcucgagacgaucaaggucagcccccagaccauggacgggauccucaagagcauccugaaggugaagaaggcccugggcauguucaucuccgacaccccgggcgagcggaaccccuacgagaacauccuguacaagaucugccugagcggggacggcuggcccuacaucgccucccgcaccagcaucacggggcgggcgugggagaacaccguggucgaccucgaguccgacggcaagccccagaaggccgggagcaacaacuccaacaagagccugcaguccgccggcuucaccgccggccugaccuacagccagcucaugacgcugaaggacgccaugcugcagcuggacccgaacgcgaagaccuggauggacaucgaggggcgccccgaggaccccguggagguggcccucuaccagcccuccagcggcugcuacauccacuucuuccgggagccgaccgaccugaagcaguucaagcaggacgccaaguacucccacgggaucgacgucaccgaccuguucgccgcccagcccggccucacgagcgcggugaucgacgcccugccccgcaacauggugaucacgugccaggggagcgacgacauccgcaagcugcucgagucccagggccggaaggacaucaagcugaucgacaucgcccugagcaagaccgacucccgcaaguacgagaacgccgucugggaccaguacaaggaccucugccacaugcacaccggcguggucguggagaagaagaagcgcgggggcaaggaggagaucaccccgcacugcgcgcugauggacugcaucauguucgacgccgccgugagcgggggccugaacaccuccguccuccgggccgugcugccccgggacaugguguuccgcaccagcacgccccgggucgugcugugaggacuagucccuguucccagagcccacuuuuuuuucuuuuuuugaaauaaaauagccugucuuucagaucucaaaggcucuuuucagagccaccaaaaaaaaaaaaaaaaaaaaaaaaaaaaaaaaaaaaaaaaaaaaaaaaaaaaaaaaaaaaaaaaagaauu

SEQ ID NO: 18136 - RNA, 2014 nt, Artificial Sequence
  mRNA product Design a-1 (hSL-A64-N5) comprising derived and/or modified sequence from LASV(Mad39;Clade IV)__ANH09723__SP-HsPLAT_NP(2-569) (opt1)
aggagagucccgcagucggcguccagcggcucugcuuguucgugugugugucguugcaggccuuauucaagcuuaccauggacgccaugaagcgcggccugugcugcgugcuccugcugugcggggccgucuucgugagccccagcgccuccaaggagaucaagagcuuccuguggacccagucccuccgccgggagcugagcggcuacugcuccaacaucaagcuccagguggucaaggacgcccaggcgcugcugcacgggcuggacuucagcgagguguccaacgugcagcgccucaugcggaagcagcgccgggacgacaacgaccugaagcgccugcgggaccucaaccaggccgucaacaaccugguggagcugaaguccacccagcagaaguccgugcuccgcgucggcacgcugaccagcgacgaccugcucacccuggccgccgaccuggagaagcucaaguccaaggugacccggacggagcgcccccugaccgccgggguguacaugggcaaccugagcucccagcagcucgaccagcggcgcgcgcugcugaacaugaucgggaugagcggcggcaaccagggggcccggaccggccgcgacggggucgugcgggugugggacgucaagaacgccgagcuccugaacaaccaguucggcaccaugccgucccugacgcucgccugccugaccaagcagggccagguggaccugaacgacgugguccaggcgcucaccgaccuggggcugaucuacaccgccaaguaccccaacacgagcgaccucgaccgccugacccagucccaccccauccugaacaugaucgacaccaacaagagcucccucaacaucagcggcuacaacuucagccugggggccgccgugaaggccggcgcgugcaugcuggacgggggcaacaugcucgagaccaucaaggugagcccccagacgauggacggcauccucaagagcauccugaaggucaagaagucccuggggauguucaucagcgacaccccgggcgagcggaaccccuacgagaacauccuguacaagaucugccuguccggggacggcuggcccuacaucgccagccgcaccuccaucaccgggcgggccugggagaacacggugguggaccucgagagcggcggcaagccccagaaggccggguccaacaacagcaacaagucccugcagagcgccggcuucgcggccgggcugaccuacucccagcucaugacccugaaggacgccaugcugcagcuggacccgaacgccaagaccuggauggacaucgagggccgccccgaggaccccgucgagaucgcccucuaccagcccaucagcgggugcuacauccacuucuuccgggagccgacggaccugaagcaguucaagcaggacgcgaaguacucccacggcaucgacgugaccgaccuguucgccgcccagcccggccucaccagcgccgugaucgaggcccugccccgcaacauggucaucacgugccagggguccgacgacauccgcaagcuguucgagagccagggccggaaggacaucaagcucaucgacaucgcgcuguccaagaccgacagccgcaaguacgagaacgccgugugggaccaguacaaggaccugugccacaugcacaccggggucgugguggagaagaagaagaagggcgggaaggaggagaucacgccccacugcgcccucauggacugcaucauguucgacgccgcggucagcggcggccugaacacccuggugcuccgggccgugcugccgcgcgacauggucuuccggaccuccacccccaagguggugcugugaggacuagucccuguucccagagcccacuuuuuuuucuuuuuuugaaauaaaauagccugucuuucagaucucaaaggcucuuuucagagccaccaaaaaaaaaaaaaaaaaaaaaaaaaaaaaaaaaaaaaaaaaaaaaaaaaaaaaaaaaaaaaaaaagaauu

SEQ ID NO: 18137 - RNA, 2014 nt, Artificial Sequence
  mRNA product Design a-1 (hSL-A64-N5) comprising derived and/or modified sequence from LASV(Z0947-SLE-2011;Clade IV)__AIT17841__SP-HsPLAT_NP(2-569) (opt1)
aggagagucccgcagucggcguccagcggcucugcuuguucgugugugugucguugcaggccuuauucaagcuuaccauggacgccaugaagcgcggccugugcugcgugcuccugcugugcggggccgucuucgugagccccagcgccuccaaggagaucaagagcuuccuguggacccagucccuccgccgggagcugagcggcuacugcuccaacaucaagcuccagguggucaaggacgcccaggcgcugcugcacgggcuggacuucagcgagguguccaacgugcagcgccucaugcggaaggagcgccgggacgacaacgaccugaagcgccugcgggaccucaaccaggccgucaacaaccugguggagcucaagagcacccagcagaaguccauccugcgcgugggcacccugaccagcgacgaccugcucauccuggccgccgaccuggagaagcucaaguccaaggucacccggaccgagcgcccccugagcgccgggguguacaugggcaaccuguccagccagcagcucgaccagcggcgcgcgcugcugaacaugaucgggauguccggcagcaaccagggcgcccggacggggcgcgacggcgugguccgggugugggacgugaagaacgccgagcuccugaacaaccaguucgggaccaugccgucccugacccucgccugccugaccaagcagggccaggucgaccugaacgacgcggugcaggcccucacggaccuggggcugaucuacaccgccaaguaccccaacaccagcgaccucgaccgccugacccagucccaccccauccugaacaugaucgacacgaagaaguccagccucaacaucuccggcuacaacuucagccugggcgccgccgugaaggcgggggccugcaugcuggacggcgggaacaugcucgagaccaucaaggucagcccccagaccauggacggcauccucaagagcauccugaaggugaagaaggcccugggcauguucaucuccgacgccccgggggagcggaaccccuacgagaacauccuguacaagaucugccugagcggcgacggguggcccuacaucgccucccgcaccagcaucacgggccgggcgugggagaacaccguggucgaccucgaguccgacgggaagccccagaaggccggcagcaacggcuccaacaagagccugcaguccgccggguucaccgccggccugaccuacagccagcucaugacgcugaaggacgccaugcugcagcuggacccgaacgcgaagaccuggauggacaucgaggggcgccccgaggaccccguggagaucgcccucuaccagcccuccagcggcugcuacauccacuucuuccgggagccgaccgaccugaagcaguucaagcaggacgccaaguacucccacgggaucgacgugaccgaccuguucgccgcccagcccggccucacgagcgcggucaucgacgcccugccccgcaacauggugaucacgugccagggcuccgacgacauccgcaagcuguucgagagccaggggcggaaggacaucaagcucaucgacaucgcccugagcaagaccgacucccgcaaguacgagaacgccgugugggaccaguacaaggaccugugccacaugcacaccggcaucgucguggagaagaagaagcgcgggggcaaggaggagaucaccccgcacugcgcgcucauggacugcaucauguucgacgccgccgucagcgggggccugaacaccuccgugcugcgggccgugcucccccgggacauggucuuccgcaccagcacgccccggguggugcugugaggacuagucccuguucccagagcccacuuuuuuuucuuuuuuugaaauaaaauagccugucuuucagaucucaaaggcucuuuucagagccaccaaaaaaaaaaaaaaaaaaaaaaaaaaaaaaaaaaaaaaaaaaaaaaaaaaaaaaaaaaaaaaaaagaauu

SEQ ID NO: 18138 - RNA, 2014 nt, Artificial Sequence
  mRNA product Design a-1 (hSL-A64-N5) comprising derived and/or modified sequence from LASV(Josiah;Clade IV)__NP_694869__SP-HsPLAT_NP(2-569) (opt4)
aggagagucccgcagucggcguccagcggcucugcuuguucgugugugugucguugcaggccuuauucaagcuuaccauggacgccaugaagagaggccugugcugcgugcugcugcugugcggcgccguguucgugagccccagcgccagcaaggagaucaagagcuuccuguggacccagagccugagaagagagcugagcggcuacugcagcaacaucaagcugcagguggugaaggacgcccaggcccugcugcacggccuggacuucagcgaggugagcaacgugcagagacugaugagaaaggagagaagagacgacaacgaccugaagagacugagagaccugaaccaggccgugaacaaccugguggagcugaagagcacccagcagaagagcauccugagagugggcacccugaccagcgacgaccugcugauccuggccgccgaccuggagaagcugaagagcaaggugaucagaaccgagagaccccugagcgccggcguguacaugggcaaccugagcagccagcagcuggaccagagaagagcccugcugaacaugaucggcaugagcggcggcaaccagggcgccagagccggcagagacggcguggugagagugugggacgugaagaacgccgagcugcugaacaaccaguucggcaccaugcccagccugacccuggccugccugaccaagcagggccagguggaccugaacgacgccgugcaggcccugaccgaccugggccugaucuacaccgccaaguaccccaacaccagcgaccuggacagacugacccagagccaccccauccugaacaugaucgacaccaagaagagcagccugaacaucagcggcuacaacuucagccugggcgccgccgugaaggccggcgccugcaugcuggacggcggcaacaugcuggagaccaucaaggugagcccccagaccauggacggcauccugaagagcauccugaaggugaagaaggcccugggcauguucaucagcgacacccccggcgagagaaaccccuacgagaacauccuguacaagaucugccugagcggcgacggcuggcccuacaucgccagcagaaccagcaucaccggcagagccugggagaacaccgugguggaccuggagagcgacggcaagccccagaaggccgacagcaacaacagcagcaagagccugcagagcgccggcuucaccgccggccugaccuacagccagcugaugacccugaaggacgccaugcugcagcuggaccccaacgccaagaccuggauggacaucgagggcagacccgaggaccccguggagaucgcccuguaccagcccagcagcggcugcuacauccacuucuucagagagcccaccgaccugaagcaguucaagcaggacgccaaguacagccacggcaucgacgugaccgaccuguucgccacccagcccggccugaccagcgccgugaucgacgcccugcccagaaacauggugaucaccugccagggcagcgacgacaucagaaagcugcuggagagccagggcagaaaggacaucaagcugaucgacaucgcccugagcaagaccgacagcagaaaguacgagaacgccgugugggaccaguacaaggaccugugccacaugcacaccggcguggugguggagaagaagaagagaggcggcaaggaggagaucaccccccacugcgcccugauggacugcaucauguucgacgccgccgugagcggcggccugaacaccagcgugcugagagccgugcugcccagagacaugguguucagaaccagcacccccagaguggugcugugaggacuagucccuguucccagagcccacuuuuuuuucuuuuuuugaaauaaaauagccugucuuucagaucucaaaggcucuuuucagagccaccaaaaaaaaaaaaaaaaaaaaaaaaaaaaaaaaaaaaaaaaaaaaaaaaaaaaaaaaaaaaaaaaagaauu

SEQ ID NO: 18139 - RNA, 2014 nt, Artificial Sequence
  mRNA product Design a-1 (hSL-A64-N5) comprising derived and/or modified sequence from LASV(LP;Clade I)__AAF86702__SP-HsPLAT_NP(2-569) (opt4)
aggagagucccgcagucggcguccagcggcucugcuuguucgugugugugucguugcaggccuuauucaagcuuaccauggacgccaugaagagaggccugugcugcgugcugcugcugugcggcgccguguucgugagccccagcaacagcaaggagaucaagagcuuccuguggacccagagccugagaagagagcugagcggcuacugcagcaacaucaagcugcagguggugaaggacgcccaggcccugcugcacggccuggacuucagcgaggugagcaacgugcagagacugaugagaaagcagaagagagacgacgccgaccugaagagacugagagaccugaaccaggccgugaacaaccugguggagcugaagagcacccagcagaagaacgugcugagagugggcacccugagcagcgacgaccugaucacccuggccgccgaccuggagaagcugaagagcaaggugaucagaaccgagagaccccugagcagcggcguguacaugggcaaccugagcagccagcagcuggaccagagaagagcccugcugagcaugaucggcaugagcggcggcccccagggcaacagaaccggcggcgacggcguggugagagugugggacgugaagaacgccgagcugcugaacaaccaguucggcaccaugcccagccugacccuggccugccugaccaagcagggccagguggaccugaacgacgccgugcaggcccugaccgaccugggccugaucuacaccgccaaguaccccaacagcagcgaccuggacaugcugacccagagccaccccauccugggcaugguggacaccaagaagagcagccugaacaucagcggcuacaacuucagccugggcgccgccgugaaggccggcgccugcaugcuggacggcggcaacaugcuggagaccaucaaggugagcccccagaccauggacggcauccugaagagcauccugaaggugaagagaagccugggcauguucaucagcgacacccccggcgagagaaaccccuacgagaacauccuguacaagaucugccugagcggcgagggcuggcccuacaucgccagcagaaccagcaucaccggcagagccugggagaacacccugguggaccuggagagcgacaacaagccccccaagcugaacagcgccggcagcaacaagagccugcaggccgccggccugaacgccggccugaccuacagccagcugaugacccugaaggacugcaugcugcagcuggaccccagcagcaagaccuggaucgacaucgagggcagacccgaggaccccguggagaucgcccuguuccagcccagcagcggcugcuacauccacuucuucagagagcccaccgaccugaagcaguucaagcaggacgccaaguacagccacggcaucgacgugaccgaccuguucagcacccagcccggccugaccagcgccgugaucgaggcccugcccagaaacauggugcugaccugccagggcagcgacgacaucaagaagcugcuggagagccagggcagaagagacaucaagcugaucgacaucagccugagcaaggccgacagcagaaaguucgagaacgccgugugggaccaguacaaggaccugugccacaugcacaccggcguggugguggagaagaagaagagaggcggcaaggaggagaucaccccccacugcgcccugcuggacugcaucauguucgacgccgccaccaccggcagccugaacaucaccacccugagagccgugcugcccagagacaugguguucagaaccagcacccccaagguggugcugugaggacuagucccuguucccagagcccacuuuuuuuucuuuuuuugaaauaaaauagccugucuuucagaucucaaaggcucuuuucagagccaccaaaaaaaaaaaaaaaaaaaaaaaaaaaaaaaaaaaaaaaaaaaaaaaaaaaaaaaaaaaaaaaaagaauu

SEQ ID NO: 18140 - RNA, 2014 nt, Artificial Sequence
  mRNA product Design a-1 (hSL-A64-N5) comprising derived and/or modified sequence from LASV(803213;Clade II)__AAF86704__SP-HsPLAT_NP(2-569) (opt4)
aggagagucccgcagucggcguccagcggcucugcuuguucgugugugugucguugcaggccuuauucaagcuuaccauggacgccaugaagagaggccugugcugcgugcugcugcugugcggcgccguguucgugagccccagcgccagcaaggaggugaagagcuuccuguggacccagagccugagaagagagcugagcggcuacugcagcaacaucaagcugcagguggugaaggacgcccaggcccugcugcacggccuggacuucagcgaggugaacaacgugcagagacugaugagaaagcagaagagagacgacggcgaccugaagagacugagagaccugaaccaggccgugaacaaccugguggagcugaagagcacccagcagaagagcauccugagagugggcacccugaccagcgacgaccugcugacccuggccgccgaccuggagaagcugaagagcaaggugaucagaaccgagagaccccugagcagcggcguguacaugggcaaccugagcacccagcagcuggagcagagaagagcccugcugaacaugaucggcauggugggcggcgcccagggcacccagcccggcagagacggcguggugagagugugggacgugaagaaccccgaccugcugaacaaccaguucggcaccaugcccagccugacccuggccugccugaccaagcagggccagguggaccugaacgacgccgugcuggcccugaccgaccugggccugaucuacaccgccaaguaccccaacagcagcgaccuggacagacugagccagagccaccccauccugaacaugguggacaccaagaagagcagccugaacaucagcggcuacaacuucagccugggcgccgccgugaaggccggcgccugcaugcuggacggcggcaacaugcuggagaccaucaaggugaccccccagaccauggacggcauccugaagagcauccugaaggugaagagaagccugggcauguucgugagcgacacccccggcgagagaaaccccuacgagaacauccuguacaagaucugccugagcggcgacggcuggcccuacaucgccagcagaaccagcaucgugggcagagccugggagaacaccaccguggaccuggagagcgacggcaagccccagaaggugggcaccgccggcagcaacaagagccugcagagcgccggcuuccccaccggccugaccuacagccagcugaugacccugaaggacagcaugaugcagcuggaccccagcgccaagaccuggaucgacaucgagggcagacccgaggaccccguggagaucgcccuguaccagcccaugagcggcugcuacauccacuucuucagagagcccaccgaccugaagcaguucaagcaggacgccaaguacagccacggcaucgacguggccgaccuguuccccgcccagcccggccugaccagcgccgugaucgaggcccugcccagaaacauggugcugaccugccagggcagcgacgacaucaagaagcugcuggacagccagggcagaagagacaucaagcugaucgacaucagccugagcaagguggacagcagaaaguucgagaacgccgugugggaccagugcaaggaccugugccacaugcacaccggcguggugguggagaagaagaagagaggcggcaaggaggagaucaccccccacugcgcccugauggacugcaucauguucgacgccgccgugagcggcggccugaacauccccgugcugagagccgugcugcccagagacaugguguucagaaccagcagccccaagguggugcugugaggacuagucccuguucccagagcccacuuuuuuuucuuuuuuugaaauaaaauagccugucuuucagaucucaaaggcucuuuucagagccaccaaaaaaaaaaaaaaaaaaaaaaaaaaaaaaaaaaaaaaaaaaaaaaaaaaaaaaaaaaaaaaaaagaauu

SEQ ID NO: 18141 - RNA, 2017 nt, Artificial Sequence
  mRNA product Design a-1 (hSL-A64-N5) comprising derived and/or modified sequence from LASV(GA391;Clade III)__CAA36646__SP-HsPLAT_NP(2-570) (opt4)
aggagagucccgcagucggcguccagcggcucugcuuguucgugugugugucguugcaggccuuauucaagcuuaccauggacgccaugaagagaggccugugcugcgugcugcugcugugcggcgccguguucgugagccccagcgccagcaaggaggugagaagcuuccuguggacccagagccugagaagagagcugagcggcuacugcagcaacaucaagcugcagguggugaaggacgcccaggcccugcugcacggccuggacuucagcgaggugagcaacgugcagagacugaugagaaagcagaagagagacgacggcgaccugaagagacugagagaccugaaccaggccgugaacaaccugguggagcugaagagcacccagcagaagagcgugcugagagugggcacccugagcagcgacgaccugcugauccuggccgccgaccuggagaagcugaagagcaaggugaccagaaccgagagaccccugagcagcggcguguacaugggcaaccugagcagccagcagcuggaccagagaagagcccugcugaacaugaucggcaugaccggcgugagcggcggcggcaagggcgccagcgacggcaucgugagagugugggacgugaagaacgccgagcugcugaacaaccaguucggcaccaugcccagccugacccuggccugccugaccaagcagggccagguggaccugaacgacgccgugcaggcccugaccgaccugggccugaucuacaccgccaaguaccccaacagcagcgaccuggacagacugagccagagccaccccauccugaacaugaucgacaccaagaagagcagccugaacaucagcggcuacaacuucagccugggcgccgccgugaaggccggcgccugcaugcuggacggcggcaacaugcuggagaccaucaaggugagcccccagaccauggacggcauccugaagagcauccugaaggugaagaagagccugggcauguucgugagcgacacccccggcgagagaaaccccuacgagaacauccuguacaagaucugccugagcggcgacggcuggcccuacaucgccagcagaaccagcaucgugggcagagccugggagaacaccgugguggaccuggagcaggacaacaagccccagaagaucggcaacggcggcagcaacaagagccugcagagcgccggcuucgccgccggccugaccuacagccagcugaugacccugaaggacuucaagugcuucaaccugauccccaacgccaagaccuggauggacaucgagggcagacccgaggaccccguggagaucgcccuguaccagcccagcagcggcugcuacgugcacuucuucagagagcccaccgaccugaagcaguucaagcaggacgccaaguacagccacggcaucgacgugaccgaccuguucgccgcccagcccggccugaccagcgccgugaucgaggcccugcccagaaacauggugaucaccugccagggcagcgaggacaucagaaagcugcuggagagccagggcagaagagacaucaagcugaucgacaucacccugagcaaggccgacagcagaaaguucgagaacgccgugugggaccaguucaaggaccugugccacaugcacaccggcguggugguggagaagaagaagagaggcggcaaggaggagaucaccccccacugcgcccugauggacugcaucauguucgacgccgccgugagcggcggccuggacgccaaggugcugagaguggugcugcccagagacaugguguucagaaccagcacccccaagguggugcugugaggacuagucccuguucccagagcccacuuuuuuuucuuuuuuugaaauaaaauagccugucuuucagaucucaaaggcucuuuucagagccaccaaaaaaaaaaaaaaaaaaaaaaaaaaaaaaaaaaaaaaaaaaaaaaaaaaaaaaaaaaaaaaaaagaauu

SEQ ID NO: 18142 - RNA, 2014 nt, Artificial Sequence
  mRNA product Design a-1 (hSL-A64-N5) comprising derived and/or modified sequence from LASV(AV;Clade V)__CCA30315__SP-HsPLAT_NP(2-569) (opt4)
aggagagucccgcagucggcguccagcggcucugcuuguucgugugugugucguugcaggccuuauucaagcuuaccauggacgccaugaagagaggccugugcugcgugcugcugcugugcggcgccguguucgugagccccagcgccagcaaggaggugaagagcuuccuguggacccagagccugagaagagagcugagcggcuacugcagcaacaucaagcugcagguggugaaggacgcccaggcccugcugcacggccuggacuucagcgaggugagcaacgugcagagacugaugagaaagcagagaagagacgacagcgaccugaagagacugagagaccugaaccaggccgugaacaaccugguggagcugaagagcacccagcagaagagcgugcugagagugggcacccugagcagcgacgaccugcugacccuggccgccgaccuggagaagcugaagagcaaggugaccagaaccgagagaccccugagcagcggcguguacaugggcaaccugagcagccagcagcuggaccagagaagagcccugcugaaccugaucggcaugaccaacggcagccagggcagccaggccggcagagacggcguggugagagugugggacgugaagaacgccgagcugcugaacaaccaguucggcaccaugcccagccugacccuggccugccugaccaagcagggccagguggaccugaacgacguggugcaggcccugaccgaccugggccugaucuacaccgccaaguaccccaacaccagcgaccuggacagacugacccagagccaccccauccugaacaugaucgacaccaagaagagcagccugaacaucagcggcuacaacuucagccugggcgccgccgugaaggccggcgccugcaugcuggacggcggcaacaugcuggagaccaucaaggugagcccccagagcauggacggcauccugaagagcauccugaaggugaagagagcccugggcauguucgugagcgacacccccggcgagagaaaccccuacgagaacauccuguacaagaucugccugagcggcgacggcuggcccuacaucgccagcagaaccagcaucgugggcagagccugggagaacaccgugguggaccuggagaccgacggcaagccccagaagaucggcagcggcaacagcaacaagagccugcagagcgccggcuucagcgccggccugaccuacagccagcugaugacccugaaggacgccaugcugcagcuggaccccaacgccaagaccuggauggacaucgagggcagacccgaggaccccguggagguggcccuguaccagcccaucagcggcugcuacauccacuucuucagagagcccaccgaccugaagcaguucaagcaggacgccaaguacagccacggcaucgacaucgccgaccuguucgccgcccagcccggccugaccagcgccgugaucgaggcccugcccagaaacauggugaucaccugccagggcagcgaggacaucaagaagcugcuggagagccagggcagaaaggacaucaagcugaucgacaucgcccugagcaagaucgacagcagaaaguucgagaacgccgugugggaccaguacaaggaccugugccacaugcacaccggcguggugguggagaagaagaagagaggcggcaaggaggagaucaccccccacugcgcccugauggacugcaucauguucgacgccgccgugagcggcggccugaacacccuggugcugagagccgugcugcccagagacaugguguucagaaccagcacccccagaguggugcugugaggacuagucccuguucccagagcccacuuuuuuuucuuuuuuugaaauaaaauagccugucuuucagaucucaaaggcucuuuucagagccaccaaaaaaaaaaaaaaaaaaaaaaaaaaaaaaaaaaaaaaaaaaaaaaaaaaaaaaaaaaaaaaaaagaauu

SEQ ID NO: 18143 - RNA, 2014 nt, Artificial Sequence
  mRNA product Design a-1 (hSL-A64-N5) comprising derived and/or modified sequence from LASV(Togo/2016/7082;Clade VI)__AMR44578__SP-HsPLAT_NP(2-569) (opt4)
aggagagucccgcagucggcguccagcggcucugcuuguucgugugugugucguugcaggccuuauucaagcuuaccauggacgccaugaagagaggccugugcugcgugcugcugcugugcggcgccguguucgugagccccagcaacagcaaggaggugaagagcuuccuguggacccagagccugagaagagagcugagcggcuacugcagcaacaucaagcugcagguggugaaggacgcccaggcccugcugcacggccuggacuucagcgaggugagcaacgugcagagacugaugagaaagcagaagagagacgacggcgaccugaagagacugagagaccugaaccaggccgugaacaaccugguggagcugaagagcgugcagcagaagagcauccugagagugggcacccugaccagcgacgaccugcugacccuggccgccgaccuggagaagcugaagagcaaggugaccagaaccgagagaccccugagcagcggcguguacaugggcaaccugagcagccagcagcuggaccagagaagagcccugcugagcaugaucggcaugagcggcggcaaccagaacagccagcccaagggcgacggcguggugagagugugggacgugaagaacgccgaccugcugaacaaccaguucggcaccaugcccagccugacccuggccugccugaccaagcagggccagguggaccugaacgacgccgugcaggcccugaccgaccugggccugaucuacaccgccaaguaccccaacagcagcgaccuggacagacugagccagagccaccccauccugaacaugaucgacaccaagaagagcagccugaacaucagcggcuacaacuucagccugggcgccgccaucaagaccggcgccugcaugcuggacggcggcaacaugcuggagaccaucaaggugaccccccagaccauggacggcauccugaagagcauccugaaggugaagagaagccugggcauguucaucagcgacacccccggcgagagaaaccccuacgagaacauccuguacaagaucugccugagcggcgacggcuggcccuacaucgccagcagaaccgccaucaucggcagagccugggagaacaccgugguggaccuggagagcgacagcaagccccagaagaucggcagcaacggcagcaacaagagccugcagagcgccggcuucgcccccggccugaccuacagccagcugaugacccugaaggacagcaugcugcagcuggaccccaacgccaagaccuggaucgacaucgagggcagacccgaggaccccguggagguggcccuguuccagcccaucagcggcugcuacauccacuucuucagagagcccaccgaccugaagcaguucaagcaggacgccaaguacagccacggcaucgacgugaccgaccuguucgccgcccagcccggccugaccagcgccgugaucgaggcccugcccagaaacauggugcugaccugccagggcagcgacgacaucaagaagcugcuggacagccagggcagaagagacaucaagcugaucgacgugagccugaacaagaucgacagcagaaaguucgagaacgccgugugggaccaguacaaggaccugugccacaugcacaccggcguggugguggagaagaagaagaagggcggcaaggaggagaucaccccccacugcgcccugcuggacugcaucauguucgacgccgccgugagcggcggccugaacgccaccgugcugagagccgugcugcccagagacaugguguucagaaccagcagccccaagguggugcugugaggacuagucccuguucccagagcccacuuuuuuuucuuuuuuugaaauaaaauagccugucuuucagaucucaaaggcucuuuucagagccaccaaaaaaaaaaaaaaaaaaaaaaaaaaaaaaaaaaaaaaaaaaaaaaaaaaaaaaaaaaaaaaaaagaauu

SEQ ID NO: 18144 - RNA, 2014 nt, Artificial Sequence
  mRNA product Design a-1 (hSL-A64-N5) comprising derived and/or modified sequence from LASV(KAK-428;Clade n.d. (VII))__ANH09741__SP-HsPLAT_NP(2-569) (opt4)
aggagagucccgcagucggcguccagcggcucugcuuguucgugugugugucguugcaggccuuauucaagcuuaccauggacgccaugaagagaggccugugcugcgugcugcugcugugcggcgccguguucgugagccccagcaacagcaaggaggugaagagcuuccuguggacccagagccugagaagagagcugagcggcuacugcaccaacaucaagcugcagguggugaaggacgcccaggcccugcugcacggccuggacuucagcgaggugagcaacgugcagagacugaugagaaagcagaagagagacgacaacgaccugaagagacugagagaccugaaccaggccgugaacaaccugguggagcugaagagcgugcagcagaagagcgugcugaaggugggcacccugaacagcgacgaccugcugacccuggccgccgaccuggagaagcugaagagcaagguggugagaaccgagagaccccugagcagcggcguguacaugggcaaccugagcagccagcagcuggaccagagaagagcccugcugaacaugaucggcauggccggcggcagccagggcaaccagcccagcagagacggcguggugagagugugggacgugaagaacgccgaccugcugaacaaccaguucggcaccaugcccagccugacccuggccugccugaccaagcagggccagguggaccugaacgacguggugcuggcccugaccgaccugggccugaucuacaccgccaaguaccccaacagcagcgaccuggacagacugagccagaaccaccccgugcugaacaugaucgacgugaacaagagcagccugaacaucagcggcuacaacuucagccugggcgccgccgugaaggccggcgccugcaugcuggacggcggcaacaugcuggagaccaucaagaucagcccccagaccguggacggcauccugaagagcauccugaaggugaagagagcccugggcauguucgugagcgacacccccggcgagagaaaccccuacgagaacauccuguacaaggugugccugagcggcaacggcuggcccuacaucgccagcagaaccagcaucgugggcagagccugggagaacaccgugguggaccuggagagcaacaagaaccagcccaaggugggcaacaacggcagcaacaagaugcugcagagcagcggcuucgccaccggccugaccuacagccagcugaugacccugagagacagcaugcugcagcuggaccccaccgccaagaccuggaucgacaucgagggcagacccgaggaccccguggagcuggcccuguuccagcccagcagcggcugcuacauccacuucuucagagagcccaccgaccugaagcaguucaagcaggacgccaaguacagccacggcaucgacgugaacgaccuguucagcgcccagcccggccugaccagcgccgugcuggaggcccugcccagaaacauggugcugaccugccagggcagcgacgacaucagaaagcugcuggacagccaggacagaaaggacaucaagcugaucgacaucagccugagcaaggccgacgccagaaaguucgagaacgacgugugggaccaguucaaggaccugugccacaugcacaccggcaucgugguggagaagaagaagaagggcggcaagcaggagaugaccccccacugcgcccugcuggacugcaucauguucgacgccgccgugagcggcggccugaacgugcccacccugagagccgugcugcccaccgacaugguguucagaaccaucaccaccaagguggugcugugaggacuagucccuguucccagagcccacuuuuuuuucuuuuuuugaaauaaaauagccugucuuucagaucucaaaggcucuuuucagagccaccaaaaaaaaaaaaaaaaaaaaaaaaaaaaaaaaaaaaaaaaaaaaaaaaaaaaaaaaaaaaaaaaagaauu

SEQ ID NO: 18145 - RNA, 2014 nt, Artificial Sequence; identical to SEQ ID NO: 18139
  mRNA product Design a-1 (hSL-A64-N5) comprising derived and/or modified sequence from LASV(Pinneo-NIG-1969;Clade I)__AIT17837__SP-HsPLAT_NP(2-569) (opt4)

SEQ ID NO: 18146 - RNA, 2014 nt, Artificial Sequence
  mRNA product Design a-1 (hSL-A64-N5) comprising derived and/or modified sequence from LASV(ISTH0009-NIG-2011;Clade II)__AIT17405__SP-HsPLAT_NP(2-569) (opt4)
aggagagucccgcagucggcguccagcggcucugcuuguucgugugugugucguugcaggccuuauucaagcuuaccauggacgccaugaagagaggccugugcugcgugcugcugcugugcggcgccguguucgugagccccagcgugagcaaggaggugaagagcuuccuguggacccagagccugagaagagagcugagcggcuacugcagcaacaucaagcugcagguggugaaggacgcccaggcccugcugcacggccuggacuucagcgaggugagcaacgugcagagacugaugagaaagcagaagagagacgacagcgaccugaagagacugagagaccugaaccaggccgugaacaaccugguggagcugaagagcacccagcagaagagcauccugagagugggcacccugaccagcgacgaccugcugacccuggccgccgaccuggagaagcugaagagcaaggugaucagaaccgagagaccccugagcagcggcguguacaugggcaaccugagcacccagcagcuggagcagagaagagcccugcugaacaugaucggcauggugggcggcgcccagggcacccagcccggcagagacggcguggugagagugugggacgugaagaaccccgaccugcugaacaaccaguucggcaccaugcccagccugacccuggccugccugaccaagcagggccagguggaccugaacgacgccgugcuggcccugaccgaccugggccugaucuacaccgccaaguaccccaacagcagcgaccuggacagacugagccagagccaccccauccugaacaugguggacaucaagaagagcagccugaacaucagcggcuacaacuucagccugggcgccgccgugaaggccggcgccugcaugcuggacggcggcaacaugcuggagaccaucaaggugaccccccagaccauggacggcauccugaagagcauccugaaggugaagagaagccugggcauguucgugagcgacacccccggcgagagaaaccccuacgagaacauccuguacaagaucugccugagcggcgacggcuggcccuacaucgccagcagaaccagcaucgugggcagagccugggagaacaccaccguggaccuggagagcgacggcaagccccagaaggugggcagcgccggcagcaacaagagccugcagagcgccggcuuccccaccggccugaccuacagccagcugaugacccugaaggacagcaugaugcagcuggaccccagcgccaagaccuggaucgacaucgagggcagacccgaggaccccguggagaucgcccuguaccagcccaugagcggcugcuacauccacuucuucagagagcccaccgaccugaagcaguucaagcaggacgccaaguacagccacggcaucgacguggccgaccuguuccccgcccagcccggccugaccagcgccgugaucgaggcccugcccagaaacauggugcugaccugccagggcagcgacgacaucaagagacugcuggacagccagggcagaagagacaucaagcugaucgacaucgcccugagcaaggccgacagcagaagauucgagaacgccgugugggaccagugcaaggaccugugccacaugcacaccggcguggugguggagaagaagaagagaggcggcaaggaggagaucaccccccacugcgcccugauggacugcaucauguacgacgccgccgugagcggcggccugaacauccccgugcugagagccgugcugcccagagacaugguguucagaaccagcagccccaagguggugcugugaggacuagucccuguucccagagcccacuuuuuuuucuuuuuuugaaauaaaauagccugucuuucagaucucaaaggcucuuuucagagccaccaaaaaaaaaaaaaaaaaaaaaaaaaaaaaaaaaaaaaaaaaaaaaaaaaaaaaaaaaaaaaaaaagaauu

SEQ ID NO: 18147 - RNA, 2014 nt, Artificial Sequence
  mRNA product Design a-1 (hSL-A64-N5) comprising derived and/or modified sequence from LASV(ISTH2010-NIG-2012;Clade II)__AIT17483__SP-HsPLAT_NP(2-569) (opt4)
aggagagucccgcagucggcguccagcggcucugcuuguucgugugugugucguugcaggccuuauucaagcuuaccauggacgccaugaagagaggccugugcugcgugcugcugcugugcggcgccguguucgugagccccagcgccagcaaggaggugaagagcuuccuguggacccagagccugagaagagagcugagcggcuacugcagcaacaucaagcugcagguggugaaggacgcccaggcccugcugcacggccuggacuucagcgaggugagcaacgugcagagacugaugagaaagcagaagagagacgacagcgaccugaagagacugagagaccugaaccaggccgugaacaaccugguggagcugaagagcacccagcagaagagcauccugagagugggcacccugaccagcgacgaccugcugacccuggccgccgaccuggagaagcugaagagcaaggugaucagaaccgagagaccccugagcagcggcguguacaugggcaaccugagcacccagcagcuggagcagagaagagcccugcugaaccugaucggcauggugggcggcgcccagggcacccagcccggcagagacggcguggugagagugugggacgugaagaaccccgaccugcugaacaaccaguucggcaccaugcccagccugacccuggccugccugaccaagcagggccagguggaccugaacgacgccgugcuggcccugaccgaccugggccugaucuacaccgccaaguaccccaacagcagcgaccuggacagacugagccagagccaccccauccugaacaugguggacaccaagaagagcagccugaacaucagcggcuucaacuucagccugggcgccgccgugaaggccggcgccugcaugcuggacggcggcaacaugcuggagaccaucaaggugaccccccagaccauggacggcauccugaagagcauccugaaggugaagaagagccugggcauguucgugagcgacacccccggcgagagaaaccccuacgagaacauccuguacaagaucugccugagcggcgacggcuggcccuacaucgccagcagaaccagcaucgugggcagagccugggagaacaccaccguggaccuggagagcgacggcaagccccacaaggugggcaccgccggcagcaacaagagccugcagagcgccggcuuccccaccggccugaccuacagccagcugaugacccugaaggacagcaugaugcagcuggaccccagcgccaagaccuggaucgacaucgagggcagacccgaggaccccguggagaucgcccuguaccagcccaugagcggcugcuacauccacuucuucagagagcccaccgaccugaagcaguucaagcaggacgccaaguacagccacggcaucgacguggccgaccuguuccccgcccagcccggccugaccagcgccgugaucgaggcccugcccagaaacauggugcugaccugccagggcagcgacgacaucaagagacugcuggacagccagggcagaagagacaucaagcugaucgacaucgcccugagcaaggccgacagcagaagauucgagaacgccgugugggaccagugcaaggaccugugccacaugcacaccggcguggugguggagaagaagaagagaggcggcaaggaggagaucaccccccacugcgcccugauggacugcaucauguacgacgccgccgugagcggcggccugaacauccccgugcugagagccgugcugcccagagacaugguguucagaaccagcagccccaagguggugcugugaggacuagucccuguucccagagcccacuuuuuuuucuuuuuuugaaauaaaauagccugucuuucagaucucaaaggcucuuuucagagccaccaaaaaaaaaaaaaaaaaaaaaaaaaaaaaaaaaaaaaaaaaaaaaaaaaaaaaaaaaaaaaaaaagaauu

SEQ ID NO: 18148 - RNA, 2014 nt, Artificial Sequence
  mRNA product Design a-1 (hSL-A64-N5) comprising derived and/or modified sequence from LASV(Lassa virus/H.sapiens-wt/NGA/2015/ISTH_0543;Clade II)__AVO03640__SP-HsPLAT_NP(2-569) (opt4)
aggagagucccgcagucggcguccagcggcucugcuuguucgugugugugucguugcaggccuuauucaagcuuaccauggacgccaugaagagaggccugugcugcgugcugcugcugugcggcgccguguucgugagccccagcgccagcaaggaggugaagagcuuccuguggacccagagccugagaagagagcugagcggcuacugcagcaacaucaagcugcagguggugaaggacgcccaggcccugcugcacggccuggacuucagcgaggugagcaacgugcagagacugaugagaaagcagaagagagacgacagcgaccugaagagacugagagaccugaaccaggccgugaacaaccugguggagcugaagagcacccagcagaagagcauccugagagugggcacccugaccagcgacgaccugcugacccuggccgccgaccuggagaagcugaagagcaaggugaucagaaccgagagaccccugagcagcggcguguacaugggcaaccugagcacccagcagcuggagcagagaagagcccugcugaacaugaucggcauggugggcggcgcccagggcacccagcccggcagagacggcguggugagagugugggacgugaagaaccccgaccugcugaacaaccaguucggcaccaugcccagccugacccuggccugccugaccaagcagggccagguggaccugaacgacgccgugcuggcccugaccgaccugggccugaucuacaccgccaaguaccccaacagcagcgaccuggacagacugagccagagccaccccauccugaacaugguggacaccaagaagagcagccugaacaucagcggcuacaacuucagccugggcgccgccgugaaggccggcgccugcaugcuggacggcggcaacaugcuggagaccaucaaggugaccccccagaccauggacggcauccugaagagcauccugaaggugaagaagagccugggcauguucgugagcgacacccccggcgagagaaaccccuacgagaacauccuguacaagaucugccugagcggcgacggcuggcccuacaucgccagcagaaccagcaucgugggcagagccugggagaacaccaccguggaccuggagagcgacggcaagccccagaaggugggcagcgccggcagcaacaagagccugcagagcgccggcuuccccaccggccugaccuacagccagcugaugacccugaaggacagcaugaugcagcuggaccccagcgccaagaccuggaucgacaucgagggcagacccgaggaccccguggagaucgcccuguaccagcccaugagcggcugcuacauccacuucuucagagagcccaccgaccugaagcaguucaagcaggacgccaaguacagccacggcaucgacguggccgaccuguuccccgcccagcccggccugaccagcgccgugaucgaggcccugcccagaaacauggugcugaccugccagggcagcgacgacaucaagagacugcuggacagccagggcagaaaggacaucaagcugaucgacaucgcccugagcaaggccgacagcagaagauucgagaacgccgugugggaccagugcaaggaccugugccacaugcacaccggcguggugguggagaagaagaagagaggcggcaaggaggagaucaccccccacugcgcccugauggacugcaucauguacgacgccgccgugagcggcggccugaacauccccgugcugagagccgugcugcccagagacaugguguucagaaccagcagccccaagguggugcugugaggacuagucccuguucccagagcccacuuuuuuuucuuuuuuugaaauaaaauagccugucuuucagaucucaaaggcucuuuucagagccaccaaaaaaaaaaaaaaaaaaaaaaaaaaaaaaaaaaaaaaaaaaaaaaaaaaaaaaaaaaaaaaaaagaauu

SEQ ID NO: 18149 - RNA, 2014 nt, Artificial Sequence
  mRNA product Design a-1 (hSL-A64-N5) comprising derived and/or modified sequence from LASV(Lassa virus/H.sapiens-wt/NGA/2016/ISTH_0009;Clade II)__AVO03572__SP-HsPLAT_NP(2-569) (opt4)
aggagagucccgcagucggcguccagcggcucugcuuguucgugugugugucguugcaggccuuauucaagcuuaccauggacgccaugaagagaggccugugcugcgugcugcugcugugcggcgccguguucgugagccccagcgccagcaaggaggugaagagcuuccuguggacccagagccugagaagagagcugagcggcuacugcagcaacaucaagcugcagguggugaaggacgcccaggcccugcugcacggccuggacuucagcgaggugagcaacgugcagagacugaugagaaagcagaagagagacgacagcgaccugaagagacugagagaccugaaccaggccgugaacaaccugguggagcugaagagcacccagcagaagagcauccugagagugggcacccugaccagcgacgaccugcugacccuggccgccgaccuggagaagcugaagagcaaggugaucagaaccgagagaccccugagcagcggcguguacaugggcaaccugagcacccagcagcuggagcagagaagagcccugcugaacaugaucggcauggugggcggcgcccagggcacccagcccggcagagacggcguggugagagugugggacgugaagaaccccgaccugcugaacaaccaguucggcaccaugcccagccugacccuggccugccugaccaagcagggccagguggaccugaacgacgccgugcuggcccugaccgaccugggccugaucuacaccgccaaguaccccaacagcagcgaccuggacagacugagccagagccaccccauccugaacaugguggacaccaagaagagcagccugaacaucagcggcuacaacuucagccugggcgccgccgugaaggccggcgccugcaugcuggacggcggcaacaugcuggagaccaucaaggugaccccccagaccauggacggcauccugaagagcauccugaaggugaagaagagccugggcauguucgugagcgacacccccggcgagagaaaccccuacgagaacauccuguacaagaucugccugagcggcgacggcuggcccuacaucgccagcagaaccagcaucgugggcagagccugggagaacaccaccguggaccuggagagcgacggcaagccccagaaggugggcagcgccggcagcaacaagagccugcagagcgccggcuuccccaccggccugaccuacagccagcugaugacccugaaggacagcaugaugcagcuggaccccagcgccaagaccuggaucgacaucgagggcagacccgaggaccccguggagaucgcccuguaccagcccaugagcggcugcuacauccacuucuucagagagcccaccgaccugaagcaguucaagcaggacgccaaguacagccacggcaucgacguggccgaccuguuccccgcccagcccggccugaccagcgccgugaucgaggcccugcccagaaacauggugcugaccugccagggcagcgacgacaucaagagacugcuggacagccagggcagaagagacaucaagcugaucgacaucgcccugagcaaggccgacagcagaagauucgagaacgccgugugggaccagugcaaggaccugugccacaugcacaccggcguggugguggagaagaagaagagaggcggcaaggaggagaucaccccccacugcgcccugauggacugcaucauguacgacgccgccgugagcggcggccugaacauccccgugcugagagccgugcugcccagagacaugguguucagaaccagcagccccaagguggugcugugaggacuagucccuguucccagagcccacuuuuuuuucuuuuuuugaaauaaaauagccugucuuucagaucucaaaggcucuuuucagagccaccaaaaaaaaaaaaaaaaaaaaaaaaaaaaaaaaaaaaaaaaaaaaaaaaaaaaaaaaaaaaaaaaagaauu

SEQ ID NO: 18150 - RNA, 2014 nt, Artificial Sequence
  mRNA product Design a-1 (hSL-A64-N5) comprising derived and/or modified sequence from LASV(Lassa virus/H.sapiens-wt/NGA/2016/ISTH_0017;Clade II)__AVO03568__SP-HsPLAT_NP(2-569) (opt4)
aggagagucccgcagucggcguccagcggcucugcuuguucgugugugugucguugcaggccuuauucaagcuuaccauggacgccaugaagagaggccugugcugcgugcugcugcugugcggcgccguguucgugagccccagcgccagcaaggaggugaagagcuuccuguggacccagagccugagaagagagcugagcggcuacugcagcagcaucaagcugcagguggugaaggacgcccaggcccugcugcacggccuggacuucagcgaggugagcaacgugcagagacugaugagaaagcagaagagagacgacagcgaccugaagagacugagagaccugaaccaggccgugaacaaccugguggagcugaagagcacccagcagaagagcauccugagagugggcacccugaccagcgacgaccugcugacccuggccgccgaccuggagaagcugaagagcaaggugaucagaaccgagagaccccugagcagcggcguguacaugggcaaccugagcacccagcagcuggagcagagaagagcccugcugaacaugaucggcauggccggcggcgcccagggcacccagcccggcagagacggcguggugagagugugggacgugaagaaccccgaccugcugaacaaccaguucggcaccaugcccagccugacccuggccugccugaccaagcagggccagguggaccugaacgacgccgugcuggcccugaccgaccugggccugaucuacaccgccaaguaccccaacagcagcgaccuggacagacugagccagagccaccccauccugaacaugguggacaccaagaagagcagccugaacaucagcggcuacaacuucagccugggcgccgccgugaaggccggcgccugcaugcuggacggcggcaacaugcuggagaccaucaaggugaccccccagaccauggacggcauccugaagagcauccugaaggugaagagaagccugggcauguucgugagcgacgcccccggcgagagaaaccccuacgagaacauccuguacaagaucugccugagcggcgacggcuggcccuacaucgccagcagaaccagcaucgugggcagagccugggagaacaccaccguggaccuggagagcgacggcaagccccagaaggugggcgccaccggcagcaacaagagccugcagagcgccggcuuccccaccggccugaccuacagccagcugaugacccugaaggacagcaugaugcagcuggaccccagcgccaagaccuggaucgacaucgagggcagacccgaggaccccguggagguggcccuguaccagcccgugagcggcugcuacauccacuucuucagagagcccaccgaccugaagcaguucaagcaggacgccaaguacagccacggcaucgacguggccgaccuguuccccgcccagcccggccugaccagcgccgugaucgaggcccugcccagaaacauggugcugaccugccagggcagcgacgacaucaagaagcugcuggacagccagggcagaaaggacaucaagcugaucgacaucgcccugagcaaggccgacagcagaagauucgagaacgccgugugggaccagugcaaggaccugugccacaugcacaccggcguggugguggagaagaagaagagaggcggcaaggaggagaucaccccccacugcgcccugauggacugcaucauguacgacgccgccgugagcggcggccugaacauccccgugcugagagccgugcugcccagagacaugguguucagaaccagcagccccaagguggugcugugaggacuagucccuguucccagagcccacuuuuuuuucuuuuuuugaaauaaaauagccugucuuucagaucucaaaggcucuuuucagagccaccaaaaaaaaaaaaaaaaaaaaaaaaaaaaaaaaaaaaaaaaaaaaaaaaaaaaaaaaaaaaaaaaagaauu

SEQ ID NO: 18151 - RNA, 2014 nt, Artificial Sequence
  mRNA product Design a-1 (hSL-A64-N5) comprising derived and/or modified sequence from LASV(Lassa virus/H.sapiens-wt/NGA/2018/ISTH_0959;Clade II)__AVV65100__SP-HsPLAT_NP(2-569) (opt4)
aggagagucccgcagucggcguccagcggcucugcuuguucgugugugugucguugcaggccuuauucaagcuuaccauggacgccaugaagagaggccugugcugcgugcugcugcugugcggcgccguguucgugagccccagcgccagcaaggaggugaagagcuuccuguggacccagagccugagaagagagcugagcggcuacugcagcaacaucaagcugcagguggugaaggacgcccaggcccugcugcacggccuggacuucagcgaggugagcaacgugcagagacugaugagaaagcagaagagagacgacagcgaccugaagagacugagagaccugaaccaggccgugaacaaccugguggagcugaagagcacccagcagaagagcauccugagagugggcacccugaccagcgacgaccugcugacccuggccgccgaccuggagaagcugaagagcaaggugaucagaaccgagagaccccugagcagcggcguguacaugggcaaccugagcacccagcagcuggagcagagaagagcccugcugaaccugaucggcauggugggcggcgcccagggcacccagcccggcagagacggcguggugagagugugggacgugaagaaccccgaccugcugaacaaccaguucggcaccaugcccagccugacccuggccugccugaccaagcagggccagguggaccugaacgacguggugcuggcccugaccgaccugggccugaucuacaccgccaaguaccccaacagcagcgaccuggacagacugagccagagccaccccauccugaacaugguggacaccaagaagagcagccugaacaucagcggcuucaacuucagccugggcgccgccgugaaggccggcgccugcaugcuggacggcggcaacaugcuggagaccaucaaggugaccccccagaccauggacggcauccugaagagcauccugaaggugaagaagagccugggcauguucgugagcgacacccccggcgagagaaaccccuacgagaacauccuguacaagaucugccugagcggcgacggcuggcccuacaucgccagcagaaccagcaucgugggcagagccugggagaacaccaccguggaccuggagagcgacggcaagccccacaaggugggcaccgccggcagcaacaagagccugcagagcgccggcuuccccaccggccugaccuacagccagcugaugacccugaaggacagcaugaugcagcuggaccccagcgccaagaccuggaucgacaucgagggcagacccgaggaccccguggagaucgcccuguaccagcccaugagcggcugcuacauccacuucuucagagagcccaccgaccugaagcaguucaagcaggacgccaaguacagccacggcaucgacguggccgaccuguuccccgcccagcccggccugaccagcgccgugaucgaggcccugcccagaaacauggugcugaccugccagggcagcgacgacaucaagagacugcuggacagccagggcagaaaggacaucaagcugaucgacaucgcccugagcaagaccgacagcagaagauucgagaacgccgugugggaccagugcaaggaccugugccacaugcacaccggcguggugguggagaagaagaagagaggcggcaaggaggagaucaccccccacugcgcccugauggacugcaucauguacgacgccgccgugagcggcggccugaacauccccgugcugagagccgugcugcccagagacaugguguucagaaccagcagccccaagguggugcugugaggacuagucccuguucccagagcccacuuuuuuuucuuuuuuugaaauaaaauagccugucuuucagaucucaaaggcucuuuucagagccaccaaaaaaaaaaaaaaaaaaaaaaaaaaaaaaaaaaaaaaaaaaaaaaaaaaaaaaaaaaaaaaaaagaauu

SEQ ID NO: 18152 - RNA, 2014 nt, Artificial Sequence
  mRNA product Design a-1 (hSL-A64-N5) comprising derived and/or modified sequence from LASV(LASV003-NIG-2008;Clade II)__AIT17581__SP-HsPLAT_NP(2-569) (opt4)
aggagagucccgcagucggcguccagcggcucugcuuguucgugugugugucguugcaggccuuauucaagcuuaccauggacgccaugaagagaggccugugcugcgugcugcugcugugcggcgccguguucgugagccccagcgccagcaaggaggugaagagcuuccuguggacccagagccugagaagagagcugagcggcuacugcagcagcaucaagcugcagguggugaaggacgcccaggcccugcugcacggccuggacuucagcgaggugagcaacgugcagagacugaugagaaagcagaagagagacgacagcgaccugaagagacugagagaccugaaccaggccgugaacaaccugguggagcugaagagcacccagcagaagagcgugcugagagugggcacccugaccagcgacgaccugcugacccuggccgccgaccuggagaagcugaagagcaaggugaucagaaccgagagaccccugagcagcggcguguacaugggcaaccugagcgcccagcagcuggagcagagaagaacccugcugaacaugaucggcauggugggcggcgcccagggcacccagcccggcagagacggcguggugagagugugggacgugaagaaccccgaccugcugaacaaccaguucggcaccaugcccagccugacccuggccugccugaccaagcagggccagguggaccugaacgacguggugcuggcccugaccgaccugggccugaucuacaccgccaaguaccccaacagcagcgaccuggacagacugagccagagccaccccauccugagcaugguggacaccaagaagagcagccugaacaucagcggcuacaacuucagccugggcgccgccgugaaggccggcgccugcaugcuggacggcggcaacaugcuggagaccaucaaggugaccccccagaccauggacggcauccugaagagcauccugaaggugaagaagagccugggcauguucgugagcgacacccccggcgagagaaaccccuacgagaacauccuguacaagaucugccugagcggcgacggcuggcccuacaucgccagcagaaccagcaucgugggcagagccugggagaacaccaccguggaccuggagagcgacggcaagccccagaaggugggcaccgccggcagcaacaagagccugcagagcgccggcuuccccaccggccugaccuacagccagcugaugacccugaaggacagcaugaugcagcuggaccccagcgccaagaccuggaucgacaucgagggcagacccgaggaccccguggagaucgcccuguaccagcccaugagcggcugcuacauccacuucuucagagagcccaccgaccugaagcaguucaagcaggacgccaaguacagccacggcaucgacgugaccgaccuguuccccgcccagcccggccugaccagcgccgugaucgaggcccugcccagaaacauggugcugaccugccagggcagcgacgacaucaagagacugcuggacagccagggcagaagagacaucaagcugaucgacaucgcccugagcaaggccgacagcagaagauucgagaacgccgugugggaccagugcaaggaccugugccacaugcacaccggcguggugguggagaagaagaagagaggcggcaaggaggagaucaccccccacugcgcccugauggacugcaucauguacgacgccgccgugagcggcggccugaacauccccgugcugagagccgugcugcccagagacaugguguucagaaccagcagccccaagguggugcugugaggacuagucccuguucccagagcccacuuuuuuuucuuuuuuugaaauaaaauagccugucuuucagaucucaaaggcucuuuucagagccaccaaaaaaaaaaaaaaaaaaaaaaaaaaaaaaaaaaaaaaaaaaaaaaaaaaaaaaaaaaaaaaaaagaauu

SEQ ID NO: 18153 - RNA, 2014 nt, Artificial Sequence
  mRNA product Design a-1 (hSL-A64-N5) comprising derived and/or modified sequence from LASV(LASV035-NIG-2009;Clade II)__AIT17589__SP-HsPLAT_NP(2-569) (opt4)
aggagagucccgcagucggcguccagcggcucugcuuguucgugugugugucguugcaggccuuauucaagcuuaccauggacgccaugaagagaggccugugcugcgugcugcugcugugcggcgccguguucgugagccccagcgccagcaaggaggugaagagcuuccuguggacccagagccugagaagagagcugagcggcuacugcagcagcaucaagcugcagguggugaaggacgcccaggcccugcugcacggccuggacuucagcgaggugagcaacgugcagagacugaugagaaagcagaagagagacgacagcgaccugaagagacugagagaccugaaccaggccgugaacaaccugguggagcugaagagcacccagcagaagagcauccugagagugggcacccugaccagcgacgaccugcugacccuggccgccgaccuggagaagcugaagagcaaggugaucagaaccgagagaccccugagcagcggcguguacaugggcaaccugagcgcccagcagcuggagcagagaagagcccugcugaacaugaucggcauggugggcggcgcccagggcacccagcccggcagagacggcguggugagagugugggacgugaagaaccccgaccugcugaacaaccaguucggcaccaugcccagccugacccuggccugccugaccaagcagggccagguggaccugaacgacgccgugcuggcccugaccgaccugggccugaucuacaccgccaaguaccccaacagcagcgaccuggacagacugagccagagccaccccauccugaacaugguggacaccaagaagagcagccugaacaucagcggcuacaacuucagccugggcgccgccgugaaggccggcgccugcaugcuggacggcggcaacaugcuggagaccaucaaggugaccccccagaccauggacggcauccugaagagcauccugaaggugaagagaagccugggcauguucgugagcgacacccccggcgagagaaaccccuacgagaacauccuguacaagaucugccugagcggcgacggcuggcccuacaucgccagcagaaccagcaucgugggcagagccugggagaacaccaccguggaccuggagagcgacggcaagccccagaaggugggcaccaccggcagcaacaagagccugcagagcgccggcuuccccaccggccugaccuacagccagcugaugacccugaaggacagcaugaugcagcuggaccccagcgccaagaccuggaucgacaucgagggcagacccgaggaccccguggagaucgcccuguaccagcccaugagcggcugcuacauccacuucuucagagagcccaccgaccugaagcaguucaagcaggacgccaaguacagccacggcaucgacguggccgaccuguuccccgcccagcccggccugaccagcgccgugaucgaggcccugcccagaaacauggugcugaccugccagggcagcgacgacaucaagaagcugcuggacagccagggcagaagagacaucaagcugaucgacaucgcccugagcaaggccgacagcagaaaguucgagaacgccgugugggaccagugcaaggaccugugccacaugcacaccggcguggugguggagaagaagaagagaggcggcaaggaggagaucaccccccacugcgcccugauggacugcaucauguacgacgccgccgugagcggcggccugaacauccccgugcugagagccgugcugcccagagacaugguguucagaaccagcagccccaagguggugcugugaggacuagucccuguucccagagcccacuuuuuuuucuuuuuuugaaauaaaauagccugucuuucagaucucaaaggcucuuuucagagccaccaaaaaaaaaaaaaaaaaaaaaaaaaaaaaaaaaaaaaaaaaaaaaaaaaaaaaaaaaaaaaaaaagaauu

SEQ ID NO: 18154 - RNA, 2014 nt, Artificial Sequence
  mRNA product Design a-1 (hSL-A64-N5) comprising derived and/or modified sequence from LASV(LASV1000-NIG-2009;Clade II)__AIT17783__SP-HsPLAT_NP(2-569) (opt4)
aggagagucccgcagucggcguccagcggcucugcuuguucgugugugugucguugcaggccuuauucaagcuuaccauggacgccaugaagagaggccugugcugcgugcugcugcugugcggcgccguguucgugagccccagcgccagcaaggaggugaagagcuuccuguggacccagagccugagaagagagcugagcggcuacugcagcaacaucaagcugcagguggugaaggacgcccaggcccugcugcacggccuggacuucagcgaggugagcaacgugcagagacugaugagaaagcagaagagagacgacagcgaccugaagagacugagagaccugaaccaggccgugaacaaccugguggagcugaagagcacccagcagaagagcauccugagagugggcacccugaccagcgacgaccugcugacccuggccgccgaccuggagaagcugaagagcaaggugaucagaaccgagagaccccugagcagcggcguguacaugggcaaccugagcacccagcagcuggagcagagaagagcccugcugaacaugaucggcauggugggcggcgcccagggcacccagcccggcagagacggcguggugagagugugggacgugaagaaccccgaccugcugaacaaccaguucggcaccaugcccagccugacccuggccugccugaccaagcagggccagguggaccugaacgacguggugcuggcccugaccgaccugggccugaucuacaccgccaaguaccccaacagcagcgaccuggacagacugagccagagccaccccauccugaacaugguggacaccaagaagagcagccugaacaucagcggcuacaacuucagccugggcgccgccgugaaggccggcgccugcaugcuggacggcggcaacaugcuggagaccaucaaggugaccccccagaccauggacggcauccugaagagcauccugaaggugaagaagagccugggcauguucgugagcgacacccccggcgagagaaaccccuacgagaacauccuguacaagaucugccugagcggcgacggcuggcccuacaucgccagcagaaccagcaucgugggcagagccugggagaacaccaccguggaccuggagagcgacggcaagccccagaaggugggcaccgccggcagcaacaagagccugcagagcgccggcuuccccaccggccugaccuacagccagcugaugacccugaaggacagcaugaugcagcuggaccccagcgccaagaccuggaucgacaucgagggcagacccgaggaccccguggagaucgcccuguaccagcccgugagcggcugcuacauccacuucuucagagagcccaccgaccugaagcaguucaagcaggacgccaaguacagccacggcaucgacguggccgaccuguuccccgcccagcccggccugaccagcgccgugaucgaggcccugcccagaaacauggugcugaccugccagggcagcgacgacaucaagagacugcuggacagccagggcagaagagacaucaagcugaucgacaucgcccugagcaaggccgacagcagaagauucgagaacgccgugugggaccagugcaaggaccugugccacaugcacaccggcguggugguggagaagaagaagagaggcggcaaggaggagaucaccccccacugcgcccugauggacugcaucauguacgacgccgccgugagcggcggccugaacauccccgugcugagagccgugcugcccagagacaugguguucagaaccagcagccccaagguggugcugugaggacuagucccuguucccagagcccacuuuuuuuucuuuuuuugaaauaaaauagccugucuuucagaucucaaaggcucuuuucagagccaccaaaaaaaaaaaaaaaaaaaaaaaaaaaaaaaaaaaaaaaaaaaaaaaaaaaaaaaaaaaaaaaaagaauu

SEQ ID NO: 18155 - RNA, 2014 nt, Artificial Sequence
  mRNA product Design a-1 (hSL-A64-N5) comprising derived and/or modified sequence from LASV(LASV221-NIG-2010;Clade II)__AIT17625__SP-HsPLAT_NP(2-569) (opt4)
aggagagucccgcagucggcguccagcggcucugcuuguucgugugugugucguugcaggccuuauucaagcuuaccauggacgccaugaagagaggccugugcugcgugcugcugcugugcggcgccguguucgugagccccagcgccagcaaggaggugaagagcuuccuguggacccagagccugagaagagagcugagcggcuacugcagcagcaucaagcugcagguggugaaggacgcccaggcccugcugcacggccuggacuucagcgaggugagcaacgugcagagacugaugagaaagcagagaagagacgacagcgaccugaagagacugagagaccugaaccaggccgugaacaaccugguggagcugaagagcacccagcagaagagcauccugagagugggcacccugaccagcgacgaccugcugacccuggccgccgaccuggagaagcugaagagcaaggugaucagaaccgagagaccccugagcagcggcguguacaugggcaaccugagcacccagcagcuggagcagagaagagcccugcugaacaugaucggcauggugggcggcgcccagggcacccagcccggcagagacggcguggugagagugugggacgugaagaaccccgaccugcugaacaaccaguucggcaccaugcccagccugacccuggccugccugaccaagcagggccagguggaccugaacgacgccgugcuggcccugaccgaccugggccugaucuacaccgccaaguaccccaacagcagcgaccuggacagacugagccagagccaccccauccugaacaugguggacaccaagaagagcagccugaacaucagcggcuacaacuucagccugggcgccgccgugaaggccggcgccugcaugcuggacggcggcaacaugcuggagaccaucaaggugaccccccagaccguggacggcauccugaagagcauccugaaggugaagagaagccugggcauguucgugagcgacacccccggcgagagaaaccccuacgagaacauccuguacaagaucugccugagcggcgacggcuggcccuacaucgccagcagaaccagcaucgugggcagagccugggagaacaccaccguggaccuggagagcgacggcaagccccagaaggugggcaccgccggcagcaacaagagccugcagagcgccggcuuccccaccggccugaccuacagccagcugaugacccugaaggacagcaugaugcagcuggaccccagcgccaagaccuggaucgacaucgagggcagacccgaggaccccguggagaucgcccuguaccagcccaugagcggcugcuacauccacuucuucagagagcccaccgaccugaagcaguucaagcaggacgccaaguacagccacggcaucgacguggccgaccuguuccccgcccagcccggccugaccagcgccgugaucgaggcccugcccagaaacauggugcugaccugccagggcagcgacgacaucaagagacugcuggacagccagggcagaagagacaucaagcugaucgacaucgcccugagcaaggccgacagcagaaaguucgagaacgccgugugggaccagugcaaggaccugugccacaugcacaccggcguggugguggagaagaagaagagaggcggcaaggaggagaucaccccccacugcgcccugauggacugcaucauguacgacgccgccgugagcggcggccugaacauccccgugcugagagccgugcugcccagagacaugguguucagaaccagcagccccaagguggugcugugaggacuagucccuguucccagagcccacuuuuuuuucuuuuuuugaaauaaaauagccugucuuucagaucucaaaggcucuuuucagagccaccaaaaaaaaaaaaaaaaaaaaaaaaaaaaaaaaaaaaaaaaaaaaaaaaaaaaaaaaaaaaaaaaagaauu

SEQ ID NO: 18156 - RNA, 2014 nt, Artificial Sequence
  mRNA product Design a-1 (hSL-A64-N5) comprising derived and/or modified sequence from LASV(LASV237-NIG-2010;Clade II)__AIT17639__SP-HsPLAT_NP(2-569) (opt4)
aggagagucccgcagucggcguccagcggcucugcuuguucgugugugugucguugcaggccuuauucaagcuuaccauggacgccaugaagagaggccugugcugcgugcugcugcugugcggcgccguguucgugagccccagcgccagcaaggaggugaagagcuuccuguggacccagagccugagaagagagcugagcggcuacugcagcaacaucaagcugcagguggugaaggacgcccaggcccugcugcacggccuggacuucagcgaggugagcaacgugcagagacugaugagaaagcagaagagagacgacagcgaccugaagagacugagagaccugaaccaggccgugaacaaccugguggagcugaagagcacccagcagaagagcauccugagagugggcacccugaccagcgacgaccugcugacccuggccgccgaccuggagaagcugaagagcaaggugaucagaaccgagagaccccugagcagcggcguguacaugggcaaccugagcacccagcagcuggagcagagaagagcccugcugaacaugaucggcauggugggcggcgcccagggcacccagcccggcagagacggcguggugagagugugggacgugaagaaccccgaccugcugaacaaccaguucggcaccaugcccagccugacccuggccugccugaccaagcagggccagguggaccugaacgacgccgugcuggcccugaccgaccugggccugaucuacaccgccaaguaccccaacagcagcgaccuggacagacugagccagagccaccccauccugaacaugguggacaucaagaagagcagccugaacaucagcggcuacaacuucagccugggcgccgccgugaaggccggcgccugcaugcuggacggcggcaacaugcuggagaccaucaaggugaccccccagaccauggacggcauccugaagagcauccugaaggugaagagaagccugggcauguucgugagcgacacccccggcgagagaaaccccuacgagaacauccuguacaagaucugccugagcggcgacggcuggcccuacaucgccagcagaaccagcaucgugggcagagccugggagaacaccaccguggaccuggagagcgacggcaagccccagaaggugggcagcgccggcagcaacaagagccugcagagcgccggcuuccccaccggccugaccuacagccagcugaugacccugaaggacagcaugaugcagcuggaccccagcgccaagaccuggaucgacaucgagggcagacccgaggaccccguggagaucgcccuguaccagcccaugagcggcugcuacauccacuucuucagagagcccaccgaccugaagcaguucaagcaggacgccaaguacagccacggcaucgacguggccgaccuguuccccgcccagcccggccugaccagcgccgugaucgaggcccugcccagaaacauggugcugaccugccagggcagcgacgacaucaagagacugcuggacagccagggcagaagagacaucaagcugaucgacaucgcccugagcaaggccgacagcagaagauucgagaacgccgugugggaccagugcaaggaccugugccacaugcacaccggcguggugguggagaagaagaagagaggcggcaaggaggagaucaccccccacugcgcccugauggacugcaucauguacgacgccgccgugagcggcggccugaacauccccgugcugagagccgugcugcccagagacaugguguucagaaccagcagccccaagguggugcugugaggacuagucccuguucccagagcccacuuuuuuuucuuuuuuugaaauaaaauagccugucuuucagaucucaaaggcucuuuucagagccaccaaaaaaaaaaaaaaaaaaaaaaaaaaaaaaaaaaaaaaaaaaaaaaaaaaaaaaaaaaaaaaaaagaauu

SEQ ID NO: 18157 - RNA, 2014 nt, Artificial Sequence
  mRNA product Design a-1 (hSL-A64-N5) comprising derived and/or modified sequence from LASV(LASV253-NIG-2011;Clade II)__AIT17671__SP-HsPLAT_NP(2-569) (opt4)
aggagagucccgcagucggcguccagcggcucugcuuguucgugugugugucguugcaggccuuauucaagcuuaccauggacgccaugaagagaggccugugcugcgugcugcugcugugcggcgccguguucgugagccccagcgccagcaaggaggugaagagcuuccuguggacccagagccugagaagagagcugagcggcuacugcagcagcaucaagcugcagguggugaaggacgcccaggcccugcugcacggccuggacuucagcgaggugagcaacgugcagagacugaugagaaagcagaagagagacgacagcgaccugaagagacugagagaccugaaccaggccgugaacaaccugguggagcugaagagcacccagcagaagagcgugcugagagugggcacccugaccagcgacgaccugcugacccuggccgccgaccuggagaagcugaagagcaaggugaucagaaccgagagaccccugagcagcggcguguacaugggcaaccugagcacccagcagcuggagcagagaagagcccugcugaacaugaucggcauggugggcggcgcccagggcacccagcccggcagagacggcguggugagagugugggacgugaagaaccccgaccugcugaacaaccaguucggcaccaugcccagccugacccuggccugccugaccaagcagggccagguggaccugaacgacguggugcuggcccugaccgaccugggccugaucuacaccgccaaguaccccaacagcagcgaccuggacagacugagccagagccaccccauccugaacaugguggacaccaagaagagcagccugaacaucagcggcuacaacuucagccugggcgccgccgugaaggccggcgccugcaugcuggacggcggcaacaugcuggagaccaucaaggugaccccccagaccauggacggcauccugaagagcauccugaaggugaagaagagccugggcauguucgugagcgacacccccggcgagagaaaccccuacgagaacauccuguacaagaucugccugagcggcgacggcuggcccuacaucgccagcagaaccagcaucgugggcagagccugggagaacaccaccguggaccuggagagcgacggcaagccccagaaggugggcaccgccggcagcaacaagagccugcagagcgccggcuuccccaccggccugaccuacagccagcugaugacccugaaggacagcaugaugcagcuggaccccagcgccaagaccuggaucgacaucgagggcagacccgaggaccccguggagaucgcccuguaccagcccaugagcggcugcuacauccacuucuucagagagcccaccgaccugaagcaguucaagcaggacgccaaguacagccacggcaucgacgugaccgaccuguuccccgcccagcccggccugaccagcgccgugaucgaggcccugcccagaaacauggugcugaccugccagggcagcgacgacaucaagagacugcuggacagccagggcagaagagacaucaagcugaucgacaucgcccugagcaaggccgacagcagaagauucgagaacgccgugugggaccagugcaaggaccugugccacaugcacaccggcguggugguggagaagaagaagagaggcggcaaggaggagaucaccccccacugcgcccugauggacugcaucauguacgacgccgccgugagcggcggccugaacauccccgugcugagagccgugcugcccagagacaugguguucagaaccagcagccccaagguggugcugugaggacuagucccuguucccagagcccacuuuuuuuucuuuuuuugaaauaaaauagccugucuuucagaucucaaaggcucuuuucagagccaccaaaaaaaaaaaaaaaaaaaaaaaaaaaaaaaaaaaaaaaaaaaaaaaaaaaaaaaaaaaaaaaaagaauu

SEQ ID NO: 18158 - RNA, 2014 nt, Artificial Sequence
  mRNA product Design a-1 (hSL-A64-N5) comprising derived and/or modified sequence from LASV(LASV254-NIG-2011;Clade II)__AIT17675__SP-HsPLAT_NP(2-569) (opt4)
aggagagucccgcagucggcguccagcggcucugcuuguucgugugugugucguugcaggccuuauucaagcuuaccauggacgccaugaagagaggccugugcugcgugcugcugcugugcggcgccguguucgugagccccagcgccagcaaggaggugaagagcuuccuguggacccagagccugagaagagagcugagcggcuacugcagcagcaucaagcugcagguggugaaggacgcccaggcccugcugcacggccuggacuucagcgaggugagcaacgugcagagacugaugagaaagcagaagagagacgacagcgaccugaagagacugagagaccugaaccaggccgugaacaaccugguggagcugaagagcacccagcagaagagcgugcugagagugggcacccugaccagcgacgaccugcugacccuggccgccgaccuggagaagcugaagagcaaggugaucagaaccgagagaccccugagcagcggcguguacaugggcaaccugagcacccagcagcuggagcagagaagagcccugcugaacaugaucggcauggugggcggcgcccagggcacccagcccggcagagacggcguggugagagugugggacgugaagaaccccgaccugcugaacaaccaguucggcaccaugcccagccugacccuggccugccugaccaagcagggccagguggaccugaacgacgccgugcuggcccugaccgaccugggccugaucuacaccgccaaguaccccaacagcagcgaccuggacagacugagccagagccaccccauccugaacaugguggacaccaagaagagcagccugaacaucagcggcuacaacuucagccugggcgccgccgugaaggccggcgccugcaugcuggacggcggcaacaugcuggagaccaucaaggugaccccccagaccauggacggcauccugaagagcauccugaaggugaagaagagccugggcauguucgugagcgacacccccggcgagagaaaccccuacgagaacauccuguacaagaucugccugagcggcgacggcuggcccuacaucgccagcagaaccagcaucgugggcagagccugggagaacaccaucguggaccuggagagcgacggcaagccccagaaggugggcaccgccggcagcaacaagagccugcagagcgccggcuuccccaccggccugaccuacagccagcugaugacccugaaggacagcaugaugcagcuggaccccagcgccaagaccuggaucgacaucgagggcagacccgaggaccccguggagaucgcccuguaccagcccaugagcggcugcuacauccacuucuucagagagcccaccgaccugaagcaguucaagcaggacgccaaguacagccacggcaucgacguggccgaccuguuccccgcccagcccggccugaccagcgccgugaucgaggcccugcccagaaacauggugcugaccugccagggcagcgacgacaucaagagacugcuggacagccagggcagaagagacaucaagcugaucgacaucgcccugagcaaggccgacagcagaagauucgagaacgccgugugggaccagugcaaggaccugugccacaugcacaccggcguggugguggagaagaagaagagaggcggcaaggaggagaucaccccccacugcgcccugauggacugcaucauguacgacgccgccgugagcggcggccugaacauccccgugcugagagccgugcugcccagagacaugguguucagaaccagcagccccaagguggugcugugaggacuagucccuguucccagagcccacuuuuuuuucuuuuuuugaaauaaaauagccugucuuucagaucucaaaggcucuuuucagagccaccaaaaaaaaaaaaaaaaaaaaaaaaaaaaaaaaaaaaaaaaaaaaaaaaaaaaaaaaaaaaaaaaagaauu

SEQ ID NO: 18159 - RNA, 2014 nt, Artificial Sequence
  mRNA product Design a-1 (hSL-A64-N5) comprising derived and/or modified sequence from LASV(Nig08-04;Clade II)__ADU56611__SP-HsPLAT_NP(2-569) (opt4)
aggagagucccgcagucggcguccagcggcucugcuuguucgugugugugucguugcaggccuuauucaagcuuaccauggacgccaugaagagaggccugugcugcgugcugcugcugugcggcgccguguucgugagccccagcgccagcaaggaggugaagagcuuccuguggacccagagccugagaagagagcugagcggcuacugcagcaacaucaagcugcagguggugaaggacgcccaggcccugcugcacggccuggacuucagcgaggugagcaacgugcagagacugaugagaaagcagaagagagacgacggcgaccugaagagacugagagaccugaaccaggccgugaacaaccugguggagcugaagagcacccagcagaagagcgugcugagagugggcacccugaccagcgacgaccugcugacccuggccgccgaccuggagaagcugaagagcaaggugaucagaaccgagagaccccugagcagcggcguguacaugggcaaccugagcacccagcagcuggagcagagaaaggcccugcugagcaugaucggcauggugggcggcgcccagggcacccagcccggcagagacggcguggugagagugugggacgugaagaaccccgaccugcugaacaaccaguucggcaccaugcccagccugacccuggccugccugaccaagcagggccagguggaccugaacgacgccgugcuggcccugaccgaccugggccugaucuacaccgccaaguaccccaacagcagcgaccuggacagacugagccagagccaccccauccugaacaugguggacaccaagaagagcagccugaacaucagcggcuacaacuucagccugggcgccgccgugaaggccggcgccugcaugcuggacggcggcaacaugcuggagaccaucaaggugaccccccagaccauggacggcauccugaagagcauccugaaggugaagagaagccugggcauguucgugagcgacacccccggcgagagaaaccccuacgagaacauccuguacaagaucugccugagcggcgacggcuggcccuacaucgccagcagaaccagcaucgugggcagagccugggagaacaccaccguggaccuggagagcgacggcaagccccagaaggugggcaccgccggcagcaacaagagccugcagagcgccggcuuccccaccggccugaccuacagccagcugaugacccugaaggacagcaugaugcagcuggaccccagcgccaagaccuggaucgacaucgagggcagacccgaggaccccguggagaucgcccuguaccagcccaugagcggcugcuacauccacuucuucagagagcccaccgaccugaagcaguucaagcaggacgccaaguacagccacggcaucgacgugaccgaccuguucagcgcccagcccggccugaccagcgccgugaucgaggcccugcccagaaacauggugcugaccugccagggcagcgacgacaucaagaagcugcuggacagccagggcagaagagacaucaagcugaucgacaucagccugaacaaggccgacagcagaagauucgagaacgccgugugggaccagugcaaggaccugugccacaugcacaccggcguggugguggagaagaagaagagaggcggcaaggaggagaucaccccccacugcgcccugauggacugcaucauguucgacgccgccgugagcggcggccugaacauccccauccugagagccgugcugcccagagacaugguguucagaaccagcagccccaagguggugcugugaggacuagucccuguucccagagcccacuuuuuuuucuuuuuuugaaauaaaauagccugucuuucagaucucaaaggcucuuuucagagccaccaaaaaaaaaaaaaaaaaaaaaaaaaaaaaaaaaaaaaaaaaaaaaaaaaaaaaaaaaaaaaaaaagaauu

SEQ ID NO: 18160 - RNA, 2017 nt, Artificial Sequence
  mRNA product Design a-1 (hSL-A64-N5) comprising derived and/or modified sequence from LASV(GA391;Clade III)__AAA46284__SP-HsPLAT_NP(2-570) (opt4)
aggagagucccgcagucggcguccagcggcucugcuuguucgugugugugucguugcaggccuuauucaagcuuaccauggacgccaugaagagaggccugugcugcgugcugcugcugugcggcgccguguucgugagccccagcgccagcaaggaggugagaagcugccuguggacccagagccugagaagagagcugagcggcuacugcagcaacaucaagcugcagguggugaaggacgcccaggcccugcugcacggccuggacuucagcgaggugagcaacgugcagagacugaugagaaagcagaagagagacgacggcgaccugaagagacugagagaccugaaccaggccgugaacaaccugguggagcugaagagcacccagcagaagagcgugcugagagugggcacccugagcagcgacgaccugcugauccuggccgccgaccuggagaagcugaagagcaaggugaccagaaccgagagaccccugagcagcggcguguacaugggcaaccugagcagccagcagcuggaccagagaagagcccugcugaacaugaucggcaugaccggcgugagcggcggcggcaagggcgccagcaacggcaucgugagagugugggacgugaagaacgccgagcugcugaacaaccaguucggcaccaugcccagccugacccuggccugccugaccaagcagggccagguggaccugaacgacgccgugcaggcccugaccgaccugggccugaucuacaccgccaaguaccccaacagcagcgaccuggacagacugagccagagccaccccauccugaacaugaucgacaccaagaagagcagccugaacaucagcggcuacaacuucagccugggcgccgccgugaaggccggcgccugcaugcuggacggcggcaacaugcuggagaccaucaaggugagcccccagaccauggacggcauccugaagagcauccugaaggugaagaagagccugggcauguucgugagcgacacccccggcgagagaaaccccuacgagaacauccuguacaagaucugccugagcggcgacggcuggagcuacaucgccagcagaaccagcaucgugggcagagccugggagaacaccgugguggaccuggagcaggacaacaagccccagaagaucggcaacggcggcagcaacaagagccugcagagcgccggcuucgccgccggccugaucuacagccagcugaugacccugaaggacuucaagugcuucaaccugauccccaacgccaagaccuggauggacaucgagggcagacccgaggaccccguggagaucgcccuguaccagcccagcagcggcugcuacgugcacuucuucagagagcccaccgaccugaagcaguucaagcaggacgccaaguacagccacggcagagacgugaccgaccuguucgccgcccagcccggccugaccagcgccgugaucgaggcccugcccagaaacauggugaucaccugccagggcagcgaggacaucagaaagcugcuggagagccagggcagaagagacaucaagcugaucgacaucacccugagcaaggccgacagcagaaaguucgagaacgccgugugggaccaguucaaggaccugugccacaugcacaccggcguggugguggagaagaagaagagaggcggcaaggaggagaucaccccccacugcgcccugauggacugcaucauguucgacgccgccgugagcggcggccuggacgccaaggugcugagaguggugcugcccagagacaugguguucagaaccagcacccccaagguggugcugugaggacuagucccuguucccagagcccacuuuuuuuucuuuuuuugaaauaaaauagccugucuuucagaucucaaaggcucuuuucagagccaccaaaaaaaaaaaaaaaaaaaaaaaaaaaaaaaaaaaaaaaaaaaaaaaaaaaaaaaaaaaaaaaaagaauu

SEQ ID NO: 18161 - RNA, 2014 nt, Artificial Sequence
  mRNA product Design a-1 (hSL-A64-N5) comprising derived and/or modified sequence from LASV(Nig08-A19;Clade III)__ADU56619__SP-HsPLAT_NP(2-569) (opt4)
aggagagucccgcagucggcguccagcggcucugcuuguucgugugugugucguugcaggccuuauucaagcuuaccauggacgccaugaagagaggccugugcugcgugcugcugcugugcggcgccguguucgugagccccagcgccagcaaggaggugaagagcuuccuguggacccagagccugagaagagagcugagcggcuacugcagcaacaucaagcugcagguggugaaggacgcccaggcccugcugcacggccuggacuucagcgaggugagcaacgugcagagacugaugagaaagcagaagagagacgacggcgaccugaagagacugagagaccugaaccaggccgugaacaaccugguggagcugaagagcacccagcagaagagcgugcugagagugggcacccugagcagcgacgaccugcuggugcuggccgccgaccuggagaagcugaagagcaagguggugagaaccgagagaccccugagcagcggcaucuacaugggcaaccugagcagccagcagcuggaccagagaaaggcccugcugaacaugaucggcaugaccggcggcaacggcggcagaaacaccaccagcgacggcaucgugagagugugggacgugaagaacgccgagcugcugaacaaccaguucggcaccaugcccagccugacccuggccugccugaccaagcagggccagguggaccugaacgacgccgugcaggcccugaccgaccugggccugaucuacaccgccaaguaccccaacagcagcgaccuggacagacuggcccagagccaccccauccugaacaugaucgacaccaagaagagcagccugaacaucagcggcuacaacuucagccugggcgccgccgugaaggccggcgccugcaugcuggacggcggcaacaugcuggagaccaucaaggugagcccccagaccauggacggcauccugaagagcauccugaaggugaagagaagccugggcauguucaucagcgacacccccggcgagagaaaccccuacgagaacauccuguacaagaucugccugagcggcgacggcuggcccuacaucgccagcagaaccagcaucgugggcagagccugggagaacaccgugguggaccuggagagcgacaacaagccccagaagaccggcaacggcggcagcaacaagagccugcagagcgccggcuucgccgccggccugaccuacagccagcugaugacccugaaggacagcaugcugcagcuggaccccaacgccaagaccuggauggacaucgagggcagacccgaggaccccguggagaucgcccuguaccagcccagcagcggcugcuacauccacuucuucagagagcccaccgaccugaagcaguucaagcaggacgccaaguacagccacggcaucgacgugaccgaccuguucgccgcccagcccggccugaccagcgccgugaucgaggcccugcccagaaacauggugaucaccugccagggcagcgaggacaucagaaagcugcuggagagccagggcagaagagacaucaagcugaucgacaucagccugagcaagguggacagcagaaaguucgagaacgccgugugggaccaguucaaggaccugugccacaugcacaccggcaucgugguggagaagaagaagagaggcggcaaggaggagaucaccccccacugcgcccugauggacugcaucauguucgacgccgccgugagcggcggcguggacgccaaggugcugagagccgugcugcccagagacaugguguucagaaccagcacccccaagguggugcugugaggacuagucccuguucccagagcccacuuuuuuuucuuuuuuugaaauaaaauagccugucuuucagaucucaaaggcucuuuucagagccaccaaaaaaaaaaaaaaaaaaaaaaaaaaaaaaaaaaaaaaaaaaaaaaaaaaaaaaaaaaaaaaaaagaauu

SEQ ID NO: 18162 - RNA, 2014 nt, Artificial Sequence
  mRNA product Design a-1 (hSL-A64-N5) comprising derived and/or modified sequence from LASV(G1180-SLE-2010;Clade IV)__AIT17169__SP-HsPLAT_NP(2-569) (opt4)
aggagagucccgcagucggcguccagcggcucugcuuguucgugugugugucguugcaggccuuauucaagcuuaccauggacgccaugaagagaggccugugcugcgugcugcugcugugcggcgccguguucgugagccccagcgccagcaaggagaucaagagcuuccuguggacccagagccugagaagagagcugagcggcuacugcagcaacaucaagcugcagguggugaaggacgcccaggcccugcugcacggccuggacuucagcgaggugagcaacgugcagagacugaugagaaaggagagaagagacgacaacgaccugaagagacugagagaccugaaccaggccgugaacaaccugguggagcugaagagcacccagcagaagagcauccugagagugggcacccugaccagcgacgaccugcugauccuggccgccgaccuggagaagcugaagagcaaggugaucagaaccgagagaccccugagcgccggcguguacaugggcaaccugagcagccagcagcuggaccagagaagagcccugcugagcaugaucggcaugagcagcggcaaccagagagcccaggccggcagagacggcguggugagagugugggacgugaagaacguggagcugcugaacaaccaguucggcaccaugcccagccugacccuggccugccugaccaagcagggccagguggaccugaacgacgccgugcaggcccugaccgaccugggccugaucuacaccgccaaguaccccaacaccagcgaccuggacagacugacccagagccaccccauccugaacaugaucgacaccaagaagagcagccugaacaucagcggcuacaacuucagccugggcgccgccgugaaggccggcgccugcaugcuggacggcggcaacaugcuggagaccaucaaggugagcccccagaccauggacggcauccugaagagcauccugaaggugaagaaggcccugggcauguucaucagcgacacccccggcgagagaaaccccuacgagaacauccuguacaagaucugccugagcggcgacggcuggcccuacaucgccagcagaaccagcaucaccggcagagccugggagaacaccgugguggaccuggagagcgacggcaagccccagaaggccggcagcaacaacagcaacaagagccugcagagcgugggcuucaccgccggccugaccuacagccagcugaugacccugaaggacgccaugcugcagcuggaccccaacgccaagaccuggauggacaucgagggcagacccgaggaccccguggagaucgcccuguaccagcccagcagcggcugcuacauccacuucuucagagagcccaccgaccugaagcaguucaagcaggacgccaaguacagccacggcaucgacgugaccgaccuguucgccgcccagcccggccugaccagcgccgugaucgacgcccugcccagaaacauggugaucaccugccagggcagcgacgacaucagaaagcugcuggagagccagggcagaaaggacaucaagcugaucgacaucgcccugagcaagaccgacagcagaaaguacgagaacgccgugugggaccaguacaaggaccugugccacaugcacaccggcguggugguggagaagaagaagagaggcggcaaggaggagaucaccccccacugcgcccugauggacugcaucauguucgacgccgccgugagcggcggccugaacaccagcgugcugagagccgugcugcccagagacaugguguucagaaccagcacccccagaguggugcugugaggacuagucccuguucccagagcccacuuuuuuuucuuuuuuugaaauaaaauagccugucuuucagaucucaaaggcucuuuucagagccaccaaaaaaaaaaaaaaaaaaaaaaaaaaaaaaaaaaaaaaaaaaaaaaaaaaaaaaaaaaaaaaaaagaauu

SEQ ID NO: 18163 - RNA, 2014 nt, Artificial Sequence
  mRNA product Design a-1 (hSL-A64-N5) comprising derived and/or modified sequence from LASV(G1442-SLE-2011;Clade IV)__AIT17181__SP-HsPLAT_NP(2-569) (opt4)
aggagagucccgcagucggcguccagcggcucugcuuguucgugugugugucguugcaggccuuauucaagcuuaccauggacgccaugaagagaggccugugcugcgugcugcugcugugcggcgccguguucgugagccccagcgccagcaaggaggugaagagcuuccuguggacccagagccugagaagagagcugagcggcuacugcagcaacaucaagcugcagguggugaaggacgcccaggcccugcugcacggccuggacuucagcgaggugagcaacgugcagagacugaugagaaagcagagaagagacgacaacgaccugaagagacugagagaccugaaccaggccgugaacaaccugguggagcugaagagcacccagcagaagagcgugcugagagugggcacccugaccagcgacgaccugcuggugcuggccgccgaccuggagaagcugaagagcaaggugaucagaaccgagagaccccugagcgccggcguguacaugggcaaccugagcagccagcagcuggaccagagaagagcccugcugaacaugaucggcaugagcggcggcauccagggcaccagaaccggcagagacggcguggugagagugugggacgugaagaacgccgaccugcugaacaaccaguucggcaccaugcccagccugacccuggccugccugaccaagcagggccagguggaccugaacgacguggugcaggcccugaccgaccugggccugaucuacaccgccaaguaccccaacgccagcgaccuggacagacugacccagagccaccccauccugaacaugaucgacaccaagaagagcagccugaacaucagcggcuacaacuucagccugggcgccgccgugaaggccggcgccugcaugcuggacggcggcaacaugcuggagaccaucaaggugagcccccagaccauggacggcauccugaagagcauccugaaggugaagaagacccugggcauguucaucagcgacacccccggcgagagaaaccccuacgagaacauccuguacaagaucugccugagcggcgacggcuggcccuacaucgccagcagaaccagcaucaccggcagagccugggagaacaccgugguggaccuggagagcgacggcaagccccagaaggccggcagcaacaacagcaacaagagccugcagagcgccggcuucgccgccggccugaccuacagccagcugaugacccugaaggacgccaugcugcagcuggaccccaacgccaagaccuggauggacaucgagggcagacccgaggaccccguggagaucgcccuguaccagcccagcagcggcugcuacauccacuucuucagagagcccaccgaccugaagcaguucaagcaggacgccaaguacagccacggcaucgacgugaccgaccuguucgccgcccagcccggccugaccagcgccgugaucgaggcccugcccagaaacauggugaucaccugccagggcagcgacgacaucaagaagcugcuggagagccagggcagaaaggacaucaagcugaucgacaucgcccugagcaagaccgacagcagaaaguacgagaacgccgugugggaccaguacaaggaccugugccacaugcacaccggcguggugguggagaagaagaagagaggcggcaaggaggagaucaccccccacugcgcccugauggacugcaucauguucgacgccgccgugagcggcggccugaacacccuggugcugagagccgugcugcccagagacaugguguucagaaccagcacccccagaguggugcugugaggacuagucccuguucccagagcccacuuuuuuuucuuuuuuugaaauaaaauagccugucuuucagaucucaaaggcucuuuucagagccaccaaaaaaaaaaaaaaaaaaaaaaaaaaaaaaaaaaaaaaaaaaaaaaaaaaaaaaaaaaaaaaaaagaauu

SEQ ID NO: 18164 - RNA, 2014 nt, Artificial Sequence
  mRNA product Design a-1 (hSL-A64-N5) comprising derived and/or modified sequence from LASV(G3010-SLE-2013;Clade IV)__AIT17345__SP-HsPLAT_NP(2-569) (opt4)
aggagagucccgcagucggcguccagcggcucugcuuguucgugugugugucguugcaggccuuauucaagcuuaccauggacgccaugaagagaggccugugcugcgugcugcugcugugcggcgccguguucgugagccccagcgccagcaaggagaucaagagcuuccuguggacccagagccugagaagagagcugagcggcuacugcagcaacaucaagcugcagguggugaaggacgcccaggcccugcugcacggccuggacuucagcgaggugagcaacgugcagagacugaugagaaaggagagaagagacgacaacgaccugaagagacugagagaccugaaccaggccgugaacaaccugguggagcugaagagcacccagcagaagagcauccugagagugggcacccugaccagcgacgaccugcugauccuggccgccgaccuggagaagcugaagagcaaggugaccagaaccgagagaccccugagcgccggcguguacaugggcaaccugagcagccagcagcuggaccagagaagagcccugcugagcaugaucggcaugagcagcggcgugcagggcgccagagccggcagagacggcguggugagagugugggacgugaagaacgccgagcugcugaacaaccaguucggcaccaugcccagccugacccuggccugccugaccaagcagggccagguggaccugaacgacguggugcaggcccugaccgaccugggccugaucuacaccgccaaguaccccaacaccagcgaccuggacagacugacccagagccaccccauccugaacaugaucgacaccaagaagagcagccugaacaucagcggcuacaacuucagccugggcgccgccgugaaggccggcgccugcaugcuggacggcggcaacaugcuggagaccaucaaggugagcccccagaccauggacggcauccugaagagcauccugaaggugaagaaggcccugggcauguucaucagcgagacccccggcgagagaaaccccuacgagaacauccuguacaagaucugccugagcggcgacggcuggcccuacaucgccagcagaaccagcaucaccggcagagccugggagaacaccgugguggaccuggagagcgacggcaagccccagaaggccggcagcaacaacagcaacaagagccugcagagcgccggcuucaccgccggccugaccuacagccagcugaugacccugaaggacgccaugcugcagcuggaccccaacgccaagaccuggauggacaucgagggcagacccgaggaccccguggagguggcccuguaccagcccagcagcggcugcuacauccacuucuucagagagcccaccgaccugaagcaguucaagcaggacgccaaguacagccacggcaucgacgugaccgaccuguucgccgcccagcccggccugaccagcgccgugaucgacgcccugcccagaaacauggugaucaccugccagggcagcgacgacaucaagaagcugcuggagagccagggcagaaaggacaucaagcugaucgacaucgcccugagcaagaccgacagcagaaaguacgagaacgccgugugggaccaguacaaggaccugugccacaugcacaccggcguggugguggagaagaagaagagaggcggcaaggaggagaucaccccccacugcgcccugauggacugcaucauguucgacgccgccgugagcggcggccugaacaccagcgugcugagagccgugcugcccagagacaugguguucagaaccagcacccccagaguggugcugugaggacuagucccuguucccagagcccacuuuuuuuucuuuuuuugaaauaaaauagccugucuuucagaucucaaaggcucuuuucagagccaccaaaaaaaaaaaaaaaaaaaaaaaaaaaaaaaaaaaaaaaaaaaaaaaaaaaaaaaaaaaaaaaaagaauu

SEQ ID NO: 18165 - RNA, 2014 nt, Artificial Sequence
  mRNA product Design a-1 (hSL-A64-N5) comprising derived and/or modified sequence from LASV(G502-SLE-2009;Clade IV)__AIT17127__SP-HsPLAT_NP(2-569) (opt4)
aggagagucccgcagucggcguccagcggcucugcuuguucgugugugugucguugcaggccuuauucaagcuuaccauggacgccaugaagagaggccugugcugcgugcugcugcugugcggcgccguguucgugagccccagcgccagcaaggagaucaagagcuuccuguggacccagagccugagaagagagcugagcggcuacugcagcaacaucaagcugcagguggugaaggacgcccaggcccugcugcacggccuggacuucagcgaggugagcaacgugcagagacugaugagaaaggagagaagagacgacaacgaccugaagagacugagagaccugaaccaggccgugaacaaccugguggagcugaagagcacccagcagaagagcauccugagagugggcacccugaccagcgacgaccugcugauccuggccgccgaccuggagaagcugaagagcaaggugaucagaaccgagagaccccugagcgccggcguguacaugggcaaccugagcagccagcagcuggaccagagaagagcccugcugagcaugaucggcaugagcggcggcaaccagggcgugagagccggcaaggacggcguggugagagugugggacgugaagaacgccgagcugcugaacaaccaguucggcaccaugcccagccugacccuggccugccugaccaagcagggccagguggaccugaacgacgccgugcaggcccugaccgaccugggccugaucuacaccgccaaguaccccaacaccagcgaccuggacagacugacccagagccaccccauccugaacaugaucgacaccaagaagagcagccugaacaucagcggcuacaacuucagccugggcgccgccgugaaggccggcgccugcaugcuggacggcggcaacaugcuggagaccaucaaggugagcccccagaccauggacggcauccugaagagcauccugaaggugaagaaggcccugggcauguucaucagcgacacccccggcgagagaaaccccuacgagaacauccuguacaagaucugccugagcggcgacggcuggcccuacaucgccagcagaaccagcaucaccggcagagccugggagaacaccgugguggaccuggagagcgacggcaagccccagaaggccggcagcaacaacagcaacaagagccugcagagcgccggcuucaccgccggccugaccuacagccagcugaugacccugaaggacgccaugcugcagcuggaccccaacaccaagaccuggauggacaucgagggcagacccgaggaccccguggagaucgcccuguaccagcccagcagcggcugcuacauccacuucuucagagagcccaccgaccugaagcaguucaagcaggacgccaaguacagccacggcaucgacgugaccgaccuguucgccgcccagcccggccugaccagcgccgugaucgacgcccugcccagaaacauggugaucaccugccagggcagcgacgacaucagaaagcugcuggagagccagggcagaaaggacaucaagcugaucgacaucgcccugaacaagaccgacagcagaaaguacgagaacgccgugugggaccaguacaaggaccugugccacaugcacaccggcguggugguggagaagaagaagagaggcggcaaggaggagaucaccccccacugcgcccugauggacugcaucauguucgacgccgccgugagcggcggccugaacaccagcgugcugagagccgugcugcccagagacaugguguucagaaccagcacccccagaguggugcugugaggacuagucccuguucccagagcccacuuuuuuuucuuuuuuugaaauaaaauagccugucuuucagaucucaaaggcucuuuucagagccaccaaaaaaaaaaaaaaaaaaaaaaaaaaaaaaaaaaaaaaaaaaaaaaaaaaaaaaaaaaaaaaaaagaauu

SEQ ID NO: 18166 - RNA, 2014 nt, Artificial Sequence
  mRNA product Design a-1 (hSL-A64-N5) comprising derived and/or modified sequence from LASV(G733-SLE-2010;Clade IV)__AIT17155__SP-HsPLAT_NP(2-569) (opt4)
aggagagucccgcagucggcguccagcggcucugcuuguucgugugugugucguugcaggccuuauucaagcuuaccauggacgccaugaagagaggccugugcugcgugcugcugcugugcggcgccguguucgugagccccagcgccagcaaggagaucaagagcuuccuguggacccagagccugagaagagagcugagcggcuacugcagcaacaucaagcugcagguggugaaggacgcccaggcccugcugcacggccuggacuucagcgaggugagcaacgugcagagacugaugagaaaggagagaagagacgacaacgaccugaagagacugagagaccugaaccaggccgugaacaaccugguggagcugaagagcacccagcagaagagcgugcugagagugggcacccugaccagcgacgagcugcuggugcuggccgccgaccuggagaagcugaagagcaaggugaucagaaccgagagaccccugagcgccggcguguacaugggcaaccugagcagccagcagcuggaccagagaagagcccugcugagcaugaucggcaugagcggcggcaaccagggcgccagaaccggcagagacggcguggugagagugugggacgugaagaacgccgagcugcugaacaaccaguucggcaccaugcccagccugacccuggccugccugaccaagcagggccagguggaccugaacgacgccgugcaggcccugaccgaccugggccugaucuacaccgccaaguaccccaacaccagcgaccuggacagacugacccagagccaccccauccugaacaugaucgacaccaagaagagcagccugaacaucagcggcuacaacuucagccugggcgccgccgugaaggccggcgccugcaugcuggacggcggcaacaugcuggagaccaucaaggugagcccccagaccauggacggcauccugaagagcauccugaaggugaagaaggcccugggcauguucaucagcgacacccccggcgagagaaaccccuacgagaacauccuguacaagaucugccugagcggcgacggcuggcccuacaucgccagcagaaccagcaucaccggcagagccugggagaacaccgugguggaccuggagagcgacggcaagccccagaaggccggcagcaacaacagcaacaagagccugcagagcgccggcuucaccgccggccugaccuacagccagcugaugacccugaaggacgccaugcugcagcuggaccccaacgccaagaccuggauggacaucgagggcagacccgaggaccccguggagaucgcccuguaccagcccagcagcggcugcuacauccacuucuucagagagcccaccgaccugaagcaguucaagcaggacgccaaguacagccacggcaucgacgugaccgaccuguucgccgcccagcccggccugaccagcgccgugaucgacgcccugcccagaaacauggugaucaccugccagggcagcgacgacaucagaaagcugcuggagagccagggcagaaaggacaucaagcugaucgacaucgcccugagcaagaucgacagcagaaaguacgagaacgccgugugggaccaguacaaggaccugugccacaugcacaccggcguggugguggagaagaagaagagaggcggcaaggaggagaucaccccccacugcgcccugauggacugcaucauguucgacgccgccgugagcggcggccugaacagccuggugcugagagccgugcugcccagagacaugguguucagaaccagcacccccagaguggugcugugaggacuagucccuguucccagagcccacuuuuuuuucuuuuuuugaaauaaaauagccugucuuucagaucucaaaggcucuuuucagagccaccaaaaaaaaaaaaaaaaaaaaaaaaaaaaaaaaaaaaaaaaaaaaaaaaaaaaaaaaaaaaaaaaagaauu

SEQ ID NO: 18167 - RNA, 2014 nt, Artificial Sequence
  mRNA product Design a-1 (hSL-A64-N5) comprising derived and/or modified sequence from MOPV/LASV reassortant(IGS-1;Clade IV)__AFY05578__SP-HsPLAT_NP(2-569) (opt4)
aggagagucccgcagucggcguccagcggcucugcuuguucgugugugugucguugcaggccuuauucaagcuuaccauggacgccaugaagagaggccugugcugcgugcugcugcugugcggcgccguguucgugagccccagcgccagcaaggagaucaagagcuuccuguggacccagagccugagaagagagcugagcggcuacugcagcaacaucaagcugcagguggugaaggacgcccaggcccugcugcacggccuggacuucagcgaggugagcaacgugcagagacugaugagaaaggagagaagagacgacaacgaccugaagagacugagagaccugaaccaggccgugaacaaccugguggagcugaagagcacccagcagaagagcauccugagagugggcacccugaccagcgacgaccugcugauccuggccgccgaccuggagaagcugagaagcaaggugaucagaaccgagagaccccugagcgccggcguguacaugggcaaccugagcagccagcagcuggaccagagaagagcccugcugaacaugaucggcaugagcggcggcaaccagggcgccagagccggcagagacggcguggugagagugugggacgugaagaacgccgagcugcugagcaaccaguucggcaccaugcccagccugacccuggccugccugaccaagcagggccagguggaccugaacgacgccgugcaggcccugaccgaccugggccugaucuacaccgccaaguaccccaacaccagcgaccuggacagacugacccagagccaccccauccugaacaugaucgacaccaagaagagcagccugaacaucagcggcuacaacuucagccugggcgccgccgugaaggccggcgccugcaugcuggacggcggcaacaugcuggagaccaucaaggugagcccccagaccauggacggcauccugaagagcauccugaaggugaagaaggcccugggcauguucaucagcgacacccccggcgagagaaaccccuacgagaacauccuguacaagaucugccugagcggcgacggcuggcccuacaucgccagcagaaccagcaucaccggcagagccugggagaacaccgugguggaccuggagagcgacggcaagccccagaaggccgacagcaacaacagcagcaagagccugcagagcgccggcuucaccgccggccugaccuacagccagcugaugacccugaaggacgccaugcugcagcuggaccccaacgccaagaccuggauggacaucgagggcagacccgaggaccccguggagaucgcccuguaccagcccagcagcggcugcuacauccacuucuucagagagcccaccgaccugaagcaguucaagcaggacgccaaguacagccacggcaucgacgugaccgaccuguucgccacccagcccggccugaccagcgccgugaucgacgcccugcccagaaacauggugaucaccugccagggcagcgacgacaucagaaagcugcuggagagccagggcagaaaggacaucaagcugaucgacaucgaccugagcaagaccgacagcagaaaguacgagaacgccgugugggaccaguacaaggaccugugccacaugcacaccggcguggugguggagaagaagaagagaggcggcaaggaggagaucaccccccacugcgcccugauggacugcaucauguucgacgccgccgugagcggcggccugaacaccagcgugcugagagccgugcugcccagagacaugguguucagaaccagcacccccagaguggugcugugaggacuagucccuguucccagagcccacuuuuuuuucuuuuuuugaaauaaaauagccugucuuucagaucucaaaggcucuuuucagagccaccaaaaaaaaaaaaaaaaaaaaaaaaaaaaaaaaaaaaaaaaaaaaaaaaaaaaaaaaaaaaaaaaagaauu

SEQ ID NO: 18168 - RNA, 2014 nt, Artificial Sequence
  mRNA product Design a-1 (hSL-A64-N5) comprising derived and/or modified sequence from LASV(LM765-SLE-2012;Clade IV)__AIT17815__SP-HsPLAT_NP(2-569) (opt4)
aggagagucccgcagucggcguccagcggcucugcuuguucgugugugugucguugcaggccuuauucaagcuuaccauggacgccaugaagagaggccugugcugcgugcugcugcugugcggcgccguguucgugagccccagcgccagcaaggagaucaagagcuuccuguggacccagagccugagaagagagcugagcggcuacugcagcaacaucaagcugcagguggugaaggacgcccaggcccugcugcacggccuggacuucagcgaggugagcaacgugcagagacugaugagaaaggagagaagagacgacaacgaccugaagagacugagagaccugaaccaggccgugaacaaccugguggagcugaagagcacccagcagaagagcauccugagagugggcacccugaccagcgacgaccugcugauccuggccgccgaccuggagaagcugaagagcaaggugaccagaaccgagagaccccugagcgccggcguguacaugggcaaccugagcagccagcagcuggaccagagaagagcccugcuggacaugaucggcaugagcggcagcaaccagggcgccagagccggcagagacggcguggugagagugugggacgugaagaacgccgagcugcugaacaaccaguucggcaccaugcccagccugacccuggccugccugaccaagcagggccagguggaccugaacgacgccgugcaggcccugaccgaccugggccugaucuacaccgccaaguaccccaacaccagcgaccuggacagacugacccagagccaccccauccugaacaugaucgacaccaagaagagcagccugaacaucagcggcuacaacuucagccugggcgccgccgugaaggccggcgccugcaugcuggacggcggcaacaugcuggagaccaucaaggugagcccccagaccauggacggcauccugaagagcauccugaaggugaagaaggcccugggcauguucaucagcgacgcccccggcgagagaaaccccuacgagaacauccuguacaagaucugccugagcggcgacggcuggcccuacaucgccagcagaaccagcaucaccggcagagccugggagaacaccgugguggaccuggagagcgacggcaagccccagaaggccggcagcaacggcagcaacaagagccugcagagcgccggcuucaccgccggccugaccuacagccagcugaugacccugaaggacgccaugcugcagcuggaccccaacgccaagaccuggauggacaucgagggcagacccgaggaccccguggagaucgcccuguaccagcccagcagcggcugcuacauccacuucuucagagagcccaccgaccugaagcaguucaagcaggacgccaaguacagccacggcaucgacgugaccgaccuguucgccgcccagcccggccugaccagcgccgugaucgacgcccugcccagaaacauggugaucaccugccagggcagcgacgacaucagaaagcuguucgagagccagggcagaaaggacaucaagcugaucgacaucgcccugagcaagaccgacagcagaaaguacgagaacgccgugugggaccaguacaaggaccugugccacaugcacaccggcaucgugguggagaagaagaagagaggcggcaaggaggagaucaccccccacugcgcccugauggacugcaucauguucgacgccgccgugagcggcggccugaacaccagcgugcugagagccgugcugcccagagacaugguguucagaaccagcacccccagaguggugcugugaggacuagucccuguucccagagcccacuuuuuuuucuuuuuuugaaauaaaauagccugucuuucagaucucaaaggcucuuuucagagccaccaaaaaaaaaaaaaaaaaaaaaaaaaaaaaaaaaaaaaaaaaaaaaaaaaaaaaaaaaaaaaaaaagaauu

SEQ ID NO: 18169 - RNA, 2014 nt, Artificial Sequence
  mRNA product Design a-1 (hSL-A64-N5) comprising derived and/or modified sequence from LASV(LM776-SLE-2012;Clade IV)__AIT17825__SP-HsPLAT_NP(2-569) (opt4)
aggagagucccgcagucggcguccagcggcucugcuuguucgugugugugucguugcaggccuuauucaagcuuaccauggacgccaugaagagaggccugugcugcgugcugcugcugugcggcgccguguucgugagccccagcgccagcaaggagaucaagagcuuccuguggacccagagccugagaagagagcugagcagcuacugcagcaacaucaagcugcagguggugaaggacgcccaggcccugcugcacggccuggacuucagcgaggugagcaacgugcagagacugaugagaaaggagagaagagacgacaacgaccugaagagacugagagaccugaaccaggccgugaacaaccugguggagcugaagagcacccagcagaagagcauccugagagugggcacccugaccagcgacgaccugcugauccuggccgccgaccuggagaagcugaagagcaaggugaccagaaccgagagaccccugagcgccggcguguacaugggcaaccugagcagccagcagcuggaccagagaagagcccugcugagcaugaucggcaugagcggcagcaaccagggcgccagagccggcagagacggcguggugagagugugggacgugaagaacgccgagcugcugaacaaccaguucggcaccaugcccagccugacccuggccugccugaccaagcagggccagguggaccugaacgacgccgugcaggcccugaccgaccugggccugaucuacaccgccaaguaccccaacaccagcgaccuggacagacugacccagagccaccccauccugaacaugaucgacaccaagaagagcagccugaacaucagcggcuacaacuucagccugggcgccgccgugaaggccggcgccugcaugcuggacggcggcaacaugcuggagaccaucaaggugagcccccagaccauggacggcauccugaagagcauccugaaggugaagaaggcccugggcauguucaucagcgacacccccggcgagagaaaccccuacgagaacauccuguacaagaucugccugagcggcgacggcuggcccuacaucgccagcagaaccagcaucaccggcagagccugggagaacaccgugguggaccuggagagcgacggcaagccccagaaggccggcagcaacaacagcaacaagagccugcagagcgccggcuucaccgccggccugaccuacagccagcugaugacccugaaggacgccaugcugcagcuggaccccaacgccaagaccuggauggacaucgagggcagacccgaggaccccguggagguggcccuguaccagcccagcagcggcugcuacauccacuucuucagagagcccaccgaccugaagcaguucaagcaggacgccaaguacagccacggcaucgacgugaccgaccuguucgccgcccagcccggccugaccagcgccgugaucgacgcccugcccagaaacauggugaucaccugccagggcagcgacgacaucagaaagcugcuggagagccagggcagaaaggacaucaagcugaucgacaucgcccugagcaagaccgacagcagaaaguacgagaacgccgugugggaccaguacaaggaccugugccacaugcacaccggcguggugguggagaagaagaagagaggcggcaaggaggagaucaccccccacugcgcccugauggacugcaucauguucgacgccgccgugagcggcggccugaacaccagcgugcugagagccgugcugcccagagacaugguguucagaaccagcacccccagaguggugcugugaggacuagucccuguucccagagcccacuuuuuuuucuuuuuuugaaauaaaauagccugucuuucagaucucaaaggcucuuuucagagccaccaaaaaaaaaaaaaaaaaaaaaaaaaaaaaaaaaaaaaaaaaaaaaaaaaaaaaaaaaaaaaaaaagaauu

SEQ ID NO: 18170 - RNA, 2014 nt, Artificial Sequence
  mRNA product Design a-1 (hSL-A64-N5) comprising derived and/or modified sequence from LASV(Mad39;Clade IV)__ANH09723__SP-HsPLAT_NP(2-569) (opt4)
aggagagucccgcagucggcguccagcggcucugcuuguucgugugugugucguugcaggccuuauucaagcuuaccauggacgccaugaagagaggccugugcugcgugcugcugcugugcggcgccguguucgugagccccagcgccagcaaggagaucaagagcuuccuguggacccagagccugagaagagagcugagcggcuacugcagcaacaucaagcugcagguggugaaggacgcccaggcccugcugcacggccuggacuucagcgaggugagcaacgugcagagacugaugagaaagcagagaagagacgacaacgaccugaagagacugagagaccugaaccaggccgugaacaaccugguggagcugaagagcacccagcagaagagcgugcugagagugggcacccugaccagcgacgaccugcugacccuggccgccgaccuggagaagcugaagagcaaggugaccagaaccgagagaccccugaccgccggcguguacaugggcaaccugagcagccagcagcuggaccagagaagagcccugcugaacaugaucggcaugagcggcggcaaccagggcgccagaaccggcagagacggcguggugagagugugggacgugaagaacgccgagcugcugaacaaccaguucggcaccaugcccagccugacccuggccugccugaccaagcagggccagguggaccugaacgacguggugcaggcccugaccgaccugggccugaucuacaccgccaaguaccccaacaccagcgaccuggacagacugacccagagccaccccauccugaacaugaucgacaccaacaagagcagccugaacaucagcggcuacaacuucagccugggcgccgccgugaaggccggcgccugcaugcuggacggcggcaacaugcuggagaccaucaaggugagcccccagaccauggacggcauccugaagagcauccugaaggugaagaagagccugggcauguucaucagcgacacccccggcgagagaaaccccuacgagaacauccuguacaagaucugccugagcggcgacggcuggcccuacaucgccagcagaaccagcaucaccggcagagccugggagaacaccgugguggaccuggagagcggcggcaagccccagaaggccggcagcaacaacagcaacaagagccugcagagcgccggcuucgccgccggccugaccuacagccagcugaugacccugaaggacgccaugcugcagcuggaccccaacgccaagaccuggauggacaucgagggcagacccgaggaccccguggagaucgcccuguaccagcccaucagcggcugcuacauccacuucuucagagagcccaccgaccugaagcaguucaagcaggacgccaaguacagccacggcaucgacgugaccgaccuguucgccgcccagcccggccugaccagcgccgugaucgaggcccugcccagaaacauggugaucaccugccagggcagcgacgacaucagaaagcuguucgagagccagggcagaaaggacaucaagcugaucgacaucgcccugagcaagaccgacagcagaaaguacgagaacgccgugugggaccaguacaaggaccugugccacaugcacaccggcguggugguggagaagaagaagaagggcggcaaggaggagaucaccccccacugcgcccugauggacugcaucauguucgacgccgccgugagcggcggccugaacacccuggugcugagagccgugcugcccagagacaugguguucagaaccagcacccccaagguggugcugugaggacuagucccuguucccagagcccacuuuuuuuucuuuuuuugaaauaaaauagccugucuuucagaucucaaaggcucuuuucagagccaccaaaaaaaaaaaaaaaaaaaaaaaaaaaaaaaaaaaaaaaaaaaaaaaaaaaaaaaaaaaaaaaaagaauu

SEQ ID NO: 18171 - RNA, 2014 nt, Artificial Sequence
  mRNA product Design a-1 (hSL-A64-N5) comprising derived and/or modified sequence from LASV(Z0947-SLE-2011;Clade IV)__AIT17841__SP-HsPLAT_NP(2-569) (opt4)
aggagagucccgcagucggcguccagcggcucugcuuguucgugugugugucguugcaggccuuauucaagcuuaccauggacgccaugaagagaggccugugcugcgugcugcugcugugcggcgccguguucgugagccccagcgccagcaaggagaucaagagcuuccuguggacccagagccugagaagagagcugagcggcuacugcagcaacaucaagcugcagguggugaaggacgcccaggcccugcugcacggccuggacuucagcgaggugagcaacgugcagagacugaugagaaaggagagaagagacgacaacgaccugaagagacugagagaccugaaccaggccgugaacaaccugguggagcugaagagcacccagcagaagagcauccugagagugggcacccugaccagcgacgaccugcugauccuggccgccgaccuggagaagcugaagagcaaggugaccagaaccgagagaccccugagcgccggcguguacaugggcaaccugagcagccagcagcuggaccagagaagagcccugcugaacaugaucggcaugagcggcagcaaccagggcgccagaaccggcagagacggcguggugagagugugggacgugaagaacgccgagcugcugaacaaccaguucggcaccaugcccagccugacccuggccugccugaccaagcagggccagguggaccugaacgacgccgugcaggcccugaccgaccugggccugaucuacaccgccaaguaccccaacaccagcgaccuggacagacugacccagagccaccccauccugaacaugaucgacaccaagaagagcagccugaacaucagcggcuacaacuucagccugggcgccgccgugaaggccggcgccugcaugcuggacggcggcaacaugcuggagaccaucaaggugagcccccagaccauggacggcauccugaagagcauccugaaggugaagaaggcccugggcauguucaucagcgacgcccccggcgagagaaaccccuacgagaacauccuguacaagaucugccugagcggcgacggcuggcccuacaucgccagcagaaccagcaucaccggcagagccugggagaacaccgugguggaccuggagagcgacggcaagccccagaaggccggcagcaacggcagcaacaagagccugcagagcgccggcuucaccgccggccugaccuacagccagcugaugacccugaaggacgccaugcugcagcuggaccccaacgccaagaccuggauggacaucgagggcagacccgaggaccccguggagaucgcccuguaccagcccagcagcggcugcuacauccacuucuucagagagcccaccgaccugaagcaguucaagcaggacgccaaguacagccacggcaucgacgugaccgaccuguucgccgcccagcccggccugaccagcgccgugaucgacgcccugcccagaaacauggugaucaccugccagggcagcgacgacaucagaaagcuguucgagagccagggcagaaaggacaucaagcugaucgacaucgcccugagcaagaccgacagcagaaaguacgagaacgccgugugggaccaguacaaggaccugugccacaugcacaccggcaucgugguggagaagaagaagagaggcggcaaggaggagaucaccccccacugcgcccugauggacugcaucauguucgacgccgccgugagcggcggccugaacaccagcgugcugagagccgugcugcccagagacaugguguucagaaccagcacccccagaguggugcugugaggacuagucccuguucccagagcccacuuuuuuuucuuuuuuugaaauaaaauagccugucuuucagaucucaaaggcucuuuucagagccaccaaaaaaaaaaaaaaaaaaaaaaaaaaaaaaaaaaaaaaaaaaaaaaaaaaaaaaaaaaaaaaaaagaauu

SEQ ID NO: 18172 - RNA, 2014 nt, Artificial Sequence
  mRNA product Design a-1 (hSL-A64-N5) comprising derived and/or modified sequence from LASV(Josiah;Clade IV)__NP_694869__SP-HsPLAT_NP(2-569) (opt5)
aggagagucccgcagucggcguccagcggcucugcuuguucgugugugugucguugcaggccuuauucaagcuuaccauggacgccaugaagagaggccugugcugugugcuccugcuuugcggggcugucuucguuagccccagcgccuccaaggagaucaaaucuuuccuguggacccagagccucagacgggaacuguccggcuacugcucuaacauuaagcugcaaguggucaaagacgcucaggcccugcuccacgggcuggauuuuagcgagguuuccaaugugcagcgccuuaugagaaaggaacggcgcgacgauaacgaccugaaaagacuccgggaucugaaucaggcggugaacaaucuggucgagcucaagucuacacaacaaaagagcauccugcgcgugggaacgcuuaccuccgacgaucugcucauucuggcugccgaccuugaaaaacuuaagagcaaaguuaucagaacagagcggccccucucugccggcguguauauggggaaccuguccagccagcagcuggaucagcgcagagcucuccugaauaugauuggaaugucuggcgggaaccagggagcccgggcuggccgcgacggcgucgugagaguuugggaugugaagaaugccgagcuucugaacaaucaguucgggaccaugccuucccucacacuggcgugucuuaccaaacagggacaagucgaccugaacgaugccgugcaggcucucacagaccugggccugaucuacaccgccaaguauccgaauacgagcgaccucgaucggcugacccagucucaucccauccuuaacaugauugacacaaagaaauccagccugaauaucuccggguacaacuuuucucucggagcugccgugaaggcgggcgccugcaugcuggaugggggaaacaugcuugaaaccauuaaagucagcccucaaacaauggacggcauccugaaguccauucucaaaguuaagaaagcucugggcauguucaucagcgauacccccggggagcgcaauccuuaugaaaacauucuguacaagaucugucucucuggagacggcuggcccuauaucgccuccagaacgagcauuacagggcgggcuugggagaauaccgugguggaucuggagucugacggaaagccucagaaagccgauagcaacaauuccucuaagagccuucaguccgccggcuuuacagcugggcugaccuacagccagcucaugacccugaaagacgcgaugcugcaacuugauccgaacgccaagacauggauggacaucgaaggaagacccgaggacccugucgaaauugcucucuaccagcccucuuccggcugcuauauccacuucuuucgcgagccuacggaucugaaacaguucaagcaggacgccaaguacagccauggcauugaugugaccgaccuguuugccacacaacccgggcucaccucugcuguuaucgaugcccugccgcggaauauggugaucacaugucagggauccgacgauauuagaaaacuucuggaaagccagggccgcaaggacaucaaacucauugauaucgcgcuguccaagaccgacucucggaaauaugagaacgcugucugggaucaguacaaggaccugugccacaugcauacgggggugguuguggagaagaaaaagagaggaggcaaagaagagauuacaccucacugugcccuuauggauugcaucauguucgacgccgcugucagcgggggccucaauaccuccgugcugcgcgccguccugccccgggacaugguguuuagaaccucuacaccucgcguugugcucugaggacuagucccuguucccagagcccacuuuuuuuucuuuuuuugaaauaaaauagccugucuuucagaucucaaaggcucuuuucagagccaccaaaaaaaaaaaaaaaaaaaaaaaaaaaaaaaaaaaaaaaaaaaaaaaaaaaaaaaaaaaaaaaaagaauu

SEQ ID NO: 18173 - RNA, 2014 nt, Artificial Sequence
  mRNA product Design a-1 (hSL-A64-N5) comprising derived and/or modified sequence from LASV(LP;Clade I)__AAF86702__SP-HsPLAT_NP(2-569) (opt5)
aggagagucccgcagucggcguccagcggcucugcuuguucgugugugugucguugcaggccuuauucaagcuuaccauggacgccaugaagagaggccugugcugugugcuccugcuuugcggggcugucuucguuagccccagcaacuccaaggagaucaaaucuuuccuguggacccagagccucagacgggaacuguccggcuacugcucuaauauuaagcuccaaguggucaaagacgcccaggcucugcuccacgggcuggauuuuagcgagguuuccaacgugcagcgccuuaugagaaagcagaaacgggacgaugccgaccugaagcgccucagagaucugaaucaagcggugaacaaucuggucgaacucaagucuacacagcagaaaaacgugcugcggguuggaacgcuuagcuccgacgaucugaucacccucgcugccgaccuggagaaacuuaaaagcaaggugauucgcacagaaagaccccugucuuccggcgucuauauggggaaucucagcucucagcaacuggaucagcggcgcgcccugcucuccaugaucggaaugagcggcgggccucagggaaacagaaccggcggcgacggggugguucgggugugggaugucaaaaaugcugagcugcuuaacaaucaguucggaacaaugccgucucugacccucgccugucugacaaagcaaggccagguggaccuuaacgaugcugugcaggcccugaccgaccucgggcugauuuacacggcgaaguaucccaauuccagcgaccuggauaugcucacccaaucccauccuauccugggaauggucgacacaaagaagucuagccuuaacaucuccggcuacaauuuuagccugggggccgcuguuaaagccggagcuugcaugcucgauggcggcaacaugcuggagaccauuaaggugucuccccagacaauggacgggauccuuaaauccauucugaaggugaaacgcagccucggaauguucaucucugauaccccuggcgaaagaaaccccuaugagaauauucuguacaagaucugucugagcggggaaggauggccuuauauugccucccggacgucuaucacaggccgcgcgugggagaacacccucgucgaccuggagagcgauaauaagccgcccaaacuuaacuccgccgggagcaauaagucucugcaggcugccggacucaacgcuggccugacauacucccagcugaugacccuuaaagacugcaugcuccaacuggauccuagcucuaagaccuggaucgacauugaaggcagacccgaggauccuguggaaaucgcccuguuucagcccuccagcggguguuacauucacuucuuucgggagccgacagaccucaaacaguucaagcaggacgccaaguauucccauggaaucgauguuacggaccuguuuucuacccaaccuggccuuacaagcgcugugauugaagcgcugcccagaaauaugguccuuaccugccagggguccgaugacaucaaaaagcugcuggagucucagggacgccgggauaucaaacuuauugacaucagccucuccaaggccgauagcagaaaauucgagaacgcugugugggaccaguacaaggaucugugucacaugcauacaggcguuguggucgaaaagaaaaagcgcgggggcaaagaggaaauuaccccucacugcgcccugcucgacuguaucauguuugaugccgcuacgacaggaucucugaauauuaccacccuucgggccgugcugcccagagacauggucuuccgcacauccacccccaaggugguucucugaggacuagucccuguucccagagcccacuuuuuuuucuuuuuuugaaauaaaauagccugucuuucagaucucaaaggcucuuuucagagccaccaaaaaaaaaaaaaaaaaaaaaaaaaaaaaaaaaaaaaaaaaaaaaaaaaaaaaaaaaaaaaaaaagaauu

SEQ ID NO: 18174 - RNA, 2014 nt, Artificial Sequence
  mRNA product Design a-1 (hSL-A64-N5) comprising derived and/or modified sequence from LASV(803213;Clade II)__AAF86704__SP-HsPLAT_NP(2-569) (opt5)
aggagagucccgcagucggcguccagcggcucugcuuguucgugugugugucguugcaggccuuauucaagcuuaccauggacgccaugaagagaggccugugcugugugcuccugcuuugcggggcugucuucguuagccccagcgccuccaaggaggugaaaucuuuccuguggacccagagccucagacgggaacuguccggcuacugcucuaacaucaaacuucaagucguuaaggacgcucaggcccugcuccacgggcuggauuuuagcgaggugaauaacgugcagcgccuuaugagaaagcagaaacgggacgauggagaccugaagcgccucagagaucugaaucaagcggucaacaaucugguggaacucaaguccacacagcagaaaucuauucugcggguuggcacgcuuaccagcgacgaucugcucacacuggcugccgaccuugagaagcugaaauccaaggugauccgcaccgaaagaccccucagcucuggggucuauaugggaaaccuguccacacagcaacuggagcagcggcgcgcccuccugaauaugauuggcauggugggaggagcucagggcacccagccuggcagagaugggguugugcgggucugggacgugaaaaacccggaucuucugaauaaccaauucggaacaaugcccagccucacccuggccugucuuacgaagcagggccagguggaccugaaugaugcuguccucgcccugaccgaccuggggcucaucuacacagcgaaguauccuaacucuuccgaccuggaucgccuuagccaaucucaucccauucugaauaugguugacaccaaaaaguccagccucaacaucuccggauacaauuuuucucugggcgccgcugugaaagccggggcuugcaugcuugauggaggcaacaugcuggagacaaucaaggugaccccucagacgauggacggcauucucaaaagcauccugaaggucaaaagaucccuggggauguucgugagcgauacacccggagaacggaacccuuaugagaauauucucuacaagaucugucugucuggcgacggguggccguauauugccucccgcaccagcaucguugggagagcgugggaaaacacaaccguggaucuugagucugacggcaagccccagaaagucgggaccgccggaagcaauaagucccugcagucugcuggcuuuccuacaggccucacguacagccaacugaugacccugaaagauuccaugaugcagcuugaccccagcgccaagacauggauugauaucgaggggcggccugaagaccccguggagaucgcucucuaccagccgaugucuggaugcuauauucacuucuuuagagaaccuaccgaccugaaacaguucaagcaagaugccaaguacucccauggcaucgacguugccgaucuguuucccgcucagccugggcucacaagcgcggugauugaggcccugccccgcaacaugguccuuaccugucagggaucugacgauaucaaaaagcugcucgacucccagggccggagagauauuaaacugaucgacaucagccuguccaagguggauucucgcaaauucgaaaaugcugucugggaccaaugcaaggaucuuugucacaugcauacgggggugguuguggagaagaaaaagcggggcggaaaagaggaaauuacaccccacugcgcccucauggacuguaucauguuugaugccgcugucagcggcgggcugaacauuccugugcugagagccguucucccgcgcgacaugguguuccggaccuccucucccaaggucgugcugugaggacuagucccuguucccagagcccacuuuuuuuucuuuuuuugaaauaaaauagccugucuuucagaucucaaaggcucuuuucagagccaccaaaaaaaaaaaaaaaaaaaaaaaaaaaaaaaaaaaaaaaaaaaaaaaaaaaaaaaaaaaaaaaaagaauu

SEQ ID NO: 18175 - RNA, 2017 nt, Artificial Sequence
  mRNA product Design a-1 (hSL-A64-N5) comprising derived and/or modified sequence from LASV(GA391;Clade III)__CAA36646__SP-HsPLAT_NP(2-570) (opt5)
aggagagucccgcagucggcguccagcggcucugcuuguucgugugugugucguugcaggccuuauucaagcuuaccauggacgccaugaagagaggccugugcugugugcuccugcuuugcggggcugucuucguuagccccagcgccuccaaggaggugagaucuuuccuguggacccagagccuccggcgcgaacuguccggcuacugcucuaacaucaaacuucaagucguuaaggacgcucaggcccugcuccacgggcuggauuuuagcgagguguccaaugugcagagacuuaugcggaaacagaagcgcgacgauggagaccugaaaagacuccgggaucugaaccaagcggucaauaaccugguggaacucaagucuacacagcagaaaagcguucugcgcgugggcacgcuuuccagcgacgaucugcucauucuggcugccgaccuugagaaacugaagucuaaagucaccagaacagaacggccccucuccagcgggguguauaugggaaaucugucuucccagcaacuggaucagcgcagagcccuccugaacaugaucggcaugaccgggguuagcggaggcggcaagggggcuucugacggaauugugcgggucugggaugugaaaaaugccgagcuucugaacaaucaguucggcacaaugccuucccucacccuggcuugucuuacaaagcaggggcaaguggaccugaacgaugccguccaggcgcucaccgaccugggacugaucuacacggccaaguauccgaauagcuccgaccucgaucgccugucucagagccaucccauucuuaacaugaucgacaccaaaaaguccagccugaauaucucuggcuacaacuuuucccucggggcugccguuaaagcuggagccugcaugcuggauggcggcaauaugcuugagacaauuaaggugagcccucaaaccauggacgggauccugaaaucuauucucaaggugaaaaagagccugggaauguucgucuccgauacacccggcgaaagaaacccuuaugagaacauccuguacaagauuugucucucuggggacggauggcccuauaucgcgagccggaccuccauugugggccgcgccugggaaaauacgguuguggaucuggagcaggacaacaaaccucagaagaucgggaauggaggcagcaacaaaucucuucaguccgcuggcuuugccgcugggcugacauacagccaacucaugacccugaaggauuucaaaugcuuuaaucugaucccgaacgccaagacauggauggacauugagggaagacccgaagauccugucgagaucgcccuuuaccagcccucuuccggcuguuaugugcacuucuuucgggaaccuaccgaccucaagcaguucaaacaggacgcuaaguacagccaugggauugauguuaccgaccuguuugcggcccaacccggacugacauccgcugugaucgaggcccucccgagaaauauggucauuacgugccagggcucugaagauauccgcaaacugcuugagagccaggggcggagagacaucaagcugauugauaucacccucuccaaagccgacucucgcaaguucgagaacgcugugugggaucaguuuaaggaccugugucacaugcauacaggcgucgugguugaaaagaagaaacggggaggcaaggaggaaauuaccccucacugcgcccugauggauuguaucauguucgacgcggcugugagcgggggacuugaugccaaaguccucagagugguucugccccgcgacaugguguuccggacauccaccccuaaggucgugcugugaggacuagucccuguucccagagcccacuuuuuuuucuuuuuuugaaauaaaauagccugucuuucagaucucaaaggcucuuuucagagccaccaaaaaaaaaaaaaaaaaaaaaaaaaaaaaaaaaaaaaaaaaaaaaaaaaaaaaaaaaaaaaaaaagaauu

SEQ ID NO: 18176 - RNA, 2014 nt, Artificial Sequence
  mRNA product Design a-1 (hSL-A64-N5) comprising derived and/or modified sequence from LASV(AV;Clade V)__CCA30315__SP-HsPLAT_NP(2-569) (opt5)
aggagagucccgcagucggcguccagcggcucugcuuguucgugugugugucguugcaggccuuauucaagcuuaccauggacgccaugaagagaggccugugcugugugcuccugcuuugcggggcugucuucguuagccccagcgccuccaaggaggugaaaucuuuccuguggacccagagccucagacgggaacuguccggcuacugcucuaacaucaaacuucaagucguuaaggacgcucaggcccugcuccacgggcuggauuuuagcgagguguccaaugugcagcgccuuaugagaaagcagcggcgcgacgauucugaccugaaaagacuccgggaucugaaccaagcggucaauaaccugguggaacucaagagcacacagcagaaguccguucugcgcgugggaacgcuuagcucugacgaucugcucacccuggcugccgaccuugagaaacugaaguccaaagucacaagaaccgaacggccccucagcucuggcguguauauggggaaucuguccagccagcaacuggaucagcgcagagcccuccugaaccuuauuggaaugacaaauggcucucaggggucccaggcuggacgggacggcguugugcgcgucugggaugugaagaacgccgagcugcucaauaaccaauucggcaccaugccuagccugacacuugcuugucugaccaaacagggacagguggaccucaaugaugucguucaagcccugacggaccuggggcucaucuacaccgcgaaguauccgaacacauccgaccuggauagacuuacccagucucaucccauucugaauaugaucgacacaaagaaaagcucccucaacauuagcggcuacaauuuuucucugggggccgcugugaaggccggagcuugcaugcuugauggcgggaacaugcuggagaccaucaaaguguccccucagagcauggacggaauccucaagucuauucugaaagucaagcgggcccugggcauguucgugagcgauacgcccggcgaacgcaacccuuaugagaauauccucuacaaaauuugucuguccggggacggauggcccuauaucgcgucuagaacaagcauuguuggccgggccugggaaaacaccguggucgaucuugagacagacgggaagccucagaagaucggauccggcaauagcaacaaaucucugcaauccgcuggguuuagcgccggacucaccuacucucagcugaugacccugaaggaugcuaugcuucagcucgacccgaaugccaaaacauggauggauauugagggcagacccgaagacccuguggagguugcccuguaccagcccaucuccggcugcuauauccacuucuuucgcgaaccuacggaccugaagcaauucaaacaggaugcuaaguacagccaugggauugacaucgcggaucucuuugccgcucagcccggacugaccuccgccgugauugaggcccuuccgcggaacauggucaucacaugucagggcucugaagacauuaagaaacugcucgagagccaagggagaaaggauaucaaacugaucgacauugcucuguccaagaucgauucucgcaaauucgagaaugccgugugggaccaguauaaggaucuuugccacaugcauaccggagucgugguugaaaagaaaaagcggggcgggaaagaggaaauuacaccucacugugcgcucauggacugcaucauguuugaugcugccgugagcggcggacugaacacccugguccucagagccgugcugccccgcgacaugguuuuccggacguccacaccuagagugguccuuugaggacuagucccuguucccagagcccacuuuuuuuucuuuuuuugaaauaaaauagccugucuuucagaucucaaaggcucuuuucagagccaccaaaaaaaaaaaaaaaaaaaaaaaaaaaaaaaaaaaaaaaaaaaaaaaaaaaaaaaaaaaaaaaaagaauu

SEQ ID NO: 18177 - RNA, 2014 nt, Artificial Sequence
  mRNA product Design a-1 (hSL-A64-N5) comprising derived and/or modified sequence from LASV(Togo/2016/7082;Clade VI)__AMR44578__SP-HsPLAT_NP(2-569) (opt5)
aggagagucccgcagucggcguccagcggcucugcuuguucgugugugugucguugcaggccuuauucaagcuuaccauggacgccaugaagagaggccugugcugugugcuccugcuuugcggggcugucuucguuagccccagcaacuccaaggaggugaaaucuuuccuguggacccagagccucagacgggaacuguccggcuacugcucuaauaucaaacuucaagucguuaaagacgcccaggcucugcuccacgggcuggauuuuagcgagguguccaacgugcagcgccuuaugagaaagcagaaacgggacgauggagaccugaagcgccucagagaucugaaucaagccgucaacaaucugguggaacucaagucuguucagcagaaaagcauucugcgggugggcacacuuacguccgacgaucugcucacccuggcggcugaccuugagaagcugaaaagcaaggucacacgcaccgaaagaccccucucuuccgggguguauaugggaaaccugagcucucagcaacuggaucagcggcgcgcccuccuguccaugaucggcaugagcgggggaaaucagaacucucagccuaaaggcgacggcguugugagagucugggaugugaagaaugccgaccuucugaacaaucaauucgggacaaugccgucccucacccuggcuugucuuacaaagcagggacagguggaucugaacgacgccguccaagcucucaccgaccugggccugauuuacacggccaaauaucccaauagcuccgaucucgaccggcugucucagagccauccuauccuuaacaugauugauaccaagaaauccagccugaauaucucuggguacaacuuuucccucggagcggccaucaagacaggcgcuugcaugcuggacgggggaaacaugcuugagaccauuaaaguuacaccccagaccauggauggcauccucaagagcauucugaaagugaagcgcucucugggcauguucaucagcgacacgccuggggagagaaaucccuaugaaaacauucuguacaagaucugucucuccggagauggcuggccuuauauugccucucggacagcuaucaucgggcgcgccugggagaauaccguggucgaccuggaaagcgauuccaaaccgcagaagauuggaagcaacggcucuaauaaaucccuucaaagcgcgggguuugcccccggacugacauacucucagcucaugacccugaaggacuccaugcugcagcuugauccuaacgcuaaaaccuggaucgacauugagggcagacccgaggacccuguggaaguugcccucuuccagcccaucagcggcugcuacauucacuuuuuccgggagccgacagaucugaagcaauuuaagcaggacgcuaaauauucccaugggaucgaugugacggaccuguucgccgcccagccuggacucaccucugcugucaucgaagcgcugcccagaaauauggugcuuacaugucagggcagcgaugacauuaagaaacugcucgauucccaagggcgccgggacaucaagcugauugauguuucucugaacaaaaucgacagcagaaaguuugagaaugccgugugggaucaguacaaggaccuuugccacaugcauaccggagucguggucgaaaagaagaaaaagggcgggaaagaggagauuacaccucacugugcucuccuggauugcaucauguucgacgccgccguguccggcggacugaacgcuaccguucuccgcgccgugcugccccgggacauggucuuuagaacgagcucucccaaggugguucuuugaggacuagucccuguucccagagcccacuuuuuuuucuuuuuuugaaauaaaauagccugucuuucagaucucaaaggcucuuuucagagccaccaaaaaaaaaaaaaaaaaaaaaaaaaaaaaaaaaaaaaaaaaaaaaaaaaaaaaaaaaaaaaaaaagaauu

SEQ ID NO: 18178 - RNA, 2014 nt, Artificial Sequence
  mRNA product Design a-1 (hSL-A64-N5) comprising derived and/or modified sequence from LASV(KAK-428;Clade n.d. (VII))__ANH09741__SP-HsPLAT_NP(2-569) (opt5)
aggagagucccgcagucggcguccagcggcucugcuuguucgugugugugucguugcaggccuuauucaagcuuaccauggacgccaugaagagaggccugugcugugugcuccugcuuugcggggcugucuucguuagccccagcaacuccaaggaggugaaaucuuuccuguggacccagagccucagacgggaacuguccggcuacugcacaaauaucaaacuucaagucguuaaggacgcccaggcucugcuccacgggcuggauuuuucugaggugagcaacgugcagcgccuuaugagaaagcagaaacgggacgauaaugaccugaagcgccucagagaucugaaccaagccgucaauaaccugguggaacucaaguccguucagcagaaaucugugcugaaggucggaacgcuuaauagcgacgaucugcucacccuggcggcugaccuugagaaacugaaguccaaagugguucggacagaacgcccccucagcucuggcguguauauggggaaccuguccagccagcaacuggaucagagacgggcccuccugaauaugauuggaauggccggcgggucucagggaaaccagccuucccgcgacggcgucgugagagugugggaugucaagaaugcugaccuucugaacaaucaauucggcaccaugccgagccucacacuggccugucuuaccaagcaggggcagguugaucugaacgacguggugcucgcucugacagaccugggacucaucuacaccgccaaauaucccaauucuuccgaucuggaccggcuuagccaaaaccauccuguccugaacaugauugaugugaauaaguccucucucaacaucagcggcuacaauuuuucccugggggcggccguuaaagcuggagccugcaugcuugacggcgggaacaugcuggagacgauuaagaucagcccccagaccguggauggaauccucaaaucuauucugaaggucaaacgcgcucugggcauguucguguccgacacaccuggcgagagaaaucccuaugaaaacauccucuacaagguuugucugagcgggaauggauggccuuauauugccucucggaccagcaucgugggccgcgcgugggagaacacagucguggaucuugaauccaauaagaaccagccgaaagucgggaauaacggaucuaauaagaugcugcagagcuccggcuuugccaccgggcucacguacagccaacugaugacacugagagacucuaugcuucagcucgaucccaccgcuaaaacauggauugacaucgagggacggccugaggaucccguggaacuggcccuguuccagccuuccagcggcugcuacauucacuuuuucagagagcccaccgaccucaagcaguuuaaacaagacgcuaaguauucucauggcaucgauguuaacgaccuguucuccgcccagccggggcuuaccagcgccgugcuggaagcucucccucgcaauaugguccugacaugucagggauccgaugacauccggaagcugcuugauucucaggacagaaaagauauuaagcucaucgacauuagccuguccaaagcggaugcccgcaaguuugagaacgacgugugggaucaauucaaagaccugugccacaugcauacgggcaucguuguggaaaagaagaaaaagggagggaaacaggagaugacaccccacugugcucuccuggauugcauuauguuugacgccgccgucucuggcgggcuuaacgugccuacccugcgggcugugcuccccaccgacaugguuuucagaacaaucaccacgaaggucgugcugugaggacuagucccuguucccagagcccacuuuuuuuucuuuuuuugaaauaaaauagccugucuuucagaucucaaaggcucuuuucagagccaccaaaaaaaaaaaaaaaaaaaaaaaaaaaaaaaaaaaaaaaaaaaaaaaaaaaaaaaaaaaaaaaaagaauu

SEQ ID NO: 18179 - RNA, 2014 nt, Artificial Sequence; identical to SEQ ID NO: 18173
  mRNA product Design a-1 (hSL-A64-N5) comprising derived and/or modified sequence from LASV(Pinneo-NIG-1969;Clade I)__AIT17837__SP-HsPLAT_NP(2-569) (opt5)

SEQ ID NO: 18180 - RNA, 2014 nt, Artificial Sequence
  mRNA product Design a-1 (hSL-A64-N5) comprising derived and/or modified sequence from LASV(ISTH0009-NIG-2011;Clade II)__AIT17405__SP-HsPLAT_NP(2-569) (opt5)
aggagagucccgcagucggcguccagcggcucugcuuguucgugugugugucguugcaggccuuauucaagcuuaccauggacgccaugaagagaggccugugcugugugcuccugcuuugcggggcugucuucguuagccccagcguguccaaggaggucaaaucuuuccuguggacccagagccucagacgggaacuguccggcuacugcucuaacaucaaacuucaaguugugaaggacgcccaggcucugcuccacgggcuggauuuuagcgagguguccaauguccagcgccuuaugagaaagcagaaacgggacgauucugaccugaagcgccucagagaucugaaccaagccgugaauaaccugguugaacucaagagcacacagcagaaauccauucugcgggugggaacgcuuaccagcgacgaucugcucacacuggcggcugaccuugagaagcugaaaucuaaggucauccgcaccgaaagaccccucuccagcggcguguauauggggaaucugucuacacagcaacuggagcagcggcgcgcccuccugaacaugauuggaaugguuggcggggcccagggaacccagccuggcagagauggcgugguccgggugugggacgugaaaaauccggaucuucugaacaaucaauucgggacaaugcccucccucacccuggcuugucuuacgaagcagggacaggucgaccugaacgaugccguucucgcucugaccgaccugggccucaucuacacagccaaguauccuaauagcucugaccuggaucgccuuucccaaagccaucccauucugaacaugguggacaucaaaaaguccucucucaauaucagcggguacaacuuuucccugggagcggccgugaaagcuggcgccugcaugcuugaugggggaaauaugcuggagaccauuaaggucacaccucagaccauggacggcauccucaaaagcauucugaaggugaaaagaucucugggcauguucguuuccgauacgcccggggaacggaacccuuaugagaacauccucuacaagauuugucugagcggagacggcuggccguauaucgcuucucgcacaagcauuguggggagagccugggaaaauaccacagucgaucuugaguccgacggaaagccccagaaagugggcucugcggggagcaacaagucccugcagagcgccggauuuccuaccggccucaccuacucucaacugaugacacugaaagauuccaugaugcagcuugaccccagcgcuaagacguggaucgauaucgagggccggccugaagaccccguugagauugcccucuaccagccgaugucugggugcuauauccacuucuuuagagaaccuaccgaccugaaacaguucaagcaagaugcuaaguacucccauggaauugacguggccgaucuguuucccgcccagccuggccucacaagcgcugucaucgaggcgcugccccgcaauauggugcuuaccugucagggguccgacgauauuaaacggcugcucgacucucagggaagacgcgauaucaagcugaucgacauugcccugagcaaagcugauucccggagauucgaaaacgccgucugggaccaaugcaaggaucuuugucacaugcauacaggcgugguuguggagaaaaagaagcgcgggggcaaagaggaaaucacgccccacugcgcccucauggacuguauuauguaugaugcugccgucucuggaggccugaauaucccugugcugcgggcgguucucccgagagacaugguguuucgcaccagcucccccaaggucgugcugugaggacuagucccuguucccagagcccacuuuuuuuucuuuuuuugaaauaaaauagccugucuuucagaucucaaaggcucuuuucagagccaccaaaaaaaaaaaaaaaaaaaaaaaaaaaaaaaaaaaaaaaaaaaaaaaaaaaaaaaaaaaaaaaaagaauu

SEQ ID NO: 18181 - RNA, 2014 nt, Artificial Sequence
  mRNA product Design a-1 (hSL-A64-N5) comprising derived and/or modified sequence from LASV(ISTH2010-NIG-2012;Clade II)__AIT17483__SP-HsPLAT_NP(2-569) (opt5)
aggagagucccgcagucggcguccagcggcucugcuuguucgugugugugucguugcaggccuuauucaagcuuaccauggacgccaugaagagaggccugugcugugugcuccugcuuugcggggcugucuucguuagccccagcgccuccaaggaggugaaaucuuuccuguggacccagagccucagacgggaacuguccggcuacugcucuaacaucaaacuucaagucguuaaggacgcucaggcccugcuccacgggcuggauuuuagcgagguguccaaugugcagcgccuuaugagaaagcagaaacgggacgauucugaccugaagcgccucagagaucugaaccaagcggucaauaaccugguggaacucaagagcacacagcagaaauccauucugcggguuggaacgcuuaccagcgacgaucugcucacacuggcugccgaccuugagaagcugaaaucuaaggugauccgcaccgaaagaccccucuccagcggcgucuauauggggaaucugucuacacagcaacuggagcagcggcgcgcccuccugaaccuuauuggaauggugggcggggcucagggaacccagccuggcagagauggcguugugcgggucugggacgugaaaaauccggaucugcucaacaaucaauucgggacaaugcccucccugacccuugccugucugacgaagcagggacagguggaccucaacgaugcuguccuggcccugaccgaccucggccugaucuacacagcgaaguauccuaauagcucugaccuugaucgccugucccaaagccaucccauucucaacaugguugacaccaaaaaguccucucugaauaucagcggguuuaacuucucccuuggagccgcugugaaagccggcgcuugcaugcuggaugggggaaauaugcucgagacaaucaaggugaccccucagacgauggacggcauucugaaaagcauccugaaggucaaaaagucucucggcauguuuguguccgauacacccggggaaagaaacccuuacgagaacauucuguauaagaucugucuuagcggagacggcuggccguacauugccucucggaccagcaucguugggcgcgcgugggaaaauacaaccguggaucuggaguccgacggaaaaccccacaaggucggcaccgccgggucuaacaaaagccuccaguccgcuggauucccuacaggccugacguauagccagcugaugacccuuaaggauucuaugaugcaacucgaccccuccgccaaaacauggauugauaucgagggcagaccugaagaccccguggagaucgcucuguaccagccgaugagcgggugcuacauucacuuuuuccgggaaccuaccgaccugaagcaguuuaagcaggaugccaaauauucucauggaaucgacguugccgaucucuuccccgcucaaccuggccugacauccgcggugauugaggcccuucccagaaauaugguccugaccugucaggggagcgacgauaucaagcgccuccuggacucccagggacggagagauauuaaacugaucgacaucgcucuuucuaaggccgauagccgccgguuugaaaacgccgugugggaccagugcaaagaucucugucauaugcacacgggcgucgugguugagaagaagaaaagagggggcaaggaggaaauuacaccccacugcgcucugauggacuguaucauguacgaugccgcgguguccggaggccugaauauuccuguccuccgcgcugugcugccgcgggacaugguuuucagaaccucuagccccaaagugguccuuugaggacuagucccuguucccagagcccacuuuuuuuucuuuuuuugaaauaaaauagccugucuuucagaucucaaaggcucuuuucagagccaccaaaaaaaaaaaaaaaaaaaaaaaaaaaaaaaaaaaaaaaaaaaaaaaaaaaaaaaaaaaaaaaaagaauu

SEQ ID NO: 18182 - RNA, 2014 nt, Artificial Sequence
  mRNA product Design a-1 (hSL-A64-N5) comprising derived and/or modified sequence from LASV(Lassa virus/H.sapiens-wt/NGA/2015/ISTH_0543;Clade II)__AVO03640__SP-HsPLAT_NP(2-569) (opt5)
aggagagucccgcagucggcguccagcggcucugcuuguucgugugugugucguugcaggccuuauucaagcuuaccauggacgccaugaagagaggccugugcugugugcuccugcuuugcggggcugucuucguuagccccagcgccuccaaggaggugaaaucuuuccuguggacccagagccucagacgggaacuguccggcuacugcucuaacaucaaacuucaagucguuaaggacgcucaggcccugcuccacgggcuggauuuuagcgagguguccaaugugcagcgccuuaugagaaagcagaaacgggacgauucugaccugaagcgccucagagaucugaaccaagcggucaauaaccugguggaacucaagagcacacagcagaaauccauucugcggguuggaacgcuuaccagcgacgaucugcucacacuggcugccgaccuugagaagcugaaaucuaaggugauccgcaccgaaagaccccucuccagcggcgucuauauggggaaucugucuacacagcaacuggagcagcggcgcgcccuccugaacaugauuggaauggugggcggggcucagggaacccagccuggcagagauggcguugugcgggucugggacgugaaaaauccggaucuucugaacaaucaauucgggacaaugcccucccucacccuggccugucuuacgaagcagggacagguggaccugaacgaugcuguccucgcccugaccgaccugggccucaucuacacagcgaaguauccuaauagcucugaccuggaucgccuuucccaaagccaucccauucugaacaugguugacaccaaaaaguccucucucaauaucagcggguacaacuuuucccugggagccgcugugaaagccggcgcuugcaugcuugaugggggaaauaugcuggagacaaucaaggugaccccucagacgauggacggcauucucaaaagcauccugaaggucaaaaagucucugggcauguucguguccgauacacccggggaaagaaacccuuaugagaacauucucuacaagaucugucugagcggagacggcuggccguauauugccucucggaccagcaucguugggcgcgcgugggaaaauacaaccguggaucuugaguccgacggaaaaccccagaaggucggcucugccgggagcaacaaaucccugcagagcgcuggauuuccuaccggccucacauacucucaacugaugacgcugaaggauuccaugaugcagcuugaccccagcgccaaaaccuggauugauaucgagggcagaccugaagaccccguggagaucgcucucuaccagccgaugucugggugcuauauucacuucuuucgggaaccuacagaccugaagcaguucaagcaagaugccaaauacucccauggaaucgacguugccgaucuguuucccgcucagccuggccucaccagcgcggugauugaggcccugcccagaaauaugguccuuacaugucagggguccgacgauaucaagcgccugcucgacucucagggacggaaagauauuaagcugaucgacaucgcucugagcaaagccgauuccagacgcuucgaaaacgccgugugggaccaaugcaaggaucuuugucacaugcauaccggcgucgugguugagaagaaaaagagagggggcaaagaggaaauuacgccccacugcgcucucauggacuguaucauguaugaugccgcggugucuggaggccugaauauuccuguccugcgggcugugcucccgcgcgacaugguuuuucggacaagcucccccaaggugguccugugaggacuagucccuguucccagagcccacuuuuuuuucuuuuuuugaaauaaaauagccugucuuucagaucucaaaggcucuuuucagagccaccaaaaaaaaaaaaaaaaaaaaaaaaaaaaaaaaaaaaaaaaaaaaaaaaaaaaaaaaaaaaaaaaagaauu

SEQ ID NO: 18183 - RNA, 2014 nt, Artificial Sequence
  mRNA product Design a-1 (hSL-A64-N5) comprising derived and/or modified sequence from LASV(Lassa virus/H.sapiens-wt/NGA/2016/ISTH_0009;Clade II)__AVO03572__SP-HsPLAT_NP(2-569) (opt5)
aggagagucccgcagucggcguccagcggcucugcuuguucgugugugugucguugcaggccuuauucaagcuuaccauggacgccaugaagagaggccugugcugugugcuccugcuuugcggggcugucuucguuagccccagcgccuccaaggaggugaaaucuuuccuguggacccagagccucagacgggaacuguccggcuacugcucuaacaucaaacuucaagucguuaaggacgcucaggcccugcuccacgggcuggauuuuagcgagguguccaaugugcagcgccuuaugagaaagcagaaacgggacgauucugaccugaagcgccucagagaucugaaccaagcggucaauaaccugguggaacucaagagcacacagcagaaauccauucugcggguuggaacgcuuaccagcgacgaucugcucacacuggcugccgaccuugagaagcugaaaucuaaggugauccgcaccgaaagaccccucuccagcggcgucuauauggggaaucugucuacacagcaacuggagcagcggcgcgcccuccugaacaugauuggaauggugggcggggcucagggaacccagccuggcagagauggcguugugcgggucugggacgugaaaaauccggaucuucugaacaaucaauucgggacaaugcccucccucacccuggccugucuuacgaagcagggacagguggaccugaacgaugcuguccucgcccugaccgaccugggccucaucuacacagcgaaguauccuaauagcucugaccuggaucgccuuucccaaagccaucccauucugaacaugguugacaccaaaaaguccucucucaauaucagcggguacaacuuuucccugggagccgcugugaaagccggcgcuugcaugcuugaugggggaaauaugcuggagacaaucaaggugaccccucagacgauggacggcauucucaaaagcauccugaaggucaaaaagucucugggcauguucguguccgauacacccggggaaagaaacccuuaugagaacauucucuacaagaucugucugagcggagacggcuggccguauauugccucucggaccagcaucguugggcgcgcgugggaaaauacaaccguggaucuugaguccgacggaaaaccccagaaggucggcucugccgggagcaacaaaucccugcagagcgcuggauuuccuaccggccucacauacucucaacugaugacgcugaaggauuccaugaugcagcuugaccccagcgccaaaaccuggauugauaucgagggcagaccugaagaccccguggagaucgcucucuaccagccgaugucugggugcuauauucacuucuuucgggaaccuacagaccugaagcaguucaagcaagaugccaaauacucccauggaaucgacguugccgaucuguuucccgcucagccuggccucaccagcgcggugauugaggcccugcccagaaauaugguccuuacaugucagggguccgacgauaucaagcgccugcucgacucucagggacggagagauauuaaacugaucgacaucgcucugagcaaggccgauucccgccgguucgaaaacgccgugugggaccaaugcaaagaucuuugucacaugcauaccggcgucgugguugagaagaagaaaagagggggcaaggaggaaauuacgccccacugcgcucucauggacuguaucauguaugaugccgcggugucuggaggccugaauauuccuguccugcgcgcugugcucccgcgggacaugguuuuuagaacaagcucccccaaagugguccugugaggacuagucccuguucccagagcccacuuuuuuuucuuuuuuugaaauaaaauagccugucuuucagaucucaaaggcucuuuucagagccaccaaaaaaaaaaaaaaaaaaaaaaaaaaaaaaaaaaaaaaaaaaaaaaaaaaaaaaaaaaaaaaaaagaauu

SEQ ID NO: 18184 - RNA, 2014 nt, Artificial Sequence
  mRNA product Design a-1 (hSL-A64-N5) comprising derived and/or modified sequence from LASV(Lassa virus/H.sapiens-wt/NGA/2016/ISTH_0017;Clade II)__AVO03568__SP-HsPLAT_NP(2-569) (opt5)
aggagagucccgcagucggcguccagcggcucugcuuguucgugugugugucguugcaggccuuauucaagcuuaccauggacgccaugaagagaggccugugcugugugcuccugcuuugcggggcugucuucguuagccccagcgccuccaaggaggugaaaucuuuccuguggacccagagccucagacgggaacuguccggcuacugcucuagcaucaaacuucaagucguuaaggacgcucaggcccugcuccacgggcuggauuuuuccgaggugucuaacgugcagcgccuuaugagaaagcagaaacgggacgauagcgaccugaagcgccucagagaucugaaucaagcggucaacaaucugguggaacucaaguccacacagcagaaaagcauucugcggguuggaacgcuuaccucugacgaucugcucacacuggcugccgaccuugagaagcugaaauccaaggugauccgcaccgaaagaccccucagcucuggcgucuauauggggaaccuguccacacagcaacuggagcagcggcgcgcccuccugaauaugauuggaauggcuggcggggcccagggaacccagccuggcagagauggcgugguucgggugugggacgucaaaaacccggaucuucugaauaaccaauucgggacaaugcccagccucacccuggcuugucuuacgaagcagggacagguggaccugaaugaugccgugcucgcgcugaccgaccugggccucaucuacacagccaaguauccuaacucuuccgaccuggaucgccuuagccaaucccaucccauucugaauauggucgacaccaaaaagucuagccucaacaucuccggguacaauuuuagccugggagcugccguuaaagcuggcgccugcaugcuugaugggggaaacaugcuggagacaaucaaggugaccccucagacgauggacggcauucucaaaucuauccugaaggugaaaagaucccugggcauguucgucagcgaugcgcccggggaacggaauccuuaugagaacauucucuacaagaucugucugucuggagacggcuggccguauauugccagccgcacauccaucguggggagagcuugggaaaacaccacaguugaucuugagucugacggaaagccccagaaagugggcgccaccgggagcaauaagucccugcagagcgcuggauuuccuaccggccucacauacucucaacugaugacgcugaaagauuccaugaugcagcuugaccccagcgccaagaccuggauugauaucgagggccggccugaagaccccgucgagguggcccucuaccagccgguuucugggugcuauauccacuucuuuagagaaccuacagaccugaaacaguucaagcaagaugcuaaguacucccauggaauugacguggcggaucuguuucccgcccagccuggccucaccagcgcugucaucgaggcccugccccgcaacauggugcuuacaugucagggguccgacgauauuaaaaagcugcucgacucucagggacggaaagauaucaagcugauugacaucgcccugagcaaagcugauuccagacgcuucgaaaaugccgucugggaccaaugcaaggaucuuugucacaugcauaccggcgugguuguggagaagaaaaagagagggggcaaagaggaaaucacgccccacugcgcgcucauggacuguauuauguaugaugcugccgucucuggaggccugaacaucccugugcugcgggccguucucccgcgcgacaugguguuucggacaagcucccccaaggucgugcugugaggacuagucccuguucccagagcccacuuuuuuuucuuuuuuugaaauaaaauagccugucuuucagaucucaaaggcucuuuucagagccaccaaaaaaaaaaaaaaaaaaaaaaaaaaaaaaaaaaaaaaaaaaaaaaaaaaaaaaaaaaaaaaaaagaauu

SEQ ID NO: 18185 - RNA, 2014 nt, Artificial Sequence
  mRNA product Design a-1 (hSL-A64-N5) comprising derived and/or modified sequence from LASV(Lassa virus/H.sapiens-wt/NGA/2018/ISTH_0959;Clade II)__AVV65100__SP-HsPLAT_NP(2-569) (opt5)
aggagagucccgcagucggcguccagcggcucugcuuguucgugugugugucguugcaggccuuauucaagcuuaccauggacgccaugaagagaggccugugcugugugcuccugcuuugcggggcugucuucguuagccccagcgccuccaaggaggugaaaucuuuccuguggacccagagccucagacgggaacuguccggcuacugcucuaacaucaaacuucaagucguuaaggacgcucaggcccugcuccacgggcuggauuuuagcgagguguccaaugugcagcgccuuaugagaaagcagaaacgggacgauucugaccugaagcgccucagagaucugaaccaagcggucaauaaccugguggaacucaagagcacccagcagaaauccauucugcggguuggaacgcuuaccagcgacgaucugcucacacuggcugccgaccuugagaagcugaaaucuaaggugauccgcaccgaaagaccccucuccagcggcgucuauauggggaaucugucuacacagcaacuggagcagcggcgcgcccuccugaaccuuauuggaauggugggcggggcucagggaacccagccuggcagagauggcguugugcgggucugggacgugaaaaauccggaucugcucaacaaucaauucgggacaaugcccucccugacccuugccugucugacgaagcagggacagguggaccucaacgaugucguucuggcucugaccgaccucggccugaucuacacagccaaguauccuaauagcucugaccuugaucgccugucccaaagccaucccauucucaacaugguggacaccaaaaaguccucucugaauaucagcggguuuaacuucucccuuggagcggccgugaaagcuggcgccugcaugcuggaugggggaaauaugcucgagacaaucaaggucaccccucagacgauggacggcauucugaaaagcauccugaaggugaaaaagucucucggcauguuuguuuccgauacacccggggaaagaaacccuuacgagaacauucuguauaagaucugucuuagcggagacggcuggccguacauugcuucucggaccagcaucguggggcgcgccugggaaaauacaaccgucgaucuggaguccgacggaaaaccccacaaggugggcaccgcggggucuaacaaaagccuccaguccgccggauucccuacaggccugacguauagccagcugaugacccuuaaggauucuaugaugcaacucgaccccuccgcuaaaacauggauugauaucgagggcagaccugaagaccccguugagaucgcccuguaccagccgaugagcgggugcuacauucacuuuuuccgggaaccuaccgaccugaagcaguuuaagcaggaugcuaaauauucucauggaaucgacguggccgaucucuuccccgcccaaccuggccugacauccgcugucauugaggcgcuucccagaaauauggugcugaccugucaggggagcgacgauaucaagcgccuccuggacucccagggacggaaagauauuaagcugaucgacaucgcccuuucuaaaacggauagcagacgcuuugaaaacgcugucugggaccagugcaaggaucucugucauaugcacacaggcgugguuguggagaagaaaaagagagggggcaaagaggaaauuacaccccacugcgcccugauggacuguaucauguacgaugccgcugucuccggaggccugaauauuccugugcuccgggccguucugccgcgcgacaugguguuccggaccucuagccccaaggucgugcuuugaggacuagucccuguucccagagcccacuuuuuuuucuuuuuuugaaauaaaauagccugucuuucagaucucaaaggcucuuuucagagccaccaaaaaaaaaaaaaaaaaaaaaaaaaaaaaaaaaaaaaaaaaaaaaaaaaaaaaaaaaaaaaaaaagaauu

SEQ ID NO: 18186 - RNA, 2014 nt, Artificial Sequence
  mRNA product Design a-1 (hSL-A64-N5) comprising derived and/or modified sequence from LASV(LASV003-NIG-2008;Clade II)__AIT17581__SP-HsPLAT_NP(2-569) (opt5)
aggagagucccgcagucggcguccagcggcucugcuuguucgugugugugucguugcaggccuuauucaagcuuaccauggacgccaugaagagaggccugugcugugugcuccugcuuugcggggcugucuucguuagccccagcgccuccaaggaggugaaaucuuuccuguggacccagagccucagacgggaacuguccggcuacugcucuagcaucaaacuucaagucguuaaggacgcucaggcccugcuccacgggcuggauuuuuccgaggugucuaacgugcagcgccuuaugagaaagcagaaacgggacgauagcgaccugaagcgccucagagaucugaaucaagcggucaacaaucugguggaacucaaguccacccagcagaaaagcguucugcgggugggaacgcuuaccucugacgaucugcucacacuggcugccgaccuugagaagcugaaauccaaggucauucgcaccgaaagaccccucagcucuggcguguauauggggaaccuguccgcccagcaacuggagcagcggcgcacacuccugaauaugaucggaaugguuggcggggcucagggaacccagccuggcagagauggcgugguccgggugugggacgugaaaaacccggaucuucugaauaaccaauucgggacaaugcccagccucacccuggccugucuuacgaagcagggacaggucgaccugaaugauguugugcucgcucugaccgaccugggccucauuuacacagccaaguauccuaacucuuccgaccuggaucgccuuagccaaucccaucccauccugucuaugguggacaccaaaaagagcucccucaauauuagcggguacaacuuuucucugggagcggccgucaaagcuggcgccugcaugcuugaugggggaaauaugcuggagacaaucaaggugaccccucagacgauggacggcauccucaaauccauucugaagguuaaaaagagccugggcauguucgugucugauacacccggggaaagaaacccuuaugagaauauccucuacaagauuugucugagcggagacggcuggccguauaucgcuucccggaccucuauugucgggcgcgccugggaaaacacaaccguggaucuugagagcgacggaaaaccccagaagguuggcaccgcgggguccaacaaaagccugcagucugccggauuuccuacaggccucacguacucccaacugaugacccugaaggauagcaugaugcagcuugaccccucugcuaaaacauggaucgauauugagggcagaccugaagaccccguggagaucgcccucuaccagccgauguccgggugcuauauccacuucuuucgggaaccuaccgaccugaagcaguucaagcaagaugcuaaauacagccauggaauugacgucacagaucuguuucccgcccagccuggccucaccuccgccgugaucgaggcucugcccagaaauaugguccuuacgugucaggggucugacgauauuaagcgccugcucgacagccagggacggagagauaucaaacugauugacaucgcgcuguccaaggccgauucucgccgguucgaaaacgcugugugggaccaaugcaaagaucuuugucacaugcauacaggcguuguggucgagaagaagaaaagagggggcaaggaggaaaucacaccccacugcgcccucauggacuguauuauguaugaugccgcugugagcggaggccugaauaucccuguucugcgcgccgugcucccgcgggacauggucuuuagaaccuccagccccaaaguggugcugugaggacuagucccuguucccagagcccacuuuuuuuucuuuuuuugaaauaaaauagccugucuuucagaucucaaaggcucuuuucagagccaccaaaaaaaaaaaaaaaaaaaaaaaaaaaaaaaaaaaaaaaaaaaaaaaaaaaaaaaaaaaaaaaaagaauu

SEQ ID NO: 18187 - RNA, 2014 nt, Artificial Sequence
  mRNA product Design a-1 (hSL-A64-N5) comprising derived and/or modified sequence from LASV(LASV035-NIG-2009;Clade II)__AIT17589__SP-HsPLAT_NP(2-569) (opt5)
aggagagucccgcagucggcguccagcggcucugcuuguucgugugugugucguugcaggccuuauucaagcuuaccauggacgccaugaagagaggccugugcugugugcuccugcuuugcggggcugucuucguuagccccagcgccuccaaggaggugaaaucuuuccuguggacccagagccucagacgggaacuguccggcuacugcucuagcaucaaacuucaagucguuaaagacgcucaggcccugcuccacgggcuggauuuuuccgaggugucuaacgugcagcgccuuaugagaaagcagaaacgggacgauagcgaccugaagcgccucagagaucugaaucaagcggucaacaaucugguggaacucaaguccacacagcagaaaagcauucugcggguuggaacgcuuaccucugacgaucugcucacacuggcugccgaccuugagaagcugaaauccaaggugauccgcaccgaaagaccccucagcucuggcgucuauauggggaaccuguccgcccagcaacuggagcagcggcgcgcucuccugaauaugauuggaauggugggcggggcccagggaacacagccuggcagagauggcguugugcgggucugggacgugaaaaacccggaucuucugaauaaccaauucgggaccaugcccagccucacacuggcuugucuuaccaagcagggacagguggaccugaaugaugccguccucgcgcugacggaccugggccucaucuacaccgccaaguauccuaacucuuccgaccuggaucgccuuagccaaucccaucccauucugaauaugguugacacaaagaagucuagccucaacaucuccggguacaauuuuagccugggagcugccgugaaagcuggcgccugcaugcuugaugggggaaacaugcuggagaccaucaaggugacaccucagaccauggacggcauucucaaaucuauccugaaggucaaaagaucccugggcauguucgugagcgauacgcccggggaacggaauccuuaugagaacauucucuacaagaucugucugucuggagacggcuggccguauauugcgagccgcacauccaucguugggagagccugggaaaacaccacaguggaucuugagucugacggaaagccccagaaagucggcaccaccgggagcaauaagucccugcagagcgcuggauuuccuacaggccucacguacucucaacugaugacccugaaagauuccaugaugcagcuugaccccagcgccaagacauggauugauaucgagggccggccugaagaccccguggagaucgcucucuaccagccgaugucugggugcuauauucacuucuuuagagaaccuaccgaccugaaacaguucaagcaagaugccaaguacucccauggaaucgacguugccgaucuguuucccgcucagccuggccucacaagcgcggugauugaggcccugccccgcaacaugguccuuaccugucagggguccgacgauaucaaaaagcugcucgacucucagggacggagagauauuaaacugaucgacaucgcucugagcaaggccgauucccgcaaauucgaaaaugccgugugggaccaaugcaaggaucuuugucacaugcauacgggcgucgugguugagaagaaaaagagagggggcaaagaggaaauuacaccccacugcgcucucauggacuguaucauguaugaugccgcggugucuggaggccugaacauuccuguccugcgggcugugcucccgcgcgacaugguuuuucggaccagcucccccaaggugguccugugaggacuagucccuguucccagagcccacuuuuuuuucuuuuuuugaaauaaaauagccugucuuucagaucucaaaggcucuuuucagagccaccaaaaaaaaaaaaaaaaaaaaaaaaaaaaaaaaaaaaaaaaaaaaaaaaaaaaaaaaaaaaaaaaagaauu

SEQ ID NO: 18188 - RNA, 2014 nt, Artificial Sequence
  mRNA product Design a-1 (hSL-A64-N5) comprising derived and/or modified sequence from LASV(LASV1000-NIG-2009;Clade II)__AIT17783__SP-HsPLAT_NP(2-569) (opt5)
aggagagucccgcagucggcguccagcggcucugcuuguucgugugugugucguugcaggccuuauucaagcuuaccauggacgccaugaagagaggccugugcugugugcuccugcuuugcggggcugucuucguuagccccagcgccuccaaggaggugaaaucuuuccuguggacccagagccucagacgggaacuguccggcuacugcucuaacaucaaacuucaagucguuaaggacgcucaggcccugcuccacgggcuggauuuuagcgagguguccaaugugcagcgccuuaugagaaagcagaaacgggacgauucugaccugaagcgccucagagaucugaaccaagcggucaauaaccugguggaacucaagagcacacagcagaaauccauucugcggguuggaacgcuuaccagcgacgaucugcucacacuggcugccgaccuugagaagcugaaaucuaaggugauccgcaccgaaagaccccucuccagcggcgucuauauggggaaucugucuacacagcaacuggagcagcggcgcgcccuccugaacaugauuggaauggugggcggggcucagggaacccagccuggcagagauggcguugugcgggucugggacgugaaaaauccggaucuucugaacaaucaauucgggacaaugcccucccucacccuggccugucuuacgaagcagggacagguggaccugaacgaugucguucucgcucugaccgaccugggccucaucuacacagccaaguauccuaauagcucugaccuggaucgccuuucccaaagccaucccauucugaacaugguggacaccaaaaaguccucucucaauaucagcggguacaacuuuucccugggagcggccgugaaagcuggcgccugcaugcuugaugggggaaauaugcuggagacaaucaaggucaccccucagacgauggacggcauucucaaaagcauccugaaggugaaaaagucucugggcauguucguuuccgauacacccggggaaagaaacccuuaugagaacauucucuacaagaucugucugagcggagacggcuggccguauauugcuucucggaccagcaucguggggcgcgccugggaaaauacaaccgucgaucuugaguccgacggaaaaccccagaaggugggcaccgcggggucuaacaaaagccugcaguccgccggauuuccuacaggccucacguacagccaacugaugacccugaaggauucuaugaugcagcuugaccccuccgcuaaaacauggauugauaucgagggcagaccugaagaccccguugagaucgcccucuaccagccggugagcgggugcuauauucacuucuuucgggaaccuaccgaccugaagcaguucaagcaagaugcuaaauacucucauggaaucgacgucgccgaucuguuucccgcccagccuggccucacauccgcugugauugaggcgcugcccagaaauaugguccuuaccugucaggggagcgacgauaucaagcgccugcucgacucccagggacggagagauauuaaacugaucgacaucgcccugucuaaggcugauagccgccgguucgaaaacgccgugugggaccaaugcaaagaucuuugucacaugcauacgggcguuguggucgagaagaagaaaagagggggcaaggaggaaauuacaccccacugcgcccucauggacuguaucauguaugaugcugccguguccggaggccugaauauuccuguucugcgcgcggugcucccgcgggacauggucuuuagaaccucuagccccaaaguggugcugugaggacuagucccuguucccagagcccacuuuuuuuucuuuuuuugaaauaaaauagccugucuuucagaucucaaaggcucuuuucagagccaccaaaaaaaaaaaaaaaaaaaaaaaaaaaaaaaaaaaaaaaaaaaaaaaaaaaaaaaaaaaaaaaaagaauu

SEQ ID NO: 18189 - RNA, 2014 nt, Artificial Sequence
  mRNA product Design a-1 (hSL-A64-N5) comprising derived and/or modified sequence from LASV(LASV221-NIG-2010;Clade II)__AIT17625__SP-HsPLAT_NP(2-569) (opt5)
aggagagucccgcagucggcguccagcggcucugcuuguucgugugugugucguugcaggccuuauucaagcuuaccauggacgccaugaagagaggccugugcugugugcuccugcuuugcggggcugucuucguuagccccagcgccuccaaggaggugaaaucuuuccuguggacccagagccucagacgggaacuguccggcuacugcucuagcaucaaacuucaagucguuaaggacgcucaggcccugcuccacgggcuggauuuuuccgaggugucuaacgugcagcgccuuaugagaaagcagcggcgcgacgauagcgaccugaaaagacuccgggaucugaaucaagcggucaacaaucugguggaacucaaguccacacagcaaaagagcauucugcgcguuggaacgcuuaccucugacgaucugcucacacuggcugccgaccuugagaaacugaaguccaaagugaucagaaccgaacggccccucagcucuggcgucuauauggggaaccuguccacacagcagcuggagcagcgcagagcccuccugaauaugauuggaauggugggcggggcucagggaacccagccuggccgggauggcguugugcgcgucugggacgugaagaacccggaucuucugaauaaccaauucgggacaaugcccagccucacccuggccugucuuacgaaacagggacagguggaccugaaugaugcuguccucgcccugaccgaccugggccucaucuacacagcgaaguauccuaacucuuccgaccuggauagacuuagccaaucccaucccauucugaauaugguugacaccaagaaaucuagccucaacaucuccggguacaauuuuagccugggagccgcugugaaggccggcgcuugcaugcuugaugggggaaacaugcuggagacaaucaaagugaccccucagacggucgacggcauucucaagucuauccugaaagugaagcggucccugggcauguucguuagcgauacacccggggaacgcaauccuuaugagaacauucucuacaaaaucugucugucuggagacggcuggccguauauugccagcagaaccuccaucguggggcgggcgugggaaaacacaaccgucgaucuugagucugacggaaagccccagaaggugggcaccgccgggagcaauaaaucccugcagagcgcuggauuuccuacaggccucacguacucucaacugaugacccugaaggauuccaugaugcagcuugaccccagcgccaaaacauggauugauaucgagggcagaccugaagaccccguugagaucgcucucuaccagccgaugucugggugcuauauucacuucuuucgcgaaccuaccgaccugaagcaguucaaacaagaugccaaguacucccauggaaucgacguggccgaucuguuucccgcucagccuggccucacaagcgcggucauugaggcccugccccggaacauggugcuuaccugucagggguccgacgauaucaagagacugcucgacucucagggacgccgggauauuaaacugaucgacaucgcucugagcaaggccgauuccagaaaauucgaaaaugccgucugggaccaaugcaaggaucuuugucacaugcauacgggcgugguuguggagaaaaagaagcgcgggggcaaagaggaaauuacaccccacugcgcucucauggacuguaucauguaugaugccgcggucucuggaggccugaacauuccugugcugcgggcuguucucccgagagacaugguguuucgcaccagcucccccaaggucgugcugugaggacuagucccuguucccagagcccacuuuuuuuucuuuuuuugaaauaaaauagccugucuuucagaucucaaaggcucuuuucagagccaccaaaaaaaaaaaaaaaaaaaaaaaaaaaaaaaaaaaaaaaaaaaaaaaaaaaaaaaaaaaaaaaaagaauu

SEQ ID NO: 18190 - RNA, 2014 nt, Artificial Sequence
  mRNA product Design a-1 (hSL-A64-N5) comprising derived and/or modified sequence from LASV(LASV237-NIG-2010;Clade II)__AIT17639__SP-HsPLAT_NP(2-569) (opt5)
aggagagucccgcagucggcguccagcggcucugcuuguucgugugugugucguugcaggccuuauucaagcuuaccauggacgccaugaagagaggccugugcugugugcuccugcuuugcggggcugucuucguuagccccagcgccuccaaggaggugaaaucuuuccuguggacccagagccucagacgggaacuguccggcuacugcucuaacaucaaacuucaagucguuaaggacgcucaggcccugcuccacgggcuggauuuuagcgagguguccaaugugcagcgccuuaugagaaagcagaaacgggacgauucugaccugaagcgccucagagaucugaaccaagcggucaauaaccugguggaacucaagagcacacagcagaaauccauucugcggguuggaacgcuuaccagcgacgaucugcucacacuggcugccgaccuugagaagcugaaaucuaaggugauccgcaccgaaagaccccucuccagcggcgucuauauggggaaucugucuacacagcaacuggagcagcggcgcgcccuccugaacaugauuggaauggugggcggggcucagggaacccagccuggcagagauggcguugugcgggucugggacgugaaaaauccggaucuucugaacaaucaauucgggacaaugcccucccucacccuggccugucuuacgaagcagggacagguggaccugaacgaugcuguccucgcccugaccgaccugggccucaucuacacagcgaaguauccuaauagcucugaccuggaucgccuuucccaaagccaucccauucugaacaugguugacaucaaaaaguccucucucaauaucagcggguacaacuuuucccugggagccgcugugaaagccggcgcuugcaugcuugaugggggaaauaugcuggagaccauuaaggugacaccucagaccauggacggcauccucaaaagcauucugaaggucaaaagaucucugggcauguucguguccgauacgcccggggaacggaacccuuaugagaacauccucuacaagauuugucugagcggagacggcuggccguauaucgccucucgcacaagcauuguugggagagcgugggaaaauaccacaguggaucuugaguccgacggaaagccccagaaagucggcucugccgggagcaacaagucccugcagagcgcuggauuuccuaccggccucaccuacucucaacugaugacacugaaagauuccaugaugcagcuugaccccagcgccaagacguggaucgauaucgagggccggccugaagaccccguggagauugcucucuaccagccgaugucugggugcuauauccacuucuuuagagaaccuaccgaccugaaacaguucaagcaagaugccaaguacucccauggaauugacguugccgaucuguuucccgcucagccuggccucacaagcgcggugaucgaggcccugccccgcaauaugguccuuaccugucagggguccgacgauauuaaacggcugcucgacucucagggaagacgcgauaucaagcugaucgacauugcucugagcaaagccgauucccggagauucgaaaacgccgugugggaccaaugcaaggaucuuugucacaugcauacaggcgucgugguugagaaaaagaagcgcgggggcaaagaggaaaucacgccccacugcgcucucauggacuguauuauguaugaugccgcggugucuggaggccugaauaucccuguccugcgggcugugcucccgagagacaugguuuuucgcaccagcucccccaaggugguccugugaggacuagucccuguucccagagcccacuuuuuuuucuuuuuuugaaauaaaauagccugucuuucagaucucaaaggcucuuuucagagccaccaaaaaaaaaaaaaaaaaaaaaaaaaaaaaaaaaaaaaaaaaaaaaaaaaaaaaaaaaaaaaaaaagaauu

SEQ ID NO: 18191 - RNA, 2014 nt, Artificial Sequence
  mRNA product Design a-1 (hSL-A64-N5) comprising derived and/or modified sequence from LASV(LASV253-NIG-2011;Clade II)__AIT17671__SP-HsPLAT_NP(2-569) (opt5)
aggagagucccgcagucggcguccagcggcucugcuuguucgugugugugucguugcaggccuuauucaagcuuaccauggacgccaugaagagaggccugugcugugugcuccugcuuugcggggcugucuucguuagccccagcgccuccaaggaggugaaaucuuuccuguggacccagagccucagacgggaacuguccggcuacugcucuagcaucaaacuucaagucguuaaggacgcucaggcccugcuccacgggcuggauuuuuccgaggugucuaacgugcagcgccuuaugagaaagcagaaacgggacgauagcgaccugaagcgccucagagaucugaaucaagcggucaacaaucugguggaacucaaguccacccagcagaaaagcguucugcgggugggaacgcuuaccucugacgaucugcucacacuggcugccgaccuugagaagcugaaauccaaggucauucgcaccgaaagaccccucagcucuggcguguauauggggaaccuguccacacagcaacuggagcagcggcgcgcccuccugaauaugaucggaaugguuggcggggcucagggaacccagccuggcagagauggcgugguccgggugugggacgugaaaaacccggaucuucugaauaaccaauucgggacaaugcccagccucacccuggccugucuuacgaagcagggacaggucgaccugaaugauguugugcucgcucugaccgaccugggccucauuuacacagccaaguauccuaacucuuccgaccuggaucgccuuagccaaucccaucccauccugaauaugguggacaccaaaaagucuagccucaacauuuccggguacaauuuuagccugggagcggccgucaaagcuggcgccugcaugcuugaugggggaaacaugcuggagacaaucaaggugaccccucagacgauggacggcauccucaaaucuauucugaagguuaaaaagucccugggcauguucgugagcgauacacccggggaaagaaauccuuaugagaacauccucuacaagauuugucugucuggagacggcuggccguauaucgcuagccggaccuccauugucgggcgcgccugggaaaacacaaccguggaucuugagucugacggaaaaccccagaagguuggcaccgcggggagcaauaaaucccugcagagcgccggauuuccuacaggccucacguacucucaacugaugacccugaaggauuccaugaugcagcuugaccccagcgcuaaaacauggaucgauauugagggcagaccugaagaccccguggagaucgcccucuaccagccgaugucugggugcuauauccacuucuuucgggaaccuaccgaccugaagcaguucaagcaagaugcuaaauacucccauggaauugacgucacagaucuguuucccgcccagccuggccucaccagcgccgugaucgaggcucugcccagaaacaugguccuuacgugucagggguccgacgauauuaagcgccugcucgacucucagggacggagagauaucaaacugauugacaucgcgcugagcaaggccgauucccgccgguucgaaaaugcugugugggaccaaugcaaagaucuuugucacaugcauacaggcguuguggucgagaagaagaaaagagggggcaaggaggaaaucacaccccacugcgcccucauggacuguauuauguaugaugccgcugugucuggaggccugaacaucccuguucugcgcgccgugcucccgcgggacauggucuuuagaaccagcucccccaaaguggugcugugaggacuagucccuguucccagagcccacuuuuuuuucuuuuuuugaaauaaaauagccugucuuucagaucucaaaggcucuuuucagagccaccaaaaaaaaaaaaaaaaaaaaaaaaaaaaaaaaaaaaaaaaaaaaaaaaaaaaaaaaaaaaaaaaagaauu

SEQ ID NO: 18192 - RNA, 2014 nt, Artificial Sequence
  mRNA product Design a-1 (hSL-A64-N5) comprising derived and/or modified sequence from LASV(LASV254-NIG-2011;Clade II)__AIT17675__SP-HsPLAT_NP(2-569) (opt5)
aggagagucccgcagucggcguccagcggcucugcuuguucgugugugugucguugcaggccuuauucaagcuuaccauggacgccaugaagagaggccugugcugugugcuccugcuuugcggggcugucuucguuagccccagcgccuccaaggaggugaaaucuuuccuguggacccagagccucagacgggaacuguccggcuacugcucuagcaucaaacuucaagucguuaaggacgcucaggcccugcuccacgggcuggauuuuuccgaggugucuaacgugcagcgccuuaugagaaagcagaaacgggacgauagcgaccugaagcgccucagagaucugaaucaagcggucaacaaucugguggaacucaaguccacacagcagaaaagcguucugcgggugggaacgcuuaccucugacgaucugcucacacuggcugccgaccuugagaagcugaaauccaaggucauucgcaccgaaagaccccucagcucuggcguguauauggggaaccuguccacacagcaacuggagcagcggcgcgcccuccugaauaugaucggaaugguuggcggggcucagggaacccagccuggcagagauggcgugguccgggugugggacgugaaaaacccggaucuucugaauaaccaauucgggacaaugcccagccucacccuggccugucuuacgaagcagggacaggucgaccugaaugaugcuguucucgcccugaccgaccugggccucauuuacacagcgaaguauccuaacucuuccgaccuggaucgccuuagccaaucccaucccauccugaauaugguggacaccaaaaagucuagccucaacauuuccggguacaauuuuagccugggagccgcugugaaagccggcgcuugcaugcuugaugggggaaacaugcuggagacaaucaaggucaccccucagacgauggacggcauccucaaaucuauucugaaggugaaaaagucccugggcauguucguuagcgauacacccggggaaagaaauccuuaugagaacauccucuacaagauuugucugucuggagacggcuggccguauaucgccagccggaccuccauuguggggcgcgcgugggaaaacacaaucgucgaucuugagucugacggaaaaccccagaaggugggcaccgccgggagcaauaaaucccugcagagcgcuggauuuccuaccggccucacauacucucaacugaugacgcugaaggauuccaugaugcagcuugaccccagcgccaaaaccuggauugauaucgagggcagaccugaagaccccguugagaucgcucucuaccagccgaugucugggugcuauauucacuucuuucgggaaccuacagaccugaagcaguucaagcaagaugccaaauacucccauggaaucgacguggccgaucuguuucccgcucagccuggccucaccagcgcggucauugaggcccugcccagaaacauggugcuuacaugucagggguccgacgauaucaagcgccugcucgacucucagggacggagagauauuaaacugaucgacaucgcucugagcaaggccgauucccgccgguucgaaaaugccgucugggaccaaugcaaagaucuuugucacaugcauaccggcgugguuguggagaagaagaaaagagggggcaaggaggaaauuacgccccacugcgcucucauggacuguaucauguaugaugccgcggucucuggaggccugaacauuccugugcugcgcgcuguucucccgcgggacaugguguuuagaacaagcucccccaaagucgugcugugaggacuagucccuguucccagagcccacuuuuuuuucuuuuuuugaaauaaaauagccugucuuucagaucucaaaggcucuuuucagagccaccaaaaaaaaaaaaaaaaaaaaaaaaaaaaaaaaaaaaaaaaaaaaaaaaaaaaaaaaaaaaaaaaagaauu

SEQ ID NO: 18193 - RNA, 2014 nt, Artificial Sequence
  mRNA product Design a-1 (hSL-A64-N5) comprising derived and/or modified sequence from LASV(Nig08-04;Clade II)__ADU56611__SP-HsPLAT_NP(2-569) (opt5)
aggagagucccgcagucggcguccagcggcucugcuuguucgugugugugucguugcaggccuuauucaagcuuaccauggacgccaugaagagaggccugugcugugugcuccugcuuugcggggcugucuucguuagccccagcgccuccaaggaggugaaaucuuuccuguggacccagagccucagacgggaacuguccggcuacugcucuaacaucaaacuucaagucguuaaggacgcucaggcccugcuccacgggcuggauuuuagcgagguguccaaugugcagcgccuuaugagaaagcagaaacgggacgauggagaccugaagcgccucagagaucugaaccaagcggucaauaaccugguggaacucaagucuacccagcagaaaagcguucugcgggugggcacgcuuaccuccgacgaucugcucacacuggcugccgaccuugagaagcugaaaagcaaggucauucgcaccgaaagaccccucucuuccgggguguauaugggaaaucugagcacacagcaacuggagcagcggaaagcccuccugucuaugaucggcaugguugggggagcucagggcacccagccuggccgcgaugggguggucagagugugggacgugaagaacccggaucuucugaauaaccaauucggaacaaugcccucccucacccuggccugucuuacgaagcagggccaggucgaccugaaugaugcuguucucgcccugaccgaccuggggcucauuuacacagcgaaauauccuaacagcucugaccuggaucggcuuucccaaagccaucccauccugaauaugguggacaccaagaaauccucucucaacauuagcggauacaauuuuucccugggcgccgcugugaaggccggggcuugcaugcuugauggaggcaacaugcuggagacaaucaaagucaccccucagacgauggacggcauccucaagagcauucugaaagugaagcgcucucuggggauguucguuuccgauacacccggagaaagaaauccuuaugagaacauccucuacaagauuugucugagcggcgacggguggccguauaucgccucucggaccagcauugugggacgcgcgugggaaaacacaaccgucgaucuugaguccgacggcaaaccccagaagguggggaccgccggaucuaauaaaagccugcaguccgcuggcuuuccuacaggccucacguacagccaacugaugacccugaaggauucuaugaugcagcuugaccccuccgccaaaacauggaucgauauugaggggagaccugaagaccccguugagaucgcucucuaccagccgaugagcggaugcuauauccacuucuuucgggaaccuaccgaccugaagcaguucaagcaagaugccaaauacucucauggcauugacgugacagaucuguuuuccgcccagcccgggcucaccagcgcugucaucgaggcgcugccuagaaacauggugcuuacgugucagggauccgacgauauuaagaaacugcucgacucucagggccgccgggauaucaagcugauugacaucagccugaauaaagccgauuccagacgcuucgaaaacgcugucugggaccaaugcaaggaucuuugucacaugcauacaggggugguuguggagaagaaaaagcggggcggaaaagaggaaaucacaccccacugcgcccucauggacuguauuauguuugaugccgcugucucuggcgggcugaauauccccauucugagagccgugcucccucgcgacaugguuuuccggaccagcuccccgaaggugguccugugaggacuagucccuguucccagagcccacuuuuuuuucuuuuuuugaaauaaaauagccugucuuucagaucucaaaggcucuuuucagagccaccaaaaaaaaaaaaaaaaaaaaaaaaaaaaaaaaaaaaaaaaaaaaaaaaaaaaaaaaaaaaaaaaagaauu

SEQ ID NO: 18194 - RNA, 2017 nt, Artificial Sequence
  mRNA product Design a-1 (hSL-A64-N5) comprising derived and/or modified sequence from LASV(GA391;Clade III)__AAA46284__SP-HsPLAT_NP(2-570) (opt5)
aggagagucccgcagucggcguccagcggcucugcuuguucgugugugugucguugcaggccuuauucaagcuuaccauggacgccaugaagagaggccugugcugugugcuccugcuuugcggggcugucuucguuagccccagcgccuccaaggaggugagaucuugccuguggacccagagccuccggcgcgaacuguccggcuacuguucuaacaucaaacuucaagucguuaaggacgcucaggcccugcuccacgggcuggauuucagcgagguguccaaugugcagagacuuaugcggaaacagaagcgcgacgauggagaccugaaaagacuccgggaucugaaccaagcggucaauaaccugguggaacucaagucuacacagcagaaaagcguucugcgcgugggcacgcuuuccagcgacgaucugcucauucuggcugccgaccuugagaaacugaagucuaaagucaccagaacagaacggccccucuccagcgggguguauaugggaaaucugucuucccagcaacuggaucagcgcagagcccuccugaacaugaucggcaugaccgggguuagcggaggcggcaagggggcuucuaauggaauugugcgggucugggacgugaaaaacgccgagcuucugaauaaccaguuuggcacaaugccuucccucacccuggcuugccuuacaaagcaggggcaaguggaucugaaugacgccguccaggcgcucaccgaucugggacugaucuacacggccaaguauccgaacagcuccgaccucgaccgccugucucagagccaucccauucuuaauaugaucgauaccaaaaaguccagccugaacaucucuggcuacaauuucucccucggggcugccguuaaagcuggagccuguaugcuggacggcggcaacaugcuugagacaauuaaggugagcccucaaaccauggaugggauccugaaaucuauucucaaggugaaaaagagccugggaauguuugucuccgacacacccggcgaaagaaacccuuaugagaauauccuguacaagauuugccucucuggggauggauggagcuauaucgcgucccggaccagcauugugggccgcgccugggaaaacacgguuguggaccuggagcaggauaauaaaccccagaagaucgggaacggaggcucuaauaaaucccuucagagcgcuggcuucgccgcugggcugaucuacucucaacucaugacacugaaggacuuuaaauguuucaaccugauuccuaaugccaagaccuggauggauaucgagggaagaccggaagaccccgucgagauugcccuuuaccagccuuccagcggcugcuaugugcacuuuuuccgggaacccacagaucucaagcaguuuaaacaggacgcuaaguacucccaugggagagacguuaccgaucuguucgcggcccaaccuggacugaccucugcugugaucgaggcccucccccgcaacauggucauuacaugucagggcagcgaagacauccggaaacugcuugagucccaggggagacgcgauaucaagcugauugacaucacgcucucuaaagccgauagccggaaguuugagaaugcugugugggaccaguucaaggaucugugccacaugcauaccggcgucgugguugaaaagaagaaaagaggaggcaaggaggaaauuacaccgcacugugcccugauggacugcaucauguuugaugcggcuguguccgggggacuugacgccaaaguccuccgcgugguucugccucgggauaugguguucagaaccagcacacccaaggucgugcugugaggacuagucccuguucccagagcccacuuuuuuuucuuuuuuugaaauaaaauagccugucuuucagaucucaaaggcucuuuucagagccaccaaaaaaaaaaaaaaaaaaaaaaaaaaaaaaaaaaaaaaaaaaaaaaaaaaaaaaaaaaaaaaaaagaauu

SEQ ID NO: 18195 - RNA, 2014 nt, Artificial Sequence
  mRNA product Design a-1 (hSL-A64-N5) comprising derived and/or modified sequence from LASV(Nig08-A19;Clade III)__ADU56619__SP-HsPLAT_NP(2-569) (opt5)
aggagagucccgcagucggcguccagcggcucugcuuguucgugugugugucguugcaggccuuauucaagcuuaccauggacgccaugaagagaggccugugcugugugcuccugcuuugcggggcugucuucguuagccccagcgccuccaaggaggugaaaucuuuccuguggacccagagccucagacgggaacuguccggcuacugcucuaacaucaaacuucaagucguuaaggacgcucaggcccugcuccacgggcuggauuuuagcgagguguccaaugugcagcgccuuaugagaaagcagaaacgggacgauggagaccugaagcgccucagagaucugaaccaagcggucaauaaccugguggaacucaagucuacacagcagaaaagcguucugcgggugggcacgcuuuccagcgacgaucugcucguccuggcugccgaccuugagaagcugaaaucuaaggugguucgcaccgaaagaccccucuccagcgggauuuauaugggaaaucugucuucccagcaacuggaucagcggaaagcccuccugaacaugaucggcaugacagggggaaauggcggccgcaacaccacaagcgacgggauugugagagucugggaugugaagaaugcugagcuucugaacaaucaguucggaaccaugccuucucucacacuggccugucuuaccaagcagggccaaguggaccugaacgaugcuguccaggcccucacggaccuggggcugaucuacaccgcgaaauaucccaauuccagcgaccucgaucggcuggcccagucccauccgauucuuaacaugaucgacacaaagaaaucuagccugaauaucuccggauacaacuuuagccucggcgcugccguuaaggcuggggccugcaugcuggauggaggcaacaugcuugagaccauuaaagugucuccucaaacaauggacggcauccugaaguccauucucaaagugaagcgcagccuggggauguucaucucugauacccccggagaaagaaauccuuaugagaacauucuguacaagaucugucucagcggcgacggguggcccuauauugcgucccggacgucuaucgucggacgcgccugggaaaauacagugguugaucuggagagcgacaacaaaccucagaagaccggcaaugggggauccaacaaaagccuucagucugcuggcuuugccgcuggccugacauacucccagcucaugacccugaaggauagcaugcugcaacuugacccgaaugccaaaaccuggauggauaucgaggggagacccgaagacccuguggagauugcccucuaccagcccucuuccggaugcuauauccacuucuuucgggaaccuacagaccugaagcaguucaagcaggaugcuaaauacagccauggcauugacgucacggaucuguuugcggcccaacccgggcucaccuccgcugugaucgaggcccugccgagaaacaugguuauuacaugucagggaucugaagacauccgcaaacuucuggagagccagggccggagagauaucaagcucauugacaucucccugucuaagguggauagccgcaaauucgagaaugccgucugggaccaguuuaaggaucugugccacaugcauaccgggauuguggucgaaaagaaaaagcggggcggaaaagaggaaaucacaccucacugugcucuuauggacugcauuauguucgaugccgcgguguccggcgggguugacgcuaaggugcucagagccguccugccccgcgauaugguguuucggaccagcacgccuaaaguugugcugugaggacuagucccuguucccagagcccacuuuuuuuucuuuuuuugaaauaaaauagccugucuuucagaucucaaaggcucuuuucagagccaccaaaaaaaaaaaaaaaaaaaaaaaaaaaaaaaaaaaaaaaaaaaaaaaaaaaaaaaaaaaaaaaaagaauu

SEQ ID NO: 18196 - RNA, 2014 nt, Artificial Sequence
  mRNA product Design a-1 (hSL-A64-N5) comprising derived and/or modified sequence from LASV(G1180-SLE-2010;Clade IV)__AIT17169__SP-HsPLAT_NP(2-569) (opt5)
aggagagucccgcagucggcguccagcggcucugcuuguucgugugugugucguugcaggccuuauucaagcuuaccauggacgccaugaagagaggccugugcugugugcuccugcuuugcggggcugucuucguuagccccagcgccuccaaggagaucaaaucuuuccuguggacccagagccucagacgggaacuguccggcuacugcucuaacauuaagcugcaaguggucaaagacgcucaggcccugcuccacgggcuggauuuuagcgagguuuccaaugugcagcgccuuaugagaaaggaacggcgcgacgauaacgaccugaaaagacuccgggaucugaaucaggcggugaacaaucuggucgagcucaagucuacacaacaaaagagcauccugcgcgugggaacgcuuaccuccgacgaucugcucauucuggcugccgaccuugaaaaacuuaagagcaaaguuaucagaacagagcggccccucucugccggcguguauauggggaaccuguccagccagcagcuggaucagcgcagagcucuccugucuaugauuggaauguccagcggcaaucagcgggcccaggcugggcgcgacggagucgugagaguuugggaugugaagaacgucgagcuucugaauaaccaguucggcaccaugccuucucucacacuggccugucuuaccaaacaaggccagguggaccugaaugaugcggugcaggcccucacagaccuggggcugaucuacaccgcuaaguauccgaacacguccgaccucgaucggcugacccaaagccaucccauccuuaauaugauugacacaaagaaauccucucugaacaucagcggauacaauuuuucccucggcgccgcugucaaggccggggcgugcaugcuggauggaggcaacaugcuugaaaccauuaaaguuagcccucagacaauggacgggauccugaagucuauucucaaagugaagaaagcccugggaauguucaucuccgauacccccggcgagcgcaacccuuaugaaaauauucuguacaagaucugucucagcggcgacggguggcccuauaucgcuucuagaacgagcauuacaggacgggccugggagaacaccguggucgaucuggaguccgacggcaagccucagaaagcugggucuaauaacagcaauaagucccuucagagcgugggauuuacagccggccugaccuacucucaacucaugacccugaaagaugccaugcugcagcuugacccgaacgcuaagacauggauggauaucgaagggagacccgaggacccuguugaaauugcgcucuaccagcccuccagcggaugcuauauccacuucuuucgcgagccuacggaccugaaacaguucaagcaagaugccaaguacucucauggcauugacgugaccgaucuguuugcugcccagcccggccucacauccgccgucaucgacgcucugccgcggaauauggugaucaccugucaggggagcgaugacauuagaaaacuucuggaaucccagggacgcaaggauaucaaacucauugacaucgcccugucuaagacagauagccggaaauaugagaacgcgguuugggaccaauacaaggaucugugccacaugcauaccggcguggucguggagaagaaaaagagagggggaaaagaagagauuacgccucacugugcucuuauggacugcaucauguucgaugccgccgucuccggcgggcucaauacaucugugcugcgcgcuguucugccccgggacaugguguuuagaaccagcaccccucgcgucgugcucugaggacuagucccuguucccagagcccacuuuuuuuucuuuuuuugaaauaaaauagccugucuuucagaucucaaaggcucuuuucagagccaccaaaaaaaaaaaaaaaaaaaaaaaaaaaaaaaaaaaaaaaaaaaaaaaaaaaaaaaaaaaaaaaaagaauu

SEQ ID NO: 18197 - RNA, 2014 nt, Artificial Sequence
  mRNA product Design a-1 (hSL-A64-N5) comprising derived and/or modified sequence from LASV(G1442-SLE-2011;Clade IV)__AIT17181__SP-HsPLAT_NP(2-569) (opt5)
aggagagucccgcagucggcguccagcggcucugcuuguucgugugugugucguugcaggccuuauucaagcuuaccauggacgccaugaagagaggccugugcugugugcuccugcuuugcggggcugucuucguuagccccagcgccuccaaggaggugaaaucuuuccuguggacccagagccucagacgggaacuguccggcuacugcucuaacaucaaacuucaagucguuaaggacgcucaggcccugcuccacgggcuggauuuuagcgagguguccaaugugcagcgccuuaugagaaagcagcggcgcgacgauaacgaccugaaaagacuccgggaucugaaucaagcggucaacaaucugguggaacucaagucuacacagcaaaagagcguucugcgcgugggaacgcuuaccuccgacgaucugcucguccuggcugccgaccuugagaaacuuaagagcaaagugauuagaacagaacggccccucucugccggcguuuauauggggaaccuguccagccagcagcuggaucagcgcagagcucuccugaauaugaucggaaugucuggcgggauucagggaacccggacaggccgcgacggcguggucagagugugggaugugaagaacgccgaccuucugaauaaccaguucgggaccaugccuucccucacacuggcuugucuuaccaaacaaggacaggucgaucugaaugacguugugcaggcccucacggaccugggccugaucuacaccgcgaaguauccgaacgccagcgaucucgaccggcugacacaaucucaucccauucuuaauaugaucgauaccaagaaauccagccugaacaucuccggguacaauuuuucucucggagcugccgugaaggcuggcgccugcaugcuggacgggggaaacaugcuugagacaauuaaagucagcccucagaccauggauggcauccugaaguccauucucaaagugaagaaaacgcugggcauguucaucagcgacacacccggggagcgcaacccuuaugaaaauauucuguacaagaucugucucucuggagauggcuggcccuauauugcguccagaaccagcaucacagggcgggccugggagaacaccguuguggaccuggaaucugauggaaagccucagaaagcuggcagcaauaacuccaauaagucucuucagagcgccggguuugcugccggacugaccuacucccaacucaugacacugaaagacgccaugcugcagcuugauccgaacgcuaagacguggauggacaucgagggcagacccgaggacccugucgaaauugcgcucuaccagcccagcucuggcugcuauauccacuucuuucgcgagccuaccgaucugaaacaguucaagcaagacgccaaguacucccaugggauugaugugacagaccuguuugcugcccagcccggacucaccagcgccguuaucgaagcucugccgcggaauauggugauuacaugucagggcucugaugacaucaaaaagcugcuggagucccaggggagaaaagauaucaagcucauugacaucgcccugagcaaaaccgauucccgcaaguaugaaaacgcggucugggaccaauacaaggaucugugccacaugcauacgggaguggucguggagaaaaagaaacggggcgggaaggaggaaauuacaccucacugugcucuuauggacugcaucauguucgaugccgccguuucuggcggacucaauacccuggugcugagagcuguccucccccgcgacaugguguuucggaccagcacaccuagaguugugcugugaggacuagucccuguucccagagcccacuuuuuuuucuuuuuuugaaauaaaauagccugucuuucagaucucaaaggcucuuuucagagccaccaaaaaaaaaaaaaaaaaaaaaaaaaaaaaaaaaaaaaaaaaaaaaaaaaaaaaaaaaaaaaaaaagaauu

SEQ ID NO: 18198 - RNA, 2014 nt, Artificial Sequence
  mRNA product Design a-1 (hSL-A64-N5) comprising derived and/or modified sequence from LASV(G3010-SLE-2013;Clade IV)__AIT17345__SP-HsPLAT_NP(2-569) (opt5)
aggagagucccgcagucggcguccagcggcucugcuuguucgugugugugucguugcaggccuuauucaagcuuaccauggacgccaugaagagaggccugugcugugugcuccugcuuugcggggcugucuucguuagccccagcgccuccaaggagaucaaaucuuuccuguggacccagagccucagacgggaacuguccggcuacugcucuaacauuaaacuucaaguggucaaagacgcucaggcccugcuccacgggcuggauuuuagcgagguuuccaaugugcagcgccuuaugagaaaggaacggcgcgacgauaacgaccugaaaagacuccgggaucugaaucaggcggugaacaaucuggucgagcucaagucuacacaacaaaagagcauccugcgcgugggaacgcuuaccuccgacgaucugcucauucuggcugccgaccuugaaaaacuuaagagcaaaguuacaagaaccgagcggccccucucugccggcguguauauggggaaccuguccagccagcagcuggaucagcgcagagcucuccugucuaugaucggaauguccagcggcguccagggggcccgggcuggacgcgacggcgugguuagagugugggaugucaagaaugccgagcuucugaacaaucaguucggcacaaugccuucucucacccuggcgugucuuacaaaacaggggcaaguggaccugaacgaugugguccaggcccucaccgaccugggacugauuuacacggcuaaguauccgaauaccuccgaccucgaucggcugacacagagccaucccauccuuaacaugaucgacaccaagaaauccucucugaauauuagcggcuacaacuuuucccucggggccgcuguuaaggccggagcgugcaugcuggauggcgggaauaugcuugaaacaaucaaagugagcccucaaaccauggacggcauucugaagucuauccucaaagugaagaaagcccugggaauguucauuuccgagacgcccggcgaacgcaacccuuaugagaacauccuguacaagauuugucucagcggggauggauggcccuauaucgcuucuagaacaagcaucaccggccgggccugggagaauacagucguggaccuggaauccgaugggaagccucagaaagcuggaucuaacaauagcaacaagucccuucagagcgccggcuuuaccgccgggcugaccuacucucagcucaugacacugaaagacgcuaugcugcaacuugauccgaaugcgaagacguggauggacauugagggaagacccgaagauccuguugagguggcccucuaccagcccuccagcggcugcuauauccacuucuuucgcgaaccuaccgaccugaaacaguucaagcaggacgcuaaguacucucauggcauugaugucacagaccuguuugccgcccaacccgggcucaccuccgcugugaucgaugcccugccgcggaacaugguuauuacaugucagggaagcgacgauaucaaaaagcugcuggagucccagggcagaaaagacaucaagcucauugauaucgcgcugucuaaaaccgacagccgcaaguaugagaaugcugugugggaucaguacaaggaccugugccacaugcauacgggggucguggucgaaaagaagaaacggggaggcaaggaggaaauuacaccucacugugcccuuauggauugcaucauguucgacgccgcuguguccgggggccucaacaccucuguucugagagccgugcugccccgcgauauggucuuucggaccagcacaccuagagugguucucugaggacuagucccuguucccagagcccacuuuuuuuucuuuuuuugaaauaaaauagccugucuuucagaucucaaaggcucuuuucagagccaccaaaaaaaaaaaaaaaaaaaaaaaaaaaaaaaaaaaaaaaaaaaaaaaaaaaaaaaaaaaaaaaaagaauu

SEQ ID NO: 18199 - RNA, 2014 nt, Artificial Sequence
  mRNA product Design a-1 (hSL-A64-N5) comprising derived and/or modified sequence from LASV(G502-SLE-2009;Clade IV)__AIT17127__SP-HsPLAT_NP(2-569) (opt5)
aggagagucccgcagucggcguccagcggcucugcuuguucgugugugugucguugcaggccuuauucaagcuuaccauggacgccaugaagagaggccugugcugugugcuccugcuuugcggggcugucuucguuagccccagcgccuccaaggagaucaaaucuuuccuguggacccagagccucagacgggaacuguccggcuacugcucuaacauuaagcugcaaguggucaaagacgcucaggcccugcuccacgggcuggauuuuagcgagguuuccaaugugcagcgccuuaugagaaaggaacggcgcgacgauaacgaccugaaaagacuccgggaucugaaucaggcggugaacaaucuggucgagcucaagucuacacaacaaaagagcauccugcgcgugggaacgcuuaccuccgacgaucugcucauucuggcugccgaccuugaaaaacuuaagagcaaaguuaucagaacagagcggccccucucugccggcguguauauggggaaccuguccagccagcagcuggaucagcgcagagcucuccugucuaugauuggaauguccggcgggaaucagggaguccgggccggcaaggacggcgugguucgcgugugggaugucaaaaacgcugagcuucugaauaaccaguucgggaccaugccuagccucacacuggccugucuuaccaagcagggacaaguggaccugaaugaugcggugcaggcccucacagaccugggccugaucuacaccgcuaaguauccgaacacgucugaccucgauagacugacccagucccaucccauccuuaauaugauugacaccaaaaagagcucccugaacaucucuggguacaauuuuagccucggagccgcugucaaagccggcgcgugcaugcuggaugggggaaacaugcuugaaacaauuaagguuuccccucaaacaauggacggcauccugaaaagcauucucaaggugaaaaaggcccugggcauguucaucucugauacccccggggagcggaacccuuaugaaaauauucuguacaagaucugucucuccggagacggcuggcccuauaucgcuagccgcacgucuauuacagggagagccugggagaacaccguggucgaucuggagagcgacggaaaaccucagaaggcuggcuccaauaacucuaauaaaagccuucaguccgccggguuuacagccggacugaccuacagccagcucaugacccugaaggaugcuaugcugcaacuugacccgaacacaaaaacguggauggauaucgaaggccggcccgaggacccuguggaaauugcgcucuaccagcccucuuccggcugcuauauccacuucuuuagagagccuaccgaccugaagcaguucaagcaggaugccaaauacagccaugggauugacguuacagaucuguuugcugcccaacccggacucaccucugccgugaucgacgcucugccgcgcaauauggucaucacaugucagggcuccgaugacauucggaaacuucuggaaagccaggggagaaaggauaucaagcucauugacaucgcccugaacaaaaccgauucccgcaaguaugagaaugcggugugggaccaguacaaggaucugugccacaugcauacgggaguuguggucgagaaaaagaaacggggcgggaaggaagagauuacaccucacugugcucuuauggacugcaucauguucgaugccgccgugucuggcggacucaacaccagcguccugagagcugugcugccccgcgacaugguuuuucggaccuccacaccuagagugguccucugaggacuagucccuguucccagagcccacuuuuuuuucuuuuuuugaaauaaaauagccugucuuucagaucucaaaggcucuuuucagagccaccaaaaaaaaaaaaaaaaaaaaaaaaaaaaaaaaaaaaaaaaaaaaaaaaaaaaaaaaaaaaaaaaagaauu

SEQ ID NO: 18200 - RNA, 2014 nt, Artificial Sequence
  mRNA product Design a-1 (hSL-A64-N5) comprising derived and/or modified sequence from LASV(G733-SLE-2010;Clade IV)__AIT17155__SP-HsPLAT_NP(2-569) (opt5)
aggagagucccgcagucggcguccagcggcucugcuuguucgugugugugucguugcaggccuuauucaagcuuaccauggacgccaugaagagaggccugugcugugugcuccugcuuugcggggcugucuucguuagccccagcgccuccaaggagaucaaaucuuuccuguggacccagagccucagacgggaacuguccggcuacugcucuaacauuaagcugcaaguggucaaagacgcucaggcccugcuccacgggcuggauuuuagcgagguuuccaaugugcagcgccuuaugagaaaggaacggcgcgacgauaacgaccugaaaagacuccgggaucugaaucaggcggugaacaaucuggucgagcucaagucuacacaacaaaagagcgugcugcgcguuggaacgcuuaccuccgacgaacugcucgugcuggcugccgaucuugagaaacuuaagagcaaagucaucagaacagagcggccccucucugccggcguguauauggggaaccuguccagccagcagcuggaccagcgcagagcucuccugucuaugauuggaauguccggcgggaaucagggagcccggaccggccgcgauggcguugugagagucugggacgugaagaacgcugaacuucugaauaaccaguucgggacaaugccuagccucacccuggccugucuuacaaaacagggacaaguggaucugaaugacgcgguccaggcccucaccgaucugggccugaucuacacggcuaaguauccgaacaccucugaccucgaccggcugacacagucccaucccauucuuaauaugaucgauaccaagaaaagcucccugaacaucucuggguacaauuuuagccucggagccgcuguuaaggccggcgcgugcaugcuggacgggggaaacaugcuugagacaauuaaaguguccccucaaaccauggauggcauccucaagagcauucugaaagugaagaaagcccugggcauguucaucucugacacgcccggggaacgcaacccuuaugagaauauucuguacaagaucugucucuccggagauggcuggcccuauauugcuagcagaacaucuaucaccgggcgggccugggagaacacagucguggaccuggaaagcgauggaaagccucagaaagcuggcuccaauaacucuaauaagagccuucaguccgccggguuuaccgccggacugaccuacagccagcucaugacacugaaagacgcuaugcugcaacuugauccgaacgcgaagacguggauggacaucgagggcagacccgaagauccuguugagauugcccucuaccagcccucuuccggcugcuauauccacuucuuucgcgaaccuaccgaccugaaacaguucaagcaggacgcuaaguacagccaugggauugaugugacagaccuguuugccgcccaacccggacucaccucugcugucaucgaugcccugccgcggaauauggugauuacaugucagggcuccgacgauaucagaaaacuucuggagagccaggggcgcaaggacaucaaacucauugauaucgcgcuguccaagauugacucucggaaauaugagaacgcuguuugggaucaguacaaggaccugugccacaugcauaccggaguggucguggaaaagaaaaagagaggcgggaaagaggaaaucacgccucacugugcccuuauggauugcauuauguucgacgccgcugucagcggcggacucaauucccuggugcugcgcgccguucucccccgggauaugguguuuagaacaucuaccccucgcgucgugcugugaggacuagucccuguucccagagcccacuuuuuuuucuuuuuuugaaauaaaauagccugucuuucagaucucaaaggcucuuuucagagccaccaaaaaaaaaaaaaaaaaaaaaaaaaaaaaaaaaaaaaaaaaaaaaaaaaaaaaaaaaaaaaaaaagaauu

SEQ ID NO: 18201 - RNA, 2014 nt, Artificial Sequence
  mRNA product Design a-1 (hSL-A64-N5) comprising derived and/or modified sequence from MOPV/LASV reassortant(IGS-1;Clade IV)__AFY05578__SP-HsPLAT_NP(2-569) (opt5)
aggagagucccgcagucggcguccagcggcucugcuuguucgugugugugucguugcaggccuuauucaagcuuaccauggacgccaugaagagaggccugugcugugugcuccugcuuugcggggcugucuucguuagccccagcgccuccaaggagaucaaaucuuuccuguggacccagagccucagacgggaacuguccggcuacugcucuaacauuaaacuucaaguggucaaggacgcucaggcccugcuccacgggcuggauuuuagcgagguuuccaaugugcagcgccuuaugagaaaggaacggcgcgacgauaacgaccugaaaagacuccgggaucugaaucaggcggugaacaaucuggucgagcucaagucuacacaacaaaagagcauccugcgcgugggaacgcuuaccuccgacgaucugcucauucuggcugccgaccuugaaaaacugagaagcaagguuauccggacagagcgcccccucucugccggcguguauauggggaaccuguccagccagcagcuggaucagagacgggcucuccugaauaugauuggaaugucuggcgggaaccagggagcccgcgcuggcagagacggcgucgugcggguuugggaugugaaaaaugccgagcuucuguccaaccaguucgggaccaugccuagccucacacuggcgugucuuaccaagcagggacaagucgaccugaaugaugccgugcaggcucucacagaccugggccugaucuacaccgccaaauauccgaacacgucugaccucgaucgccugacccagucccaucccauccuuaauaugauugacacaaagaaaagcucccugaacaucucuggguacaauuuuagccucggagcugccgugaaggcgggcgccugcaugcuggaugggggaaacaugcuugaaaccauuaaggucuccccucaaacaauggacggcauccugaaaagcauucucaagguuaaaaaggcucugggcauguucaucucugauacccccggggagagaaacccuuaugaaaauauucuguacaaaaucugucucuccggagacggcuggcccuauaucgccagccggacgucuauuacagggagagcuugggagaacaccgugguggaucuggagagcgacggaaagccucagaaggccgauuccaauaacucuagcaaaucccuucagagcgccggcuuuacagcugggcugaccuacucucagcucaugacccugaaggacgcgaugcugcaacuugauccgaaugccaaaacauggauggacaucgaaggacgccccgaggacccugucgaaauugcucucuaccagcccuccagcggcugcuauauccacuucuuucgggagccuacggaucugaagcaguucaaacaggacgccaaguacucucauggcauugaugugaccgaccuguuugccacacaacccgggcucaccuccgcuguuaucgaugcccugccgagaaacauggugaucacaugucagggaagcgacgauauucgcaaacuucuggaaucccagggccggaaggacaucaagcucauugauaucgaccugucuaaaaccgauagcagaaaguaugagaaugcggucugggaccaguacaaagaucugugccacaugcauacgggggugguuguggagaagaagaaacgcggaggcaaggaagagauuacaccucacugugcucuuauggacugcaucauguucgacgccgccgucuccgggggccucaacaccucugugcugcgggcuguccugcccagagauaugguguuucgcaccagcacaccucggguugugcucugaggacuagucccuguucccagagcccacuuuuuuuucuuuuuuugaaauaaaauagccugucuuucagaucucaaaggcucuuuucagagccaccaaaaaaaaaaaaaaaaaaaaaaaaaaaaaaaaaaaaaaaaaaaaaaaaaaaaaaaaaaaaaaaaagaauu

SEQ ID NO: 18202 - RNA, 2014 nt, Artificial Sequence
  mRNA product Design a-1 (hSL-A64-N5) comprising derived and/or modified sequence from LASV(LM765-SLE-2012;Clade IV)__AIT17815__SP-HsPLAT_NP(2-569) (opt5)
aggagagucccgcagucggcguccagcggcucugcuuguucgugugugugucguugcaggccuuauucaagcuuaccauggacgccaugaagagaggccugugcugugugcuccugcuuugcggggcugucuucguuagccccagcgccuccaaggagaucaaaucuuuccuguggacccagagccucagacgggaacuguccggcuacugcucuaacauuaagcugcaaguggucaaagacgcucaggcccugcuccacgggcuggauuuuagcgagguuuccaaugugcagcgccuuaugagaaaggaacggcgcgacgauaacgaccugaaaagacuccgggaucugaaucaggcggugaacaaucuggucgagcucaagucuacacaacaaaagagcauccugcgcgugggaacgcuuaccuccgacgaucugcucauucuggcugccgaccuugaaaaacuuaagagcaaaguuacaagaaccgagcggccccucucugccggcguguauauggggaaccuguccagccagcagcuggaucagcgcagagcucuccuggacaugaucggaaugucuggcuccaaucagggggcccgggcuggacgcgauggcgucgugagaguuugggacgugaagaacgccgagcuucugaauaaccaguucggcacaaugccuagccucacccuggcgugucuuacaaaacaggggcaagucgaucugaaugacgccgugcaggcucucaccgaccugggacugauuuacacggccaaguauccgaacaccucugaucucgaccggcugacacagucccaucccauccuuaauaugaucgauaccaagaaaagcucccugaacauuucuggcuacaauuuuagccucggggcugccgugaaggcgggagccugcaugcuggacggcgggaacaugcuugaaacaaucaaagucuccccucaaaccauggauggcauucucaagagcauccugaaaguuaagaaagcucugggaauguucauuucugacgcccccggcgagcgcaacccuuaugaaaauauccuguacaagauuugucucuccggggauggauggcccuauaucgcuagcagaacgucuaucacaggccgggccugggagaacaccgugguggaccuggagagcgaugggaagccucagaaagccggauccaauggcucuaacaagagccuucaguccgcuggguuuacagcgggacugaccuacagccagcucaugacccugaaagacgccaugcugcaacuugauccgaaugcuaagacauggauggacauugaaggcagacccgaggacccugucgaaaucgcccucuaccagcccucuuccggcugcuauauucacuucuuucgcgagccuacggaucugaaacaguucaagcaggacgccaaguacagccaugggaucgaugugaccgaccuguuugcugcccaacccggacucacaucugcgguuauugaugcucugccgcggaacauggugaucaccugucagggcuccgacgauaucagaaaacuuuucgaaagccaggggcgcaaggacauuaaacugaucgauauugcccucuccaagacagacucucggaaauaugagaaugccgucugggaucaguacaaggaccugugccacaugcauaccggaaucgugguugagaagaaaaagagaggcgggaaagaagagauuacgccucacugugcucugauggauugcaucauguuugacgccgcugugagcggcggacuuaacacauccguccuccgcgccgugcugccccgggacauggucuucagaaccucuaccccucgcgugguucugugaggacuagucccuguucccagagcccacuuuuuuuucuuuuuuugaaauaaaauagccugucuuucagaucucaaaggcucuuuucagagccaccaaaaaaaaaaaaaaaaaaaaaaaaaaaaaaaaaaaaaaaaaaaaaaaaaaaaaaaaaaaaaaaaagaauu

SEQ ID NO: 18203 - RNA, 2014 nt, Artificial Sequence
  mRNA product Design a-1 (hSL-A64-N5) comprising derived and/or modified sequence from LASV(LM776-SLE-2012;Clade IV)__AIT17825__SP-HsPLAT_NP(2-569) (opt5)
aggagagucccgcagucggcguccagcggcucugcuuguucgugugugugucguugcaggccuuauucaagcuuaccauggacgccaugaagagaggccugugcugugugcuccugcuuugcggggcugucuucguuagccccagcgccuccaaggagaucaaaucuuuccuguggacccagagccucagacgggaacuguccucuuacugcagcaacauuaaacuucaaguggucaaggacgcucaggcccugcuccacggccuggauuuuuccgagguuucuaaugugcagcgccuuaugagaaaggaacggcgcgacgauaacgaccugaaaagacuccgggaucugaaucaggcggugaacaaucuggucgagcucaagagcacacaacagaaguccauccugcgcguggggacgcuuaccagcgacgaucugcucauucuggcugccgaccuugaaaaacugaagucuaaaguuacaagaaccgagcggccccucuccgccggaguguauaugggcaaccugagcucucagcagcuggaucaacgcagagcucuccuguccaugaucgggaugagcggaucuaaucagggcgcccgggcugggcgcgacggagucgugagaguuugggaugugaagaacgccgagcuucugaauaaccaguucggcacaaugccuucccucacccuggcgugucuuacaaaacagggccaagucgaccugaaugaugccgugcaggcucucaccgaccuggggcugauuuacacggccaaguauccgaacaccagcgaccucgaucggcugacacagucccaucccauccuuaauaugaucgacaccaagaaaucuagccugaacauuuccggauacaauuuuagccucggcgcugccgugaaggcgggggccugcaugcuggauggaggcaacaugcuugaaacaaucaaagucucuccucaaaccauggacgggauucugaaguccauccucaaaguuaagaaagcucugggaauguucauuagcgauacgcccggcgagcgcaacccuuaugaaaauauccuguacaagauuugucucucuggcgacggguggcccuauaucgccagcagaacauccaucaccggacgggcuugggagaacacagugguggaucuggagucugacggcaagccucagaaagccgggagcaauaacuccaauaagagccuucagucugccggauuuaccgcuggccugaccuacucccagcucaugacacugaaagaugcgaugcugcaacuugacccgaacgccaagacguggauggauauugaagggagacccgaggacccugucgaaguggcucucuaccagcccagcucuggaugcuauauccacuucuuucgcgagccuaccgaccugaaacaguucaagcaggaugccaaguacucccauggcauugacguuacagaucuguuugccgcucaacccggccucaccagcgccgugaucgacgcgcugccgcggaauauggucauuacaugucagggguccgaugacaucagaaaacuucuggaaucucagggacgcaaggauaucaaacucauugacaucgcucugagcaagaccgauucccggaaauaugagaacgccgugugggaccaguacaaggaucugugccacaugcauacgggcguuguggucgagaagaaaaagagagggggaaaagaagagauuacaccucacugugcccuuauggacugcaucauguucgaugcugccgugucuggcgggcucaauaccagcguccugcgcgcugugcugccccgggacaugguuuuuagaaccuccacaccucgcgugguccucugaggacuagucccuguucccagagcccacuuuuuuuucuuuuuuugaaauaaaauagccugucuuucagaucucaaaggcucuuuucagagccaccaaaaaaaaaaaaaaaaaaaaaaaaaaaaaaaaaaaaaaaaaaaaaaaaaaaaaaaaaaaaaaaaagaauu

SEQ ID NO: 18204 - RNA, 2014 nt, Artificial Sequence
  mRNA product Design a-1 (hSL-A64-N5) comprising derived and/or modified sequence from LASV(Mad39;Clade IV)__ANH09723__SP-HsPLAT_NP(2-569) (opt5)
aggagagucccgcagucggcguccagcggcucugcuuguucgugugugugucguugcaggccuuauucaagcuuaccauggacgccaugaagagaggccugugcugugugcuccugcuuugcggggcugucuucguuagccccagcgccuccaaggagaucaaaucuuuccuguggacccagagccucagacgggaacuguccggcuacugcucuaacauuaagcugcaaguggucaaagacgcucaggcccugcuccacgggcuggauuuuagcgagguuuccaaugugcagcgccuuaugagaaagcagcggcgcgacgauaacgaccugaaaagacuccgggaucugaaucaagcggugaacaaucuggucgaacucaagucuacacagcaaaagagcgugcugcgcguuggaacgcuuaccuccgacgaucugcucacacuggcugccgaccuugagaaacuuaagagcaaagugaccagaacagaacggccccucaccgccggcgucuauauggggaaccugucuucccagcagcuggaucagcgcagagcucuccugaauaugaucggaaugagcggcgggaaccagggagcccggacaggccgcgacggcgugguuagagugugggaugucaagaaugcugagcuucugaacaaucaguucgggaccaugccuucucucacgcuggccugucuuaccaaacaaggacagguggaccugaacgaugugguccaggcgcucacagaccugggccugauuuacaccgccaaguauccgaauacauccgaccucgaucggcugacccaaagccaucccauccuuaacaugauugacacgaauaagucuucccugaacaucagcggguacaacuuuucccucggagcugccguuaaagcuggcgccugcaugcuggaugggggaaauaugcuugagacaaucaaggugucuccucagaccauggacggcauucugaaaagcauccucaaggugaaaaagucccugggcauguucauuagcgauacacccggggaacgcaacccuuaugagaauauccuguacaaaauuugucucucuggagacggcuggcccuauaucgcguccagaaccagcauuaccgggcgggccugggaaaacacagucguggaucuggagucuggaggcaagccucagaaggcugggagcaauaacuccaauaaaucucuucagagcgccggauuugcugccggccugacguacucccaacucaugacccugaaggacgccaugcugcagcuugauccgaacgcuaaaacauggauggacaucgagggcagacccgaagauccuguugagaucgcgcucuaccagcccauuagcgggugcuauauccacuucuuucgcgaaccuaccgaccugaagcaguucaaacaagacgccaaguacucucauggaauugaugugacagaccuguuugcugcccagcccggccucaccuccgccgucaucgaggcucugccgcggaauauggugauuacgugucaggggagcgaugacaucagaaaacuuuucgaaucucagggacgcaaggauaucaagcugauugacaucgcccucuccaaaacagauagccggaaguaugagaacgcgguuugggaccaauacaaagaucugugccacaugcauaccggcguggucguggagaagaagaaaaagggcgggaaagaagagauuaccccucacugugcucugauggacugcaucauguuugaugccgccgucuccggaggccuuaauacacucgugcugagagcuguucugccccgcgacaugguguuccggaccucuacaccuaaggucgugcucugaggacuagucccuguucccagagcccacuuuuuuuucuuuuuuugaaauaaaauagccugucuuucagaucucaaaggcucuuuucagagccaccaaaaaaaaaaaaaaaaaaaaaaaaaaaaaaaaaaaaaaaaaaaaaaaaaaaaaaaaaaaaaaaaagaauu

SEQ ID NO: 18205 - RNA, 2014 nt, Artificial Sequence
  mRNA product Design a-1 (hSL-A64-N5) comprising derived and/or modified sequence from LASV(Z0947-SLE-2011;Clade IV)__AIT17841__SP-HsPLAT_NP(2-569) (opt5)
aggagagucccgcagucggcguccagcggcucugcuuguucgugugugugucguugcaggccuuauucaagcuuaccauggacgccaugaagagaggccugugcugugugcuccugcuuugcggggcugucuucguuagccccagcgccuccaaggagaucaaaucuuuccuguggacccagagccucagacgggaacuguccggcuacugcucuaacauuaagcugcaaguggucaaagacgcucaggcccugcuccacgggcuggauuuuagcgagguuuccaaugugcagcgccuuaugagaaaggaacggcgcgacgauaacgaccugaaaagacuccgggaucugaaucaggcggugaacaaucuggucgagcucaagucuacacaacaaaagagcauccugcgcgugggaacgcuuaccuccgacgaucugcucauucuggcugccgaccuugaaaaacuuaagagcaaaguuacaagaaccgagcggccccucucugccggcguguauauggggaaccuguccagccagcagcuggaucagcgcagagcucuccugaauaugaucggaaugucuggcuccaaccagggggcccggacaggacgcgacggcgucgugagaguuugggaugugaagaaugcugagcuucugaacaaucaguucggcaccaugccuagccucacacuggccugucuuaccaaacaggggcaagucgaccugaacgaugcggugcaggcccucacggaccugggacugauuuacaccgcuaaguauccgaauacaucugaccucgaucggcugacccagucccaucccauccuuaacaugaucgacacaaagaaaagcucccugaauauuucuggcuacaacuuuagccucggggccgcugugaaggccggagcgugcaugcuggauggcgggaacaugcuugaaaccaucaaagucuccccucaaacgauggacggcauucucaagagcauccugaaaguuaagaaagcccugggaauguucauuucugaugcucccggcgagcgcaauccuuaugaaaacauccuguacaagauuugucucuccggggacggauggcccuauaucgccagcagaacaucuaucaccggccgggcuugggagaauacagugguggaucuggagagcgacgggaagccucagaaagccggauccaacggcucuaauaagagccuucaguccgccggguuuaccgcuggacugaccuacagccagcucaugacacugaaagaugcgaugcugcaacuugacccgaacgccaagacguggauggauauugaaggcagacccgaggacccugucgaaaucgcucucuaccagcccucuuccggcugcuauauucacuucuuucgcgagccuaccgaccugaaacaguucaagcaggaugccaaguacagccaugggaucgacgugacagaucuguuugccgcucaacccggacucaccucugccguuauugacgcgcugccgcggaauauggugaucacaugucagggcuccgaugacaucagaaaacuuuucgaaagccaggggcgcaaggauauuaaacugaucgacauugcucucuccaagaccgauucucggaaauaugagaacgccgucugggaccaguacaaggaucugugccacaugcauacgggaaucgugguugagaagaaaaagagaggcgggaaagaagagauuacaccucacugugcccugauggacugcaucauguuugaugcugccgugagcggcggacuuaauaccuccguccuccgcgcugugcugccccgggacauggucuucagaaccucuacaccucgcgugguucugugaggacuagucccuguucccagagcccacuuuuuuuucuuuuuuugaaauaaaauagccugucuuucagaucucaaaggcucuuuucagagccaccaaaaaaaaaaaaaaaaaaaaaaaaaaaaaaaaaaaaaaaaaaaaaaaaaaaaaaaaaaaaaaaaagaauu

SEQ ID NO: 18206 - RNA, 2045 nt, Artificial Sequence
  mRNA product Design a-1 (hSL-A100) comprising derived and/or modified sequence from LASV(Josiah;Clade IV)__NP_694869__SP-HsPLAT_NP(2-569) (opt1)
aggagagucccgcagucggcguccagcggcucugcuuguucgugugugugucguugcaggccuuauucaagcuuaccauggacgccaugaagcgcggccugugcugcgugcuccugcugugcggggccgucuucgugagccccagcgccuccaaggagaucaagagcuuccuguggacccagucccuccgccgggagcugagcggcuacugcuccaacaucaagcuccagguggucaaggacgcccaggcgcugcugcacgggcuggacuucagcgagguguccaacgugcagcgccucaugcggaaggagcgccgggacgacaacgaccugaagcgccugcgggaccucaaccaggccgucaacaaccugguggagcucaagagcacccagcagaaguccauccugcgcgugggcacccugaccagcgacgaccugcucauccuggccgccgaccuggagaagcucaaguccaaggucauccggaccgagcgcccccugagcgccgggguguacaugggcaaccuguccagccagcagcucgaccagcggcgcgcgcugcugaacaugaucgggauguccggcggcaaccagggggcccgggccggccgcgacggggugguccgggugugggacgugaagaacgccgagcuccugaacaaccaguucggcaccaugccgagccugacgcucgcgugccugaccaagcaggggcaggucgaccugaacgacgccgugcaggcccucaccgaccugggccugaucuacaccgccaaguaccccaacacguccgaccucgaccgccugacccagagccaccccauccugaacaugaucgacaccaagaaguccagccucaacaucagcggcuacaacuucucccugggggccgcggugaaggccggcgccugcaugcuggacgggggcaacaugcucgagaccaucaaggucagcccccagacgauggacggcauccugaaguccauccugaaggugaagaaggcccucgggauguucaucagcgacaccccgggcgagcggaaccccuacgagaacauccuguacaagaucugccuguccggggacggcuggcccuacaucgccagccgcaccuccaucaccgggcgggcgugggagaacacgguggucgaccucgagagcgacggcaagccccagaaggccgacuccaacaacagcuccaagagccugcaguccgccggcuucaccgccgggcugaccuacagccagcucaugacccugaaggacgccaugcugcagcuggacccgaacgcgaagacguggauggacaucgagggccgccccgaggaccccguggagaucgcccucuaccagcccuccagcgggugcuacauccacuucuuccgggagccgaccgaccugaagcaguucaagcaggacgccaaguacucccacggcaucgacgugaccgaccuguucgccacccagcccgggcucacgagcgccgucaucgacgcgcugccccgcaacauggugaucacgugccagggcuccgacgacauccgcaagcugcucgagagccagggccggaaggacaucaagcugaucgacaucgcccugagcaagaccgacucccgcaaguacgagaacgccgugugggaccaguacaaggaccucugccacaugcacaccggggucguggucgagaagaagaagcggggcgggaaggaggagaucaccccgcacugcgcccugauggacugcaucauguucgacgcggccgugagcggcgggcugaacaccuccgugcuccgcgccguccugccccgggacaugguguuccgcaccagcacgccccgggugguccugugaggacuagucccuguucccagagcccacuuuuuuuucuuuuuuugaaauaaaauagccugucuuucagaucucaaaggcucuuuucagagccaccaaaaaaaaaaaaaaaaaaaaaaaaaaaaaaaaaaaaaaaaaaaaaaaaaaaaaaaaaaaaaaaaaaaaaaaaaaaaaaaaaaaaaaaaaaaaaaaaaaaaa

SEQ ID NO: 18207 - RNA, 2045 nt, Artificial Sequence
  mRNA product Design a-1 (hSL-A100) comprising derived and/or modified sequence from LASV(LP;Clade I)__AAF86702__SP-HsPLAT_NP(2-569) (opt1)
aggagagucccgcagucggcguccagcggcucugcuuguucgugugugugucguugcaggccuuauucaagcuuaccauggacgccaugaagcgcggccugugcugcgugcuccugcugugcggggccgucuucgugagccccagcaacuccaaggagaucaagagcuuccuguggacccagucccuccgccgggagcugagcggcuacugcuccaacaucaagcuccagguggucaaggacgcccaggcccugcugcacgggcuggacuucagcgagguguccaacgugcagcgccucaugcggaagcagaagcgcgacgacgcggaccugaagcggcugcgcgaccucaaccaggccgucaacaaccugguggagcucaagagcacccagcagaagaacgugcugcgggucggcacgcuguccagcgacgaccugaucacccucgccgccgaccuggagaagcugaaguccaaggugauccgcaccgagcggccccucagcuccgggguguacaugggcaaccugagcucccagcagcuggaccagcgccgggcccuccugagcaugaucgggauguccggcggcccgcaggggaaccgcaccggcggggacggcgucgugcgggugugggacgucaagaacgcggagcugcucaacaaccaguucgggacgaugcccagccugacccuggccugccucaccaagcagggccagguggaccugaacgacgccgugcaggcccugaccgaccucggccugaucuacacggcgaaguaccccaacuccagcgaccuggacaugcucacccagagccaccccauccuggggauggucgacaccaagaaguccagccugaacaucuccggcuacaacuucagccucggggccgccgugaaggccggcgccugcaugcuggacggcgggaacaugcuggagaccaucaagguguccccgcagacgauggacggcauccucaagagcauccugaaggucaagcgcucccuggggauguucaucagcgacacccccggcgagcggaaccccuacgagaacauccucuacaagaucugccuguccggggagggcuggcccuacaucgcgagccgcaccuccaucaccggccgggccugggagaacacgcugguggaccucgagagcgacaacaagccgcccaagcugaacuccgccgggagcaacaagucccugcaggccgccggccucaacgcggggcugaccuacagccagcugaugacccugaaggacugcaugcuccagcuggaccccuccagcaagaccuggaucgacaucgagggccgccccgaggacccgguggagaucgcccuguuccagcccuccagcgggugcuacauccacuucuuccgggagcccacggaccucaagcaguucaagcaggacgccaaguacagccacggcaucgacgucaccgaccuguucuccacccagcccggccugaccagcgccgugaucgaggcccucccgcgcaacauggugcugacgugccagggguccgacgacaucaagaagcugcucgagagccagggccggcgcgacaucaagcugaucgacaucucccugagcaaggcggacucccgcaaguucgagaacgccgucugggaccaguacaaggaccucugccacaugcacaccgggguggucguggagaagaagaagcggggcgggaaggaggagaucacgccccacugcgcccugcuggacugcaucauguucgacgccgccaccaccggcagccucaacaucaccacccugcgcgcggugcugccccgggacauggucuuccgcaccuccacgcccaagguggugcucugaggacuagucccuguucccagagcccacuuuuuuuucuuuuuuugaaauaaaauagccugucuuucagaucucaaaggcucuuuucagagccaccaaaaaaaaaaaaaaaaaaaaaaaaaaaaaaaaaaaaaaaaaaaaaaaaaaaaaaaaaaaaaaaaaaaaaaaaaaaaaaaaaaaaaaaaaaaaaaaaaaaaa

SEQ ID NO: 18208 - RNA, 2045 nt, Artificial Sequence
  mRNA product Design a-1 (hSL-A100) comprising derived and/or modified sequence from LASV(803213;Clade II)__AAF86704__SP-HsPLAT_NP(2-569) (opt1)
aggagagucccgcagucggcguccagcggcucugcuuguucgugugugugucguugcaggccuuauucaagcuuaccauggacgccaugaagcgcggccugugcugcgugcuccugcugugcggggccgucuucgugagccccagcgccuccaaggaggugaaguccuuccuguggacccagagccuccgccgggagcugagcggcuacugcuccaacaucaagcugcaggucgugaaggacgcccaggcgcuccugcacgggcuggacuucagcgaggugaacaacguccagcgccucaugcggaagcagaagcgcgacgacggcgaccugaagcggcugcgcgaccucaaccaggccgugaacaaccugguggagcugaaguccacccagcagaaguccauccuccgggucgggacgcugaccagcgacgaccugcucacccuggccgccgaccuggagaagcucaagagcaaggugauccgcaccgagcggccccuguccagcggcguguacauggggaaccuguccacgcagcagcucgagcagcgccgggcccugcugaacaugaucggcauggucggcggggcgcagggcacccagccggggcgcgacggcguggugcgggucugggacgugaagaaccccgaccuccugaacaaccaguucgggaccaugcccagccugacccucgccugccugacgaagcagggccagguggaccugaacgacgccguccucgcccugaccgaccugggccucaucuacaccgcgaaguaccccaacuccagcgaccuggaccgccugucccagagccacccgauccucaacaugguggacaccaagaaguccagccugaacaucagcggguacaacuucucccugggcgccgccgugaaggccggggccugcaugcucgacggcggcaacaugcuggagacgaucaaggucacgccccagaccauggacgggauccucaagagcauccugaaggugaagcggucccugggcauguucgugagcgacacccccggggagcgcaaccccuacgagaacauccuguacaagaucugccucuccggcgacggguggccguacaucgcgagccggaccuccaucgucggccgcgccugggagaacaccaccguggaccuggagagcgacggcaagccccagaagguggggaccgccggcuccaacaagagccugcaguccgccggguuccccacgggccucaccuacagccagcugaugacccugaaggacuccaugaugcagcuggaccccagcgccaagaccuggaucgacaucgaggggcggccggaggaccccgucgagaucgcgcucuaccagcccauguccggcugcuacauccacuucuuccgcgagcccacggaccugaagcaguucaagcaggacgccaaguacagccacggcaucgacguggccgaccuguucccggcccagcccgggcucaccuccgccgucaucgaggcgcugccccggaacauggugcugaccugccagggcagcgacgacaucaagaagcuccuggacucccaggggcgccgcgacaucaagcugaucgacaucagccucagcaagguggacucccggaaguucgagaacgccgucugggaccagugcaaggaccugugccacaugcacaccggcgugguggucgagaagaagaagcgcgggggcaaggaggagaucacgccccacugcgcccugauggacugcaucauguucgacgccgccgugagcggcgggcucaacaucccggugcugcgggcgguccugccccgcgacaugguguuccggaccuccagccccaaggugguccucugaggacuagucccuguucccagagcccacuuuuuuuucuuuuuuugaaauaaaauagccugucuuucagaucucaaaggcucuuuucagagccaccaaaaaaaaaaaaaaaaaaaaaaaaaaaaaaaaaaaaaaaaaaaaaaaaaaaaaaaaaaaaaaaaaaaaaaaaaaaaaaaaaaaaaaaaaaaaaaaaaaaaa

SEQ ID NO: 18209 - RNA, 2048 nt, Artificial Sequence
  mRNA product Design a-1 (hSL-A100) comprising derived and/or modified sequence from LASV(GA391;Clade III)__CAA36646__SP-HsPLAT_NP(2-570) (opt1)
aggagagucccgcagucggcguccagcggcucugcuuguucgugugugugucguugcaggccuuauucaagcuuaccauggacgccaugaagcgcggccugugcugcgugcuccugcugugcggggccgucuucgugagccccagcgccuccaaggaggugcgcagcuuccuguggacccagucccuccggcgcgagcugagcggcuacugcuccaacaucaagcugcaggucgugaaggacgcccaggcgcuccugcacgggcuggacuucagcgagguguccaacguccagcggcucaugcgcaagcagaagcgggacgacggcgaccugaagcgccugcgggaccucaaccaggccgugaacaaccugguggagcucaagagcacccagcagaaguccguccugcgcguggggacccugagcuccgacgaccugcucauccuggccgccgaccuggagaagcucaagagcaaggugacccggaccgagcgcccccuguccagcggcgucuacauggggaaccuguccagccagcagcucgaccagcggcgcgcccugcugaacaugaucggcaugaccggcguguccgggggcgggaagggcgcgagcgacgggaucgugcgggucugggacgugaagaacgccgagcuccugaacaaccaguucggcacgaugccgucccugacccucgccugccugaccaagcagggccagguggaccugaacgacgccguccaggcgcucaccgaccuggggcugaucuacacggccaaguaccccaacagcagcgaccucgaccgccugucccagagccaccccauccugaacaugaucgacaccaagaaguccagccucaacaucuccggcuacaacuucagccugggggccgccgugaaggccggcgcgugcaugcuggacggcgggaacaugcucgagaccaucaaggugagcccccagaccauggacggcauccucaaguccauccugaaggucaagaagucccuggggauguucgugagcgacacgccgggcgagcggaaccccuacgagaacauccuguacaagaucugccuguccggggacggcuggcccuacaucgccagccgcaccuccaucgugggccgggccugggagaacaccgucguggaccucgagcaggacaacaagccccagaagaucgggaacggcgggagcaacaagucccugcagagcgccggcuucgccgcggggcugaccuacucccagcucaugacgcugaaggacuucaagugcuucaaccugaucccgaacgccaagaccuggauggacaucgagggccgccccgaggaccccguggagaucgcccuguaccagcccagcuccggcugcuacguccacuucuuccgggagccgaccgaccucaagcaguucaagcaggacgccaaguacagccacgggaucgacgugaccgaccuguucgccgcgcagcccggccugacgagcgccgucaucgaggcccucccccgcaacauggugaucacgugccagggguccgaggacauccggaagcugcuggagagccagggccgccgcgacaucaagcucaucgacaucacccuguccaaggccgacagccggaaguucgagaacgccgugugggaccaguucaaggaccugugccacaugcacaccggggucgugguggagaagaagaagcgcggcggcaaggaggagaucacgccccacugcgcgcucauggacugcaucauguucgacgccgccgucuccgggggccuggacgccaaggugcugcgggugguccucccgcgcgacaugguguuccggaccagcacccccaaggugguccugugaggacuagucccuguucccagagcccacuuuuuuuucuuuuuuugaaauaaaauagccugucuuucagaucucaaaggcucuuuucagagccaccaaaaaaaaaaaaaaaaaaaaaaaaaaaaaaaaaaaaaaaaaaaaaaaaaaaaaaaaaaaaaaaaaaaaaaaaaaaaaaaaaaaaaaaaaaaaaaaaaaaaa

SEQ ID NO: 18210 - RNA, 2045 nt, Artificial Sequence
  mRNA product Design a-1 (hSL-A100) comprising derived and/or modified sequence from LASV(AV;Clade V)__CCA30315__SP-HsPLAT_NP(2-569) (opt1)
aggagagucccgcagucggcguccagcggcucugcuuguucgugugugugucguugcaggccuuauucaagcuuaccauggacgccaugaagcgcggccugugcugcgugcuccugcugugcggggccgucuucgugagccccagcgccuccaaggaggugaaguccuuccuguggacccagagccuccgccgggagcugagcggcuacugcuccaacaucaagcugcaggucgugaaggacgcccaggcgcuccugcacgggcuggacuucagcgagguguccaacguccagcgccucaugcggaagcagcgccgggacgacagcgaccugaagcgccugcgggaccucaaccaggccgugaacaaccugguggagcugaaguccacccagcagaaguccguccuccgcgugggcacgcugagcagcgacgaccugcucacccuggccgccgaccuggagaagcucaaguccaaggugacccggaccgagcgcccccugagcuccggggucuacaugggcaaccugagcucccagcagcucgaccagcggcgcgcccugcugaaccucaucgggaugacgaacggcagccagggcucccaggcggggcgggacggcguggugcgcgucugggacgugaagaacgccgagcugcugaacaaccaguucgggaccaugccgagccucacccuggccugccugaccaagcagggccagguggaccucaacgacgucgugcaggcccugacggaccuggggcucaucuacaccgcgaaguaccccaacaccagcgaccuggaccggcugacccagucccaccccauccucaacaugaucgacacgaagaaguccagccugaacaucagcggcuacaacuucucccugggcgccgccgugaaggccggggccugcaugcucgacggcgggaacaugcuggagaccaucaaggucagcccccaguccauggacggcauccucaagagcauccugaaggugaagcgcgcgcugggcauguucguguccgacaccccgggggagcggaaccccuacgagaacauccuguacaagaucugccucagcggcgacggguggcccuacaucgccucccgcaccagcaucgucggccgggccugggagaacacggugguggaccuggagaccgacgggaagccccagaagaucggcuccggcaacagcaacaagucccugcagagcgccggguucuccgccggccucaccuacagccagcugaugacccugaaggacgcgaugcugcagcucgacccgaacgccaagacguggauggacaucgaggggcgccccgaggaccccgucgagguggcccuguaccagcccaucuccggcugcuacauccacuucuuccgggagccgaccgaccugaagcaguucaagcaggacgccaaguacagccacgggaucgacaucgccgaccucuucgcggcccagcccggccugaccagcgccgucaucgaggcccugccccgcaacauggugaucacgugccagggcuccgaggacaucaagaagcuccuggagagccaggggcgcaaggacaucaagcugaucgacaucgcccucuccaagaucgacagccggaaguucgagaacgcggugugggaccaguacaaggaccugugccacaugcacaccggcgucgugguggagaagaagaagcgcgggggcaaggaggagaucaccccgcacugcgcccugauggacugcaucauguucgacgccgccgucuccgggggccucaacacccuggugcugcgggcggugcucccccgcgacauggucuuccggaccagcacgccccgcguggugcugugaggacuagucccuguucccagagcccacuuuuuuuucuuuuuuugaaauaaaauagccugucuuucagaucucaaaggcucuuuucagagccaccaaaaaaaaaaaaaaaaaaaaaaaaaaaaaaaaaaaaaaaaaaaaaaaaaaaaaaaaaaaaaaaaaaaaaaaaaaaaaaaaaaaaaaaaaaaaaaaaaaaaa

SEQ ID NO: 18211 - RNA, 2045 nt, Artificial Sequence
  mRNA product Design a-1 (hSL-A100) comprising derived and/or modified sequence from LASV(Togo/2016/7082;Clade VI)__AMR44578__SP-HsPLAT_NP(2-569) (opt1)
aggagagucccgcagucggcguccagcggcucugcuuguucgugugugugucguugcaggccuuauucaagcuuaccauggacgccaugaagcgcggccugugcugcgugcuccugcugugcggggccgucuucgugagccccagcaacuccaaggaggugaaguccuuccuguggacccagagccuccgccgggagcugagcggcuacugcuccaacaucaagcugcaggucgugaaggacgcccaggcccuccugcacgggcuggacuucagcgagguguccaacguccagcgccucaugcggaagcagaagcgcgacgacggcgaccugaagcggcugcgcgaccucaaccaggcggugaacaaccugguggagcucaagagcguccagcagaaguccauccugcggguggggacccugaccagcgacgaccugcucacccuggccgccgaccuggagaagcucaaguccaaggugacccgcaccgagcggccccugagcuccggcgucuacauggggaaccugagcucccagcagcucgaccagcgccgggcccugcugagcaugaucggcauguccggcgggaaccagaacagccagccgaagggcgacgggguggugcgcgucugggacgugaagaacgccgaccuccugaacaaccaguucggcacgaugcccucccugacccucgcgugccugaccaagcagggccagguggaccugaacgacgccguccaggcccucaccgaccuggggcugaucuacacggccaaguaccccaacagcagcgaccucgaccggcugucccagagccaccccauccugaacaugaucgacaccaagaaguccagccucaacaucuccggcuacaacuucagccugggggcggccaucaagaccggcgccugcaugcuggacgggggcaacaugcucgagaccaucaaggugacgccgcagaccauggacggcauccugaaguccauccugaaggugaagcgcagccucgggauguucaucuccgacacccccggcgagcggaaccccuacgagaacauccuguacaagaucugccugagcggggacggcuggcccuacaucgccucccgcaccgccaucaucgggcgggcgugggagaacacggucguggaccucgagagcgacuccaagccgcagaagaucggcagcaacggcuccaacaagagccugcaguccgccggguucgcccccggccugaccuacagccagcucaugacccugaaggacuccaugcugcagcuggaccccaacgccaagaccuggaucgacaucgaggggcgccccgaggacccgguggaggucgcccucuuccagcccaucagcggcugcuacauccacuucuuccgggagcccacggaccugaagcaguucaagcaggacgcgaaguacagccacgggaucgacgugaccgaccuguucgccgcccagcccggccucaccuccgccgugaucgaggcccugccgcgcaacaugguccugaccugccagggcagcgacgacaucaagaagcuccuggacucccaggggcggcgcgacaucaagcugaucgacgugagccucaacaagaucgacucccgcaaguucgagaacgcggucugggaccaguacaaggaccugugccacaugcacacgggcgugguggucgagaagaagaagaagggcgggaaggaggagaucacgccccacugcgcccugcucgacugcaucauguucgacgccgccgugagcgggggccugaacgccaccgugcugcgggcgguccucccccgcgacaugguguuccggaccuccagccccaaggugguccugugaggacuagucccuguucccagagcccacuuuuuuuucuuuuuuugaaauaaaauagccugucuuucagaucucaaaggcucuuuucagagccaccaaaaaaaaaaaaaaaaaaaaaaaaaaaaaaaaaaaaaaaaaaaaaaaaaaaaaaaaaaaaaaaaaaaaaaaaaaaaaaaaaaaaaaaaaaaaaaaaaaaaa

SEQ ID NO: 18212 - RNA, 2045 nt, Artificial Sequence
  mRNA product Design a-1 (hSL-A100) comprising derived and/or modified sequence from LASV(KAK-428;Clade n.d. (VII))__ANH09741__SP-HsPLAT_NP(2-569) (opt1)
aggagagucccgcagucggcguccagcggcucugcuuguucgugugugugucguugcaggccuuauucaagcuuaccauggacgccaugaagcgcggccugugcugcgugcuccugcugugcggggccgucuucgugagccccagcaacuccaaggaggugaaguccuuccuguggacccagagccuccgccgggagcugagcggcuacugcaccaacaucaagcugcaggucgugaaggacgcccaggcccuccugcacgggcuggacuucuccgaggugagcaacguccagcgccucaugcggaagcagaagcgcgacgacaacgaccugaagcggcugcgcgaccucaaccaggcggugaacaaccugguggagcugaaguccguccagcagaaguccgugcucaaggugggcacgcugaacagcgacgaccugcucacccuggccgccgaccuggagaagcucaagagcaaggucgugcggaccgagcgcccccuguccagcgggguguacaugggcaaccuguccagccagcagcucgaccagcggcgcgcccugcugaacaugaucgggauggccggcggcucccaggggaaccagccgagccgggacggcgucgugcgcgugugggacgucaagaacgcggaccuccugaacaaccaguucgggaccaugcccucccugacgcucgccugccugaccaagcagggccagguggaccugaacgacgugguccucgcccugaccgaccuggggcucaucuacaccgccaaguaccccaacagcuccgaccuggaccggcugagccagaaccaccccgugcucaacaugaucgacgugaacaagagcucccugaacaucagcggcuacaacuucucccugggcgcggccgucaaggccggggccugcaugcucgacggcgggaacaugcuggagacgaucaagaucagcccgcagaccguggacggcauccugaaguccauccucaaggugaagcgcgcccugggcauguucgucagcgacacccccggggagcggaaccccuacgagaacauccuguacaaggugugccucuccggcaacggguggcccuacaucgcgagccgcaccuccaucgucggccgggccugggagaacacggugguggaccuggagagcaacaagaaccagccgaaggucgggaacaacggcuccaacaagaugcugcagagcuccggcuucgccaccgggcucaccuacagccagcugaugacccugcgcgacuccaugcugcagcucgaccccacggccaagaccuggaucgacaucgagggccggcccgaggaccccguggagcuggcccuguuccagccgagcuccgggugcuacauccacuucuuccgcgagcccaccgaccucaagcaguucaagcaggacgcgaaguacagccacggcaucgacgugaacgaccuguucuccgcccagcccgggcugaccagcgccguccucgaggcccugccccggaacauggugcugacgugccagggcagcgacgacauccgcaagcuccuggacucccaggaccgcaaggacaucaagcugaucgacaucagccucuccaaggccgacgcgcggaaguucgagaacgacgugugggaccaguucaaggaccugugccacaugcacaccggcaucgucguggagaagaagaagaagggcgggaagcaggagaugaccccgcacugcgcccugcucgacugcaucauguucgacgccgccgugagcgggggccugaacguccccacccugcgcgccgugcuccccacggacaugguguuccggaccaucaccaccaaggucgugcugugaggacuagucccuguucccagagcccacuuuuuuuucuuuuuuugaaauaaaauagccugucuuucagaucucaaaggcucuuuucagagccaccaaaaaaaaaaaaaaaaaaaaaaaaaaaaaaaaaaaaaaaaaaaaaaaaaaaaaaaaaaaaaaaaaaaaaaaaaaaaaaaaaaaaaaaaaaaaaaaaaaaaa

SEQ ID NO: 18213 - RNA, 2045 nt, Artificial Sequence; identical to SEQ ID NO: 18207
  mRNA product Design a-1 (hSL-A100) comprising derived and/or modified sequence from LASV(Pinneo-NIG-1969;Clade I)__AIT17837__SP-HsPLAT_NP(2-569) (opt1)

SEQ ID NO: 18214 - RNA, 2045 nt, Artificial Sequence
  mRNA product Design a-1 (hSL-A100) comprising derived and/or modified sequence from LASV(ISTH0009-NIG-2011;Clade II)__AIT17405__SP-HsPLAT_NP(2-569) (opt1)
aggagagucccgcagucggcguccagcggcucugcuuguucgugugugugucguugcaggccuuauucaagcuuaccauggacgccaugaagcgcggccugugcugcgugcuccugcugugcggggccgucuucgugagccccagcguguccaaggaggucaagagcuuccuguggacccagucccuccgccgggagcugagcggcuacugcuccaacaucaagcuccagguggugaaggacgcccaggcccugcugcacgggcuggacuucagcgaggucuccaacgugcagcgccucaugcggaagcagaagcgcgacgacagcgaccugaagcggcugcgcgaccucaaccaggcggugaacaaccuggucgagcugaaguccacccagcagaaguccauccuccgggugggcacccugaccagcgacgaccugcucacccuggccgccgaccuggagaagcucaagagcaaggugauccgcaccgagcggccccuguccagcggggucuacaugggcaaccuguccacgcagcagcucgagcagcgccgggcccugcugaacaugaucgggauggugggcggcgcccaggggacccagccgggccgcgacggggugguccgggugugggacgugaagaaccccgaccuccugaacaaccaguucggcaccaugcccagccugacccucgcgugccugacgaagcaggggcaggucgaccugaacgacgccgugcucgcccugaccgaccugggccucaucuacaccgccaaguaccccaacuccagcgaccuggaccgccugucccagagccacccgauccucaacaugguggacaucaagaaguccagccugaacaucagcggcuacaacuucucccugggggcggccgucaaggccggcgccugcaugcucgacgggggcaacaugcuggagaccaucaaggugacgccccagaccauggacggcauccucaagagcauccugaaggugaagcggucccuggggauguucgucagcgacacccccggcgagcgcaaccccuacgagaacauccuguacaagaucugccucuccggggacggcuggccguacaucgccagccggaccuccaucguggggcgcgcgugggagaacacgaccguggaccuggagagcgacggcaagccccagaaggucggcuccgccgggagcaacaagucccugcagagcgccggcuuccccaccgggcucaccuacucccagcugaugacgcugaaggacagcaugaugcagcuggaccccuccgccaagaccuggaucgacaucgagggccggccggaggaccccguggagaucgcccucuaccagcccaugagcgggugcuacauccacuucuuccgcgagcccaccgaccugaagcaguucaagcaggacgcgaaguacucccacggcaucgacgucgccgaccuguucccggcccagcccggccucaccagcgccgugaucgaggcccugccccggaacauggugcugacgugccaggggagcgacgacaucaagcgccuccuggacucccagggccgccgggacaucaagcugaucgacaucgcgcucagcaaggccgacucccgccgguucgagaacgccgucugggaccagugcaaggaccugugccacaugcacaccggggugguggucgagaagaagaagcgcggcgggaaggaggagaucacgccccacugcgcccugauggacugcaucauguacgacgccgcggugagcggcggccucaacaucccggugcugcgggccguccugccccgcgacaugguguuccggaccuccagccccaaggugguccucugaggacuagucccuguucccagagcccacuuuuuuuucuuuuuuugaaauaaaauagccugucuuucagaucucaaaggcucuuuucagagccaccaaaaaaaaaaaaaaaaaaaaaaaaaaaaaaaaaaaaaaaaaaaaaaaaaaaaaaaaaaaaaaaaaaaaaaaaaaaaaaaaaaaaaaaaaaaaaaaaaaaaa

SEQ ID NO: 18215 - RNA, 2045 nt, Artificial Sequence
  mRNA product Design a-1 (hSL-A100) comprising derived and/or modified sequence from LASV(ISTH2010-NIG-2012;Clade II)__AIT17483__SP-HsPLAT_NP(2-569) (opt1)
aggagagucccgcagucggcguccagcggcucugcuuguucgugugugugucguugcaggccuuauucaagcuuaccauggacgccaugaagcgcggccugugcugcgugcuccugcugugcggggccgucuucgugagccccagcgccuccaaggaggugaaguccuuccuguggacccagagccuccgccgggagcugagcggcuacugcuccaacaucaagcugcaggucgugaaggacgcccaggcgcuccugcacgggcuggacuucagcgagguguccaacguccagcgccucaugcggaagcagaagcgcgacgacagcgaccugaagcggcugcgcgaccucaaccaggccgugaacaaccugguggagcugaaguccacccagcagaaguccauccuccgggucggcacgcugaccagcgacgaccugcucacccuggccgccgaccuggagaagcucaagagcaaggugauccgcaccgagcggccccuguccagcgggguguacaugggcaaccuguccacgcagcagcucgagcagcgccgggcccugcugaaccucaucgggauggucggcggcgcgcaggggacccagccgggccgcgacgggguggugcgggucugggacgugaagaaccccgaccugcugaacaaccaguucggcaccaugcccagccucacccuggccugccugacgaagcagggccagguggaccucaacgacgccguccuggcccugaccgaccucgggcugaucuacaccgcgaaguaccccaacuccagcgaccuggaccgccucucccagagccacccgauccugaacaugguggacaccaagaaguccagccugaacaucagcggcuucaacuucucccucggggccgccgugaaggccggcgccugcaugcuggacgggggcaacaugcuggagacgaucaaggucacgccccagaccauggacggcauccucaagagcauccugaaggugaagaagucccuggggauguucgugagcgacacccccggcgagcggaaccccuacgagaacauccucuacaagaucugccuguccggggacggcuggccguacaucgcgagccgcaccuccaucgucgggcgggccugggagaacaccaccguggaccuggagagcgacggcaagccccacaaggugggcaccgccggguccaacaagagccuccaguccgccggcuuccccacggggcugaccuacagccagcugaugacccugaaggacuccaugaugcagcucgaccccagcgccaagaccuggaucgacaucgagggccgcccggaggaccccgucgagaucgcgcuguaccagcccauguccgggugcuacauccacuucuuccgggagcccacggaccugaagcaguucaagcaggacgccaaguacagccacggcaucgacguggccgaccucuucccggcccagcccggccugaccuccgccgucaucgaggcgcugccccgcaacauggugcugaccugccaggggagcgacgacaucaagcggcuccuggacagccagggccgccgcgacaucaagcucaucgacaucgcccuguccaaggccgacagccggcgcuucgagaacgccgugugggaccagugcaaggaccugugccacaugcacaccggggucgugguggagaagaagaagcggggcgggaaggaggagaucacgccccacugcgcccucauggacugcaucauguacgacgcggccgucuccggcggccugaacaucccggugcugcgcgccgugcucccccgggacauggucuuccgcaccagcucccccaagguggugcugugaggacuagucccuguucccagagcccacuuuuuuuucuuuuuuugaaauaaaauagccugucuuucagaucucaaaggcucuuuucagagccaccaaaaaaaaaaaaaaaaaaaaaaaaaaaaaaaaaaaaaaaaaaaaaaaaaaaaaaaaaaaaaaaaaaaaaaaaaaaaaaaaaaaaaaaaaaaaaaaaaaaaa

SEQ ID NO: 18216 - RNA, 2045 nt, Artificial Sequence
  mRNA product Design a-1 (hSL-A100) comprising derived and/or modified sequence from LASV(Lassa virus/H.sapiens-wt/NGA/2015/ISTH_0543;Clade II)__AVO03640__SP-HsPLAT_NP(2-569) (opt1)
aggagagucccgcagucggcguccagcggcucugcuuguucgugugugugucguugcaggccuuauucaagcuuaccauggacgccaugaagcgcggccugugcugcgugcuccugcugugcggggccgucuucgugagccccagcgccuccaaggaggugaaguccuuccuguggacccagagccuccgccgggagcugagcggcuacugcuccaacaucaagcugcaggucgugaaggacgcccaggcgcuccugcacgggcuggacuucagcgagguguccaacguccagcgccucaugcggaagcagaagcgcgacgacagcgaccugaagcggcugcgcgaccucaaccaggccgugaacaaccugguggagcugaaguccacccagcagaaguccauccuccgggucggcacgcugaccagcgacgaccugcucacccuggccgccgaccuggagaagcucaagagcaaggugauccgcaccgagcggccccuguccagcgggguguacaugggcaaccuguccacgcagcagcucgagcagcgccgggcccugcugaacaugaucgggauggucggcggcgcgcaggggacccagccgggccgcgacgggguggugcgggucugggacgugaagaaccccgaccuccugaacaaccaguucggcaccaugcccagccugacccucgccugccugacgaagcagggccagguggaccugaacgacgccguccucgcccugaccgaccuggggcucaucuacaccgcgaaguaccccaacuccagcgaccuggaccgccugucccagagccacccgauccucaacaugguggacaccaagaaguccagccugaacaucagcggcuacaacuucucccugggggccgccgugaaggccggcgccugcaugcucgacgggggcaacaugcuggagacgaucaaggucacgccccagaccauggacggcauccucaagagcauccugaaggugaagaagucccuggggauguucgugagcgacacccccggcgagcggaaccccuacgagaacauccuguacaagaucugccucuccggggacggcuggccguacaucgcgagccgcaccuccaucgucgggcgggccugggagaacaccaccguggaccuggagagcgacggcaagccccagaaggugggcuccgccgggagcaacaagucccugcagagcgccggcuuccccaccgggcucacguacucccagcugaugacccugaaggacagcaugaugcagcuggaccccuccgccaagaccuggaucgacaucgagggccgcccggaggaccccgucgagaucgcgcucuaccagcccaugagcgggugcuacauccacuucuuccgggagcccaccgaccugaagcaguucaagcaggacgccaaguacucccacggcaucgacguggccgaccuguucccggcccagcccggccucacgagcgccgucaucgaggcgcugccccgcaacauggugcugaccugccaggggagcgacgacaucaagcggcuccuggacucccagggccgcaaggacaucaagcugaucgacaucgcccucagcaaggccgacucccgccgguucgagaacgccgugugggaccagugcaaggaccugugccacaugcacaccggggucgugguggagaagaagaagcgcggcgggaaggaggagaucacgccccacugcgcccugauggacugcaucauguacgacgcggccgucagcggcggccucaacaucccggugcugcgggccgugcugccccgcgacauggucuuccggaccuccagccccaagguggugcucugaggacuagucccuguucccagagcccacuuuuuuuucuuuuuuugaaauaaaauagccugucuuucagaucucaaaggcucuuuucagagccaccaaaaaaaaaaaaaaaaaaaaaaaaaaaaaaaaaaaaaaaaaaaaaaaaaaaaaaaaaaaaaaaaaaaaaaaaaaaaaaaaaaaaaaaaaaaaaaaaaaaaa

SEQ ID NO: 18217 - RNA, 2045 nt, Artificial Sequence
  mRNA product Design a-1 (hSL-A100) comprising derived and/or modified sequence from LASV(Lassa virus/H.sapiens-wt/NGA/2016/ISTH_0009;Clade II)__AVO03572__SP-HsPLAT_NP(2-569) (opt1)
aggagagucccgcagucggcguccagcggcucugcuuguucgugugugugucguugcaggccuuauucaagcuuaccauggacgccaugaagcgcggccugugcugcgugcuccugcugugcggggccgucuucgugagccccagcgccuccaaggaggugaaguccuuccuguggacccagagccuccgccgggagcugagcggcuacugcuccaacaucaagcugcaggucgugaaggacgcccaggcgcuccugcacgggcuggacuucagcgagguguccaacguccagcgccucaugcggaagcagaagcgcgacgacagcgaccugaagcggcugcgcgaccucaaccaggccgugaacaaccugguggagcugaaguccacccagcagaaguccauccuccgggucggcacgcugaccagcgacgaccugcucacccuggccgccgaccuggagaagcucaagagcaaggugauccgcaccgagcggccccuguccagcgggguguacaugggcaaccuguccacgcagcagcucgagcagcgccgggcccugcugaacaugaucgggauggucggcggcgcgcaggggacccagccgggccgcgacgggguggugcgggucugggacgugaagaaccccgaccuccugaacaaccaguucggcaccaugcccagccugacccucgccugccugacgaagcagggccagguggaccugaacgacgccguccucgcccugaccgaccuggggcucaucuacaccgcgaaguaccccaacuccagcgaccuggaccgccugucccagagccacccgauccucaacaugguggacaccaagaaguccagccugaacaucagcggcuacaacuucucccugggggccgccgugaaggccggcgccugcaugcucgacgggggcaacaugcuggagacgaucaaggucacgccccagaccauggacggcauccucaagagcauccugaaggugaagaagucccuggggauguucgugagcgacacccccggcgagcggaaccccuacgagaacauccuguacaagaucugccucuccggggacggcuggccguacaucgcgagccgcaccuccaucgucgggcgggccugggagaacaccaccguggaccuggagagcgacggcaagccccagaaggugggcuccgccgggagcaacaagucccugcagagcgccggcuuccccaccgggcucacguacucccagcugaugacccugaaggacagcaugaugcagcuggaccccuccgccaagaccuggaucgacaucgagggccgcccggaggaccccgucgagaucgcgcucuaccagcccaugagcgggugcuacauccacuucuuccgggagcccaccgaccugaagcaguucaagcaggacgccaaguacucccacggcaucgacguggccgaccuguucccggcccagcccggccucacgagcgccgucaucgaggcgcugccccgcaacauggugcugaccugccaggggagcgacgacaucaagcggcuccuggacucccagggccgccgcgacaucaagcugaucgacaucgcccucagcaaggccgacucccggcgcuucgagaacgccgugugggaccagugcaaggaccugugccacaugcacaccggggucgugguggagaagaagaagcggggcgggaaggaggagaucacgccccacugcgcccugauggacugcaucauguacgacgcggccgucagcggcggccucaacaucccggugcugcgcgccgugcugccccgggacauggucuuccgcaccuccagccccaagguggugcucugaggacuagucccuguucccagagcccacuuuuuuuucuuuuuuugaaauaaaauagccugucuuucagaucucaaaggcucuuuucagagccaccaaaaaaaaaaaaaaaaaaaaaaaaaaaaaaaaaaaaaaaaaaaaaaaaaaaaaaaaaaaaaaaaaaaaaaaaaaaaaaaaaaaaaaaaaaaaaaaaaaaaa

SEQ ID NO: 18218 - RNA, 2045 nt, Artificial Sequence
  mRNA product Design a-1 (hSL-A100) comprising derived and/or modified sequence from LASV(Lassa virus/H.sapiens-wt/NGA/2016/ISTH_0017;Clade II)__AVO03568__SP-HsPLAT_NP(2-569) (opt1)
aggagagucccgcagucggcguccagcggcucugcuuguucgugugugugucguugcaggccuuauucaagcuuaccauggacgccaugaagcgcggccugugcugcgugcuccugcugugcggggccgucuucgugagccccagcgccuccaaggaggugaaguccuuccuguggacccagagccuccgccgggagcugagcggcuacugcuccagcaucaagcugcaggucgugaaggacgcccaggcgcuccugcacgggcuggacuucuccgaggugagcaacguccagcgccucaugcggaagcagaagcgcgacgacuccgaccugaagcggcugcgcgaccucaaccaggccgugaacaaccugguggagcucaagagcacccagcagaaguccauccugcgggucggcacgcugaccagcgacgaccugcucacccuggccgccgaccuggagaagcucaaguccaaggugauccgcaccgagcggccccugagcuccgggguguacaugggcaaccugagcacgcagcagcucgagcagcgccgggcccugcugaacaugaucgggauggcgggcggcgcccaggggacccagccgggccgcgacggggucgugcgggugugggacgucaagaaccccgaccuccugaacaaccaguucggcaccaugcccucccugacccucgccugccugacgaagcagggccagguggaccugaacgacgccgugcucgcgcugaccgaccuggggcucaucuacaccgccaaguaccccaacagcuccgaccuggaccgccugagccagagccacccgauccucaacauggucgacaccaagaaguccagccugaacaucuccggcuacaacuucagccugggggccgccgugaaggccggcgcgugcaugcucgacgggggcaacaugcuggagacgaucaaggugacgccccagaccauggacggcauccugaaguccauccucaaggucaagcggagccuggggauguucguguccgacgcccccggcgagcgcaaccccuacgagaacauccuguacaagaucugccucagcggggacggcuggccguacaucgccucccggaccagcaucguggggcgcgccugggagaacaccaccgucgaccuggaguccgacggcaagccccagaaggugggcgccaccgggagcaacaagucccugcagagcgcgggcuuccccaccgggcucacguacucccagcugaugacccugaaggacagcaugaugcagcuggaccccuccgccaagaccuggaucgacaucgagggccggccggaggaccccguggaggucgcccucuaccagcccgugagcgggugcuacauccacuucuuccgcgagcccaccgaccugaagcaguucaagcaggacgccaaguacucccacggcaucgacgucgccgaccuguucccggcgcagcccggccucacgagcgccgugaucgaggcccugccccggaacauggugcugaccugccaggggagcgacgacaucaagaagcuccuggacucccagggccgcaaggacaucaagcugaucgacaucgcccucagcaaggccgacucccgccgguucgagaacgcggucugggaccagugcaaggaccugugccacaugcacaccggggugguggucgagaagaagaagcgcggcgggaaggaggagaucacgccccacugcgcccugauggacugcaucauguacgacgccgccgugagcggcggccucaacaucccggugcugcgggcgguccugccccgcgacaugguguuccggaccuccagccccaaggugguccucugaggacuagucccuguucccagagcccacuuuuuuuucuuuuuuugaaauaaaauagccugucuuucagaucucaaaggcucuuuucagagccaccaaaaaaaaaaaaaaaaaaaaaaaaaaaaaaaaaaaaaaaaaaaaaaaaaaaaaaaaaaaaaaaaaaaaaaaaaaaaaaaaaaaaaaaaaaaaaaaaaaaaa

SEQ ID NO: 18219 - RNA, 2045 nt, Artificial Sequence
  mRNA product Design a-1 (hSL-A100) comprising derived and/or modified sequence from LASV(Lassa virus/H.sapiens-wt/NGA/2018/ISTH_0959;Clade II)__AVV65100__SP-HsPLAT_NP(2-569) (opt1)
aggagagucccgcagucggcguccagcggcucugcuuguucgugugugugucguugcaggccuuauucaagcuuaccauggacgccaugaagcgcggccugugcugcgugcuccugcugugcggggccgucuucgugagccccagcgccuccaaggaggugaaguccuuccuguggacccagagccuccgccgggagcugagcggcuacugcuccaacaucaagcugcaggucgugaaggacgcccaggcgcuccugcacgggcuggacuucagcgagguguccaacguccagcgccucaugcggaagcagaagcgcgacgacagcgaccugaagcggcugcgcgaccucaaccaggccgugaacaaccugguggagcugaaguccacccagcagaaguccauccuccgggucggcacccugaccagcgacgaccugcucacccuggccgccgaccuggagaagcucaagagcaaggugauccgcaccgagcggccccuguccagcgggguguacaugggcaaccuguccacgcagcagcucgagcagcgccgggcccugcugaaccucaucgggauggucggcggcgcgcaggggacccagccgggccgcgacgggguggugcgggucugggacgugaagaaccccgaccugcugaacaaccaguucggcaccaugcccagccucacccuggccugccugacgaagcagggccagguggaccucaacgacgucgugcuggcccugaccgaccucgggcugaucuacaccgccaaguaccccaacuccagcgaccuggaccgccucucccagagccacccgauccugaacaugguggacaccaagaaguccagccugaacaucagcggcuucaacuucucccucggggcggccgucaaggccggcgccugcaugcuggacgggggcaacaugcuggagacgaucaaggugacgccccagaccauggacggcauccucaagagcauccugaaggugaagaagucccuggggauguucgucagcgacacccccggcgagcggaaccccuacgagaacauccucuacaagaucugccuguccggggacggcuggccguacaucgccagccgcaccuccaucguggggcgggcgugggagaacaccaccguggaccuggagagcgacggcaagccccacaaggucggcaccgccggguccaacaagagccuccaguccgccggcuuccccacggggcugaccuacagccagcugaugacccugaaggacuccaugaugcagcucgaccccagcgccaagaccuggaucgacaucgagggccgcccggaggaccccguggagaucgcccuguaccagcccauguccgggugcuacauccacuucuuccgggagcccacggaccugaagcaguucaagcaggacgcgaaguacagccacggcaucgacgucgccgaccucuucccggcccagcccggccugaccuccgccgugaucgaggcccugccccgcaacauggugcugaccugccaggggagcgacgacaucaagcggcuccuggacagccagggccgcaaggacaucaagcucaucgacaucgcgcuguccaagaccgacagccgccgguucgagaacgccgucugggaccagugcaaggaccugugccacaugcacacgggggugguggucgagaagaagaagcgcggcgggaaggaggagaucacgccccacugcgcccucauggacugcaucauguacgacgccgccguguccggcggccugaacaucccggugcugcgggcgguccucccccgcgacaugguguuccggaccagcucccccaaggugguccugugaggacuagucccuguucccagagcccacuuuuuuuucuuuuuuugaaauaaaauagccugucuuucagaucucaaaggcucuuuucagagccaccaaaaaaaaaaaaaaaaaaaaaaaaaaaaaaaaaaaaaaaaaaaaaaaaaaaaaaaaaaaaaaaaaaaaaaaaaaaaaaaaaaaaaaaaaaaaaaaaaaaaa

SEQ ID NO: 18220 - RNA, 2045 nt, Artificial Sequence
  mRNA product Design a-1 (hSL-A100) comprising derived and/or modified sequence from LASV(LASV003-NIG-2008;Clade II)__AIT17581__SP-HsPLAT_NP(2-569) (opt1)
aggagagucccgcagucggcguccagcggcucugcuuguucgugugugugucguugcaggccuuauucaagcuuaccauggacgccaugaagcgcggccugugcugcgugcuccugcugugcggggccgucuucgugagccccagcgccuccaaggaggugaaguccuuccuguggacccagagccuccgccgggagcugagcggcuacugcuccagcaucaagcugcaggucgugaaggacgcccaggcgcuccugcacgggcuggacuucuccgaggugagcaacguccagcgccucaugcggaagcagaagcgcgacgacuccgaccugaagcggcugcgcgaccucaaccaggccgugaacaaccugguggagcucaagagcacccagcagaaguccguccugcgggugggcacccugaccagcgacgaccugcucacccuggccgccgaccuggagaagcucaaguccaaggugauccgcaccgagcggccccugagcuccggggucuacaugggcaaccugagcgcccagcagcucgagcagcgccggacgcugcugaacaugaucgggauggugggcggcgcgcaggggacccagccgggccgcgacggggugguccgggugugggacgugaagaaccccgaccuccugaacaaccaguucggcaccaugcccucccugacccucgccugccugacgaagcaggggcaggucgaccugaacgacguggugcucgcccugaccgaccugggccucaucuacaccgccaaguaccccaacagcuccgaccuggaccgccugagccagagccacccgauccucuccauggucgacaccaagaaguccagccugaacaucagcggcuacaacuucucccugggggcggccgugaaggccggcgccugcaugcucgacgggggcaacaugcuggagacgaucaaggugacgccccagaccauggacggcauccucaagagcauccugaaggucaagaagucccuggggauguucgugagcgacacccccggcgagcggaaccccuacgagaacauccuguacaagaucugccucuccggggacggcuggccguacaucgccagccgcaccuccaucguggggcgggcgugggagaacaccaccgucgaccuggagagcgacggcaagccccagaaggugggcaccgccggguccaacaagagccugcaguccgccggcuuccccacggggcucaccuacagccagcugaugacccugaaggacuccaugaugcagcuggaccccagcgccaagaccuggaucgacaucgagggccgcccggaggaccccgucgagaucgcccucuaccagcccauguccgggugcuacauccacuucuuccgggagcccacggaccugaagcaguucaagcaggacgcgaaguacagccacggcaucgacgugaccgaccuguucccggcccagcccggccucaccagcgccgugaucgaggcccugccccgcaacaugguccugaccugccagggguccgacgacaucaagcggcuccuggacagccagggccgccgcgacaucaagcugaucgacaucgcccucuccaaggcggacagccggcgcuucgagaacgccgugugggaccagugcaaggaccugugccacaugcacacggggguggucguggagaagaagaagcggggcgggaaggaggagaucacgccccacugcgcccugauggacugcaucauguacgacgccgccguguccggcggccucaacaucccgguccugcgcgcggugcugccccgggacaugguguuccgcaccagcucccccaaggucgugcucugaggacuagucccuguucccagagcccacuuuuuuuucuuuuuuugaaauaaaauagccugucuuucagaucucaaaggcucuuuucagagccaccaaaaaaaaaaaaaaaaaaaaaaaaaaaaaaaaaaaaaaaaaaaaaaaaaaaaaaaaaaaaaaaaaaaaaaaaaaaaaaaaaaaaaaaaaaaaaaaaaaaaa

SEQ ID NO: 18221 - RNA, 2045 nt, Artificial Sequence
  mRNA product Design a-1 (hSL-A100) comprising derived and/or modified sequence from LASV(LASV035-NIG-2009;Clade II)__AIT17589__SP-HsPLAT_NP(2-569) (opt1)
aggagagucccgcagucggcguccagcggcucugcuuguucgugugugugucguugcaggccuuauucaagcuuaccauggacgccaugaagcgcggccugugcugcgugcuccugcugugcggggccgucuucgugagccccagcgccuccaaggaggugaaguccuuccuguggacccagagccuccgccgggagcugagcggcuacugcuccagcaucaagcugcaggucgugaaggacgcccaggcgcuccugcacgggcuggacuucuccgaggugagcaacguccagcgccucaugcggaagcagaagcgcgacgacuccgaccugaagcggcugcgcgaccucaaccaggccgugaacaaccugguggagcucaagagcacccagcagaaguccauccugcgggucggcacgcugaccagcgacgaccugcucacccuggccgccgaccuggagaagcucaaguccaaggugauccgcaccgagcggccccugagcuccgggguguacaugggcaaccugagcgcccagcagcucgagcagcgccgggcgcugcugaacaugaucgggauggucggcggcgcccaggggacgcagccgggccgcgacgggguggugcgggucugggacgugaagaaccccgaccuccugaacaaccaguucggcaccaugcccucccugacccucgccugccugaccaagcagggccagguggaccugaacgacgccguccucgcgcugacggaccuggggcucaucuacaccgccaaguaccccaacagcuccgaccuggaccgccugagccagagccacccgauccucaacaugguggacaccaagaaguccagccugaacaucuccggcuacaacuucagccugggggccgccgugaaggccggcgcgugcaugcucgacgggggcaacaugcuggagaccaucaaggucacgccccagaccauggacggcauccugaaguccauccucaaggugaagcggagccuggggauguucguguccgacacccccggcgagcgcaaccccuacgagaacauccuguacaagaucugccucagcggggacggcuggccguacaucgccucccggaccagcaucgucgggcgcgccugggagaacacgaccguggaccuggaguccgacggcaagccccagaaggugggcaccaccgggagcaacaagucccugcagagcgccggcuuccccacggggcucaccuacucccagcugaugacccugaaggacagcaugaugcagcuggaccccuccgccaagaccuggaucgacaucgagggccggccggaggaccccgucgagaucgcgcucuaccagcccaugagcgggugcuacauccacuucuuccgcgagcccacggaccugaagcaguucaagcaggacgccaaguacucccacggcaucgacguggccgaccuguucccggcccagcccggccucaccagcgccgucaucgaggcgcugccccggaacauggugcugaccugccaggggagcgacgacaucaagaagcuccuggacucccagggccgccgcgacaucaagcugaucgacaucgcccucagcaaggccgacucccggaaguucgagaacgccgugugggaccagugcaaggaccugugccacaugcacaccggggucgugguggagaagaagaagcgcggcgggaaggaggagaucacgccccacugcgcccugauggacugcaucauguacgacgcggccgucagcggcggccucaacaucccggugcugcgggccgugcugccccgcgacauggucuuccggaccuccagccccaagguggugcucugaggacuagucccuguucccagagcccacuuuuuuuucuuuuuuugaaauaaaauagccugucuuucagaucucaaaggcucuuuucagagccaccaaaaaaaaaaaaaaaaaaaaaaaaaaaaaaaaaaaaaaaaaaaaaaaaaaaaaaaaaaaaaaaaaaaaaaaaaaaaaaaaaaaaaaaaaaaaaaaaaaaaa

SEQ ID NO: 18222 - RNA, 2045 nt, Artificial Sequence
  mRNA product Design a-1 (hSL-A100) comprising derived and/or modified sequence from LASV(LASV1000-NIG-2009;Clade II)__AIT17783__SP-HsPLAT_NP(2-569) (opt1)
aggagagucccgcagucggcguccagcggcucugcuuguucgugugugugucguugcaggccuuauucaagcuuaccauggacgccaugaagcgcggccugugcugcgugcuccugcugugcggggccgucuucgugagccccagcgccuccaaggaggugaaguccuuccuguggacccagagccuccgccgggagcugagcggcuacugcuccaacaucaagcugcaggucgugaaggacgcccaggcgcuccugcacgggcuggacuucagcgagguguccaacguccagcgccucaugcggaagcagaagcgcgacgacagcgaccugaagcggcugcgcgaccucaaccaggccgugaacaaccugguggagcugaaguccacccagcagaaguccauccuccgggucggcacgcugaccagcgacgaccugcucacccuggccgccgaccuggagaagcucaagagcaaggugauccgcaccgagcggccccuguccagcgggguguacaugggcaaccuguccacgcagcagcucgagcagcgccgggcccugcugaacaugaucgggauggucggcggcgcgcaggggacccagccgggccgcgacgggguggugcgggucugggacgugaagaaccccgaccuccugaacaaccaguucggcaccaugcccagccugacccucgccugccugacgaagcagggccagguggaccugaacgacgucgugcucgcccugaccgaccuggggcucaucuacaccgccaaguaccccaacuccagcgaccuggaccgccugucccagagccacccgauccucaacaugguggacaccaagaaguccagccugaacaucagcggcuacaacuucucccugggggcggccgucaaggccggcgccugcaugcucgacgggggcaacaugcuggagacgaucaaggugacgccccagaccauggacggcauccucaagagcauccugaaggugaagaagucccuggggauguucgucagcgacacccccggcgagcggaaccccuacgagaacauccuguacaagaucugccucuccggggacggcuggccguacaucgccagccgcaccuccaucguggggcgggcgugggagaacaccaccguggaccuggagagcgacggcaagccccagaaggucggcaccgccggguccaacaagagccugcaguccgccggcuuccccacggggcucaccuacagccagcugaugacccugaaggacuccaugaugcagcuggaccccagcgccaagaccuggaucgacaucgagggccgcccggaggaccccguggagaucgcccucuaccagcccgucuccgggugcuacauccacuucuuccgggagcccacggaccugaagcaguucaagcaggacgcgaaguacagccacggcaucgacguggccgaccuguucccggcccagcccggccucaccuccgccgugaucgaggcccugccccgcaacaugguccugaccugccaggggagcgacgacaucaagcggcuccuggacagccagggccgccgcgacaucaagcugaucgacaucgcgcucuccaaggccgacagccggcgcuucgagaacgccgugugggaccagugcaaggaccugugccacaugcacaccgggguggucguggagaagaagaagcggggcgggaaggaggagaucacgccccacugcgcccugauggacugcaucauguacgacgccgcgguguccggcggccucaacaucccgguccugcgcgccgugcugccccgggacaugguguuccgcaccagcucccccaaggucgugcucugaggacuagucccuguucccagagcccacuuuuuuuucuuuuuuugaaauaaaauagccugucuuucagaucucaaaggcucuuuucagagccaccaaaaaaaaaaaaaaaaaaaaaaaaaaaaaaaaaaaaaaaaaaaaaaaaaaaaaaaaaaaaaaaaaaaaaaaaaaaaaaaaaaaaaaaaaaaaaaaaaaaaa

SEQ ID NO: 18223 - RNA, 2045 nt, Artificial Sequence
  mRNA product Design a-1 (hSL-A100) comprising derived and/or modified sequence from LASV(LASV221-NIG-2010;Clade II)__AIT17625__SP-HsPLAT_NP(2-569) (opt1)
aggagagucccgcagucggcguccagcggcucugcuuguucgugugugugucguugcaggccuuauucaagcuuaccauggacgccaugaagcgcggccugugcugcgugcuccugcugugcggggccgucuucgugagccccagcgccuccaaggaggugaaguccuuccuguggacccagagccuccgccgggagcugagcggcuacugcuccagcaucaagcugcaggucgugaaggacgcccaggcgcuccugcacgggcuggacuucuccgaggugagcaacguccagcgccucaugcggaagcagcgccgggacgacuccgaccugaagcgccugcgggaccucaaccaggccgugaacaaccugguggagcucaagagcacccagcagaaguccauccugcgcgucggcacgcugaccagcgacgaccugcucacccuggccgccgaccuggagaagcucaaguccaaggugauccggaccgagcgcccccugagcuccgggguguacaugggcaaccugagcacgcagcagcucgagcagcggcgcgcccugcugaacaugaucgggauggucggcggcgcgcaggggacccagccgggccgggacgggguggugcgcgucugggacgugaagaaccccgaccuccugaacaaccaguucggcaccaugcccucccugacccucgccugccugacgaagcagggccagguggaccugaacgacgccguccucgcccugaccgaccuggggcucaucuacaccgcgaaguaccccaacagcuccgaccuggaccggcugagccagagccacccgauccucaacaugguggacaccaagaaguccagccugaacaucuccggcuacaacuucagccugggggccgccgugaaggccggcgccugcaugcucgacgggggcaacaugcuggagacgaucaaggucacgccccagaccguggacggcauccugaaguccauccucaaggugaagcgcagccuggggauguucgucuccgacacccccggcgagcggaaccccuacgagaacauccuguacaagaucugccucagcggggacggcuggccguacaucgcgucccgcaccagcaucguggggcgggccugggagaacaccaccguggaccuggaguccgacggcaagccccagaaggucggcaccgccgggagcaacaagucccugcagagcgccggcuuccccacggggcucaccuacucccagcugaugacccugaaggacagcaugaugcagcuggaccccuccgccaagaccuggaucgacaucgagggccgcccggaggaccccguggagaucgcgcucuaccagcccaugagcgggugcuacauccacuucuuccgggagcccacggaccugaagcaguucaagcaggacgccaaguacucccacggcaucgacgucgccgaccuguucccggcccagcccggccucaccagcgccgugaucgaggcgcugccccgcaacauggugcugaccugccaggggagcgacgacaucaagcgccuccuggacucccagggccggcgcgacaucaagcugaucgacaucgcccucagcaaggccgacucccggaaguucgagaacgccgucugggaccagugcaaggaccugugccacaugcacaccggggugguggucgagaagaagaagcgcggcgggaaggaggagaucacgccccacugcgcccugauggacugcaucauguacgacgcggccgugagcggcggccucaacaucccggugcugcgggccguccugccccgcgacaugguguuccggaccuccagccccaaggugguccucugaggacuagucccuguucccagagcccacuuuuuuuucuuuuuuugaaauaaaauagccugucuuucagaucucaaaggcucuuuucagagccaccaaaaaaaaaaaaaaaaaaaaaaaaaaaaaaaaaaaaaaaaaaaaaaaaaaaaaaaaaaaaaaaaaaaaaaaaaaaaaaaaaaaaaaaaaaaaaaaaaaaaa

SEQ ID NO: 18224 - RNA, 2045 nt, Artificial Sequence
  mRNA product Design a-1 (hSL-A100) comprising derived and/or modified sequence from LASV(LASV237-NIG-2010;Clade II)__AIT17639__SP-HsPLAT_NP(2-569) (opt1)
aggagagucccgcagucggcguccagcggcucugcuuguucgugugugugucguugcaggccuuauucaagcuuaccauggacgccaugaagcgcggccugugcugcgugcuccugcugugcggggccgucuucgugagccccagcgccuccaaggaggugaaguccuuccuguggacccagagccuccgccgggagcugagcggcuacugcuccaacaucaagcugcaggucgugaaggacgcccaggcgcuccugcacgggcuggacuucagcgagguguccaacguccagcgccucaugcggaagcagaagcgcgacgacagcgaccugaagcggcugcgcgaccucaaccaggccgugaacaaccugguggagcugaaguccacccagcagaaguccauccuccgggucggcacccugaccagcgacgaccugcucacccuggccgccgaccuggagaagcucaagagcaaggugauccgcaccgagcggccccuguccagcgggguguacaugggcaaccuguccacgcagcagcucgagcagcgccgggcccugcugaacaugaucgggauggucggcggcgcgcaggggacccagccgggccgcgacgggguggugcgggucugggacgugaagaaccccgaccuccugaacaaccaguucggcaccaugcccagccugacccucgccugccugacgaagcagggccagguggaccugaacgacgccguccucgcccugaccgaccuggggcucaucuacaccgcgaaguaccccaacuccagcgaccuggaccgccugucccagagccacccgauccucaacaugguggacaucaagaaguccagccugaacaucagcggcuacaacuucucccugggggccgccgugaaggccggcgccugcaugcucgacgggggcaacaugcuggagaccaucaaggucacgccccagaccauggacggcauccucaagagcauccugaaggugaagcggucccuggggauguucgugagcgacacccccggcgagcgcaaccccuacgagaacauccuguacaagaucugccucuccggggacggcuggccguacaucgcgagccggaccuccaucgucgggcgcgccugggagaacacgaccguggaccuggagagcgacggcaagccccagaaggugggcuccgccgggagcaacaagucccugcagagcgccggcuuccccaccgggcucaccuacucccagcugaugacgcugaaggacagcaugaugcagcuggaccccuccgccaagaccuggaucgacaucgagggccggccggaggaccccgucgagaucgcgcucuaccagcccaugagcgggugcuacauccacuucuuccgcgagcccaccgaccugaagcaguucaagcaggacgccaaguacucccacggcaucgacguggccgaccuguucccggcccagcccggccucaccagcgccgucaucgaggcgcugccccggaacauggugcugacgugccaggggagcgacgacaucaagcgccuccuggacucccagggccgccgggacaucaagcugaucgacaucgcccucagcaaggccgacucccgccgguucgagaacgccgugugggaccagugcaaggaccugugccacaugcacaccggggucgugguggagaagaagaagcgcggcgggaaggaggagaucacgccccacugcgcccugauggacugcaucauguacgacgcggccgucagcggcggccucaacaucccggugcugcgggccgugcugccccgcgacauggucuuccggaccuccagccccaagguggugcucugaggacuagucccuguucccagagcccacuuuuuuuucuuuuuuugaaauaaaauagccugucuuucagaucucaaaggcucuuuucagagccaccaaaaaaaaaaaaaaaaaaaaaaaaaaaaaaaaaaaaaaaaaaaaaaaaaaaaaaaaaaaaaaaaaaaaaaaaaaaaaaaaaaaaaaaaaaaaaaaaaaaaa

SEQ ID NO: 18225 - RNA, 2045 nt, Artificial Sequence
  mRNA product Design a-1 (hSL-A100) comprising derived and/or modified sequence from LASV(LASV253-NIG-2011;Clade II)__AIT17671__SP-HsPLAT_NP(2-569) (opt1)
aggagagucccgcagucggcguccagcggcucugcuuguucgugugugugucguugcaggccuuauucaagcuuaccauggacgccaugaagcgcggccugugcugcgugcuccugcugugcggggccgucuucgugagccccagcgccuccaaggaggugaaguccuuccuguggacccagagccuccgccgggagcugagcggcuacugcuccagcaucaagcugcaggucgugaaggacgcccaggcgcuccugcacgggcuggacuucuccgaggugagcaacguccagcgccucaugcggaagcagaagcgcgacgacuccgaccugaagcggcugcgcgaccucaaccaggccgugaacaaccugguggagcucaagagcacccagcagaaguccguccugcgggugggcacccugaccagcgacgaccugcucacccuggccgccgaccuggagaagcucaaguccaaggugauccgcaccgagcggccccugagcuccggggucuacaugggcaaccugagcacgcagcagcucgagcagcgccgggcccugcugaacaugaucgggauggugggcggcgcgcaggggacccagccgggccgcgacggggugguccgggugugggacgugaagaaccccgaccuccugaacaaccaguucggcaccaugcccucccugacccucgccugccugacgaagcaggggcaggucgaccugaacgacguggugcucgcccugaccgaccugggccucaucuacaccgccaaguaccccaacagcuccgaccuggaccgccugagccagagccacccgauccucaacauggucgacaccaagaaguccagccugaacaucuccggcuacaacuucagccugggggcggccgugaaggccggcgccugcaugcucgacgggggcaacaugcuggagacgaucaaggugacgccccagaccauggacggcauccugaaguccauccucaaggucaagaagucccuggggauguucgugagcgacacccccggcgagcggaaccccuacgagaacauccuguacaagaucugccucagcggggacggcuggccguacaucgccucccgcaccagcaucguggggcgggcgugggagaacaccaccgucgaccuggaguccgacggcaagccccagaaggugggcaccgccgggagcaacaagucccugcagagcgccggcuuccccacggggcucaccuacucccagcugaugacccugaaggacagcaugaugcagcuggaccccuccgccaagaccuggaucgacaucgagggccgcccggaggaccccgucgagaucgcccucuaccagcccaugagcgggugcuacauccacuucuuccgggagcccacggaccugaagcaguucaagcaggacgcgaaguacucccacggcaucgacgugaccgaccuguucccggcccagcccggccucaccagcgccgugaucgaggcccugccccgcaacaugguccugaccugccaggggagcgacgacaucaagcggcuccuggacucccagggccgccgcgacaucaagcugaucgacaucgcccucagcaaggcggacucccggcgcuucgagaacgccgugugggaccagugcaaggaccugugccacaugcacacggggguggucguggagaagaagaagcggggcgggaaggaggagaucacgccccacugcgcccugauggacugcaucauguacgacgccgccgugagcggcggccucaacaucccgguccugcgcgcggugcugccccgggacaugguguuccgcaccuccagccccaaggucgugcucugaggacuagucccuguucccagagcccacuuuuuuuucuuuuuuugaaauaaaauagccugucuuucagaucucaaaggcucuuuucagagccaccaaaaaaaaaaaaaaaaaaaaaaaaaaaaaaaaaaaaaaaaaaaaaaaaaaaaaaaaaaaaaaaaaaaaaaaaaaaaaaaaaaaaaaaaaaaaaaaaaaaaa

SEQ ID NO: 18226 - RNA, 2045 nt, Artificial Sequence
  mRNA product Design a-1 (hSL-A100) comprising derived and/or modified sequence from LASV(LASV254-NIG-2011;Clade II)__AIT17675__SP-HsPLAT_NP(2-569) (opt1)
aggagagucccgcagucggcguccagcggcucugcuuguucgugugugugucguugcaggccuuauucaagcuuaccauggacgccaugaagcgcggccugugcugcgugcuccugcugugcggggccgucuucgugagccccagcgccuccaaggaggugaaguccuuccuguggacccagagccuccgccgggagcugagcggcuacugcuccagcaucaagcugcaggucgugaaggacgcccaggcgcuccugcacgggcuggacuucuccgaggugagcaacguccagcgccucaugcggaagcagaagcgcgacgacuccgaccugaagcggcugcgcgaccucaaccaggccgugaacaaccugguggagcucaagagcacccagcagaaguccguccugcgggugggcacgcugaccagcgacgaccugcucacccuggccgccgaccuggagaagcucaaguccaaggugauccgcaccgagcggccccugagcuccggggucuacaugggcaaccugagcacgcagcagcucgagcagcgccgggcccugcugaacaugaucgggauggugggcggcgcgcaggggacccagccgggccgcgacggggugguccgggugugggacgugaagaaccccgaccuccugaacaaccaguucggcaccaugcccucccugacccucgccugccugacgaagcaggggcaggucgaccugaacgacgccgugcucgcccugaccgaccugggccucaucuacaccgcgaaguaccccaacagcuccgaccuggaccgccugagccagagccacccgauccucaacaugguggacaccaagaaguccagccugaacaucuccggcuacaacuucagccugggggccgccgucaaggccggcgccugcaugcucgacgggggcaacaugcuggagacgaucaaggugacgccccagaccauggacggcauccugaaguccauccucaaggugaagaagucccuggggauguucgucagcgacacccccggcgagcggaaccccuacgagaacauccuguacaagaucugccucagcggggacggcuggccguacaucgcgucccgcaccagcaucguggggcgggccugggagaacaccaucguggaccuggaguccgacggcaagccccagaaggucggcaccgccgggagcaacaagucccugcagagcgccggcuuccccaccgggcucacguacucccagcugaugacccugaaggacagcaugaugcagcuggaccccuccgccaagaccuggaucgacaucgagggccgcccggaggaccccguggagaucgcgcucuaccagcccaugagcgggugcuacauccacuucuuccgggagcccaccgaccugaagcaguucaagcaggacgccaaguacucccacggcaucgacgucgccgaccuguucccggcccagcccggccucacgagcgccgugaucgaggcgcugccccgcaacauggugcugaccugccaggggagcgacgacaucaagcggcuccuggacucccagggccgccgcgacaucaagcugaucgacaucgcccucagcaaggccgacucccggcgcuucgagaacgccgucugggaccagugcaaggaccugugccacaugcacaccggggugguggucgagaagaagaagcggggcgggaaggaggagaucacgccccacugcgcccugauggacugcaucauguacgacgcggccgugagcggcggccucaacaucccggugcugcgcgccguccugccccgggacaugguguuccgcaccuccagccccaaggugguccucugaggacuagucccuguucccagagcccacuuuuuuuucuuuuuuugaaauaaaauagccugucuuucagaucucaaaggcucuuuucagagccaccaaaaaaaaaaaaaaaaaaaaaaaaaaaaaaaaaaaaaaaaaaaaaaaaaaaaaaaaaaaaaaaaaaaaaaaaaaaaaaaaaaaaaaaaaaaaaaaaaaaaa

SEQ ID NO: 18227 - RNA, 2045 nt, Artificial Sequence
  mRNA product Design a-1 (hSL-A100) comprising derived and/or modified sequence from LASV(Nig08-04;Clade II)__ADU56611__SP-HsPLAT_NP(2-569) (opt1)
aggagagucccgcagucggcguccagcggcucugcuuguucgugugugugucguugcaggccuuauucaagcuuaccauggacgccaugaagcgcggccugugcugcgugcuccugcugugcggggccgucuucgugagccccagcgccuccaaggaggugaaguccuuccuguggacccagagccuccgccgggagcugagcggcuacugcuccaacaucaagcugcaggucgugaaggacgcccaggcgcuccugcacgggcuggacuucagcgagguguccaacguccagcgccucaugcggaagcagaagcgcgacgacggcgaccugaagcggcugcgcgaccucaaccaggccgugaacaaccugguggagcucaagagcacccagcagaaguccguccugcggguggggacccugaccagcgacgaccugcucacccuggccgccgaccuggagaagcucaaguccaaggugauccgcaccgagcggccccugagcuccggcgucuacauggggaaccugagcacgcagcagcucgagcagcgcaaggcccugcuguccaugaucggcauggugggcggggcgcagggcacccagccggggcgggacggcgugguccgcgugugggacgugaagaaccccgaccuccugaacaaccaguucgggaccaugcccagccugacccucgccugccugacgaagcagggccaggucgaccugaacgacgccgugcucgcccugaccgaccugggccucaucuacaccgcgaaguaccccaacuccagcgaccuggaccggcugucccagagccacccgauccucaacaugguggacaccaagaaguccagccugaacaucagcggguacaacuucucccugggcgccgccgucaaggccggggccugcaugcucgacggcggcaacaugcuggagacgaucaaggugacgccccagaccauggacgggauccucaagagcauccugaaggugaagcgcucccugggcauguucgucagcgacacccccggggagcggaaccccuacgagaacauccuguacaagaucugccucuccggcgacggguggccguacaucgcgagccgcaccuccaucgugggccgggccugggagaacaccaccguggaccuggagagcgacggcaagccccagaaggucgggaccgccggcuccaacaagagccugcaguccgccggguuccccacgggccucaccuacagccagcugaugacccugaaggacuccaugaugcagcuggaccccagcgccaagaccuggaucgacaucgaggggcgcccggaggaccccguggagaucgcgcucuaccagcccauguccggcugcuacauccacuucuuccgggagcccacggaccugaagcaguucaagcaggacgccaaguacagccacggcaucgacgucaccgaccuguucuccgcccagccggggcucaccagcgccgugaucgaggcccugccccgcaacauggugcugaccugccagggcagcgacgacaucaagaagcuccuggacucccaggggcggcgcgacaucaagcugaucgacaucagccucaacaaggcggacucccgccgguucgagaacgccgucugggaccagugcaaggaccugugccacaugcacacgggcgugguggucgagaagaagaagcgcgggggcaaggaggagaucacgccccacugcgcccugauggacugcaucauguucgacgccgccgugagcggcgggcucaacauccccauccugcgggcggugcugccgcgcgacauggucuuccggaccuccagccccaagguggugcucugaggacuagucccuguucccagagcccacuuuuuuuucuuuuuuugaaauaaaauagccugucuuucagaucucaaaggcucuuuucagagccaccaaaaaaaaaaaaaaaaaaaaaaaaaaaaaaaaaaaaaaaaaaaaaaaaaaaaaaaaaaaaaaaaaaaaaaaaaaaaaaaaaaaaaaaaaaaaaaaaaaaaa

SEQ ID NO: 18228 - RNA, 2048 nt, Artificial Sequence
  mRNA product Design a-1 (hSL-A100) comprising derived and/or modified sequence from LASV(GA391;Clade III)__AAA46284__SP-HsPLAT_NP(2-570) (opt1)
aggagagucccgcagucggcguccagcggcucugcuuguucgugugugugucguugcaggccuuauucaagcuuaccauggacgccaugaagcgcggccugugcugcgugcuccugcugugcggggccgucuucgugagccccagcgccuccaaggaggugcgcagcugccuguggacccagucccuccggcgcgagcugagcggcuacugcuccaacaucaagcugcaggucgugaaggacgcccaggcgcuccugcacgggcuggacuucagcgagguguccaacguccagcggcucaugcgcaagcagaagcgggacgacggcgaccugaagcgccugcgggaccucaaccaggccgugaacaaccugguggagcugaaguccacccagcagaaguccguccuccgcguggggacgcugagcuccgacgaccugcucauccuggccgccgaccuggagaagcucaagagcaaggugacccggaccgagcgcccccuguccagcggcgucuacauggggaaccuguccagccagcagcucgaccagcggcgcgcccugcugaacaugaucggcaugaccggcguguccgggggcgggaagggcgcgagcaacgggaucgugcgggucugggacgugaagaacgccgagcuccugaacaaccaguucggcacgaugccgucccugacccucgccugccugaccaagcagggccagguggaccugaacgacgccguccaggcgcucaccgaccuggggcugaucuacacggccaaguaccccaacagcagcgaccucgaccgccugucccagagccaccccauccugaacaugaucgacaccaagaaguccagccucaacaucuccggcuacaacuucagccugggggccgccgugaaggccggcgcgugcaugcuggacggcgggaacaugcucgagaccaucaaggugagcccccagaccauggacggcauccucaagagcauccugaaggucaagaagucccuggggauguucgugagcgacacgccgggcgagcggaaccccuacgagaacauccuguacaagaucugccuguccggggacggcuggagcuacaucgccucccgcaccagcaucgugggccgggccugggagaacaccgucguggaccucgagcaggacaacaagccccagaagaucgggaacggcggguccaacaagagccugcaguccgccggcuucgccgcggggcugaucuacagccagcucaugacccugaaggacuucaagugcuucaaccugauccccaacgccaagacguggauggacaucgagggccgcccggaggaccccguggagaucgcccuguaccagcccuccagcggcugcuacguccacuucuuccgggagcccaccgaccucaagcaguucaagcaggacgccaaguacagccacgggcgcgacgugaccgaccuguucgccgcgcagccgggccugaccuccgccgucaucgaggcccucccccggaacauggugaucacgugccaggggagcgaggacauccgcaagcugcuggagucccagggccgccgggacaucaagcucaucgacaucacccugagcaaggccgacucccgcaaguucgagaacgccgugugggaccaguucaaggaccugugccacaugcacaccggggucgugguggagaagaagaagcggggcggcaaggaggagaucacgccccacugcgcgcucauggacugcaucauguucgacgccgccgucagcgggggccuggacgccaaggugcugcgcgugguccucccccgggacaugguguuccgcaccuccaccccgaaggugguccugugaggacuagucccuguucccagagcccacuuuuuuuucuuuuuuugaaauaaaauagccugucuuucagaucucaaaggcucuuuucagagccaccaaaaaaaaaaaaaaaaaaaaaaaaaaaaaaaaaaaaaaaaaaaaaaaaaaaaaaaaaaaaaaaaaaaaaaaaaaaaaaaaaaaaaaaaaaaaaaaaaaaaa

SEQ ID NO: 18229 - RNA, 2045 nt, Artificial Sequence
  mRNA product Design a-1 (hSL-A100) comprising derived and/or modified sequence from LASV(Nig08-A19;Clade III)__ADU56619__SP-HsPLAT_NP(2-569) (opt1)
aggagagucccgcagucggcguccagcggcucugcuuguucgugugugugucguugcaggccuuauucaagcuuaccauggacgccaugaagcgcggccugugcugcgugcuccugcugugcggggccgucuucgugagccccagcgccuccaaggaggugaaguccuuccuguggacccagucccuccgccgggagcugagcggcuacugcuccaacaucaagcugcaggucgugaaggacgcccaggcgcuccugcacgggcuggacuucagcgagguguccaacguccagcgccucaugcggaagcagaagcgcgacgacggcgaccugaagcggcugcgcgaccucaaccaggccgugaacaaccugguggagcucaagagcacccagcagaaguccguccugcggguggggacccugagcuccgacgaccugcucgugcuggccgccgaccuggagaagcucaagagcaaggucgugcgcaccgagcggccccuguccagcggcaucuacauggggaaccuguccagccagcagcucgaccagcgcaaggcccugcugaacaugaucggcaugaccggcgggaacggcgggcggaacaccacguccgacggcaucgugcgcgucugggacgugaagaacgcggagcuccugaacaaccaguucgggaccaugccgagccugacccucgccugccugaccaagcagggccagguggaccugaacgacgccguccaggcccucacggaccugggccugaucuacaccgcgaaguaccccaacuccagcgaccucgaccggcuggcccagagccaccccauccugaacaugaucgacaccaagaaguccagccucaacaucuccggguacaacuucagccugggcgccgccgugaaggccggggcgugcaugcuggacggcggcaacaugcucgagaccaucaaggugagcccccagacgauggacgggauccucaagagcauccugaaggucaagcgcucccugggcauguucaucagcgacaccccgggggagcggaaccccuacgagaacauccuguacaagaucugccuguccggcgacggguggcccuacaucgccagccgcaccuccaucgugggccgggccugggagaacaccguggucgaccucgagagcgacaacaagccccagaagacgggcaacgggggcuccaacaagagccugcaguccgccggguucgccgcgggccugaccuacagccagcucaugacccugaaggacuccaugcugcagcuggacccgaacgccaagaccuggauggacaucgaggggcgccccgaggaccccguggagaucgcccucuaccagcccagcuccggcugcuacauccacuucuuccgggagccgacggaccugaagcaguucaagcaggacgccaaguacagccacggcaucgacgugaccgaccuguucgccgcgcagcccgggcucaccagcgccgucaucgaggcccugccccgcaacauggugaucacgugccagggcuccgaggacauccggaagcugcucgagagccaggggcgccgcgacaucaagcugaucgacaucucccugagcaaggucgacucccggaaguucgagaacgccgugugggaccaguucaaggaccucugccacaugcacaccggcaucguggucgagaagaagaagcgcgggggcaaggaggagaucacgccccacugcgcccugauggacugcaucauguucgacgcggccgugagcggcgggguggacgccaagguccugcgggccgugcucccgcgcgacaugguguuccggaccuccacccccaaggucgugcugugaggacuagucccuguucccagagcccacuuuuuuuucuuuuuuugaaauaaaauagccugucuuucagaucucaaaggcucuuuucagagccaccaaaaaaaaaaaaaaaaaaaaaaaaaaaaaaaaaaaaaaaaaaaaaaaaaaaaaaaaaaaaaaaaaaaaaaaaaaaaaaaaaaaaaaaaaaaaaaaaaaaaa

SEQ ID NO: 18230 - RNA, 2045 nt, Artificial Sequence
  mRNA product Design a-1 (hSL-A100) comprising derived and/or modified sequence from LASV(G1180-SLE-2010;Clade IV)__AIT17169__SP-HsPLAT_NP(2-569) (opt1)
aggagagucccgcagucggcguccagcggcucugcuuguucgugugugugucguugcaggccuuauucaagcuuaccauggacgccaugaagcgcggccugugcugcgugcuccugcugugcggggccgucuucgugagccccagcgccuccaaggagaucaagagcuuccuguggacccagucccuccgccgggagcugagcggcuacugcuccaacaucaagcuccagguggucaaggacgcccaggcgcugcugcacgggcuggacuucagcgagguguccaacgugcagcgccucaugcggaaggagcgccgggacgacaacgaccugaagcgccugcgggaccucaaccaggccgucaacaaccugguggagcucaagagcacccagcagaaguccauccugcgcgugggcacccugaccagcgacgaccugcucauccuggccgccgaccuggagaagcucaaguccaaggucauccggaccgagcgcccccugagcgccgggguguacaugggcaaccuguccagccagcagcucgaccagcggcgcgcgcugcuguccaugaucgggaugagcuccggcaaccagcgggcccaggccggccgcgacggggugguccgggugugggacgugaagaacgucgagcuccugaacaaccaguucggcaccaugccgagccugacgcucgccugccugaccaagcagggccagguggaccugaacgacgcggugcaggcccucaccgaccuggggcugaucuacaccgccaaguaccccaacacguccgaccucgaccgccugacccagagccaccccauccugaacaugaucgacaccaagaaguccagccucaacaucagcggguacaacuucucccugggcgccgccgucaaggcgggcgccugcaugcuggacgggggcaacaugcucgagaccaucaaggugagcccccagacgauggacgggauccugaaguccauccugaaggugaagaaggcccucggcauguucaucagcgacaccccgggcgagcggaaccccuacgagaacauccuguacaagaucugccuguccggggacggcuggcccuacaucgccagccgcaccuccaucaccgggcgggccugggagaacacggucguggaccucgagagcgacggcaagccccagaaggcgggguccaacaacagcaacaagucccugcagagcgugggcuucaccgccggccugaccuacucccagcucaugacccugaaggacgccaugcugcagcuggacccgaacgccaagacguggauggacaucgaggggcgccccgaggaccccgucgagaucgcccucuaccagcccagcuccggcugcuacauccacuucuuccgggagccgaccgaccugaagcaguucaagcaggacgcgaaguacagccacgggaucgacgugaccgaccuguucgccgcccagcccggccucaccuccgccgugaucgacgcccugccccgcaacauggucaucacgugccaggggagcgacgacauccgcaagcugcucgagagccagggccggaaggacaucaagcugaucgacaucgcgcuguccaagaccgacagccgcaaguacgagaacgccgugugggaccaguacaaggaccucugccacaugcacaccggcgucgugguggagaagaagaagcgcgggggcaaggaggagaucacgccccacugcgcccugauggacugcaucauguucgacgccgcggucuccgggggccugaacaccagcgugcuccgggccgugcugccgcgggacauggucuuccgcaccuccacgccccggguggugcugugaggacuagucccuguucccagagcccacuuuuuuuucuuuuuuugaaauaaaauagccugucuuucagaucucaaaggcucuuuucagagccaccaaaaaaaaaaaaaaaaaaaaaaaaaaaaaaaaaaaaaaaaaaaaaaaaaaaaaaaaaaaaaaaaaaaaaaaaaaaaaaaaaaaaaaaaaaaaaaaaaaaaa

SEQ ID NO: 18231 - RNA, 2045 nt, Artificial Sequence
  mRNA product Design a-1 (hSL-A100) comprising derived and/or modified sequence from LASV(G1442-SLE-2011;Clade IV)__AIT17181__SP-HsPLAT_NP(2-569) (opt1)
aggagagucccgcagucggcguccagcggcucugcuuguucgugugugugucguugcaggccuuauucaagcuuaccauggacgccaugaagcgcggccugugcugcgugcuccugcugugcggggccgucuucgugagccccagcgccuccaaggaggugaaguccuuccuguggacccagagccuccgccgggagcugagcggcuacugcuccaacaucaagcugcaggucgugaaggacgcccaggcgcuccugcacgggcuggacuucagcgagguguccaacguccagcgccucaugcggaagcagcgccgggacgacaacgaccugaagcgccugcgggaccucaaccaggccgugaacaaccugguggagcucaagagcacccagcagaaguccguccugcgcgugggcacccugaccagcgacgaccugcucgugcuggccgccgaccuggagaagcucaaguccaaggucauccggaccgagcgcccccugagcgccgggguguacaugggcaaccuguccagccagcagcucgaccagcggcgcgcgcugcugaacaugaucgggauguccggcggcauccaggggacccggacgggccgcgacggggugguccgggugugggacgugaagaacgccgaccuccugaacaaccaguucggcaccaugccgagccugacccucgccugccugaccaagcaggggcaggucgaccugaacgacguggugcaggcccucacggaccugggccugaucuacaccgcgaaguaccccaacgccuccgaccucgaccgccugacccagagccaccccauccugaacaugaucgacaccaagaaguccagccucaacaucagcggcuacaacuucucccugggggccgccgucaaggccggcgcgugcaugcuggacgggggcaacaugcucgagacgaucaaggugagcccccagaccauggacggcauccugaaguccauccugaaggugaagaagacccucgggauguucaucagcgacaccccgggcgagcggaaccccuacgagaacauccuguacaagaucugccuguccggggacggcuggcccuacaucgccagccgcacguccaucaccgggcgggccugggagaacaccgucguggaccucgagagcgacggcaagccccagaaggccggcuccaacaacagcaacaagucccugcagagcgccggguucgcggccggccugaccuacucccagcucaugacgcugaaggacgccaugcugcagcuggacccgaacgccaagaccuggauggacaucgaggggcgccccgaggaccccguggagaucgcccucuaccagcccagcuccggcugcuacauccacuucuuccgggagccgaccgaccugaagcaguucaagcaggacgcgaaguacagccacgggaucgacgucaccgaccuguucgccgcccagcccggccucacguccgccgugaucgaggcccugccccgcaacauggucaucacgugccagggcagcgacgacaucaagaagcugcucgagucccaggggcgcaaggacaucaagcugaucgacaucgcgcugagcaagaccgacagccggaaguacgagaacgccgugugggaccaguacaaggaccucugccacaugcacaccggcguggucguggagaagaagaagcgcgggggcaaggaggagaucaccccgcacugcgcccugauggacugcaucauguucgacgccgcgguguccgggggccugaacacccucguccugcgggccgugcugccccgcgacaugguguuccggaccagcacgccccgcgucgugcucugaggacuagucccuguucccagagcccacuuuuuuuucuuuuuuugaaauaaaauagccugucuuucagaucucaaaggcucuuuucagagccaccaaaaaaaaaaaaaaaaaaaaaaaaaaaaaaaaaaaaaaaaaaaaaaaaaaaaaaaaaaaaaaaaaaaaaaaaaaaaaaaaaaaaaaaaaaaaaaaaaaaaa

SEQ ID NO: 18232 - RNA, 2045 nt, Artificial Sequence
  mRNA product Design a-1 (hSL-A100) comprising derived and/or modified sequence from LASV(G3010-SLE-2013;Clade IV)__AIT17345__SP-HsPLAT_NP(2-569) (opt1)
aggagagucccgcagucggcguccagcggcucugcuuguucgugugugugucguugcaggccuuauucaagcuuaccauggacgccaugaagcgcggccugugcugcgugcuccugcugugcggggccgucuucgugagccccagcgccuccaaggagaucaagagcuuccuguggacccagucccuccgccgggagcugagcggcuacugcuccaacaucaagcuccagguggucaaggacgcccaggcgcugcugcacgggcuggacuucagcgagguguccaacgugcagcgccucaugcggaaggagcgccgggacgacaacgaccugaagcgccugcgggaccucaaccaggccgucaacaaccugguggagcucaagagcacccagcagaaguccauccugcgcgugggcacccugaccagcgacgaccugcucauccuggccgccgaccuggagaagcucaaguccaaggucacccggaccgagcgcccccugagcgccgggguguacaugggcaaccuguccagccagcagcucgaccagcggcgcgcgcugcuguccaugaucgggaugagcuccggcgugcagggcgcccgggccgggcgcgacggcgucgugcgggugugggacgucaagaacgccgagcuccugaacaaccaguucgggacgaugccgagccugacccucgcgugccugaccaagcagggccagguggaccugaacgacgugguccaggcccucaccgaccuggggcugaucuacacggccaaguaccccaacaccuccgaccucgaccgccugacccagagccaccccauccugaacaugaucgacaccaagaaguccagccucaacaucagcggcuacaacuucucccugggcgccgccgugaaggcgggggccugcaugcuggacggcgggaacaugcucgagacgaucaaggugagcccccagaccauggacggcauccugaaguccauccugaaggucaagaaggcccucggcauguucaucagcgagaccccgggggagcggaaccccuacgagaacauccuguacaagaucugccuguccggcgacggguggcccuacaucgccagccgcaccuccaucacgggccgggccugggagaacaccgugguggaccucgagagcgacgggaagccccagaaggcgggcuccaacaacagcaacaagucccugcagagcgccggcuucaccgccgggcugaccuacucccagcucaugacgcugaaggacgccaugcugcagcuggacccgaacgccaagaccuggauggacaucgagggccgccccgaggaccccgucgagguggcgcucuaccagcccagcuccgggugcuacauccacuucuuccgggagccgaccgaccugaagcaguucaagcaggacgccaaguacagccacggcaucgacgugaccgaccuguucgccgcccagcccgggcucacguccgccgucaucgacgcgcugccccgcaacauggugaucacgugccagggcagcgacgacaucaagaagcugcucgagagccagggccgcaaggacaucaagcugaucgacaucgcccuguccaagaccgacagccggaaguacgagaacgccgucugggaccaguacaaggaccucugccacaugcacaccggggugguggucgagaagaagaagcgcggcgggaaggaggagaucaccccgcacugcgcccugauggacugcaucauguucgacgcggccguguccggcgggcugaacaccagcgugcuccgggccguccugccccgcgacaugguguuccggaccuccacgccccgcgugguccugugaggacuagucccuguucccagagcccacuuuuuuuucuuuuuuugaaauaaaauagccugucuuucagaucucaaaggcucuuuucagagccaccaaaaaaaaaaaaaaaaaaaaaaaaaaaaaaaaaaaaaaaaaaaaaaaaaaaaaaaaaaaaaaaaaaaaaaaaaaaaaaaaaaaaaaaaaaaaaaaaaaaaa

SEQ ID NO: 18233 - RNA, 2045 nt, Artificial Sequence
  mRNA product Design a-1 (hSL-A100) comprising derived and/or modified sequence from LASV(G502-SLE-2009;Clade IV)__AIT17127__SP-HsPLAT_NP(2-569) (opt1)
aggagagucccgcagucggcguccagcggcucugcuuguucgugugugugucguugcaggccuuauucaagcuuaccauggacgccaugaagcgcggccugugcugcgugcuccugcugugcggggccgucuucgugagccccagcgccuccaaggagaucaagagcuuccuguggacccagucccuccgccgggagcugagcggcuacugcuccaacaucaagcuccagguggucaaggacgcccaggcgcugcugcacgggcuggacuucagcgagguguccaacgugcagcgccucaugcggaaggagcgccgggacgacaacgaccugaagcgccugcgggaccucaaccaggccgucaacaaccugguggagcucaagagcacccagcagaaguccauccugcgcgugggcacccugaccagcgacgaccugcucauccuggccgccgaccuggagaagcucaaguccaaggucauccggaccgagcgcccccugagcgccgggguguacaugggcaaccuguccagccagcagcucgaccagcggcgcgcgcugcuguccaugaucgggaugagcggcggcaaccagggggugcgggccggcaaggacggggucgugcgcgugugggacgucaagaacgccgagcuccugaacaaccaguucggcaccaugccgucccugacgcucgccugccugaccaagcagggccagguggaccugaacgacgcggugcaggcccucaccgaccuggggcugaucuacaccgccaaguaccccaacacgagcgaccucgaccggcugacccagucccaccccauccugaacaugaucgacaccaagaaguccagccucaacaucuccggcuacaacuucagccugggggccgccgucaaggcgggcgccugcaugcuggacgggggcaacaugcucgagaccaucaaggugagcccccagacgauggacggcauccucaagagcauccugaaggugaagaaggcccuggggauguucaucuccgacaccccgggcgagcgcaaccccuacgagaacauccuguacaagaucugccugagcggggacggcuggcccuacaucgccucccggaccagcaucaccgggcgcgccugggagaacacggucguggaccucgaguccgacggcaagccccagaaggcgggcagcaacaacuccaacaagagccugcaguccgccggguucaccgccggccugaccuacagccagcucaugacccugaaggacgccaugcugcagcuggacccgaacacgaagaccuggauggacaucgaggggcggcccgaggaccccguggagaucgcccucuaccagcccuccagcggcugcuacauccacuucuuccgcgagccgaccgaccugaagcaguucaagcaggacgcgaaguacucccacgggaucgacgucaccgaccuguucgccgcccagcccggccucacgagcgccgugaucgacgcccugccccggaacauggugaucacgugccagggcuccgacgacauccgcaagcugcucgagagccaggggcgcaaggacaucaagcugaucgacaucgcgcugaacaagaccgacagccggaaguacgagaacgccgucugggaccaguacaaggaccucugccacaugcacaccggcguggucguggagaagaagaagcgcgggggcaaggaggagaucaccccgcacugcgcccugauggacugcaucauguucgacgccgcgguguccgggggccugaacaccagcguccuccgggccgugcugccccgcgacaugguguuccggaccuccacgccccgcgucgugcugugaggacuagucccuguucccagagcccacuuuuuuuucuuuuuuugaaauaaaauagccugucuuucagaucucaaaggcucuuuucagagccaccaaaaaaaaaaaaaaaaaaaaaaaaaaaaaaaaaaaaaaaaaaaaaaaaaaaaaaaaaaaaaaaaaaaaaaaaaaaaaaaaaaaaaaaaaaaaaaaaaaaaa

SEQ ID NO: 18234 - RNA, 2045 nt, Artificial Sequence
  mRNA product Design a-1 (hSL-A100) comprising derived and/or modified sequence from LASV(G733-SLE-2010;Clade IV)__AIT17155__SP-HsPLAT_NP(2-569) (opt1)
aggagagucccgcagucggcguccagcggcucugcuuguucgugugugugucguugcaggccuuauucaagcuuaccauggacgccaugaagcgcggccugugcugcgugcuccugcugugcggggccgucuucgugagccccagcgccuccaaggagaucaagagcuuccuguggacccagucccuccgccgggagcugagcggcuacugcuccaacaucaagcuccagguggucaaggacgcccaggcgcugcugcacgggcuggacuucagcgagguguccaacgugcagcgccucaugcggaaggagcgccgggacgacaacgaccugaagcgccugcgggaccucaaccaggccgucaacaaccugguggagcucaagagcacccagcagaaguccgugcugcgcgucggcacccugaccagcgacgagcugcucgugcuggccgccgaccuggagaagcucaaguccaaggugauccggaccgagcgcccccugagcgccggggucuacaugggcaaccuguccagccagcagcucgaccagcggcgcgcgcugcuguccaugaucgggaugagcggcggcaaccagggggcccggaccggccgcgacgggguggugcgggucugggacgugaagaacgccgagcuccugaacaaccaguucggcaccaugccgucccugacccucgccugccugaccaagcagggccagguggaccugaacgacgcgguccaggcccucaccgaccuggggcugaucuacacggccaaguaccccaacaccagcgaccucgaccgccugacccagucccaccccauccugaacaugaucgacaccaagaaguccagccucaacaucuccggcuacaacuucagccugggggccgccgugaaggcgggcgccugcaugcuggacgggggcaacaugcucgagacgaucaaggugagcccccagaccauggacggcauccucaagagcauccugaaggucaagaaggcccuggggauguucaucuccgacaccccgggcgagcggaaccccuacgagaacauccuguacaagaucugccugagcggggacggcuggcccuacaucgccucccgcaccagcaucacggggcgggccugggagaacaccgugguggaccucgaguccgacggcaagccccagaaggcgggcagcaacaacuccaacaagagccugcaguccgccggguucaccgccggccugaccuacagccagcucaugacgcugaaggacgccaugcugcagcuggacccgaacgccaagaccuggauggacaucgaggggcgccccgaggaccccgucgagaucgcgcucuaccagcccuccagcggcugcuacauccacuucuuccgggagccgaccgaccugaagcaguucaagcaggacgccaaguacucccacgggaucgacgugaccgaccuguucgccgcccagcccggccucacgagcgccgugaucgacgcgcugccccgcaacauggucaucacgugccagggcuccgacgacauccgcaagcugcucgagagccaggggcggaaggacaucaagcugaucgacaucgcccugagcaagaucgacucccgcaaguacgagaacgccgugugggaccaguacaaggaccucugccacaugcacaccggcgucgugguggagaagaagaagcgcgggggcaaggaggagaucacgccccacugcgcccugauggacugcaucauguucgacgcggccgucagcgggggccugaacucccucgugcugcgggccgugcugccgcgggacauggucuuccgcaccagcacgccccggguggugcucugaggacuagucccuguucccagagcccacuuuuuuuucuuuuuuugaaauaaaauagccugucuuucagaucucaaaggcucuuuucagagccaccaaaaaaaaaaaaaaaaaaaaaaaaaaaaaaaaaaaaaaaaaaaaaaaaaaaaaaaaaaaaaaaaaaaaaaaaaaaaaaaaaaaaaaaaaaaaaaaaaaaaa

SEQ ID NO: 18235 - RNA, 2045 nt, Artificial Sequence
  mRNA product Design a-1 (hSL-A100) comprising derived and/or modified sequence from MOPV/LASV reassortant(IGS-1;Clade IV)__AFY05578__SP-HsPLAT_NP(2-569) (opt1)
aggagagucccgcagucggcguccagcggcucugcuuguucgugugugugucguugcaggccuuauucaagcuuaccauggacgccaugaagcgcggccugugcugcgugcuccugcugugcggggccgucuucgugagccccagcgccuccaaggagaucaagagcuuccuguggacccagucccuccgccgggagcugagcggcuacugcuccaacaucaagcuccagguggucaaggacgcccaggcgcugcugcacgggcuggacuucagcgagguguccaacgugcagcgccucaugcggaaggagcgccgggacgacaacgaccugaagcgccugcgggaccucaaccaggccgucaacaaccugguggagcucaagagcacccagcagaaguccauccugcgcgugggcacccugaccagcgacgaccugcucauccuggccgccgaccuggagaagcuccgguccaaggucauccgcaccgagcggccccugagcgccgggguguacaugggcaaccuguccagccagcagcucgaccagcgccgggcgcugcugaacaugaucgggauguccggcggcaaccagggggcccgcgccggccgggacggggugguccgcgugugggacgugaagaacgccgagcuccugagcaaccaguucggcaccaugccgucccugacgcucgcgugccugaccaagcaggggcaggucgaccugaacgacgccgugcaggcccucaccgaccugggccugaucuacaccgccaaguaccccaacacgagcgaccucgaccggcugacccagucccaccccauccugaacaugaucgacaccaagaaguccagccucaacaucuccggcuacaacuucagccugggggccgcggugaaggccggcgccugcaugcuggacgggggcaacaugcucgagaccaucaaggucagcccccagacgauggacggcauccucaagagcauccugaaggugaagaaggcccuggggauguucaucuccgacaccccgggcgagcgcaaccccuacgagaacauccuguacaagaucugccugagcggggacggcuggcccuacaucgccucccggaccagcaucaccgggcgcgcgugggagaacacgguggucgaccucgaguccgacggcaagccccagaaggccgacagcaacaacuccagcaagucccugcagagcgccggcuucaccgccgggcugaccuacucccagcucaugacccugaaggacgccaugcugcagcuggacccgaacgcgaagacguggauggacaucgagggccggcccgaggaccccguggagaucgcccucuaccagcccagcuccgggugcuacauccacuucuuccgcgagccgaccgaccugaagcaguucaagcaggacgccaaguacagccacggcaucgacgugaccgaccuguucgccacccagcccgggcucacguccgccgucaucgacgcgcugccccgcaacauggugaucacgugccagggcagcgacgacauccggaagcugcucgagagccagggccgcaaggacaucaagcugaucgacaucgaccuguccaagaccgacagccggaaguacgagaacgccgugugggaccaguacaaggaccucugccacaugcacaccggggucguggucgagaagaagaagcgcggcgggaaggaggagaucaccccgcacugcgcccugauggacugcaucauguucgacgccgcgguguccggcgggcugaacaccagcgugcuccgggccguccugccccgcgacaugguguuccggaccuccacgccccgcgugguccugugaggacuagucccuguucccagagcccacuuuuuuuucuuuuuuugaaauaaaauagccugucuuucagaucucaaaggcucuuuucagagccaccaaaaaaaaaaaaaaaaaaaaaaaaaaaaaaaaaaaaaaaaaaaaaaaaaaaaaaaaaaaaaaaaaaaaaaaaaaaaaaaaaaaaaaaaaaaaaaaaaaaaa

SEQ ID NO: 18236 - RNA, 2045 nt, Artificial Sequence
  mRNA product Design a-1 (hSL-A100) comprising derived and/or modified sequence from LASV(LM765-SLE-2012;Clade IV)__AIT17815__SP-HsPLAT_NP(2-569) (opt1)
aggagagucccgcagucggcguccagcggcucugcuuguucgugugugugucguugcaggccuuauucaagcuuaccauggacgccaugaagcgcggccugugcugcgugcuccugcugugcggggccgucuucgugagccccagcgccuccaaggagaucaagagcuuccuguggacccagucccuccgccgggagcugagcggcuacugcuccaacaucaagcuccagguggucaaggacgcccaggcgcugcugcacgggcuggacuucagcgagguguccaacgugcagcgccucaugcggaaggagcgccgggacgacaacgaccugaagcgccugcgggaccucaaccaggccgucaacaaccugguggagcucaagagcacccagcagaaguccauccugcgcgugggcacccugaccagcgacgaccugcucauccuggccgccgaccuggagaagcucaaguccaaggucacccggaccgagcgcccccugagcgccgggguguacaugggcaaccuguccagccagcagcucgaccagcggcgcgcgcugcuggacaugaucgggauguccggcagcaaccagggcgcccgggccgggcgcgacggcgugguccgggugugggacgugaagaacgccgagcuccugaacaaccaguucgggacgaugccgucccugacccucgcgugccugaccaagcagggccaggucgaccugaacgacgccgugcaggcccucaccgaccuggggcugaucuacacggccaaguaccccaacaccagcgaccucgaccgccugacccagucccaccccauccugaacaugaucgacaccaagaaguccagccucaacaucuccggcuacaacuucagccugggcgccgcggugaaggccggggccugcaugcuggacggcgggaacaugcucgagacgaucaaggucagcccccagaccauggacggcauccucaagagcauccugaaggugaagaaggcccugggcauguucaucuccgacgccccgggggagcggaaccccuacgagaacauccuguacaagaucugccugagcggcgacggguggcccuacaucgcgucccgcaccagcaucaccggccgggccugggagaacacgguggucgaccucgaguccgacgggaagccccagaaggccggcagcaacggcuccaacaagagccugcaguccgccggguucaccgccggccugaccuacagccagcucaugacccugaaggacgcgaugcugcagcuggacccgaacgccaagacguggauggacaucgaggggcgccccgaggaccccguggagaucgcccucuaccagcccuccagcggcugcuacauccacuucuuccgggagccgaccgaccugaagcaguucaagcaggacgccaaguacucccacgggaucgacgugaccgaccuguucgccgcgcagcccggccucaccagcgccgucaucgacgcccugccccgcaacauggugaucacgugccagggcuccgacgacauccgcaagcuguucgagagccaggggcggaaggacaucaagcucaucgacaucgcccugagcaagaccgacucccgcaaguacgagaacgcggugugggaccaguacaaggaccugugccacaugcacaccggcaucgucguggagaagaagaagcgcgggggcaaggaggagaucacgccccacugcgcccucauggacugcaucauguucgacgccgccgucagcgggggccugaacaccuccgugcugcgggccgugcucccgcgggacauggucuuccgcaccagcacgccccggguggugcugugaggacuagucccuguucccagagcccacuuuuuuuucuuuuuuugaaauaaaauagccugucuuucagaucucaaaggcucuuuucagagccaccaaaaaaaaaaaaaaaaaaaaaaaaaaaaaaaaaaaaaaaaaaaaaaaaaaaaaaaaaaaaaaaaaaaaaaaaaaaaaaaaaaaaaaaaaaaaaaaaaaaaa

SEQ ID NO: 18237 - RNA, 2045 nt, Artificial Sequence
  mRNA product Design a-1 (hSL-A100) comprising derived and/or modified sequence from LASV(LM776-SLE-2012;Clade IV)__AIT17825__SP-HsPLAT_NP(2-569) (opt1)
aggagagucccgcagucggcguccagcggcucugcuuguucgugugugugucguugcaggccuuauucaagcuuaccauggacgccaugaagcgcggccugugcugcgugcuccugcugugcggggccgucuucgugagccccagcgccuccaaggagaucaagagcuuccuguggacccagucccuccgccgggagcugagcuccuacugcagcaacaucaagcuccagguggucaaggacgcccaggcgcugcugcacggccuggacuucuccgaggugagcaacgugcagcgccucaugcggaaggagcgccgggacgacaacgaccugaagcgccugcgggaccucaaccaggccgucaacaaccugguggagcugaaguccacccagcagaaguccauccuccgcguggggacccugaccuccgacgaccugcucauccuggccgccgaccuggagaagcucaagagcaaggucacccggaccgagcgcccccuguccgccggcguguacauggggaaccugagcucccagcagcucgaccagcggcgcgcgcugcugagcaugaucggcauguccgggagcaaccagggcgcccgggccggccgcgacggggugguccgggugugggacgugaagaacgccgagcuccugaacaaccaguucggcacgaugccgucccugacccucgcgugccugaccaagcaggggcaggucgaccugaacgacgccgugcaggcccucaccgaccugggccugaucuacacggccaaguaccccaacaccagcgaccucgaccgccugacccagagccaccccauccugaacaugaucgacaccaagaaguccagccucaacaucuccggguacaacuucagccugggcgccgcggugaaggccggcgccugcaugcuggacgggggcaacaugcucgagacgaucaaggucagcccccagaccauggacgggauccucaagagcauccugaaggugaagaaggcccugggcauguucaucuccgacaccccgggcgagcggaaccccuacgagaacauccuguacaagaucugccugagcggggacggcuggcccuacaucgccucccgcaccagcaucacggggcgggcgugggagaacaccguggucgaccucgaguccgacggcaagccccagaaggccgggagcaacaacuccaacaagagccugcaguccgccggcuucaccgccggccugaccuacagccagcucaugacgcugaaggacgccaugcugcagcuggacccgaacgcgaagaccuggauggacaucgaggggcgccccgaggaccccguggagguggcccucuaccagcccuccagcggcugcuacauccacuucuuccgggagccgaccgaccugaagcaguucaagcaggacgccaaguacucccacgggaucgacgucaccgaccuguucgccgcccagcccggccucacgagcgcggugaucgacgcccugccccgcaacauggugaucacgugccaggggagcgacgacauccgcaagcugcucgagucccagggccggaaggacaucaagcugaucgacaucgcccugagcaagaccgacucccgcaaguacgagaacgccgucugggaccaguacaaggaccucugccacaugcacaccggcguggucguggagaagaagaagcgcgggggcaaggaggagaucaccccgcacugcgcgcugauggacugcaucauguucgacgccgccgugagcgggggccugaacaccuccguccuccgggccgugcugccccgggacaugguguuccgcaccagcacgccccgggucgugcugugaggacuagucccuguucccagagcccacuuuuuuuucuuuuuuugaaauaaaauagccugucuuucagaucucaaaggcucuuuucagagccaccaaaaaaaaaaaaaaaaaaaaaaaaaaaaaaaaaaaaaaaaaaaaaaaaaaaaaaaaaaaaaaaaaaaaaaaaaaaaaaaaaaaaaaaaaaaaaaaaaaaaa

SEQ ID NO: 18238 - RNA, 2045 nt, Artificial Sequence
  mRNA product Design a-1 (hSL-A100) comprising derived and/or modified sequence from LASV(Mad39;Clade IV)__ANH09723__SP-HsPLAT_NP(2-569) (opt1)
aggagagucccgcagucggcguccagcggcucugcuuguucgugugugugucguugcaggccuuauucaagcuuaccauggacgccaugaagcgcggccugugcugcgugcuccugcugugcggggccgucuucgugagccccagcgccuccaaggagaucaagagcuuccuguggacccagucccuccgccgggagcugagcggcuacugcuccaacaucaagcuccagguggucaaggacgcccaggcgcugcugcacgggcuggacuucagcgagguguccaacgugcagcgccucaugcggaagcagcgccgggacgacaacgaccugaagcgccugcgggaccucaaccaggccgucaacaaccugguggagcugaaguccacccagcagaaguccgugcuccgcgucggcacgcugaccagcgacgaccugcucacccuggccgccgaccuggagaagcucaaguccaaggugacccggacggagcgcccccugaccgccgggguguacaugggcaaccugagcucccagcagcucgaccagcggcgcgcgcugcugaacaugaucgggaugagcggcggcaaccagggggcccggaccggccgcgacggggucgugcgggugugggacgucaagaacgccgagcuccugaacaaccaguucggcaccaugccgucccugacgcucgccugccugaccaagcagggccagguggaccugaacgacgugguccaggcgcucaccgaccuggggcugaucuacaccgccaaguaccccaacacgagcgaccucgaccgccugacccagucccaccccauccugaacaugaucgacaccaacaagagcucccucaacaucagcggcuacaacuucagccugggggccgccgugaaggccggcgcgugcaugcuggacgggggcaacaugcucgagaccaucaaggugagcccccagacgauggacggcauccucaagagcauccugaaggucaagaagucccuggggauguucaucagcgacaccccgggcgagcggaaccccuacgagaacauccuguacaagaucugccuguccggggacggcuggcccuacaucgccagccgcaccuccaucaccgggcgggccugggagaacacggugguggaccucgagagcggcggcaagccccagaaggccggguccaacaacagcaacaagucccugcagagcgccggcuucgcggccgggcugaccuacucccagcucaugacccugaaggacgccaugcugcagcuggacccgaacgccaagaccuggauggacaucgagggccgccccgaggaccccgucgagaucgcccucuaccagcccaucagcgggugcuacauccacuucuuccgggagccgacggaccugaagcaguucaagcaggacgcgaaguacucccacggcaucgacgugaccgaccuguucgccgcccagcccggccucaccagcgccgugaucgaggcccugccccgcaacauggucaucacgugccagggguccgacgacauccgcaagcuguucgagagccagggccggaaggacaucaagcucaucgacaucgcgcuguccaagaccgacagccgcaaguacgagaacgccgugugggaccaguacaaggaccugugccacaugcacaccggggucgugguggagaagaagaagaagggcgggaaggaggagaucacgccccacugcgcccucauggacugcaucauguucgacgccgcggucagcggcggccugaacacccuggugcuccgggccgugcugccgcgcgacauggucuuccggaccuccacccccaagguggugcugugaggacuagucccuguucccagagcccacuuuuuuuucuuuuuuugaaauaaaauagccugucuuucagaucucaaaggcucuuuucagagccaccaaaaaaaaaaaaaaaaaaaaaaaaaaaaaaaaaaaaaaaaaaaaaaaaaaaaaaaaaaaaaaaaaaaaaaaaaaaaaaaaaaaaaaaaaaaaaaaaaaaaa

SEQ ID NO: 18239 - RNA, 2045 nt, Artificial Sequence
  mRNA product Design a-1 (hSL-A100) comprising derived and/or modified sequence from LASV(Z0947-SLE-2011;Clade IV)__AIT17841__SP-HsPLAT_NP(2-569) (opt1)
aggagagucccgcagucggcguccagcggcucugcuuguucgugugugugucguugcaggccuuauucaagcuuaccauggacgccaugaagcgcggccugugcugcgugcuccugcugugcggggccgucuucgugagccccagcgccuccaaggagaucaagagcuuccuguggacccagucccuccgccgggagcugagcggcuacugcuccaacaucaagcuccagguggucaaggacgcccaggcgcugcugcacgggcuggacuucagcgagguguccaacgugcagcgccucaugcggaaggagcgccgggacgacaacgaccugaagcgccugcgggaccucaaccaggccgucaacaaccugguggagcucaagagcacccagcagaaguccauccugcgcgugggcacccugaccagcgacgaccugcucauccuggccgccgaccuggagaagcucaaguccaaggucacccggaccgagcgcccccugagcgccgggguguacaugggcaaccuguccagccagcagcucgaccagcggcgcgcgcugcugaacaugaucgggauguccggcagcaaccagggcgcccggacggggcgcgacggcgugguccgggugugggacgugaagaacgccgagcuccugaacaaccaguucgggaccaugccgucccugacccucgccugccugaccaagcagggccaggucgaccugaacgacgcggugcaggcccucacggaccuggggcugaucuacaccgccaaguaccccaacaccagcgaccucgaccgccugacccagucccaccccauccugaacaugaucgacacgaagaaguccagccucaacaucuccggcuacaacuucagccugggcgccgccgugaaggcgggggccugcaugcuggacggcgggaacaugcucgagaccaucaaggucagcccccagaccauggacggcauccucaagagcauccugaaggugaagaaggcccugggcauguucaucuccgacgccccgggggagcggaaccccuacgagaacauccuguacaagaucugccugagcggcgacggguggcccuacaucgccucccgcaccagcaucacgggccgggcgugggagaacaccguggucgaccucgaguccgacgggaagccccagaaggccggcagcaacggcuccaacaagagccugcaguccgccggguucaccgccggccugaccuacagccagcucaugacgcugaaggacgccaugcugcagcuggacccgaacgcgaagaccuggauggacaucgaggggcgccccgaggaccccguggagaucgcccucuaccagcccuccagcggcugcuacauccacuucuuccgggagccgaccgaccugaagcaguucaagcaggacgccaaguacucccacgggaucgacgugaccgaccuguucgccgcccagcccggccucacgagcgcggucaucgacgcccugccccgcaacauggugaucacgugccagggcuccgacgacauccgcaagcuguucgagagccaggggcggaaggacaucaagcucaucgacaucgcccugagcaagaccgacucccgcaaguacgagaacgccgugugggaccaguacaaggaccugugccacaugcacaccggcaucgucguggagaagaagaagcgcgggggcaaggaggagaucaccccgcacugcgcgcucauggacugcaucauguucgacgccgccgucagcgggggccugaacaccuccgugcugcgggccgugcucccccgggacauggucuuccgcaccagcacgccccggguggugcugugaggacuagucccuguucccagagcccacuuuuuuuucuuuuuuugaaauaaaauagccugucuuucagaucucaaaggcucuuuucagagccaccaaaaaaaaaaaaaaaaaaaaaaaaaaaaaaaaaaaaaaaaaaaaaaaaaaaaaaaaaaaaaaaaaaaaaaaaaaaaaaaaaaaaaaaaaaaaaaaaaaaaa

SEQ ID NO: 18240 - RNA, 2045 nt, Artificial Sequence
  mRNA product Design a-1 (hSL-A100) comprising derived and/or modified sequence from LASV(Josiah;Clade IV)__NP_694869__SP-HsPLAT_NP(2-569) (opt4)
aggagagucccgcagucggcguccagcggcucugcuuguucgugugugugucguugcaggccuuauucaagcuuaccauggacgccaugaagagaggccugugcugcgugcugcugcugugcggcgccguguucgugagccccagcgccagcaaggagaucaagagcuuccuguggacccagagccugagaagagagcugagcggcuacugcagcaacaucaagcugcagguggugaaggacgcccaggcccugcugcacggccuggacuucagcgaggugagcaacgugcagagacugaugagaaaggagagaagagacgacaacgaccugaagagacugagagaccugaaccaggccgugaacaaccugguggagcugaagagcacccagcagaagagcauccugagagugggcacccugaccagcgacgaccugcugauccuggccgccgaccuggagaagcugaagagcaaggugaucagaaccgagagaccccugagcgccggcguguacaugggcaaccugagcagccagcagcuggaccagagaagagcccugcugaacaugaucggcaugagcggcggcaaccagggcgccagagccggcagagacggcguggugagagugugggacgugaagaacgccgagcugcugaacaaccaguucggcaccaugcccagccugacccuggccugccugaccaagcagggccagguggaccugaacgacgccgugcaggcccugaccgaccugggccugaucuacaccgccaaguaccccaacaccagcgaccuggacagacugacccagagccaccccauccugaacaugaucgacaccaagaagagcagccugaacaucagcggcuacaacuucagccugggcgccgccgugaaggccggcgccugcaugcuggacggcggcaacaugcuggagaccaucaaggugagcccccagaccauggacggcauccugaagagcauccugaaggugaagaaggcccugggcauguucaucagcgacacccccggcgagagaaaccccuacgagaacauccuguacaagaucugccugagcggcgacggcuggcccuacaucgccagcagaaccagcaucaccggcagagccugggagaacaccgugguggaccuggagagcgacggcaagccccagaaggccgacagcaacaacagcagcaagagccugcagagcgccggcuucaccgccggccugaccuacagccagcugaugacccugaaggacgccaugcugcagcuggaccccaacgccaagaccuggauggacaucgagggcagacccgaggaccccguggagaucgcccuguaccagcccagcagcggcugcuacauccacuucuucagagagcccaccgaccugaagcaguucaagcaggacgccaaguacagccacggcaucgacgugaccgaccuguucgccacccagcccggccugaccagcgccgugaucgacgcccugcccagaaacauggugaucaccugccagggcagcgacgacaucagaaagcugcuggagagccagggcagaaaggacaucaagcugaucgacaucgcccugagcaagaccgacagcagaaaguacgagaacgccgugugggaccaguacaaggaccugugccacaugcacaccggcguggugguggagaagaagaagagaggcggcaaggaggagaucaccccccacugcgcccugauggacugcaucauguucgacgccgccgugagcggcggccugaacaccagcgugcugagagccgugcugcccagagacaugguguucagaaccagcacccccagaguggugcugugaggacuagucccuguucccagagcccacuuuuuuuucuuuuuuugaaauaaaauagccugucuuucagaucucaaaggcucuuuucagagccaccaaaaaaaaaaaaaaaaaaaaaaaaaaaaaaaaaaaaaaaaaaaaaaaaaaaaaaaaaaaaaaaaaaaaaaaaaaaaaaaaaaaaaaaaaaaaaaaaaaaaa

SEQ ID NO: 18241 - RNA, 2045 nt, Artificial Sequence
  mRNA product Design a-1 (hSL-A100) comprising derived and/or modified sequence from LASV(LP;Clade I)__AAF86702__SP-HsPLAT_NP(2-569) (opt4)
aggagagucccgcagucggcguccagcggcucugcuuguucgugugugugucguugcaggccuuauucaagcuuaccauggacgccaugaagagaggccugugcugcgugcugcugcugugcggcgccguguucgugagccccagcaacagcaaggagaucaagagcuuccuguggacccagagccugagaagagagcugagcggcuacugcagcaacaucaagcugcagguggugaaggacgcccaggcccugcugcacggccuggacuucagcgaggugagcaacgugcagagacugaugagaaagcagaagagagacgacgccgaccugaagagacugagagaccugaaccaggccgugaacaaccugguggagcugaagagcacccagcagaagaacgugcugagagugggcacccugagcagcgacgaccugaucacccuggccgccgaccuggagaagcugaagagcaaggugaucagaaccgagagaccccugagcagcggcguguacaugggcaaccugagcagccagcagcuggaccagagaagagcccugcugagcaugaucggcaugagcggcggcccccagggcaacagaaccggcggcgacggcguggugagagugugggacgugaagaacgccgagcugcugaacaaccaguucggcaccaugcccagccugacccuggccugccugaccaagcagggccagguggaccugaacgacgccgugcaggcccugaccgaccugggccugaucuacaccgccaaguaccccaacagcagcgaccuggacaugcugacccagagccaccccauccugggcaugguggacaccaagaagagcagccugaacaucagcggcuacaacuucagccugggcgccgccgugaaggccggcgccugcaugcuggacggcggcaacaugcuggagaccaucaaggugagcccccagaccauggacggcauccugaagagcauccugaaggugaagagaagccugggcauguucaucagcgacacccccggcgagagaaaccccuacgagaacauccuguacaagaucugccugagcggcgagggcuggcccuacaucgccagcagaaccagcaucaccggcagagccugggagaacacccugguggaccuggagagcgacaacaagccccccaagcugaacagcgccggcagcaacaagagccugcaggccgccggccugaacgccggccugaccuacagccagcugaugacccugaaggacugcaugcugcagcuggaccccagcagcaagaccuggaucgacaucgagggcagacccgaggaccccguggagaucgcccuguuccagcccagcagcggcugcuacauccacuucuucagagagcccaccgaccugaagcaguucaagcaggacgccaaguacagccacggcaucgacgugaccgaccuguucagcacccagcccggccugaccagcgccgugaucgaggcccugcccagaaacauggugcugaccugccagggcagcgacgacaucaagaagcugcuggagagccagggcagaagagacaucaagcugaucgacaucagccugagcaaggccgacagcagaaaguucgagaacgccgugugggaccaguacaaggaccugugccacaugcacaccggcguggugguggagaagaagaagagaggcggcaaggaggagaucaccccccacugcgcccugcuggacugcaucauguucgacgccgccaccaccggcagccugaacaucaccacccugagagccgugcugcccagagacaugguguucagaaccagcacccccaagguggugcugugaggacuagucccuguucccagagcccacuuuuuuuucuuuuuuugaaauaaaauagccugucuuucagaucucaaaggcucuuuucagagccaccaaaaaaaaaaaaaaaaaaaaaaaaaaaaaaaaaaaaaaaaaaaaaaaaaaaaaaaaaaaaaaaaaaaaaaaaaaaaaaaaaaaaaaaaaaaaaaaaaaaaa

SEQ ID NO: 18242 - RNA, 2045 nt, Artificial Sequence
  mRNA product Design a-1 (hSL-A100) comprising derived and/or modified sequence from LASV(803213;Clade II)__AAF86704__SP-HsPLAT_NP(2-569) (opt4)
aggagagucccgcagucggcguccagcggcucugcuuguucgugugugugucguugcaggccuuauucaagcuuaccauggacgccaugaagagaggccugugcugcgugcugcugcugugcggcgccguguucgugagccccagcgccagcaaggaggugaagagcuuccuguggacccagagccugagaagagagcugagcggcuacugcagcaacaucaagcugcagguggugaaggacgcccaggcccugcugcacggccuggacuucagcgaggugaacaacgugcagagacugaugagaaagcagaagagagacgacggcgaccugaagagacugagagaccugaaccaggccgugaacaaccugguggagcugaagagcacccagcagaagagcauccugagagugggcacccugaccagcgacgaccugcugacccuggccgccgaccuggagaagcugaagagcaaggugaucagaaccgagagaccccugagcagcggcguguacaugggcaaccugagcacccagcagcuggagcagagaagagcccugcugaacaugaucggcauggugggcggcgcccagggcacccagcccggcagagacggcguggugagagugugggacgugaagaaccccgaccugcugaacaaccaguucggcaccaugcccagccugacccuggccugccugaccaagcagggccagguggaccugaacgacgccgugcuggcccugaccgaccugggccugaucuacaccgccaaguaccccaacagcagcgaccuggacagacugagccagagccaccccauccugaacaugguggacaccaagaagagcagccugaacaucagcggcuacaacuucagccugggcgccgccgugaaggccggcgccugcaugcuggacggcggcaacaugcuggagaccaucaaggugaccccccagaccauggacggcauccugaagagcauccugaaggugaagagaagccugggcauguucgugagcgacacccccggcgagagaaaccccuacgagaacauccuguacaagaucugccugagcggcgacggcuggcccuacaucgccagcagaaccagcaucgugggcagagccugggagaacaccaccguggaccuggagagcgacggcaagccccagaaggugggcaccgccggcagcaacaagagccugcagagcgccggcuuccccaccggccugaccuacagccagcugaugacccugaaggacagcaugaugcagcuggaccccagcgccaagaccuggaucgacaucgagggcagacccgaggaccccguggagaucgcccuguaccagcccaugagcggcugcuacauccacuucuucagagagcccaccgaccugaagcaguucaagcaggacgccaaguacagccacggcaucgacguggccgaccuguuccccgcccagcccggccugaccagcgccgugaucgaggcccugcccagaaacauggugcugaccugccagggcagcgacgacaucaagaagcugcuggacagccagggcagaagagacaucaagcugaucgacaucagccugagcaagguggacagcagaaaguucgagaacgccgugugggaccagugcaaggaccugugccacaugcacaccggcguggugguggagaagaagaagagaggcggcaaggaggagaucaccccccacugcgcccugauggacugcaucauguucgacgccgccgugagcggcggccugaacauccccgugcugagagccgugcugcccagagacaugguguucagaaccagcagccccaagguggugcugugaggacuagucccuguucccagagcccacuuuuuuuucuuuuuuugaaauaaaauagccugucuuucagaucucaaaggcucuuuucagagccaccaaaaaaaaaaaaaaaaaaaaaaaaaaaaaaaaaaaaaaaaaaaaaaaaaaaaaaaaaaaaaaaaaaaaaaaaaaaaaaaaaaaaaaaaaaaaaaaaaaaaa

SEQ ID NO: 18243 - RNA, 2048 nt, Artificial Sequence
  mRNA product Design a-1 (hSL-A100) comprising derived and/or modified sequence from LASV(GA391;Clade III)__CAA36646__SP-HsPLAT_NP(2-570) (opt4)
aggagagucccgcagucggcguccagcggcucugcuuguucgugugugugucguugcaggccuuauucaagcuuaccauggacgccaugaagagaggccugugcugcgugcugcugcugugcggcgccguguucgugagccccagcgccagcaaggaggugagaagcuuccuguggacccagagccugagaagagagcugagcggcuacugcagcaacaucaagcugcagguggugaaggacgcccaggcccugcugcacggccuggacuucagcgaggugagcaacgugcagagacugaugagaaagcagaagagagacgacggcgaccugaagagacugagagaccugaaccaggccgugaacaaccugguggagcugaagagcacccagcagaagagcgugcugagagugggcacccugagcagcgacgaccugcugauccuggccgccgaccuggagaagcugaagagcaaggugaccagaaccgagagaccccugagcagcggcguguacaugggcaaccugagcagccagcagcuggaccagagaagagcccugcugaacaugaucggcaugaccggcgugagcggcggcggcaagggcgccagcgacggcaucgugagagugugggacgugaagaacgccgagcugcugaacaaccaguucggcaccaugcccagccugacccuggccugccugaccaagcagggccagguggaccugaacgacgccgugcaggcccugaccgaccugggccugaucuacaccgccaaguaccccaacagcagcgaccuggacagacugagccagagccaccccauccugaacaugaucgacaccaagaagagcagccugaacaucagcggcuacaacuucagccugggcgccgccgugaaggccggcgccugcaugcuggacggcggcaacaugcuggagaccaucaaggugagcccccagaccauggacggcauccugaagagcauccugaaggugaagaagagccugggcauguucgugagcgacacccccggcgagagaaaccccuacgagaacauccuguacaagaucugccugagcggcgacggcuggcccuacaucgccagcagaaccagcaucgugggcagagccugggagaacaccgugguggaccuggagcaggacaacaagccccagaagaucggcaacggcggcagcaacaagagccugcagagcgccggcuucgccgccggccugaccuacagccagcugaugacccugaaggacuucaagugcuucaaccugauccccaacgccaagaccuggauggacaucgagggcagacccgaggaccccguggagaucgcccuguaccagcccagcagcggcugcuacgugcacuucuucagagagcccaccgaccugaagcaguucaagcaggacgccaaguacagccacggcaucgacgugaccgaccuguucgccgcccagcccggccugaccagcgccgugaucgaggcccugcccagaaacauggugaucaccugccagggcagcgaggacaucagaaagcugcuggagagccagggcagaagagacaucaagcugaucgacaucacccugagcaaggccgacagcagaaaguucgagaacgccgugugggaccaguucaaggaccugugccacaugcacaccggcguggugguggagaagaagaagagaggcggcaaggaggagaucaccccccacugcgcccugauggacugcaucauguucgacgccgccgugagcggcggccuggacgccaaggugcugagaguggugcugcccagagacaugguguucagaaccagcacccccaagguggugcugugaggacuagucccuguucccagagcccacuuuuuuuucuuuuuuugaaauaaaauagccugucuuucagaucucaaaggcucuuuucagagccaccaaaaaaaaaaaaaaaaaaaaaaaaaaaaaaaaaaaaaaaaaaaaaaaaaaaaaaaaaaaaaaaaaaaaaaaaaaaaaaaaaaaaaaaaaaaaaaaaaaaaa

SEQ ID NO: 18244 - RNA, 2045 nt, Artificial Sequence
  mRNA product Design a-1 (hSL-A100) comprising derived and/or modified sequence from LASV(AV;Clade V)__CCA30315__SP-HsPLAT_NP(2-569) (opt4)
aggagagucccgcagucggcguccagcggcucugcuuguucgugugugugucguugcaggccuuauucaagcuuaccauggacgccaugaagagaggccugugcugcgugcugcugcugugcggcgccguguucgugagccccagcgccagcaaggaggugaagagcuuccuguggacccagagccugagaagagagcugagcggcuacugcagcaacaucaagcugcagguggugaaggacgcccaggcccugcugcacggccuggacuucagcgaggugagcaacgugcagagacugaugagaaagcagagaagagacgacagcgaccugaagagacugagagaccugaaccaggccgugaacaaccugguggagcugaagagcacccagcagaagagcgugcugagagugggcacccugagcagcgacgaccugcugacccuggccgccgaccuggagaagcugaagagcaaggugaccagaaccgagagaccccugagcagcggcguguacaugggcaaccugagcagccagcagcuggaccagagaagagcccugcugaaccugaucggcaugaccaacggcagccagggcagccaggccggcagagacggcguggugagagugugggacgugaagaacgccgagcugcugaacaaccaguucggcaccaugcccagccugacccuggccugccugaccaagcagggccagguggaccugaacgacguggugcaggcccugaccgaccugggccugaucuacaccgccaaguaccccaacaccagcgaccuggacagacugacccagagccaccccauccugaacaugaucgacaccaagaagagcagccugaacaucagcggcuacaacuucagccugggcgccgccgugaaggccggcgccugcaugcuggacggcggcaacaugcuggagaccaucaaggugagcccccagagcauggacggcauccugaagagcauccugaaggugaagagagcccugggcauguucgugagcgacacccccggcgagagaaaccccuacgagaacauccuguacaagaucugccugagcggcgacggcuggcccuacaucgccagcagaaccagcaucgugggcagagccugggagaacaccgugguggaccuggagaccgacggcaagccccagaagaucggcagcggcaacagcaacaagagccugcagagcgccggcuucagcgccggccugaccuacagccagcugaugacccugaaggacgccaugcugcagcuggaccccaacgccaagaccuggauggacaucgagggcagacccgaggaccccguggagguggcccuguaccagcccaucagcggcugcuacauccacuucuucagagagcccaccgaccugaagcaguucaagcaggacgccaaguacagccacggcaucgacaucgccgaccuguucgccgcccagcccggccugaccagcgccgugaucgaggcccugcccagaaacauggugaucaccugccagggcagcgaggacaucaagaagcugcuggagagccagggcagaaaggacaucaagcugaucgacaucgcccugagcaagaucgacagcagaaaguucgagaacgccgugugggaccaguacaaggaccugugccacaugcacaccggcguggugguggagaagaagaagagaggcggcaaggaggagaucaccccccacugcgcccugauggacugcaucauguucgacgccgccgugagcggcggccugaacacccuggugcugagagccgugcugcccagagacaugguguucagaaccagcacccccagaguggugcugugaggacuagucccuguucccagagcccacuuuuuuuucuuuuuuugaaauaaaauagccugucuuucagaucucaaaggcucuuuucagagccaccaaaaaaaaaaaaaaaaaaaaaaaaaaaaaaaaaaaaaaaaaaaaaaaaaaaaaaaaaaaaaaaaaaaaaaaaaaaaaaaaaaaaaaaaaaaaaaaaaaaaa

SEQ ID NO: 18245 - RNA, 2045 nt, Artificial Sequence
  mRNA product Design a-1 (hSL-A100) comprising derived and/or modified sequence from LASV(Togo/2016/7082;Clade VI)__AMR44578__SP-HsPLAT_NP(2-569) (opt4)
aggagagucccgcagucggcguccagcggcucugcuuguucgugugugugucguugcaggccuuauucaagcuuaccauggacgccaugaagagaggccugugcugcgugcugcugcugugcggcgccguguucgugagccccagcaacagcaaggaggugaagagcuuccuguggacccagagccugagaagagagcugagcggcuacugcagcaacaucaagcugcagguggugaaggacgcccaggcccugcugcacggccuggacuucagcgaggugagcaacgugcagagacugaugagaaagcagaagagagacgacggcgaccugaagagacugagagaccugaaccaggccgugaacaaccugguggagcugaagagcgugcagcagaagagcauccugagagugggcacccugaccagcgacgaccugcugacccuggccgccgaccuggagaagcugaagagcaaggugaccagaaccgagagaccccugagcagcggcguguacaugggcaaccugagcagccagcagcuggaccagagaagagcccugcugagcaugaucggcaugagcggcggcaaccagaacagccagcccaagggcgacggcguggugagagugugggacgugaagaacgccgaccugcugaacaaccaguucggcaccaugcccagccugacccuggccugccugaccaagcagggccagguggaccugaacgacgccgugcaggcccugaccgaccugggccugaucuacaccgccaaguaccccaacagcagcgaccuggacagacugagccagagccaccccauccugaacaugaucgacaccaagaagagcagccugaacaucagcggcuacaacuucagccugggcgccgccaucaagaccggcgccugcaugcuggacggcggcaacaugcuggagaccaucaaggugaccccccagaccauggacggcauccugaagagcauccugaaggugaagagaagccugggcauguucaucagcgacacccccggcgagagaaaccccuacgagaacauccuguacaagaucugccugagcggcgacggcuggcccuacaucgccagcagaaccgccaucaucggcagagccugggagaacaccgugguggaccuggagagcgacagcaagccccagaagaucggcagcaacggcagcaacaagagccugcagagcgccggcuucgcccccggccugaccuacagccagcugaugacccugaaggacagcaugcugcagcuggaccccaacgccaagaccuggaucgacaucgagggcagacccgaggaccccguggagguggcccuguuccagcccaucagcggcugcuacauccacuucuucagagagcccaccgaccugaagcaguucaagcaggacgccaaguacagccacggcaucgacgugaccgaccuguucgccgcccagcccggccugaccagcgccgugaucgaggcccugcccagaaacauggugcugaccugccagggcagcgacgacaucaagaagcugcuggacagccagggcagaagagacaucaagcugaucgacgugagccugaacaagaucgacagcagaaaguucgagaacgccgugugggaccaguacaaggaccugugccacaugcacaccggcguggugguggagaagaagaagaagggcggcaaggaggagaucaccccccacugcgcccugcuggacugcaucauguucgacgccgccgugagcggcggccugaacgccaccgugcugagagccgugcugcccagagacaugguguucagaaccagcagccccaagguggugcugugaggacuagucccuguucccagagcccacuuuuuuuucuuuuuuugaaauaaaauagccugucuuucagaucucaaaggcucuuuucagagccaccaaaaaaaaaaaaaaaaaaaaaaaaaaaaaaaaaaaaaaaaaaaaaaaaaaaaaaaaaaaaaaaaaaaaaaaaaaaaaaaaaaaaaaaaaaaaaaaaaaaaa

SEQ ID NO: 18246 - RNA, 2045 nt, Artificial Sequence
  mRNA product Design a-1 (hSL-A100) comprising derived and/or modified sequence from LASV(KAK-428;Clade n.d. (VII))__ANH09741__SP-HsPLAT_NP(2-569) (opt4)
aggagagucccgcagucggcguccagcggcucugcuuguucgugugugugucguugcaggccuuauucaagcuuaccauggacgccaugaagagaggccugugcugcgugcugcugcugugcggcgccguguucgugagccccagcaacagcaaggaggugaagagcuuccuguggacccagagccugagaagagagcugagcggcuacugcaccaacaucaagcugcagguggugaaggacgcccaggcccugcugcacggccuggacuucagcgaggugagcaacgugcagagacugaugagaaagcagaagagagacgacaacgaccugaagagacugagagaccugaaccaggccgugaacaaccugguggagcugaagagcgugcagcagaagagcgugcugaaggugggcacccugaacagcgacgaccugcugacccuggccgccgaccuggagaagcugaagagcaagguggugagaaccgagagaccccugagcagcggcguguacaugggcaaccugagcagccagcagcuggaccagagaagagcccugcugaacaugaucggcauggccggcggcagccagggcaaccagcccagcagagacggcguggugagagugugggacgugaagaacgccgaccugcugaacaaccaguucggcaccaugcccagccugacccuggccugccugaccaagcagggccagguggaccugaacgacguggugcuggcccugaccgaccugggccugaucuacaccgccaaguaccccaacagcagcgaccuggacagacugagccagaaccaccccgugcugaacaugaucgacgugaacaagagcagccugaacaucagcggcuacaacuucagccugggcgccgccgugaaggccggcgccugcaugcuggacggcggcaacaugcuggagaccaucaagaucagcccccagaccguggacggcauccugaagagcauccugaaggugaagagagcccugggcauguucgugagcgacacccccggcgagagaaaccccuacgagaacauccuguacaaggugugccugagcggcaacggcuggcccuacaucgccagcagaaccagcaucgugggcagagccugggagaacaccgugguggaccuggagagcaacaagaaccagcccaaggugggcaacaacggcagcaacaagaugcugcagagcagcggcuucgccaccggccugaccuacagccagcugaugacccugagagacagcaugcugcagcuggaccccaccgccaagaccuggaucgacaucgagggcagacccgaggaccccguggagcuggcccuguuccagcccagcagcggcugcuacauccacuucuucagagagcccaccgaccugaagcaguucaagcaggacgccaaguacagccacggcaucgacgugaacgaccuguucagcgcccagcccggccugaccagcgccgugcuggaggcccugcccagaaacauggugcugaccugccagggcagcgacgacaucagaaagcugcuggacagccaggacagaaaggacaucaagcugaucgacaucagccugagcaaggccgacgccagaaaguucgagaacgacgugugggaccaguucaaggaccugugccacaugcacaccggcaucgugguggagaagaagaagaagggcggcaagcaggagaugaccccccacugcgcccugcuggacugcaucauguucgacgccgccgugagcggcggccugaacgugcccacccugagagccgugcugcccaccgacaugguguucagaaccaucaccaccaagguggugcugugaggacuagucccuguucccagagcccacuuuuuuuucuuuuuuugaaauaaaauagccugucuuucagaucucaaaggcucuuuucagagccaccaaaaaaaaaaaaaaaaaaaaaaaaaaaaaaaaaaaaaaaaaaaaaaaaaaaaaaaaaaaaaaaaaaaaaaaaaaaaaaaaaaaaaaaaaaaaaaaaaaaaa

SEQ ID NO: 18247 - RNA, 2045 nt, Artificial Sequence; identical to SEQ ID NO: 18241
  mRNA product Design a-1 (hSL-A100) comprising derived and/or modified sequence from LASV(Pinneo-NIG-1969;Clade I)__AIT17837__SP-HsPLAT_NP(2-569) (opt4)

SEQ ID NO: 18248 - RNA, 2045 nt, Artificial Sequence
  mRNA product Design a-1 (hSL-A100) comprising derived and/or modified sequence from LASV(ISTH0009-NIG-2011;Clade II)__AIT17405__SP-HsPLAT_NP(2-569) (opt4)
aggagagucccgcagucggcguccagcggcucugcuuguucgugugugugucguugcaggccuuauucaagcuuaccauggacgccaugaagagaggccugugcugcgugcugcugcugugcggcgccguguucgugagccccagcgugagcaaggaggugaagagcuuccuguggacccagagccugagaagagagcugagcggcuacugcagcaacaucaagcugcagguggugaaggacgcccaggcccugcugcacggccuggacuucagcgaggugagcaacgugcagagacugaugagaaagcagaagagagacgacagcgaccugaagagacugagagaccugaaccaggccgugaacaaccugguggagcugaagagcacccagcagaagagcauccugagagugggcacccugaccagcgacgaccugcugacccuggccgccgaccuggagaagcugaagagcaaggugaucagaaccgagagaccccugagcagcggcguguacaugggcaaccugagcacccagcagcuggagcagagaagagcccugcugaacaugaucggcauggugggcggcgcccagggcacccagcccggcagagacggcguggugagagugugggacgugaagaaccccgaccugcugaacaaccaguucggcaccaugcccagccugacccuggccugccugaccaagcagggccagguggaccugaacgacgccgugcuggcccugaccgaccugggccugaucuacaccgccaaguaccccaacagcagcgaccuggacagacugagccagagccaccccauccugaacaugguggacaucaagaagagcagccugaacaucagcggcuacaacuucagccugggcgccgccgugaaggccggcgccugcaugcuggacggcggcaacaugcuggagaccaucaaggugaccccccagaccauggacggcauccugaagagcauccugaaggugaagagaagccugggcauguucgugagcgacacccccggcgagagaaaccccuacgagaacauccuguacaagaucugccugagcggcgacggcuggcccuacaucgccagcagaaccagcaucgugggcagagccugggagaacaccaccguggaccuggagagcgacggcaagccccagaaggugggcagcgccggcagcaacaagagccugcagagcgccggcuuccccaccggccugaccuacagccagcugaugacccugaaggacagcaugaugcagcuggaccccagcgccaagaccuggaucgacaucgagggcagacccgaggaccccguggagaucgcccuguaccagcccaugagcggcugcuacauccacuucuucagagagcccaccgaccugaagcaguucaagcaggacgccaaguacagccacggcaucgacguggccgaccuguuccccgcccagcccggccugaccagcgccgugaucgaggcccugcccagaaacauggugcugaccugccagggcagcgacgacaucaagagacugcuggacagccagggcagaagagacaucaagcugaucgacaucgcccugagcaaggccgacagcagaagauucgagaacgccgugugggaccagugcaaggaccugugccacaugcacaccggcguggugguggagaagaagaagagaggcggcaaggaggagaucaccccccacugcgcccugauggacugcaucauguacgacgccgccgugagcggcggccugaacauccccgugcugagagccgugcugcccagagacaugguguucagaaccagcagccccaagguggugcugugaggacuagucccuguucccagagcccacuuuuuuuucuuuuuuugaaauaaaauagccugucuuucagaucucaaaggcucuuuucagagccaccaaaaaaaaaaaaaaaaaaaaaaaaaaaaaaaaaaaaaaaaaaaaaaaaaaaaaaaaaaaaaaaaaaaaaaaaaaaaaaaaaaaaaaaaaaaaaaaaaaaaa

SEQ ID NO: 18249 - RNA, 2045 nt, Artificial Sequence
  mRNA product Design a-1 (hSL-A100) comprising derived and/or modified sequence from LASV(ISTH2010-NIG-2012;Clade II)__AIT17483__SP-HsPLAT_NP(2-569) (opt4)
aggagagucccgcagucggcguccagcggcucugcuuguucgugugugugucguugcaggccuuauucaagcuuaccauggacgccaugaagagaggccugugcugcgugcugcugcugugcggcgccguguucgugagccccagcgccagcaaggaggugaagagcuuccuguggacccagagccugagaagagagcugagcggcuacugcagcaacaucaagcugcagguggugaaggacgcccaggcccugcugcacggccuggacuucagcgaggugagcaacgugcagagacugaugagaaagcagaagagagacgacagcgaccugaagagacugagagaccugaaccaggccgugaacaaccugguggagcugaagagcacccagcagaagagcauccugagagugggcacccugaccagcgacgaccugcugacccuggccgccgaccuggagaagcugaagagcaaggugaucagaaccgagagaccccugagcagcggcguguacaugggcaaccugagcacccagcagcuggagcagagaagagcccugcugaaccugaucggcauggugggcggcgcccagggcacccagcccggcagagacggcguggugagagugugggacgugaagaaccccgaccugcugaacaaccaguucggcaccaugcccagccugacccuggccugccugaccaagcagggccagguggaccugaacgacgccgugcuggcccugaccgaccugggccugaucuacaccgccaaguaccccaacagcagcgaccuggacagacugagccagagccaccccauccugaacaugguggacaccaagaagagcagccugaacaucagcggcuucaacuucagccugggcgccgccgugaaggccggcgccugcaugcuggacggcggcaacaugcuggagaccaucaaggugaccccccagaccauggacggcauccugaagagcauccugaaggugaagaagagccugggcauguucgugagcgacacccccggcgagagaaaccccuacgagaacauccuguacaagaucugccugagcggcgacggcuggcccuacaucgccagcagaaccagcaucgugggcagagccugggagaacaccaccguggaccuggagagcgacggcaagccccacaaggugggcaccgccggcagcaacaagagccugcagagcgccggcuuccccaccggccugaccuacagccagcugaugacccugaaggacagcaugaugcagcuggaccccagcgccaagaccuggaucgacaucgagggcagacccgaggaccccguggagaucgcccuguaccagcccaugagcggcugcuacauccacuucuucagagagcccaccgaccugaagcaguucaagcaggacgccaaguacagccacggcaucgacguggccgaccuguuccccgcccagcccggccugaccagcgccgugaucgaggcccugcccagaaacauggugcugaccugccagggcagcgacgacaucaagagacugcuggacagccagggcagaagagacaucaagcugaucgacaucgcccugagcaaggccgacagcagaagauucgagaacgccgugugggaccagugcaaggaccugugccacaugcacaccggcguggugguggagaagaagaagagaggcggcaaggaggagaucaccccccacugcgcccugauggacugcaucauguacgacgccgccgugagcggcggccugaacauccccgugcugagagccgugcugcccagagacaugguguucagaaccagcagccccaagguggugcugugaggacuagucccuguucccagagcccacuuuuuuuucuuuuuuugaaauaaaauagccugucuuucagaucucaaaggcucuuuucagagccaccaaaaaaaaaaaaaaaaaaaaaaaaaaaaaaaaaaaaaaaaaaaaaaaaaaaaaaaaaaaaaaaaaaaaaaaaaaaaaaaaaaaaaaaaaaaaaaaaaaaaa

SEQ ID NO: 18250 - RNA, 2045 nt, Artificial Sequence
  mRNA product Design a-1 (hSL-A100) comprising derived and/or modified sequence from LASV(Lassa virus/H.sapiens-wt/NGA/2015/ISTH_0543;Clade II)__AVO03640__SP-HsPLAT_NP(2-569) (opt4)
aggagagucccgcagucggcguccagcggcucugcuuguucgugugugugucguugcaggccuuauucaagcuuaccauggacgccaugaagagaggccugugcugcgugcugcugcugugcggcgccguguucgugagccccagcgccagcaaggaggugaagagcuuccuguggacccagagccugagaagagagcugagcggcuacugcagcaacaucaagcugcagguggugaaggacgcccaggcccugcugcacggccuggacuucagcgaggugagcaacgugcagagacugaugagaaagcagaagagagacgacagcgaccugaagagacugagagaccugaaccaggccgugaacaaccugguggagcugaagagcacccagcagaagagcauccugagagugggcacccugaccagcgacgaccugcugacccuggccgccgaccuggagaagcugaagagcaaggugaucagaaccgagagaccccugagcagcggcguguacaugggcaaccugagcacccagcagcuggagcagagaagagcccugcugaacaugaucggcauggugggcggcgcccagggcacccagcccggcagagacggcguggugagagugugggacgugaagaaccccgaccugcugaacaaccaguucggcaccaugcccagccugacccuggccugccugaccaagcagggccagguggaccugaacgacgccgugcuggcccugaccgaccugggccugaucuacaccgccaaguaccccaacagcagcgaccuggacagacugagccagagccaccccauccugaacaugguggacaccaagaagagcagccugaacaucagcggcuacaacuucagccugggcgccgccgugaaggccggcgccugcaugcuggacggcggcaacaugcuggagaccaucaaggugaccccccagaccauggacggcauccugaagagcauccugaaggugaagaagagccugggcauguucgugagcgacacccccggcgagagaaaccccuacgagaacauccuguacaagaucugccugagcggcgacggcuggcccuacaucgccagcagaaccagcaucgugggcagagccugggagaacaccaccguggaccuggagagcgacggcaagccccagaaggugggcagcgccggcagcaacaagagccugcagagcgccggcuuccccaccggccugaccuacagccagcugaugacccugaaggacagcaugaugcagcuggaccccagcgccaagaccuggaucgacaucgagggcagacccgaggaccccguggagaucgcccuguaccagcccaugagcggcugcuacauccacuucuucagagagcccaccgaccugaagcaguucaagcaggacgccaaguacagccacggcaucgacguggccgaccuguuccccgcccagcccggccugaccagcgccgugaucgaggcccugcccagaaacauggugcugaccugccagggcagcgacgacaucaagagacugcuggacagccagggcagaaaggacaucaagcugaucgacaucgcccugagcaaggccgacagcagaagauucgagaacgccgugugggaccagugcaaggaccugugccacaugcacaccggcguggugguggagaagaagaagagaggcggcaaggaggagaucaccccccacugcgcccugauggacugcaucauguacgacgccgccgugagcggcggccugaacauccccgugcugagagccgugcugcccagagacaugguguucagaaccagcagccccaagguggugcugugaggacuagucccuguucccagagcccacuuuuuuuucuuuuuuugaaauaaaauagccugucuuucagaucucaaaggcucuuuucagagccaccaaaaaaaaaaaaaaaaaaaaaaaaaaaaaaaaaaaaaaaaaaaaaaaaaaaaaaaaaaaaaaaaaaaaaaaaaaaaaaaaaaaaaaaaaaaaaaaaaaaaa

SEQ ID NO: 18251 - RNA, 2045 nt, Artificial Sequence
  mRNA product Design a-1 (hSL-A100) comprising derived and/or modified sequence from LASV(Lassa virus/H.sapiens-wt/NGA/2016/ISTH_0009;Clade II)__AVO03572__SP-HsPLAT_NP(2-569) (opt4)
aggagagucccgcagucggcguccagcggcucugcuuguucgugugugugucguugcaggccuuauucaagcuuaccauggacgccaugaagagaggccugugcugcgugcugcugcugugcggcgccguguucgugagccccagcgccagcaaggaggugaagagcuuccuguggacccagagccugagaagagagcugagcggcuacugcagcaacaucaagcugcagguggugaaggacgcccaggcccugcugcacggccuggacuucagcgaggugagcaacgugcagagacugaugagaaagcagaagagagacgacagcgaccugaagagacugagagaccugaaccaggccgugaacaaccugguggagcugaagagcacccagcagaagagcauccugagagugggcacccugaccagcgacgaccugcugacccuggccgccgaccuggagaagcugaagagcaaggugaucagaaccgagagaccccugagcagcggcguguacaugggcaaccugagcacccagcagcuggagcagagaagagcccugcugaacaugaucggcauggugggcggcgcccagggcacccagcccggcagagacggcguggugagagugugggacgugaagaaccccgaccugcugaacaaccaguucggcaccaugcccagccugacccuggccugccugaccaagcagggccagguggaccugaacgacgccgugcuggcccugaccgaccugggccugaucuacaccgccaaguaccccaacagcagcgaccuggacagacugagccagagccaccccauccugaacaugguggacaccaagaagagcagccugaacaucagcggcuacaacuucagccugggcgccgccgugaaggccggcgccugcaugcuggacggcggcaacaugcuggagaccaucaaggugaccccccagaccauggacggcauccugaagagcauccugaaggugaagaagagccugggcauguucgugagcgacacccccggcgagagaaaccccuacgagaacauccuguacaagaucugccugagcggcgacggcuggcccuacaucgccagcagaaccagcaucgugggcagagccugggagaacaccaccguggaccuggagagcgacggcaagccccagaaggugggcagcgccggcagcaacaagagccugcagagcgccggcuuccccaccggccugaccuacagccagcugaugacccugaaggacagcaugaugcagcuggaccccagcgccaagaccuggaucgacaucgagggcagacccgaggaccccguggagaucgcccuguaccagcccaugagcggcugcuacauccacuucuucagagagcccaccgaccugaagcaguucaagcaggacgccaaguacagccacggcaucgacguggccgaccuguuccccgcccagcccggccugaccagcgccgugaucgaggcccugcccagaaacauggugcugaccugccagggcagcgacgacaucaagagacugcuggacagccagggcagaagagacaucaagcugaucgacaucgcccugagcaaggccgacagcagaagauucgagaacgccgugugggaccagugcaaggaccugugccacaugcacaccggcguggugguggagaagaagaagagaggcggcaaggaggagaucaccccccacugcgcccugauggacugcaucauguacgacgccgccgugagcggcggccugaacauccccgugcugagagccgugcugcccagagacaugguguucagaaccagcagccccaagguggugcugugaggacuagucccuguucccagagcccacuuuuuuuucuuuuuuugaaauaaaauagccugucuuucagaucucaaaggcucuuuucagagccaccaaaaaaaaaaaaaaaaaaaaaaaaaaaaaaaaaaaaaaaaaaaaaaaaaaaaaaaaaaaaaaaaaaaaaaaaaaaaaaaaaaaaaaaaaaaaaaaaaaaaa

SEQ ID NO: 18252 - RNA, 2045 nt, Artificial Sequence
  mRNA product Design a-1 (hSL-A100) comprising derived and/or modified sequence from LASV(Lassa virus/H.sapiens-wt/NGA/2016/ISTH_0017;Clade II)__AVO03568__SP-HsPLAT_NP(2-569) (opt4)
aggagagucccgcagucggcguccagcggcucugcuuguucgugugugugucguugcaggccuuauucaagcuuaccauggacgccaugaagagaggccugugcugcgugcugcugcugugcggcgccguguucgugagccccagcgccagcaaggaggugaagagcuuccuguggacccagagccugagaagagagcugagcggcuacugcagcagcaucaagcugcagguggugaaggacgcccaggcccugcugcacggccuggacuucagcgaggugagcaacgugcagagacugaugagaaagcagaagagagacgacagcgaccugaagagacugagagaccugaaccaggccgugaacaaccugguggagcugaagagcacccagcagaagagcauccugagagugggcacccugaccagcgacgaccugcugacccuggccgccgaccuggagaagcugaagagcaaggugaucagaaccgagagaccccugagcagcggcguguacaugggcaaccugagcacccagcagcuggagcagagaagagcccugcugaacaugaucggcauggccggcggcgcccagggcacccagcccggcagagacggcguggugagagugugggacgugaagaaccccgaccugcugaacaaccaguucggcaccaugcccagccugacccuggccugccugaccaagcagggccagguggaccugaacgacgccgugcuggcccugaccgaccugggccugaucuacaccgccaaguaccccaacagcagcgaccuggacagacugagccagagccaccccauccugaacaugguggacaccaagaagagcagccugaacaucagcggcuacaacuucagccugggcgccgccgugaaggccggcgccugcaugcuggacggcggcaacaugcuggagaccaucaaggugaccccccagaccauggacggcauccugaagagcauccugaaggugaagagaagccugggcauguucgugagcgacgcccccggcgagagaaaccccuacgagaacauccuguacaagaucugccugagcggcgacggcuggcccuacaucgccagcagaaccagcaucgugggcagagccugggagaacaccaccguggaccuggagagcgacggcaagccccagaaggugggcgccaccggcagcaacaagagccugcagagcgccggcuuccccaccggccugaccuacagccagcugaugacccugaaggacagcaugaugcagcuggaccccagcgccaagaccuggaucgacaucgagggcagacccgaggaccccguggagguggcccuguaccagcccgugagcggcugcuacauccacuucuucagagagcccaccgaccugaagcaguucaagcaggacgccaaguacagccacggcaucgacguggccgaccuguuccccgcccagcccggccugaccagcgccgugaucgaggcccugcccagaaacauggugcugaccugccagggcagcgacgacaucaagaagcugcuggacagccagggcagaaaggacaucaagcugaucgacaucgcccugagcaaggccgacagcagaagauucgagaacgccgugugggaccagugcaaggaccugugccacaugcacaccggcguggugguggagaagaagaagagaggcggcaaggaggagaucaccccccacugcgcccugauggacugcaucauguacgacgccgccgugagcggcggccugaacauccccgugcugagagccgugcugcccagagacaugguguucagaaccagcagccccaagguggugcugugaggacuagucccuguucccagagcccacuuuuuuuucuuuuuuugaaauaaaauagccugucuuucagaucucaaaggcucuuuucagagccaccaaaaaaaaaaaaaaaaaaaaaaaaaaaaaaaaaaaaaaaaaaaaaaaaaaaaaaaaaaaaaaaaaaaaaaaaaaaaaaaaaaaaaaaaaaaaaaaaaaaaa

SEQ ID NO: 18253 - RNA, 2045 nt, Artificial Sequence
  mRNA product Design a-1 (hSL-A100) comprising derived and/or modified sequence from LASV(Lassa virus/H.sapiens-wt/NGA/2018/ISTH_0959;Clade II)__AVV65100__SP-HsPLAT_NP(2-569) (opt4)
aggagagucccgcagucggcguccagcggcucugcuuguucgugugugugucguugcaggccuuauucaagcuuaccauggacgccaugaagagaggccugugcugcgugcugcugcugugcggcgccguguucgugagccccagcgccagcaaggaggugaagagcuuccuguggacccagagccugagaagagagcugagcggcuacugcagcaacaucaagcugcagguggugaaggacgcccaggcccugcugcacggccuggacuucagcgaggugagcaacgugcagagacugaugagaaagcagaagagagacgacagcgaccugaagagacugagagaccugaaccaggccgugaacaaccugguggagcugaagagcacccagcagaagagcauccugagagugggcacccugaccagcgacgaccugcugacccuggccgccgaccuggagaagcugaagagcaaggugaucagaaccgagagaccccugagcagcggcguguacaugggcaaccugagcacccagcagcuggagcagagaagagcccugcugaaccugaucggcauggugggcggcgcccagggcacccagcccggcagagacggcguggugagagugugggacgugaagaaccccgaccugcugaacaaccaguucggcaccaugcccagccugacccuggccugccugaccaagcagggccagguggaccugaacgacguggugcuggcccugaccgaccugggccugaucuacaccgccaaguaccccaacagcagcgaccuggacagacugagccagagccaccccauccugaacaugguggacaccaagaagagcagccugaacaucagcggcuucaacuucagccugggcgccgccgugaaggccggcgccugcaugcuggacggcggcaacaugcuggagaccaucaaggugaccccccagaccauggacggcauccugaagagcauccugaaggugaagaagagccugggcauguucgugagcgacacccccggcgagagaaaccccuacgagaacauccuguacaagaucugccugagcggcgacggcuggcccuacaucgccagcagaaccagcaucgugggcagagccugggagaacaccaccguggaccuggagagcgacggcaagccccacaaggugggcaccgccggcagcaacaagagccugcagagcgccggcuuccccaccggccugaccuacagccagcugaugacccugaaggacagcaugaugcagcuggaccccagcgccaagaccuggaucgacaucgagggcagacccgaggaccccguggagaucgcccuguaccagcccaugagcggcugcuacauccacuucuucagagagcccaccgaccugaagcaguucaagcaggacgccaaguacagccacggcaucgacguggccgaccuguuccccgcccagcccggccugaccagcgccgugaucgaggcccugcccagaaacauggugcugaccugccagggcagcgacgacaucaagagacugcuggacagccagggcagaaaggacaucaagcugaucgacaucgcccugagcaagaccgacagcagaagauucgagaacgccgugugggaccagugcaaggaccugugccacaugcacaccggcguggugguggagaagaagaagagaggcggcaaggaggagaucaccccccacugcgcccugauggacugcaucauguacgacgccgccgugagcggcggccugaacauccccgugcugagagccgugcugcccagagacaugguguucagaaccagcagccccaagguggugcugugaggacuagucccuguucccagagcccacuuuuuuuucuuuuuuugaaauaaaauagccugucuuucagaucucaaaggcucuuuucagagccaccaaaaaaaaaaaaaaaaaaaaaaaaaaaaaaaaaaaaaaaaaaaaaaaaaaaaaaaaaaaaaaaaaaaaaaaaaaaaaaaaaaaaaaaaaaaaaaaaaaaaa

SEQ ID NO: 18254 - RNA, 2045 nt, Artificial Sequence
  mRNA product Design a-1 (hSL-A100) comprising derived and/or modified sequence from LASV(LASV003-NIG-2008;Clade II)__AIT17581__SP-HsPLAT_NP(2-569) (opt4)
aggagagucccgcagucggcguccagcggcucugcuuguucgugugugugucguugcaggccuuauucaagcuuaccauggacgccaugaagagaggccugugcugcgugcugcugcugugcggcgccguguucgugagccccagcgccagcaaggaggugaagagcuuccuguggacccagagccugagaagagagcugagcggcuacugcagcagcaucaagcugcagguggugaaggacgcccaggcccugcugcacggccuggacuucagcgaggugagcaacgugcagagacugaugagaaagcagaagagagacgacagcgaccugaagagacugagagaccugaaccaggccgugaacaaccugguggagcugaagagcacccagcagaagagcgugcugagagugggcacccugaccagcgacgaccugcugacccuggccgccgaccuggagaagcugaagagcaaggugaucagaaccgagagaccccugagcagcggcguguacaugggcaaccugagcgcccagcagcuggagcagagaagaacccugcugaacaugaucggcauggugggcggcgcccagggcacccagcccggcagagacggcguggugagagugugggacgugaagaaccccgaccugcugaacaaccaguucggcaccaugcccagccugacccuggccugccugaccaagcagggccagguggaccugaacgacguggugcuggcccugaccgaccugggccugaucuacaccgccaaguaccccaacagcagcgaccuggacagacugagccagagccaccccauccugagcaugguggacaccaagaagagcagccugaacaucagcggcuacaacuucagccugggcgccgccgugaaggccggcgccugcaugcuggacggcggcaacaugcuggagaccaucaaggugaccccccagaccauggacggcauccugaagagcauccugaaggugaagaagagccugggcauguucgugagcgacacccccggcgagagaaaccccuacgagaacauccuguacaagaucugccugagcggcgacggcuggcccuacaucgccagcagaaccagcaucgugggcagagccugggagaacaccaccguggaccuggagagcgacggcaagccccagaaggugggcaccgccggcagcaacaagagccugcagagcgccggcuuccccaccggccugaccuacagccagcugaugacccugaaggacagcaugaugcagcuggaccccagcgccaagaccuggaucgacaucgagggcagacccgaggaccccguggagaucgcccuguaccagcccaugagcggcugcuacauccacuucuucagagagcccaccgaccugaagcaguucaagcaggacgccaaguacagccacggcaucgacgugaccgaccuguuccccgcccagcccggccugaccagcgccgugaucgaggcccugcccagaaacauggugcugaccugccagggcagcgacgacaucaagagacugcuggacagccagggcagaagagacaucaagcugaucgacaucgcccugagcaaggccgacagcagaagauucgagaacgccgugugggaccagugcaaggaccugugccacaugcacaccggcguggugguggagaagaagaagagaggcggcaaggaggagaucaccccccacugcgcccugauggacugcaucauguacgacgccgccgugagcggcggccugaacauccccgugcugagagccgugcugcccagagacaugguguucagaaccagcagccccaagguggugcugugaggacuagucccuguucccagagcccacuuuuuuuucuuuuuuugaaauaaaauagccugucuuucagaucucaaaggcucuuuucagagccaccaaaaaaaaaaaaaaaaaaaaaaaaaaaaaaaaaaaaaaaaaaaaaaaaaaaaaaaaaaaaaaaaaaaaaaaaaaaaaaaaaaaaaaaaaaaaaaaaaaaaa

SEQ ID NO: 18255 - RNA, 2045 nt, Artificial Sequence
  mRNA product Design a-1 (hSL-A100) comprising derived and/or modified sequence from LASV(LASV035-NIG-2009;Clade II)__AIT17589__SP-HsPLAT_NP(2-569) (opt4)
aggagagucccgcagucggcguccagcggcucugcuuguucgugugugugucguugcaggccuuauucaagcuuaccauggacgccaugaagagaggccugugcugcgugcugcugcugugcggcgccguguucgugagccccagcgccagcaaggaggugaagagcuuccuguggacccagagccugagaagagagcugagcggcuacugcagcagcaucaagcugcagguggugaaggacgcccaggcccugcugcacggccuggacuucagcgaggugagcaacgugcagagacugaugagaaagcagaagagagacgacagcgaccugaagagacugagagaccugaaccaggccgugaacaaccugguggagcugaagagcacccagcagaagagcauccugagagugggcacccugaccagcgacgaccugcugacccuggccgccgaccuggagaagcugaagagcaaggugaucagaaccgagagaccccugagcagcggcguguacaugggcaaccugagcgcccagcagcuggagcagagaagagcccugcugaacaugaucggcauggugggcggcgcccagggcacccagcccggcagagacggcguggugagagugugggacgugaagaaccccgaccugcugaacaaccaguucggcaccaugcccagccugacccuggccugccugaccaagcagggccagguggaccugaacgacgccgugcuggcccugaccgaccugggccugaucuacaccgccaaguaccccaacagcagcgaccuggacagacugagccagagccaccccauccugaacaugguggacaccaagaagagcagccugaacaucagcggcuacaacuucagccugggcgccgccgugaaggccggcgccugcaugcuggacggcggcaacaugcuggagaccaucaaggugaccccccagaccauggacggcauccugaagagcauccugaaggugaagagaagccugggcauguucgugagcgacacccccggcgagagaaaccccuacgagaacauccuguacaagaucugccugagcggcgacggcuggcccuacaucgccagcagaaccagcaucgugggcagagccugggagaacaccaccguggaccuggagagcgacggcaagccccagaaggugggcaccaccggcagcaacaagagccugcagagcgccggcuuccccaccggccugaccuacagccagcugaugacccugaaggacagcaugaugcagcuggaccccagcgccaagaccuggaucgacaucgagggcagacccgaggaccccguggagaucgcccuguaccagcccaugagcggcugcuacauccacuucuucagagagcccaccgaccugaagcaguucaagcaggacgccaaguacagccacggcaucgacguggccgaccuguuccccgcccagcccggccugaccagcgccgugaucgaggcccugcccagaaacauggugcugaccugccagggcagcgacgacaucaagaagcugcuggacagccagggcagaagagacaucaagcugaucgacaucgcccugagcaaggccgacagcagaaaguucgagaacgccgugugggaccagugcaaggaccugugccacaugcacaccggcguggugguggagaagaagaagagaggcggcaaggaggagaucaccccccacugcgcccugauggacugcaucauguacgacgccgccgugagcggcggccugaacauccccgugcugagagccgugcugcccagagacaugguguucagaaccagcagccccaagguggugcugugaggacuagucccuguucccagagcccacuuuuuuuucuuuuuuugaaauaaaauagccugucuuucagaucucaaaggcucuuuucagagccaccaaaaaaaaaaaaaaaaaaaaaaaaaaaaaaaaaaaaaaaaaaaaaaaaaaaaaaaaaaaaaaaaaaaaaaaaaaaaaaaaaaaaaaaaaaaaaaaaaaaaa

SEQ ID NO: 18256 - RNA, 2045 nt, Artificial Sequence
  mRNA product Design a-1 (hSL-A100) comprising derived and/or modified sequence from LASV(LASV1000-NIG-2009;Clade II)__AIT17783__SP-HsPLAT_NP(2-569) (opt4)
aggagagucccgcagucggcguccagcggcucugcuuguucgugugugugucguugcaggccuuauucaagcuuaccauggacgccaugaagagaggccugugcugcgugcugcugcugugcggcgccguguucgugagccccagcgccagcaaggaggugaagagcuuccuguggacccagagccugagaagagagcugagcggcuacugcagcaacaucaagcugcagguggugaaggacgcccaggcccugcugcacggccuggacuucagcgaggugagcaacgugcagagacugaugagaaagcagaagagagacgacagcgaccugaagagacugagagaccugaaccaggccgugaacaaccugguggagcugaagagcacccagcagaagagcauccugagagugggcacccugaccagcgacgaccugcugacccuggccgccgaccuggagaagcugaagagcaaggugaucagaaccgagagaccccugagcagcggcguguacaugggcaaccugagcacccagcagcuggagcagagaagagcccugcugaacaugaucggcauggugggcggcgcccagggcacccagcccggcagagacggcguggugagagugugggacgugaagaaccccgaccugcugaacaaccaguucggcaccaugcccagccugacccuggccugccugaccaagcagggccagguggaccugaacgacguggugcuggcccugaccgaccugggccugaucuacaccgccaaguaccccaacagcagcgaccuggacagacugagccagagccaccccauccugaacaugguggacaccaagaagagcagccugaacaucagcggcuacaacuucagccugggcgccgccgugaaggccggcgccugcaugcuggacggcggcaacaugcuggagaccaucaaggugaccccccagaccauggacggcauccugaagagcauccugaaggugaagaagagccugggcauguucgugagcgacacccccggcgagagaaaccccuacgagaacauccuguacaagaucugccugagcggcgacggcuggcccuacaucgccagcagaaccagcaucgugggcagagccugggagaacaccaccguggaccuggagagcgacggcaagccccagaaggugggcaccgccggcagcaacaagagccugcagagcgccggcuuccccaccggccugaccuacagccagcugaugacccugaaggacagcaugaugcagcuggaccccagcgccaagaccuggaucgacaucgagggcagacccgaggaccccguggagaucgcccuguaccagcccgugagcggcugcuacauccacuucuucagagagcccaccgaccugaagcaguucaagcaggacgccaaguacagccacggcaucgacguggccgaccuguuccccgcccagcccggccugaccagcgccgugaucgaggcccugcccagaaacauggugcugaccugccagggcagcgacgacaucaagagacugcuggacagccagggcagaagagacaucaagcugaucgacaucgcccugagcaaggccgacagcagaagauucgagaacgccgugugggaccagugcaaggaccugugccacaugcacaccggcguggugguggagaagaagaagagaggcggcaaggaggagaucaccccccacugcgcccugauggacugcaucauguacgacgccgccgugagcggcggccugaacauccccgugcugagagccgugcugcccagagacaugguguucagaaccagcagccccaagguggugcugugaggacuagucccuguucccagagcccacuuuuuuuucuuuuuuugaaauaaaauagccugucuuucagaucucaaaggcucuuuucagagccaccaaaaaaaaaaaaaaaaaaaaaaaaaaaaaaaaaaaaaaaaaaaaaaaaaaaaaaaaaaaaaaaaaaaaaaaaaaaaaaaaaaaaaaaaaaaaaaaaaaaaa

SEQ ID NO: 18257 - RNA, 2045 nt, Artificial Sequence
  mRNA product Design a-1 (hSL-A100) comprising derived and/or modified sequence from LASV(LASV221-NIG-2010;Clade II)__AIT17625__SP-HsPLAT_NP(2-569) (opt4)
aggagagucccgcagucggcguccagcggcucugcuuguucgugugugugucguugcaggccuuauucaagcuuaccauggacgccaugaagagaggccugugcugcgugcugcugcugugcggcgccguguucgugagccccagcgccagcaaggaggugaagagcuuccuguggacccagagccugagaagagagcugagcggcuacugcagcagcaucaagcugcagguggugaaggacgcccaggcccugcugcacggccuggacuucagcgaggugagcaacgugcagagacugaugagaaagcagagaagagacgacagcgaccugaagagacugagagaccugaaccaggccgugaacaaccugguggagcugaagagcacccagcagaagagcauccugagagugggcacccugaccagcgacgaccugcugacccuggccgccgaccuggagaagcugaagagcaaggugaucagaaccgagagaccccugagcagcggcguguacaugggcaaccugagcacccagcagcuggagcagagaagagcccugcugaacaugaucggcauggugggcggcgcccagggcacccagcccggcagagacggcguggugagagugugggacgugaagaaccccgaccugcugaacaaccaguucggcaccaugcccagccugacccuggccugccugaccaagcagggccagguggaccugaacgacgccgugcuggcccugaccgaccugggccugaucuacaccgccaaguaccccaacagcagcgaccuggacagacugagccagagccaccccauccugaacaugguggacaccaagaagagcagccugaacaucagcggcuacaacuucagccugggcgccgccgugaaggccggcgccugcaugcuggacggcggcaacaugcuggagaccaucaaggugaccccccagaccguggacggcauccugaagagcauccugaaggugaagagaagccugggcauguucgugagcgacacccccggcgagagaaaccccuacgagaacauccuguacaagaucugccugagcggcgacggcuggcccuacaucgccagcagaaccagcaucgugggcagagccugggagaacaccaccguggaccuggagagcgacggcaagccccagaaggugggcaccgccggcagcaacaagagccugcagagcgccggcuuccccaccggccugaccuacagccagcugaugacccugaaggacagcaugaugcagcuggaccccagcgccaagaccuggaucgacaucgagggcagacccgaggaccccguggagaucgcccuguaccagcccaugagcggcugcuacauccacuucuucagagagcccaccgaccugaagcaguucaagcaggacgccaaguacagccacggcaucgacguggccgaccuguuccccgcccagcccggccugaccagcgccgugaucgaggcccugcccagaaacauggugcugaccugccagggcagcgacgacaucaagagacugcuggacagccagggcagaagagacaucaagcugaucgacaucgcccugagcaaggccgacagcagaaaguucgagaacgccgugugggaccagugcaaggaccugugccacaugcacaccggcguggugguggagaagaagaagagaggcggcaaggaggagaucaccccccacugcgcccugauggacugcaucauguacgacgccgccgugagcggcggccugaacauccccgugcugagagccgugcugcccagagacaugguguucagaaccagcagccccaagguggugcugugaggacuagucccuguucccagagcccacuuuuuuuucuuuuuuugaaauaaaauagccugucuuucagaucucaaaggcucuuuucagagccaccaaaaaaaaaaaaaaaaaaaaaaaaaaaaaaaaaaaaaaaaaaaaaaaaaaaaaaaaaaaaaaaaaaaaaaaaaaaaaaaaaaaaaaaaaaaaaaaaaaaaa

SEQ ID NO: 18258 - RNA, 2045 nt, Artificial Sequence
  mRNA product Design a-1 (hSL-A100) comprising derived and/or modified sequence from LASV(LASV237-NIG-2010;Clade II)__AIT17639__SP-HsPLAT_NP(2-569) (opt4)
aggagagucccgcagucggcguccagcggcucugcuuguucgugugugugucguugcaggccuuauucaagcuuaccauggacgccaugaagagaggccugugcugcgugcugcugcugugcggcgccguguucgugagccccagcgccagcaaggaggugaagagcuuccuguggacccagagccugagaagagagcugagcggcuacugcagcaacaucaagcugcagguggugaaggacgcccaggcccugcugcacggccuggacuucagcgaggugagcaacgugcagagacugaugagaaagcagaagagagacgacagcgaccugaagagacugagagaccugaaccaggccgugaacaaccugguggagcugaagagcacccagcagaagagcauccugagagugggcacccugaccagcgacgaccugcugacccuggccgccgaccuggagaagcugaagagcaaggugaucagaaccgagagaccccugagcagcggcguguacaugggcaaccugagcacccagcagcuggagcagagaagagcccugcugaacaugaucggcauggugggcggcgcccagggcacccagcccggcagagacggcguggugagagugugggacgugaagaaccccgaccugcugaacaaccaguucggcaccaugcccagccugacccuggccugccugaccaagcagggccagguggaccugaacgacgccgugcuggcccugaccgaccugggccugaucuacaccgccaaguaccccaacagcagcgaccuggacagacugagccagagccaccccauccugaacaugguggacaucaagaagagcagccugaacaucagcggcuacaacuucagccugggcgccgccgugaaggccggcgccugcaugcuggacggcggcaacaugcuggagaccaucaaggugaccccccagaccauggacggcauccugaagagcauccugaaggugaagagaagccugggcauguucgugagcgacacccccggcgagagaaaccccuacgagaacauccuguacaagaucugccugagcggcgacggcuggcccuacaucgccagcagaaccagcaucgugggcagagccugggagaacaccaccguggaccuggagagcgacggcaagccccagaaggugggcagcgccggcagcaacaagagccugcagagcgccggcuuccccaccggccugaccuacagccagcugaugacccugaaggacagcaugaugcagcuggaccccagcgccaagaccuggaucgacaucgagggcagacccgaggaccccguggagaucgcccuguaccagcccaugagcggcugcuacauccacuucuucagagagcccaccgaccugaagcaguucaagcaggacgccaaguacagccacggcaucgacguggccgaccuguuccccgcccagcccggccugaccagcgccgugaucgaggcccugcccagaaacauggugcugaccugccagggcagcgacgacaucaagagacugcuggacagccagggcagaagagacaucaagcugaucgacaucgcccugagcaaggccgacagcagaagauucgagaacgccgugugggaccagugcaaggaccugugccacaugcacaccggcguggugguggagaagaagaagagaggcggcaaggaggagaucaccccccacugcgcccugauggacugcaucauguacgacgccgccgugagcggcggccugaacauccccgugcugagagccgugcugcccagagacaugguguucagaaccagcagccccaagguggugcugugaggacuagucccuguucccagagcccacuuuuuuuucuuuuuuugaaauaaaauagccugucuuucagaucucaaaggcucuuuucagagccaccaaaaaaaaaaaaaaaaaaaaaaaaaaaaaaaaaaaaaaaaaaaaaaaaaaaaaaaaaaaaaaaaaaaaaaaaaaaaaaaaaaaaaaaaaaaaaaaaaaaaa

SEQ ID NO: 18259 - RNA, 2045 nt, Artificial Sequence
  mRNA product Design a-1 (hSL-A100) comprising derived and/or modified sequence from LASV(LASV253-NIG-2011;Clade II)__AIT17671__SP-HsPLAT_NP(2-569) (opt4)
aggagagucccgcagucggcguccagcggcucugcuuguucgugugugugucguugcaggccuuauucaagcuuaccauggacgccaugaagagaggccugugcugcgugcugcugcugugcggcgccguguucgugagccccagcgccagcaaggaggugaagagcuuccuguggacccagagccugagaagagagcugagcggcuacugcagcagcaucaagcugcagguggugaaggacgcccaggcccugcugcacggccuggacuucagcgaggugagcaacgugcagagacugaugagaaagcagaagagagacgacagcgaccugaagagacugagagaccugaaccaggccgugaacaaccugguggagcugaagagcacccagcagaagagcgugcugagagugggcacccugaccagcgacgaccugcugacccuggccgccgaccuggagaagcugaagagcaaggugaucagaaccgagagaccccugagcagcggcguguacaugggcaaccugagcacccagcagcuggagcagagaagagcccugcugaacaugaucggcauggugggcggcgcccagggcacccagcccggcagagacggcguggugagagugugggacgugaagaaccccgaccugcugaacaaccaguucggcaccaugcccagccugacccuggccugccugaccaagcagggccagguggaccugaacgacguggugcuggcccugaccgaccugggccugaucuacaccgccaaguaccccaacagcagcgaccuggacagacugagccagagccaccccauccugaacaugguggacaccaagaagagcagccugaacaucagcggcuacaacuucagccugggcgccgccgugaaggccggcgccugcaugcuggacggcggcaacaugcuggagaccaucaaggugaccccccagaccauggacggcauccugaagagcauccugaaggugaagaagagccugggcauguucgugagcgacacccccggcgagagaaaccccuacgagaacauccuguacaagaucugccugagcggcgacggcuggcccuacaucgccagcagaaccagcaucgugggcagagccugggagaacaccaccguggaccuggagagcgacggcaagccccagaaggugggcaccgccggcagcaacaagagccugcagagcgccggcuuccccaccggccugaccuacagccagcugaugacccugaaggacagcaugaugcagcuggaccccagcgccaagaccuggaucgacaucgagggcagacccgaggaccccguggagaucgcccuguaccagcccaugagcggcugcuacauccacuucuucagagagcccaccgaccugaagcaguucaagcaggacgccaaguacagccacggcaucgacgugaccgaccuguuccccgcccagcccggccugaccagcgccgugaucgaggcccugcccagaaacauggugcugaccugccagggcagcgacgacaucaagagacugcuggacagccagggcagaagagacaucaagcugaucgacaucgcccugagcaaggccgacagcagaagauucgagaacgccgugugggaccagugcaaggaccugugccacaugcacaccggcguggugguggagaagaagaagagaggcggcaaggaggagaucaccccccacugcgcccugauggacugcaucauguacgacgccgccgugagcggcggccugaacauccccgugcugagagccgugcugcccagagacaugguguucagaaccagcagccccaagguggugcugugaggacuagucccuguucccagagcccacuuuuuuuucuuuuuuugaaauaaaauagccugucuuucagaucucaaaggcucuuuucagagccaccaaaaaaaaaaaaaaaaaaaaaaaaaaaaaaaaaaaaaaaaaaaaaaaaaaaaaaaaaaaaaaaaaaaaaaaaaaaaaaaaaaaaaaaaaaaaaaaaaaaaa

SEQ ID NO: 18260 - RNA, 2045 nt, Artificial Sequence
  mRNA product Design a-1 (hSL-A100) comprising derived and/or modified sequence from LASV(LASV254-NIG-2011;Clade II)__AIT17675__SP-HsPLAT_NP(2-569) (opt4)
aggagagucccgcagucggcguccagcggcucugcuuguucgugugugugucguugcaggccuuauucaagcuuaccauggacgccaugaagagaggccugugcugcgugcugcugcugugcggcgccguguucgugagccccagcgccagcaaggaggugaagagcuuccuguggacccagagccugagaagagagcugagcggcuacugcagcagcaucaagcugcagguggugaaggacgcccaggcccugcugcacggccuggacuucagcgaggugagcaacgugcagagacugaugagaaagcagaagagagacgacagcgaccugaagagacugagagaccugaaccaggccgugaacaaccugguggagcugaagagcacccagcagaagagcgugcugagagugggcacccugaccagcgacgaccugcugacccuggccgccgaccuggagaagcugaagagcaaggugaucagaaccgagagaccccugagcagcggcguguacaugggcaaccugagcacccagcagcuggagcagagaagagcccugcugaacaugaucggcauggugggcggcgcccagggcacccagcccggcagagacggcguggugagagugugggacgugaagaaccccgaccugcugaacaaccaguucggcaccaugcccagccugacccuggccugccugaccaagcagggccagguggaccugaacgacgccgugcuggcccugaccgaccugggccugaucuacaccgccaaguaccccaacagcagcgaccuggacagacugagccagagccaccccauccugaacaugguggacaccaagaagagcagccugaacaucagcggcuacaacuucagccugggcgccgccgugaaggccggcgccugcaugcuggacggcggcaacaugcuggagaccaucaaggugaccccccagaccauggacggcauccugaagagcauccugaaggugaagaagagccugggcauguucgugagcgacacccccggcgagagaaaccccuacgagaacauccuguacaagaucugccugagcggcgacggcuggcccuacaucgccagcagaaccagcaucgugggcagagccugggagaacaccaucguggaccuggagagcgacggcaagccccagaaggugggcaccgccggcagcaacaagagccugcagagcgccggcuuccccaccggccugaccuacagccagcugaugacccugaaggacagcaugaugcagcuggaccccagcgccaagaccuggaucgacaucgagggcagacccgaggaccccguggagaucgcccuguaccagcccaugagcggcugcuacauccacuucuucagagagcccaccgaccugaagcaguucaagcaggacgccaaguacagccacggcaucgacguggccgaccuguuccccgcccagcccggccugaccagcgccgugaucgaggcccugcccagaaacauggugcugaccugccagggcagcgacgacaucaagagacugcuggacagccagggcagaagagacaucaagcugaucgacaucgcccugagcaaggccgacagcagaagauucgagaacgccgugugggaccagugcaaggaccugugccacaugcacaccggcguggugguggagaagaagaagagaggcggcaaggaggagaucaccccccacugcgcccugauggacugcaucauguacgacgccgccgugagcggcggccugaacauccccgugcugagagccgugcugcccagagacaugguguucagaaccagcagccccaagguggugcugugaggacuagucccuguucccagagcccacuuuuuuuucuuuuuuugaaauaaaauagccugucuuucagaucucaaaggcucuuuucagagccaccaaaaaaaaaaaaaaaaaaaaaaaaaaaaaaaaaaaaaaaaaaaaaaaaaaaaaaaaaaaaaaaaaaaaaaaaaaaaaaaaaaaaaaaaaaaaaaaaaaaaa

SEQ ID NO: 18261 - RNA, 2045 nt, Artificial Sequence
  mRNA product Design a-1 (hSL-A100) comprising derived and/or modified sequence from LASV(Nig08-04;Clade II)__ADU56611__SP-HsPLAT_NP(2-569) (opt4)
aggagagucccgcagucggcguccagcggcucugcuuguucgugugugugucguugcaggccuuauucaagcuuaccauggacgccaugaagagaggccugugcugcgugcugcugcugugcggcgccguguucgugagccccagcgccagcaaggaggugaagagcuuccuguggacccagagccugagaagagagcugagcggcuacugcagcaacaucaagcugcagguggugaaggacgcccaggcccugcugcacggccuggacuucagcgaggugagcaacgugcagagacugaugagaaagcagaagagagacgacggcgaccugaagagacugagagaccugaaccaggccgugaacaaccugguggagcugaagagcacccagcagaagagcgugcugagagugggcacccugaccagcgacgaccugcugacccuggccgccgaccuggagaagcugaagagcaaggugaucagaaccgagagaccccugagcagcggcguguacaugggcaaccugagcacccagcagcuggagcagagaaaggcccugcugagcaugaucggcauggugggcggcgcccagggcacccagcccggcagagacggcguggugagagugugggacgugaagaaccccgaccugcugaacaaccaguucggcaccaugcccagccugacccuggccugccugaccaagcagggccagguggaccugaacgacgccgugcuggcccugaccgaccugggccugaucuacaccgccaaguaccccaacagcagcgaccuggacagacugagccagagccaccccauccugaacaugguggacaccaagaagagcagccugaacaucagcggcuacaacuucagccugggcgccgccgugaaggccggcgccugcaugcuggacggcggcaacaugcuggagaccaucaaggugaccccccagaccauggacggcauccugaagagcauccugaaggugaagagaagccugggcauguucgugagcgacacccccggcgagagaaaccccuacgagaacauccuguacaagaucugccugagcggcgacggcuggcccuacaucgccagcagaaccagcaucgugggcagagccugggagaacaccaccguggaccuggagagcgacggcaagccccagaaggugggcaccgccggcagcaacaagagccugcagagcgccggcuuccccaccggccugaccuacagccagcugaugacccugaaggacagcaugaugcagcuggaccccagcgccaagaccuggaucgacaucgagggcagacccgaggaccccguggagaucgcccuguaccagcccaugagcggcugcuacauccacuucuucagagagcccaccgaccugaagcaguucaagcaggacgccaaguacagccacggcaucgacgugaccgaccuguucagcgcccagcccggccugaccagcgccgugaucgaggcccugcccagaaacauggugcugaccugccagggcagcgacgacaucaagaagcugcuggacagccagggcagaagagacaucaagcugaucgacaucagccugaacaaggccgacagcagaagauucgagaacgccgugugggaccagugcaaggaccugugccacaugcacaccggcguggugguggagaagaagaagagaggcggcaaggaggagaucaccccccacugcgcccugauggacugcaucauguucgacgccgccgugagcggcggccugaacauccccauccugagagccgugcugcccagagacaugguguucagaaccagcagccccaagguggugcugugaggacuagucccuguucccagagcccacuuuuuuuucuuuuuuugaaauaaaauagccugucuuucagaucucaaaggcucuuuucagagccaccaaaaaaaaaaaaaaaaaaaaaaaaaaaaaaaaaaaaaaaaaaaaaaaaaaaaaaaaaaaaaaaaaaaaaaaaaaaaaaaaaaaaaaaaaaaaaaaaaaaaa

SEQ ID NO: 18262 - RNA, 2048 nt, Artificial Sequence
  mRNA product Design a-1 (hSL-A100) comprising derived and/or modified sequence from LASV(GA391;Clade III)__AAA46284__SP-HsPLAT_NP(2-570) (opt4)
aggagagucccgcagucggcguccagcggcucugcuuguucgugugugugucguugcaggccuuauucaagcuuaccauggacgccaugaagagaggccugugcugcgugcugcugcugugcggcgccguguucgugagccccagcgccagcaaggaggugagaagcugccuguggacccagagccugagaagagagcugagcggcuacugcagcaacaucaagcugcagguggugaaggacgcccaggcccugcugcacggccuggacuucagcgaggugagcaacgugcagagacugaugagaaagcagaagagagacgacggcgaccugaagagacugagagaccugaaccaggccgugaacaaccugguggagcugaagagcacccagcagaagagcgugcugagagugggcacccugagcagcgacgaccugcugauccuggccgccgaccuggagaagcugaagagcaaggugaccagaaccgagagaccccugagcagcggcguguacaugggcaaccugagcagccagcagcuggaccagagaagagcccugcugaacaugaucggcaugaccggcgugagcggcggcggcaagggcgccagcaacggcaucgugagagugugggacgugaagaacgccgagcugcugaacaaccaguucggcaccaugcccagccugacccuggccugccugaccaagcagggccagguggaccugaacgacgccgugcaggcccugaccgaccugggccugaucuacaccgccaaguaccccaacagcagcgaccuggacagacugagccagagccaccccauccugaacaugaucgacaccaagaagagcagccugaacaucagcggcuacaacuucagccugggcgccgccgugaaggccggcgccugcaugcuggacggcggcaacaugcuggagaccaucaaggugagcccccagaccauggacggcauccugaagagcauccugaaggugaagaagagccugggcauguucgugagcgacacccccggcgagagaaaccccuacgagaacauccuguacaagaucugccugagcggcgacggcuggagcuacaucgccagcagaaccagcaucgugggcagagccugggagaacaccgugguggaccuggagcaggacaacaagccccagaagaucggcaacggcggcagcaacaagagccugcagagcgccggcuucgccgccggccugaucuacagccagcugaugacccugaaggacuucaagugcuucaaccugauccccaacgccaagaccuggauggacaucgagggcagacccgaggaccccguggagaucgcccuguaccagcccagcagcggcugcuacgugcacuucuucagagagcccaccgaccugaagcaguucaagcaggacgccaaguacagccacggcagagacgugaccgaccuguucgccgcccagcccggccugaccagcgccgugaucgaggcccugcccagaaacauggugaucaccugccagggcagcgaggacaucagaaagcugcuggagagccagggcagaagagacaucaagcugaucgacaucacccugagcaaggccgacagcagaaaguucgagaacgccgugugggaccaguucaaggaccugugccacaugcacaccggcguggugguggagaagaagaagagaggcggcaaggaggagaucaccccccacugcgcccugauggacugcaucauguucgacgccgccgugagcggcggccuggacgccaaggugcugagaguggugcugcccagagacaugguguucagaaccagcacccccaagguggugcugugaggacuagucccuguucccagagcccacuuuuuuuucuuuuuuugaaauaaaauagccugucuuucagaucucaaaggcucuuuucagagccaccaaaaaaaaaaaaaaaaaaaaaaaaaaaaaaaaaaaaaaaaaaaaaaaaaaaaaaaaaaaaaaaaaaaaaaaaaaaaaaaaaaaaaaaaaaaaaaaaaaaaa

SEQ ID NO: 18263 - RNA, 2045 nt, Artificial Sequence
  mRNA product Design a-1 (hSL-A100) comprising derived and/or modified sequence from LASV(Nig08-A19;Clade III)__ADU56619__SP-HsPLAT_NP(2-569) (opt4)
aggagagucccgcagucggcguccagcggcucugcuuguucgugugugugucguugcaggccuuauucaagcuuaccauggacgccaugaagagaggccugugcugcgugcugcugcugugcggcgccguguucgugagccccagcgccagcaaggaggugaagagcuuccuguggacccagagccugagaagagagcugagcggcuacugcagcaacaucaagcugcagguggugaaggacgcccaggcccugcugcacggccuggacuucagcgaggugagcaacgugcagagacugaugagaaagcagaagagagacgacggcgaccugaagagacugagagaccugaaccaggccgugaacaaccugguggagcugaagagcacccagcagaagagcgugcugagagugggcacccugagcagcgacgaccugcuggugcuggccgccgaccuggagaagcugaagagcaagguggugagaaccgagagaccccugagcagcggcaucuacaugggcaaccugagcagccagcagcuggaccagagaaaggcccugcugaacaugaucggcaugaccggcggcaacggcggcagaaacaccaccagcgacggcaucgugagagugugggacgugaagaacgccgagcugcugaacaaccaguucggcaccaugcccagccugacccuggccugccugaccaagcagggccagguggaccugaacgacgccgugcaggcccugaccgaccugggccugaucuacaccgccaaguaccccaacagcagcgaccuggacagacuggcccagagccaccccauccugaacaugaucgacaccaagaagagcagccugaacaucagcggcuacaacuucagccugggcgccgccgugaaggccggcgccugcaugcuggacggcggcaacaugcuggagaccaucaaggugagcccccagaccauggacggcauccugaagagcauccugaaggugaagagaagccugggcauguucaucagcgacacccccggcgagagaaaccccuacgagaacauccuguacaagaucugccugagcggcgacggcuggcccuacaucgccagcagaaccagcaucgugggcagagccugggagaacaccgugguggaccuggagagcgacaacaagccccagaagaccggcaacggcggcagcaacaagagccugcagagcgccggcuucgccgccggccugaccuacagccagcugaugacccugaaggacagcaugcugcagcuggaccccaacgccaagaccuggauggacaucgagggcagacccgaggaccccguggagaucgcccuguaccagcccagcagcggcugcuacauccacuucuucagagagcccaccgaccugaagcaguucaagcaggacgccaaguacagccacggcaucgacgugaccgaccuguucgccgcccagcccggccugaccagcgccgugaucgaggcccugcccagaaacauggugaucaccugccagggcagcgaggacaucagaaagcugcuggagagccagggcagaagagacaucaagcugaucgacaucagccugagcaagguggacagcagaaaguucgagaacgccgugugggaccaguucaaggaccugugccacaugcacaccggcaucgugguggagaagaagaagagaggcggcaaggaggagaucaccccccacugcgcccugauggacugcaucauguucgacgccgccgugagcggcggcguggacgccaaggugcugagagccgugcugcccagagacaugguguucagaaccagcacccccaagguggugcugugaggacuagucccuguucccagagcccacuuuuuuuucuuuuuuugaaauaaaauagccugucuuucagaucucaaaggcucuuuucagagccaccaaaaaaaaaaaaaaaaaaaaaaaaaaaaaaaaaaaaaaaaaaaaaaaaaaaaaaaaaaaaaaaaaaaaaaaaaaaaaaaaaaaaaaaaaaaaaaaaaaaaa

SEQ ID NO: 18264 - RNA, 2045 nt, Artificial Sequence
  mRNA product Design a-1 (hSL-A100) comprising derived and/or modified sequence from LASV(G1180-SLE-2010;Clade IV)__AIT17169__SP-HsPLAT_NP(2-569) (opt4)
aggagagucccgcagucggcguccagcggcucugcuuguucgugugugugucguugcaggccuuauucaagcuuaccauggacgccaugaagagaggccugugcugcgugcugcugcugugcggcgccguguucgugagccccagcgccagcaaggagaucaagagcuuccuguggacccagagccugagaagagagcugagcggcuacugcagcaacaucaagcugcagguggugaaggacgcccaggcccugcugcacggccuggacuucagcgaggugagcaacgugcagagacugaugagaaaggagagaagagacgacaacgaccugaagagacugagagaccugaaccaggccgugaacaaccugguggagcugaagagcacccagcagaagagcauccugagagugggcacccugaccagcgacgaccugcugauccuggccgccgaccuggagaagcugaagagcaaggugaucagaaccgagagaccccugagcgccggcguguacaugggcaaccugagcagccagcagcuggaccagagaagagcccugcugagcaugaucggcaugagcagcggcaaccagagagcccaggccggcagagacggcguggugagagugugggacgugaagaacguggagcugcugaacaaccaguucggcaccaugcccagccugacccuggccugccugaccaagcagggccagguggaccugaacgacgccgugcaggcccugaccgaccugggccugaucuacaccgccaaguaccccaacaccagcgaccuggacagacugacccagagccaccccauccugaacaugaucgacaccaagaagagcagccugaacaucagcggcuacaacuucagccugggcgccgccgugaaggccggcgccugcaugcuggacggcggcaacaugcuggagaccaucaaggugagcccccagaccauggacggcauccugaagagcauccugaaggugaagaaggcccugggcauguucaucagcgacacccccggcgagagaaaccccuacgagaacauccuguacaagaucugccugagcggcgacggcuggcccuacaucgccagcagaaccagcaucaccggcagagccugggagaacaccgugguggaccuggagagcgacggcaagccccagaaggccggcagcaacaacagcaacaagagccugcagagcgugggcuucaccgccggccugaccuacagccagcugaugacccugaaggacgccaugcugcagcuggaccccaacgccaagaccuggauggacaucgagggcagacccgaggaccccguggagaucgcccuguaccagcccagcagcggcugcuacauccacuucuucagagagcccaccgaccugaagcaguucaagcaggacgccaaguacagccacggcaucgacgugaccgaccuguucgccgcccagcccggccugaccagcgccgugaucgacgcccugcccagaaacauggugaucaccugccagggcagcgacgacaucagaaagcugcuggagagccagggcagaaaggacaucaagcugaucgacaucgcccugagcaagaccgacagcagaaaguacgagaacgccgugugggaccaguacaaggaccugugccacaugcacaccggcguggugguggagaagaagaagagaggcggcaaggaggagaucaccccccacugcgcccugauggacugcaucauguucgacgccgccgugagcggcggccugaacaccagcgugcugagagccgugcugcccagagacaugguguucagaaccagcacccccagaguggugcugugaggacuagucccuguucccagagcccacuuuuuuuucuuuuuuugaaauaaaauagccugucuuucagaucucaaaggcucuuuucagagccaccaaaaaaaaaaaaaaaaaaaaaaaaaaaaaaaaaaaaaaaaaaaaaaaaaaaaaaaaaaaaaaaaaaaaaaaaaaaaaaaaaaaaaaaaaaaaaaaaaaaaa

SEQ ID NO: 18265 - RNA, 2045 nt, Artificial Sequence
  mRNA product Design a-1 (hSL-A100) comprising derived and/or modified sequence from LASV(G1442-SLE-2011;Clade IV)__AIT17181__SP-HsPLAT_NP(2-569) (opt4)
aggagagucccgcagucggcguccagcggcucugcuuguucgugugugugucguugcaggccuuauucaagcuuaccauggacgccaugaagagaggccugugcugcgugcugcugcugugcggcgccguguucgugagccccagcgccagcaaggaggugaagagcuuccuguggacccagagccugagaagagagcugagcggcuacugcagcaacaucaagcugcagguggugaaggacgcccaggcccugcugcacggccuggacuucagcgaggugagcaacgugcagagacugaugagaaagcagagaagagacgacaacgaccugaagagacugagagaccugaaccaggccgugaacaaccugguggagcugaagagcacccagcagaagagcgugcugagagugggcacccugaccagcgacgaccugcuggugcuggccgccgaccuggagaagcugaagagcaaggugaucagaaccgagagaccccugagcgccggcguguacaugggcaaccugagcagccagcagcuggaccagagaagagcccugcugaacaugaucggcaugagcggcggcauccagggcaccagaaccggcagagacggcguggugagagugugggacgugaagaacgccgaccugcugaacaaccaguucggcaccaugcccagccugacccuggccugccugaccaagcagggccagguggaccugaacgacguggugcaggcccugaccgaccugggccugaucuacaccgccaaguaccccaacgccagcgaccuggacagacugacccagagccaccccauccugaacaugaucgacaccaagaagagcagccugaacaucagcggcuacaacuucagccugggcgccgccgugaaggccggcgccugcaugcuggacggcggcaacaugcuggagaccaucaaggugagcccccagaccauggacggcauccugaagagcauccugaaggugaagaagacccugggcauguucaucagcgacacccccggcgagagaaaccccuacgagaacauccuguacaagaucugccugagcggcgacggcuggcccuacaucgccagcagaaccagcaucaccggcagagccugggagaacaccgugguggaccuggagagcgacggcaagccccagaaggccggcagcaacaacagcaacaagagccugcagagcgccggcuucgccgccggccugaccuacagccagcugaugacccugaaggacgccaugcugcagcuggaccccaacgccaagaccuggauggacaucgagggcagacccgaggaccccguggagaucgcccuguaccagcccagcagcggcugcuacauccacuucuucagagagcccaccgaccugaagcaguucaagcaggacgccaaguacagccacggcaucgacgugaccgaccuguucgccgcccagcccggccugaccagcgccgugaucgaggcccugcccagaaacauggugaucaccugccagggcagcgacgacaucaagaagcugcuggagagccagggcagaaaggacaucaagcugaucgacaucgcccugagcaagaccgacagcagaaaguacgagaacgccgugugggaccaguacaaggaccugugccacaugcacaccggcguggugguggagaagaagaagagaggcggcaaggaggagaucaccccccacugcgcccugauggacugcaucauguucgacgccgccgugagcggcggccugaacacccuggugcugagagccgugcugcccagagacaugguguucagaaccagcacccccagaguggugcugugaggacuagucccuguucccagagcccacuuuuuuuucuuuuuuugaaauaaaauagccugucuuucagaucucaaaggcucuuuucagagccaccaaaaaaaaaaaaaaaaaaaaaaaaaaaaaaaaaaaaaaaaaaaaaaaaaaaaaaaaaaaaaaaaaaaaaaaaaaaaaaaaaaaaaaaaaaaaaaaaaaaaa

SEQ ID NO: 18266 - RNA, 2045 nt, Artificial Sequence
  mRNA product Design a-1 (hSL-A100) comprising derived and/or modified sequence from LASV(G3010-SLE-2013;Clade IV)__AIT17345__SP-HsPLAT_NP(2-569) (opt4)
aggagagucccgcagucggcguccagcggcucugcuuguucgugugugugucguugcaggccuuauucaagcuuaccauggacgccaugaagagaggccugugcugcgugcugcugcugugcggcgccguguucgugagccccagcgccagcaaggagaucaagagcuuccuguggacccagagccugagaagagagcugagcggcuacugcagcaacaucaagcugcagguggugaaggacgcccaggcccugcugcacggccuggacuucagcgaggugagcaacgugcagagacugaugagaaaggagagaagagacgacaacgaccugaagagacugagagaccugaaccaggccgugaacaaccugguggagcugaagagcacccagcagaagagcauccugagagugggcacccugaccagcgacgaccugcugauccuggccgccgaccuggagaagcugaagagcaaggugaccagaaccgagagaccccugagcgccggcguguacaugggcaaccugagcagccagcagcuggaccagagaagagcccugcugagcaugaucggcaugagcagcggcgugcagggcgccagagccggcagagacggcguggugagagugugggacgugaagaacgccgagcugcugaacaaccaguucggcaccaugcccagccugacccuggccugccugaccaagcagggccagguggaccugaacgacguggugcaggcccugaccgaccugggccugaucuacaccgccaaguaccccaacaccagcgaccuggacagacugacccagagccaccccauccugaacaugaucgacaccaagaagagcagccugaacaucagcggcuacaacuucagccugggcgccgccgugaaggccggcgccugcaugcuggacggcggcaacaugcuggagaccaucaaggugagcccccagaccauggacggcauccugaagagcauccugaaggugaagaaggcccugggcauguucaucagcgagacccccggcgagagaaaccccuacgagaacauccuguacaagaucugccugagcggcgacggcuggcccuacaucgccagcagaaccagcaucaccggcagagccugggagaacaccgugguggaccuggagagcgacggcaagccccagaaggccggcagcaacaacagcaacaagagccugcagagcgccggcuucaccgccggccugaccuacagccagcugaugacccugaaggacgccaugcugcagcuggaccccaacgccaagaccuggauggacaucgagggcagacccgaggaccccguggagguggcccuguaccagcccagcagcggcugcuacauccacuucuucagagagcccaccgaccugaagcaguucaagcaggacgccaaguacagccacggcaucgacgugaccgaccuguucgccgcccagcccggccugaccagcgccgugaucgacgcccugcccagaaacauggugaucaccugccagggcagcgacgacaucaagaagcugcuggagagccagggcagaaaggacaucaagcugaucgacaucgcccugagcaagaccgacagcagaaaguacgagaacgccgugugggaccaguacaaggaccugugccacaugcacaccggcguggugguggagaagaagaagagaggcggcaaggaggagaucaccccccacugcgcccugauggacugcaucauguucgacgccgccgugagcggcggccugaacaccagcgugcugagagccgugcugcccagagacaugguguucagaaccagcacccccagaguggugcugugaggacuagucccuguucccagagcccacuuuuuuuucuuuuuuugaaauaaaauagccugucuuucagaucucaaaggcucuuuucagagccaccaaaaaaaaaaaaaaaaaaaaaaaaaaaaaaaaaaaaaaaaaaaaaaaaaaaaaaaaaaaaaaaaaaaaaaaaaaaaaaaaaaaaaaaaaaaaaaaaaaaaa

SEQ ID NO: 18267 - RNA, 2045 nt, Artificial Sequence
  mRNA product Design a-1 (hSL-A100) comprising derived and/or modified sequence from LASV(G502-SLE-2009;Clade IV)__AIT17127__SP-HsPLAT_NP(2-569) (opt4)
aggagagucccgcagucggcguccagcggcucugcuuguucgugugugugucguugcaggccuuauucaagcuuaccauggacgccaugaagagaggccugugcugcgugcugcugcugugcggcgccguguucgugagccccagcgccagcaaggagaucaagagcuuccuguggacccagagccugagaagagagcugagcggcuacugcagcaacaucaagcugcagguggugaaggacgcccaggcccugcugcacggccuggacuucagcgaggugagcaacgugcagagacugaugagaaaggagagaagagacgacaacgaccugaagagacugagagaccugaaccaggccgugaacaaccugguggagcugaagagcacccagcagaagagcauccugagagugggcacccugaccagcgacgaccugcugauccuggccgccgaccuggagaagcugaagagcaaggugaucagaaccgagagaccccugagcgccggcguguacaugggcaaccugagcagccagcagcuggaccagagaagagcccugcugagcaugaucggcaugagcggcggcaaccagggcgugagagccggcaaggacggcguggugagagugugggacgugaagaacgccgagcugcugaacaaccaguucggcaccaugcccagccugacccuggccugccugaccaagcagggccagguggaccugaacgacgccgugcaggcccugaccgaccugggccugaucuacaccgccaaguaccccaacaccagcgaccuggacagacugacccagagccaccccauccugaacaugaucgacaccaagaagagcagccugaacaucagcggcuacaacuucagccugggcgccgccgugaaggccggcgccugcaugcuggacggcggcaacaugcuggagaccaucaaggugagcccccagaccauggacggcauccugaagagcauccugaaggugaagaaggcccugggcauguucaucagcgacacccccggcgagagaaaccccuacgagaacauccuguacaagaucugccugagcggcgacggcuggcccuacaucgccagcagaaccagcaucaccggcagagccugggagaacaccgugguggaccuggagagcgacggcaagccccagaaggccggcagcaacaacagcaacaagagccugcagagcgccggcuucaccgccggccugaccuacagccagcugaugacccugaaggacgccaugcugcagcuggaccccaacaccaagaccuggauggacaucgagggcagacccgaggaccccguggagaucgcccuguaccagcccagcagcggcugcuacauccacuucuucagagagcccaccgaccugaagcaguucaagcaggacgccaaguacagccacggcaucgacgugaccgaccuguucgccgcccagcccggccugaccagcgccgugaucgacgcccugcccagaaacauggugaucaccugccagggcagcgacgacaucagaaagcugcuggagagccagggcagaaaggacaucaagcugaucgacaucgcccugaacaagaccgacagcagaaaguacgagaacgccgugugggaccaguacaaggaccugugccacaugcacaccggcguggugguggagaagaagaagagaggcggcaaggaggagaucaccccccacugcgcccugauggacugcaucauguucgacgccgccgugagcggcggccugaacaccagcgugcugagagccgugcugcccagagacaugguguucagaaccagcacccccagaguggugcugugaggacuagucccuguucccagagcccacuuuuuuuucuuuuuuugaaauaaaauagccugucuuucagaucucaaaggcucuuuucagagccaccaaaaaaaaaaaaaaaaaaaaaaaaaaaaaaaaaaaaaaaaaaaaaaaaaaaaaaaaaaaaaaaaaaaaaaaaaaaaaaaaaaaaaaaaaaaaaaaaaaaaa

SEQ ID NO: 18268 - RNA, 2045 nt, Artificial Sequence
  mRNA product Design a-1 (hSL-A100) comprising derived and/or modified sequence from LASV(G733-SLE-2010;Clade IV)__AIT17155__SP-HsPLAT_NP(2-569) (opt4)
aggagagucccgcagucggcguccagcggcucugcuuguucgugugugugucguugcaggccuuauucaagcuuaccauggacgccaugaagagaggccugugcugcgugcugcugcugugcggcgccguguucgugagccccagcgccagcaaggagaucaagagcuuccuguggacccagagccugagaagagagcugagcggcuacugcagcaacaucaagcugcagguggugaaggacgcccaggcccugcugcacggccuggacuucagcgaggugagcaacgugcagagacugaugagaaaggagagaagagacgacaacgaccugaagagacugagagaccugaaccaggccgugaacaaccugguggagcugaagagcacccagcagaagagcgugcugagagugggcacccugaccagcgacgagcugcuggugcuggccgccgaccuggagaagcugaagagcaaggugaucagaaccgagagaccccugagcgccggcguguacaugggcaaccugagcagccagcagcuggaccagagaagagcccugcugagcaugaucggcaugagcggcggcaaccagggcgccagaaccggcagagacggcguggugagagugugggacgugaagaacgccgagcugcugaacaaccaguucggcaccaugcccagccugacccuggccugccugaccaagcagggccagguggaccugaacgacgccgugcaggcccugaccgaccugggccugaucuacaccgccaaguaccccaacaccagcgaccuggacagacugacccagagccaccccauccugaacaugaucgacaccaagaagagcagccugaacaucagcggcuacaacuucagccugggcgccgccgugaaggccggcgccugcaugcuggacggcggcaacaugcuggagaccaucaaggugagcccccagaccauggacggcauccugaagagcauccugaaggugaagaaggcccugggcauguucaucagcgacacccccggcgagagaaaccccuacgagaacauccuguacaagaucugccugagcggcgacggcuggcccuacaucgccagcagaaccagcaucaccggcagagccugggagaacaccgugguggaccuggagagcgacggcaagccccagaaggccggcagcaacaacagcaacaagagccugcagagcgccggcuucaccgccggccugaccuacagccagcugaugacccugaaggacgccaugcugcagcuggaccccaacgccaagaccuggauggacaucgagggcagacccgaggaccccguggagaucgcccuguaccagcccagcagcggcugcuacauccacuucuucagagagcccaccgaccugaagcaguucaagcaggacgccaaguacagccacggcaucgacgugaccgaccuguucgccgcccagcccggccugaccagcgccgugaucgacgcccugcccagaaacauggugaucaccugccagggcagcgacgacaucagaaagcugcuggagagccagggcagaaaggacaucaagcugaucgacaucgcccugagcaagaucgacagcagaaaguacgagaacgccgugugggaccaguacaaggaccugugccacaugcacaccggcguggugguggagaagaagaagagaggcggcaaggaggagaucaccccccacugcgcccugauggacugcaucauguucgacgccgccgugagcggcggccugaacagccuggugcugagagccgugcugcccagagacaugguguucagaaccagcacccccagaguggugcugugaggacuagucccuguucccagagcccacuuuuuuuucuuuuuuugaaauaaaauagccugucuuucagaucucaaaggcucuuuucagagccaccaaaaaaaaaaaaaaaaaaaaaaaaaaaaaaaaaaaaaaaaaaaaaaaaaaaaaaaaaaaaaaaaaaaaaaaaaaaaaaaaaaaaaaaaaaaaaaaaaaaaa

SEQ ID NO: 18269 - RNA, 2045 nt, Artificial Sequence
  mRNA product Design a-1 (hSL-A100) comprising derived and/or modified sequence from MOPV/LASV reassortant(IGS-1;Clade IV)__AFY05578__SP-HsPLAT_NP(2-569) (opt4)
aggagagucccgcagucggcguccagcggcucugcuuguucgugugugugucguugcaggccuuauucaagcuuaccauggacgccaugaagagaggccugugcugcgugcugcugcugugcggcgccguguucgugagccccagcgccagcaaggagaucaagagcuuccuguggacccagagccugagaagagagcugagcggcuacugcagcaacaucaagcugcagguggugaaggacgcccaggcccugcugcacggccuggacuucagcgaggugagcaacgugcagagacugaugagaaaggagagaagagacgacaacgaccugaagagacugagagaccugaaccaggccgugaacaaccugguggagcugaagagcacccagcagaagagcauccugagagugggcacccugaccagcgacgaccugcugauccuggccgccgaccuggagaagcugagaagcaaggugaucagaaccgagagaccccugagcgccggcguguacaugggcaaccugagcagccagcagcuggaccagagaagagcccugcugaacaugaucggcaugagcggcggcaaccagggcgccagagccggcagagacggcguggugagagugugggacgugaagaacgccgagcugcugagcaaccaguucggcaccaugcccagccugacccuggccugccugaccaagcagggccagguggaccugaacgacgccgugcaggcccugaccgaccugggccugaucuacaccgccaaguaccccaacaccagcgaccuggacagacugacccagagccaccccauccugaacaugaucgacaccaagaagagcagccugaacaucagcggcuacaacuucagccugggcgccgccgugaaggccggcgccugcaugcuggacggcggcaacaugcuggagaccaucaaggugagcccccagaccauggacggcauccugaagagcauccugaaggugaagaaggcccugggcauguucaucagcgacacccccggcgagagaaaccccuacgagaacauccuguacaagaucugccugagcggcgacggcuggcccuacaucgccagcagaaccagcaucaccggcagagccugggagaacaccgugguggaccuggagagcgacggcaagccccagaaggccgacagcaacaacagcagcaagagccugcagagcgccggcuucaccgccggccugaccuacagccagcugaugacccugaaggacgccaugcugcagcuggaccccaacgccaagaccuggauggacaucgagggcagacccgaggaccccguggagaucgcccuguaccagcccagcagcggcugcuacauccacuucuucagagagcccaccgaccugaagcaguucaagcaggacgccaaguacagccacggcaucgacgugaccgaccuguucgccacccagcccggccugaccagcgccgugaucgacgcccugcccagaaacauggugaucaccugccagggcagcgacgacaucagaaagcugcuggagagccagggcagaaaggacaucaagcugaucgacaucgaccugagcaagaccgacagcagaaaguacgagaacgccgugugggaccaguacaaggaccugugccacaugcacaccggcguggugguggagaagaagaagagaggcggcaaggaggagaucaccccccacugcgcccugauggacugcaucauguucgacgccgccgugagcggcggccugaacaccagcgugcugagagccgugcugcccagagacaugguguucagaaccagcacccccagaguggugcugugaggacuagucccuguucccagagcccacuuuuuuuucuuuuuuugaaauaaaauagccugucuuucagaucucaaaggcucuuuucagagccaccaaaaaaaaaaaaaaaaaaaaaaaaaaaaaaaaaaaaaaaaaaaaaaaaaaaaaaaaaaaaaaaaaaaaaaaaaaaaaaaaaaaaaaaaaaaaaaaaaaaaa

SEQ ID NO: 18270 - RNA, 2045 nt, Artificial Sequence
  mRNA product Design a-1 (hSL-A100) comprising derived and/or modified sequence from LASV(LM765-SLE-2012;Clade IV)__AIT17815__SP-HsPLAT_NP(2-569) (opt4)
aggagagucccgcagucggcguccagcggcucugcuuguucgugugugugucguugcaggccuuauucaagcuuaccauggacgccaugaagagaggccugugcugcgugcugcugcugugcggcgccguguucgugagccccagcgccagcaaggagaucaagagcuuccuguggacccagagccugagaagagagcugagcggcuacugcagcaacaucaagcugcagguggugaaggacgcccaggcccugcugcacggccuggacuucagcgaggugagcaacgugcagagacugaugagaaaggagagaagagacgacaacgaccugaagagacugagagaccugaaccaggccgugaacaaccugguggagcugaagagcacccagcagaagagcauccugagagugggcacccugaccagcgacgaccugcugauccuggccgccgaccuggagaagcugaagagcaaggugaccagaaccgagagaccccugagcgccggcguguacaugggcaaccugagcagccagcagcuggaccagagaagagcccugcuggacaugaucggcaugagcggcagcaaccagggcgccagagccggcagagacggcguggugagagugugggacgugaagaacgccgagcugcugaacaaccaguucggcaccaugcccagccugacccuggccugccugaccaagcagggccagguggaccugaacgacgccgugcaggcccugaccgaccugggccugaucuacaccgccaaguaccccaacaccagcgaccuggacagacugacccagagccaccccauccugaacaugaucgacaccaagaagagcagccugaacaucagcggcuacaacuucagccugggcgccgccgugaaggccggcgccugcaugcuggacggcggcaacaugcuggagaccaucaaggugagcccccagaccauggacggcauccugaagagcauccugaaggugaagaaggcccugggcauguucaucagcgacgcccccggcgagagaaaccccuacgagaacauccuguacaagaucugccugagcggcgacggcuggcccuacaucgccagcagaaccagcaucaccggcagagccugggagaacaccgugguggaccuggagagcgacggcaagccccagaaggccggcagcaacggcagcaacaagagccugcagagcgccggcuucaccgccggccugaccuacagccagcugaugacccugaaggacgccaugcugcagcuggaccccaacgccaagaccuggauggacaucgagggcagacccgaggaccccguggagaucgcccuguaccagcccagcagcggcugcuacauccacuucuucagagagcccaccgaccugaagcaguucaagcaggacgccaaguacagccacggcaucgacgugaccgaccuguucgccgcccagcccggccugaccagcgccgugaucgacgcccugcccagaaacauggugaucaccugccagggcagcgacgacaucagaaagcuguucgagagccagggcagaaaggacaucaagcugaucgacaucgcccugagcaagaccgacagcagaaaguacgagaacgccgugugggaccaguacaaggaccugugccacaugcacaccggcaucgugguggagaagaagaagagaggcggcaaggaggagaucaccccccacugcgcccugauggacugcaucauguucgacgccgccgugagcggcggccugaacaccagcgugcugagagccgugcugcccagagacaugguguucagaaccagcacccccagaguggugcugugaggacuagucccuguucccagagcccacuuuuuuuucuuuuuuugaaauaaaauagccugucuuucagaucucaaaggcucuuuucagagccaccaaaaaaaaaaaaaaaaaaaaaaaaaaaaaaaaaaaaaaaaaaaaaaaaaaaaaaaaaaaaaaaaaaaaaaaaaaaaaaaaaaaaaaaaaaaaaaaaaaaaa

SEQ ID NO: 18271 - RNA, 2045 nt, Artificial Sequence
  mRNA product Design a-1 (hSL-A100) comprising derived and/or modified sequence from LASV(LM776-SLE-2012;Clade IV)__AIT17825__SP-HsPLAT_NP(2-569) (opt4)
aggagagucccgcagucggcguccagcggcucugcuuguucgugugugugucguugcaggccuuauucaagcuuaccauggacgccaugaagagaggccugugcugcgugcugcugcugugcggcgccguguucgugagccccagcgccagcaaggagaucaagagcuuccuguggacccagagccugagaagagagcugagcagcuacugcagcaacaucaagcugcagguggugaaggacgcccaggcccugcugcacggccuggacuucagcgaggugagcaacgugcagagacugaugagaaaggagagaagagacgacaacgaccugaagagacugagagaccugaaccaggccgugaacaaccugguggagcugaagagcacccagcagaagagcauccugagagugggcacccugaccagcgacgaccugcugauccuggccgccgaccuggagaagcugaagagcaaggugaccagaaccgagagaccccugagcgccggcguguacaugggcaaccugagcagccagcagcuggaccagagaagagcccugcugagcaugaucggcaugagcggcagcaaccagggcgccagagccggcagagacggcguggugagagugugggacgugaagaacgccgagcugcugaacaaccaguucggcaccaugcccagccugacccuggccugccugaccaagcagggccagguggaccugaacgacgccgugcaggcccugaccgaccugggccugaucuacaccgccaaguaccccaacaccagcgaccuggacagacugacccagagccaccccauccugaacaugaucgacaccaagaagagcagccugaacaucagcggcuacaacuucagccugggcgccgccgugaaggccggcgccugcaugcuggacggcggcaacaugcuggagaccaucaaggugagcccccagaccauggacggcauccugaagagcauccugaaggugaagaaggcccugggcauguucaucagcgacacccccggcgagagaaaccccuacgagaacauccuguacaagaucugccugagcggcgacggcuggcccuacaucgccagcagaaccagcaucaccggcagagccugggagaacaccgugguggaccuggagagcgacggcaagccccagaaggccggcagcaacaacagcaacaagagccugcagagcgccggcuucaccgccggccugaccuacagccagcugaugacccugaaggacgccaugcugcagcuggaccccaacgccaagaccuggauggacaucgagggcagacccgaggaccccguggagguggcccuguaccagcccagcagcggcugcuacauccacuucuucagagagcccaccgaccugaagcaguucaagcaggacgccaaguacagccacggcaucgacgugaccgaccuguucgccgcccagcccggccugaccagcgccgugaucgacgcccugcccagaaacauggugaucaccugccagggcagcgacgacaucagaaagcugcuggagagccagggcagaaaggacaucaagcugaucgacaucgcccugagcaagaccgacagcagaaaguacgagaacgccgugugggaccaguacaaggaccugugccacaugcacaccggcguggugguggagaagaagaagagaggcggcaaggaggagaucaccccccacugcgcccugauggacugcaucauguucgacgccgccgugagcggcggccugaacaccagcgugcugagagccgugcugcccagagacaugguguucagaaccagcacccccagaguggugcugugaggacuagucccuguucccagagcccacuuuuuuuucuuuuuuugaaauaaaauagccugucuuucagaucucaaaggcucuuuucagagccaccaaaaaaaaaaaaaaaaaaaaaaaaaaaaaaaaaaaaaaaaaaaaaaaaaaaaaaaaaaaaaaaaaaaaaaaaaaaaaaaaaaaaaaaaaaaaaaaaaaaaa

SEQ ID NO: 18272 - RNA, 2045 nt, Artificial Sequence
  mRNA product Design a-1 (hSL-A100) comprising derived and/or modified sequence from LASV(Mad39;Clade IV)__ANH09723__SP-HsPLAT_NP(2-569) (opt4)
aggagagucccgcagucggcguccagcggcucugcuuguucgugugugugucguugcaggccuuauucaagcuuaccauggacgccaugaagagaggccugugcugcgugcugcugcugugcggcgccguguucgugagccccagcgccagcaaggagaucaagagcuuccuguggacccagagccugagaagagagcugagcggcuacugcagcaacaucaagcugcagguggugaaggacgcccaggcccugcugcacggccuggacuucagcgaggugagcaacgugcagagacugaugagaaagcagagaagagacgacaacgaccugaagagacugagagaccugaaccaggccgugaacaaccugguggagcugaagagcacccagcagaagagcgugcugagagugggcacccugaccagcgacgaccugcugacccuggccgccgaccuggagaagcugaagagcaaggugaccagaaccgagagaccccugaccgccggcguguacaugggcaaccugagcagccagcagcuggaccagagaagagcccugcugaacaugaucggcaugagcggcggcaaccagggcgccagaaccggcagagacggcguggugagagugugggacgugaagaacgccgagcugcugaacaaccaguucggcaccaugcccagccugacccuggccugccugaccaagcagggccagguggaccugaacgacguggugcaggcccugaccgaccugggccugaucuacaccgccaaguaccccaacaccagcgaccuggacagacugacccagagccaccccauccugaacaugaucgacaccaacaagagcagccugaacaucagcggcuacaacuucagccugggcgccgccgugaaggccggcgccugcaugcuggacggcggcaacaugcuggagaccaucaaggugagcccccagaccauggacggcauccugaagagcauccugaaggugaagaagagccugggcauguucaucagcgacacccccggcgagagaaaccccuacgagaacauccuguacaagaucugccugagcggcgacggcuggcccuacaucgccagcagaaccagcaucaccggcagagccugggagaacaccgugguggaccuggagagcggcggcaagccccagaaggccggcagcaacaacagcaacaagagccugcagagcgccggcuucgccgccggccugaccuacagccagcugaugacccugaaggacgccaugcugcagcuggaccccaacgccaagaccuggauggacaucgagggcagacccgaggaccccguggagaucgcccuguaccagcccaucagcggcugcuacauccacuucuucagagagcccaccgaccugaagcaguucaagcaggacgccaaguacagccacggcaucgacgugaccgaccuguucgccgcccagcccggccugaccagcgccgugaucgaggcccugcccagaaacauggugaucaccugccagggcagcgacgacaucagaaagcuguucgagagccagggcagaaaggacaucaagcugaucgacaucgcccugagcaagaccgacagcagaaaguacgagaacgccgugugggaccaguacaaggaccugugccacaugcacaccggcguggugguggagaagaagaagaagggcggcaaggaggagaucaccccccacugcgcccugauggacugcaucauguucgacgccgccgugagcggcggccugaacacccuggugcugagagccgugcugcccagagacaugguguucagaaccagcacccccaagguggugcugugaggacuagucccuguucccagagcccacuuuuuuuucuuuuuuugaaauaaaauagccugucuuucagaucucaaaggcucuuuucagagccaccaaaaaaaaaaaaaaaaaaaaaaaaaaaaaaaaaaaaaaaaaaaaaaaaaaaaaaaaaaaaaaaaaaaaaaaaaaaaaaaaaaaaaaaaaaaaaaaaaaaaa

SEQ ID NO: 18273 - RNA, 2045 nt, Artificial Sequence
  mRNA product Design a-1 (hSL-A100) comprising derived and/or modified sequence from LASV(Z0947-SLE-2011;Clade IV)__AIT17841__SP-HsPLAT_NP(2-569) (opt4)
aggagagucccgcagucggcguccagcggcucugcuuguucgugugugugucguugcaggccuuauucaagcuuaccauggacgccaugaagagaggccugugcugcgugcugcugcugugcggcgccguguucgugagccccagcgccagcaaggagaucaagagcuuccuguggacccagagccugagaagagagcugagcggcuacugcagcaacaucaagcugcagguggugaaggacgcccaggcccugcugcacggccuggacuucagcgaggugagcaacgugcagagacugaugagaaaggagagaagagacgacaacgaccugaagagacugagagaccugaaccaggccgugaacaaccugguggagcugaagagcacccagcagaagagcauccugagagugggcacccugaccagcgacgaccugcugauccuggccgccgaccuggagaagcugaagagcaaggugaccagaaccgagagaccccugagcgccggcguguacaugggcaaccugagcagccagcagcuggaccagagaagagcccugcugaacaugaucggcaugagcggcagcaaccagggcgccagaaccggcagagacggcguggugagagugugggacgugaagaacgccgagcugcugaacaaccaguucggcaccaugcccagccugacccuggccugccugaccaagcagggccagguggaccugaacgacgccgugcaggcccugaccgaccugggccugaucuacaccgccaaguaccccaacaccagcgaccuggacagacugacccagagccaccccauccugaacaugaucgacaccaagaagagcagccugaacaucagcggcuacaacuucagccugggcgccgccgugaaggccggcgccugcaugcuggacggcggcaacaugcuggagaccaucaaggugagcccccagaccauggacggcauccugaagagcauccugaaggugaagaaggcccugggcauguucaucagcgacgcccccggcgagagaaaccccuacgagaacauccuguacaagaucugccugagcggcgacggcuggcccuacaucgccagcagaaccagcaucaccggcagagccugggagaacaccgugguggaccuggagagcgacggcaagccccagaaggccggcagcaacggcagcaacaagagccugcagagcgccggcuucaccgccggccugaccuacagccagcugaugacccugaaggacgccaugcugcagcuggaccccaacgccaagaccuggauggacaucgagggcagacccgaggaccccguggagaucgcccuguaccagcccagcagcggcugcuacauccacuucuucagagagcccaccgaccugaagcaguucaagcaggacgccaaguacagccacggcaucgacgugaccgaccuguucgccgcccagcccggccugaccagcgccgugaucgacgcccugcccagaaacauggugaucaccugccagggcagcgacgacaucagaaagcuguucgagagccagggcagaaaggacaucaagcugaucgacaucgcccugagcaagaccgacagcagaaaguacgagaacgccgugugggaccaguacaaggaccugugccacaugcacaccggcaucgugguggagaagaagaagagaggcggcaaggaggagaucaccccccacugcgcccugauggacugcaucauguucgacgccgccgugagcggcggccugaacaccagcgugcugagagccgugcugcccagagacaugguguucagaaccagcacccccagaguggugcugugaggacuagucccuguucccagagcccacuuuuuuuucuuuuuuugaaauaaaauagccugucuuucagaucucaaaggcucuuuucagagccaccaaaaaaaaaaaaaaaaaaaaaaaaaaaaaaaaaaaaaaaaaaaaaaaaaaaaaaaaaaaaaaaaaaaaaaaaaaaaaaaaaaaaaaaaaaaaaaaaaaaaa

SEQ ID NO: 18274 - RNA, 2045 nt, Artificial Sequence
  mRNA product Design a-1 (hSL-A100) comprising derived and/or modified sequence from LASV(Josiah;Clade IV)__NP_694869__SP-HsPLAT_NP(2-569) (opt5)
aggagagucccgcagucggcguccagcggcucugcuuguucgugugugugucguugcaggccuuauucaagcuuaccauggacgccaugaagagaggccugugcugugugcuccugcuuugcggggcugucuucguuagccccagcgccuccaaggagaucaaaucuuuccuguggacccagagccucagacgggaacuguccggcuacugcucuaacauuaagcugcaaguggucaaagacgcucaggcccugcuccacgggcuggauuuuagcgagguuuccaaugugcagcgccuuaugagaaaggaacggcgcgacgauaacgaccugaaaagacuccgggaucugaaucaggcggugaacaaucuggucgagcucaagucuacacaacaaaagagcauccugcgcgugggaacgcuuaccuccgacgaucugcucauucuggcugccgaccuugaaaaacuuaagagcaaaguuaucagaacagagcggccccucucugccggcguguauauggggaaccuguccagccagcagcuggaucagcgcagagcucuccugaauaugauuggaaugucuggcgggaaccagggagcccgggcuggccgcgacggcgucgugagaguuugggaugugaagaaugccgagcuucugaacaaucaguucgggaccaugccuucccucacacuggcgugucuuaccaaacagggacaagucgaccugaacgaugccgugcaggcucucacagaccugggccugaucuacaccgccaaguauccgaauacgagcgaccucgaucggcugacccagucucaucccauccuuaacaugauugacacaaagaaauccagccugaauaucuccggguacaacuuuucucucggagcugccgugaaggcgggcgccugcaugcuggaugggggaaacaugcuugaaaccauuaaagucagcccucaaacaauggacggcauccugaaguccauucucaaaguuaagaaagcucugggcauguucaucagcgauacccccggggagcgcaauccuuaugaaaacauucuguacaagaucugucucucuggagacggcuggcccuauaucgccuccagaacgagcauuacagggcgggcuugggagaauaccgugguggaucuggagucugacggaaagccucagaaagccgauagcaacaauuccucuaagagccuucaguccgccggcuuuacagcugggcugaccuacagccagcucaugacccugaaagacgcgaugcugcaacuugauccgaacgccaagacauggauggacaucgaaggaagacccgaggacccugucgaaauugcucucuaccagcccucuuccggcugcuauauccacuucuuucgcgagccuacggaucugaaacaguucaagcaggacgccaaguacagccauggcauugaugugaccgaccuguuugccacacaacccgggcucaccucugcuguuaucgaugcccugccgcggaauauggugaucacaugucagggauccgacgauauuagaaaacuucuggaaagccagggccgcaaggacaucaaacucauugauaucgcgcuguccaagaccgacucucggaaauaugagaacgcugucugggaucaguacaaggaccugugccacaugcauacgggggugguuguggagaagaaaaagagaggaggcaaagaagagauuacaccucacugugcccuuauggauugcaucauguucgacgccgcugucagcgggggccucaauaccuccgugcugcgcgccguccugccccgggacaugguguuuagaaccucuacaccucgcguugugcucugaggacuagucccuguucccagagcccacuuuuuuuucuuuuuuugaaauaaaauagccugucuuucagaucucaaaggcucuuuucagagccaccaaaaaaaaaaaaaaaaaaaaaaaaaaaaaaaaaaaaaaaaaaaaaaaaaaaaaaaaaaaaaaaaaaaaaaaaaaaaaaaaaaaaaaaaaaaaaaaaaaaaa

SEQ ID NO: 18275 - RNA, 2045 nt, Artificial Sequence
  mRNA product Design a-1 (hSL-A100) comprising derived and/or modified sequence from LASV(LP;Clade I)__AAF86702__SP-HsPLAT_NP(2-569) (opt5)
aggagagucccgcagucggcguccagcggcucugcuuguucgugugugugucguugcaggccuuauucaagcuuaccauggacgccaugaagagaggccugugcugugugcuccugcuuugcggggcugucuucguuagccccagcaacuccaaggagaucaaaucuuuccuguggacccagagccucagacgggaacuguccggcuacugcucuaauauuaagcuccaaguggucaaagacgcccaggcucugcuccacgggcuggauuuuagcgagguuuccaacgugcagcgccuuaugagaaagcagaaacgggacgaugccgaccugaagcgccucagagaucugaaucaagcggugaacaaucuggucgaacucaagucuacacagcagaaaaacgugcugcggguuggaacgcuuagcuccgacgaucugaucacccucgcugccgaccuggagaaacuuaaaagcaaggugauucgcacagaaagaccccugucuuccggcgucuauauggggaaucucagcucucagcaacuggaucagcggcgcgcccugcucuccaugaucggaaugagcggcgggccucagggaaacagaaccggcggcgacggggugguucgggugugggaugucaaaaaugcugagcugcuuaacaaucaguucggaacaaugccgucucugacccucgccugucugacaaagcaaggccagguggaccuuaacgaugcugugcaggcccugaccgaccucgggcugauuuacacggcgaaguaucccaauuccagcgaccuggauaugcucacccaaucccauccuauccugggaauggucgacacaaagaagucuagccuuaacaucuccggcuacaauuuuagccugggggccgcuguuaaagccggagcuugcaugcucgauggcggcaacaugcuggagaccauuaaggugucuccccagacaauggacgggauccuuaaauccauucugaaggugaaacgcagccucggaauguucaucucugauaccccuggcgaaagaaaccccuaugagaauauucuguacaagaucugucugagcggggaaggauggccuuauauugccucccggacgucuaucacaggccgcgcgugggagaacacccucgucgaccuggagagcgauaauaagccgcccaaacuuaacuccgccgggagcaauaagucucugcaggcugccggacucaacgcuggccugacauacucccagcugaugacccuuaaagacugcaugcuccaacuggauccuagcucuaagaccuggaucgacauugaaggcagacccgaggauccuguggaaaucgcccuguuucagcccuccagcggguguuacauucacuucuuucgggagccgacagaccucaaacaguucaagcaggacgccaaguauucccauggaaucgauguuacggaccuguuuucuacccaaccuggccuuacaagcgcugugauugaagcgcugcccagaaauaugguccuuaccugccagggguccgaugacaucaaaaagcugcuggagucucagggacgccgggauaucaaacuuauugacaucagccucuccaaggccgauagcagaaaauucgagaacgcugugugggaccaguacaaggaucugugucacaugcauacaggcguuguggucgaaaagaaaaagcgcgggggcaaagaggaaauuaccccucacugcgcccugcucgacuguaucauguuugaugccgcuacgacaggaucucugaauauuaccacccuucgggccgugcugcccagagacauggucuuccgcacauccacccccaaggugguucucugaggacuagucccuguucccagagcccacuuuuuuuucuuuuuuugaaauaaaauagccugucuuucagaucucaaaggcucuuuucagagccaccaaaaaaaaaaaaaaaaaaaaaaaaaaaaaaaaaaaaaaaaaaaaaaaaaaaaaaaaaaaaaaaaaaaaaaaaaaaaaaaaaaaaaaaaaaaaaaaaaaaaa

SEQ ID NO: 18276 - RNA, 2045 nt, Artificial Sequence
  mRNA product Design a-1 (hSL-A100) comprising derived and/or modified sequence from LASV(803213;Clade II)__AAF86704__SP-HsPLAT_NP(2-569) (opt5)
aggagagucccgcagucggcguccagcggcucugcuuguucgugugugugucguugcaggccuuauucaagcuuaccauggacgccaugaagagaggccugugcugugugcuccugcuuugcggggcugucuucguuagccccagcgccuccaaggaggugaaaucuuuccuguggacccagagccucagacgggaacuguccggcuacugcucuaacaucaaacuucaagucguuaaggacgcucaggcccugcuccacgggcuggauuuuagcgaggugaauaacgugcagcgccuuaugagaaagcagaaacgggacgauggagaccugaagcgccucagagaucugaaucaagcggucaacaaucugguggaacucaaguccacacagcagaaaucuauucugcggguuggcacgcuuaccagcgacgaucugcucacacuggcugccgaccuugagaagcugaaauccaaggugauccgcaccgaaagaccccucagcucuggggucuauaugggaaaccuguccacacagcaacuggagcagcggcgcgcccuccugaauaugauuggcauggugggaggagcucagggcacccagccuggcagagaugggguugugcgggucugggacgugaaaaacccggaucuucugaauaaccaauucggaacaaugcccagccucacccuggccugucuuacgaagcagggccagguggaccugaaugaugcuguccucgcccugaccgaccuggggcucaucuacacagcgaaguauccuaacucuuccgaccuggaucgccuuagccaaucucaucccauucugaauaugguugacaccaaaaaguccagccucaacaucuccggauacaauuuuucucugggcgccgcugugaaagccggggcuugcaugcuugauggaggcaacaugcuggagacaaucaaggugaccccucagacgauggacggcauucucaaaagcauccugaaggucaaaagaucccuggggauguucgugagcgauacacccggagaacggaacccuuaugagaauauucucuacaagaucugucugucuggcgacggguggccguauauugccucccgcaccagcaucguugggagagcgugggaaaacacaaccguggaucuugagucugacggcaagccccagaaagucgggaccgccggaagcaauaagucccugcagucugcuggcuuuccuacaggccucacguacagccaacugaugacccugaaagauuccaugaugcagcuugaccccagcgccaagacauggauugauaucgaggggcggccugaagaccccguggagaucgcucucuaccagccgaugucuggaugcuauauucacuucuuuagagaaccuaccgaccugaaacaguucaagcaagaugccaaguacucccauggcaucgacguugccgaucuguuucccgcucagccugggcucacaagcgcggugauugaggcccugccccgcaacaugguccuuaccugucagggaucugacgauaucaaaaagcugcucgacucccagggccggagagauauuaaacugaucgacaucagccuguccaagguggauucucgcaaauucgaaaaugcugucugggaccaaugcaaggaucuuugucacaugcauacgggggugguuguggagaagaaaaagcggggcggaaaagaggaaauuacaccccacugcgcccucauggacuguaucauguuugaugccgcugucagcggcgggcugaacauuccugugcugagagccguucucccgcgcgacaugguguuccggaccuccucucccaaggucgugcugugaggacuagucccuguucccagagcccacuuuuuuuucuuuuuuugaaauaaaauagccugucuuucagaucucaaaggcucuuuucagagccaccaaaaaaaaaaaaaaaaaaaaaaaaaaaaaaaaaaaaaaaaaaaaaaaaaaaaaaaaaaaaaaaaaaaaaaaaaaaaaaaaaaaaaaaaaaaaaaaaaaaaa

SEQ ID NO: 18277 - RNA, 2048 nt, Artificial Sequence
  mRNA product Design a-1 (hSL-A100) comprising derived and/or modified sequence from LASV(GA391;Clade III)__CAA36646__SP-HsPLAT_NP(2-570) (opt5)
aggagagucccgcagucggcguccagcggcucugcuuguucgugugugugucguugcaggccuuauucaagcuuaccauggacgccaugaagagaggccugugcugugugcuccugcuuugcggggcugucuucguuagccccagcgccuccaaggaggugagaucuuuccuguggacccagagccuccggcgcgaacuguccggcuacugcucuaacaucaaacuucaagucguuaaggacgcucaggcccugcuccacgggcuggauuuuagcgagguguccaaugugcagagacuuaugcggaaacagaagcgcgacgauggagaccugaaaagacuccgggaucugaaccaagcggucaauaaccugguggaacucaagucuacacagcagaaaagcguucugcgcgugggcacgcuuuccagcgacgaucugcucauucuggcugccgaccuugagaaacugaagucuaaagucaccagaacagaacggccccucuccagcgggguguauaugggaaaucugucuucccagcaacuggaucagcgcagagcccuccugaacaugaucggcaugaccgggguuagcggaggcggcaagggggcuucugacggaauugugcgggucugggaugugaaaaaugccgagcuucugaacaaucaguucggcacaaugccuucccucacccuggcuugucuuacaaagcaggggcaaguggaccugaacgaugccguccaggcgcucaccgaccugggacugaucuacacggccaaguauccgaauagcuccgaccucgaucgccugucucagagccaucccauucuuaacaugaucgacaccaaaaaguccagccugaauaucucuggcuacaacuuuucccucggggcugccguuaaagcuggagccugcaugcuggauggcggcaauaugcuugagacaauuaaggugagcccucaaaccauggacgggauccugaaaucuauucucaaggugaaaaagagccugggaauguucgucuccgauacacccggcgaaagaaacccuuaugagaacauccuguacaagauuugucucucuggggacggauggcccuauaucgcgagccggaccuccauugugggccgcgccugggaaaauacgguuguggaucuggagcaggacaacaaaccucagaagaucgggaauggaggcagcaacaaaucucuucaguccgcuggcuuugccgcugggcugacauacagccaacucaugacccugaaggauuucaaaugcuuuaaucugaucccgaacgccaagacauggauggacauugagggaagacccgaagauccugucgagaucgcccuuuaccagcccucuuccggcuguuaugugcacuucuuucgggaaccuaccgaccucaagcaguucaaacaggacgcuaaguacagccaugggauugauguuaccgaccuguuugcggcccaacccggacugacauccgcugugaucgaggcccucccgagaaauauggucauuacgugccagggcucugaagauauccgcaaacugcuugagagccaggggcggagagacaucaagcugauugauaucacccucuccaaagccgacucucgcaaguucgagaacgcugugugggaucaguuuaaggaccugugucacaugcauacaggcgucgugguugaaaagaagaaacggggaggcaaggaggaaauuaccccucacugcgcccugauggauuguaucauguucgacgcggcugugagcgggggacuugaugccaaaguccucagagugguucugccccgcgacaugguguuccggacauccaccccuaaggucgugcugugaggacuagucccuguucccagagcccacuuuuuuuucuuuuuuugaaauaaaauagccugucuuucagaucucaaaggcucuuuucagagccaccaaaaaaaaaaaaaaaaaaaaaaaaaaaaaaaaaaaaaaaaaaaaaaaaaaaaaaaaaaaaaaaaaaaaaaaaaaaaaaaaaaaaaaaaaaaaaaaaaaaaa

SEQ ID NO: 18278 - RNA, 2045 nt, Artificial Sequence
  mRNA product Design a-1 (hSL-A100) comprising derived and/or modified sequence from LASV(AV;Clade V)__CCA30315__SP-HsPLAT_NP(2-569) (opt5)
aggagagucccgcagucggcguccagcggcucugcuuguucgugugugugucguugcaggccuuauucaagcuuaccauggacgccaugaagagaggccugugcugugugcuccugcuuugcggggcugucuucguuagccccagcgccuccaaggaggugaaaucuuuccuguggacccagagccucagacgggaacuguccggcuacugcucuaacaucaaacuucaagucguuaaggacgcucaggcccugcuccacgggcuggauuuuagcgagguguccaaugugcagcgccuuaugagaaagcagcggcgcgacgauucugaccugaaaagacuccgggaucugaaccaagcggucaauaaccugguggaacucaagagcacacagcagaaguccguucugcgcgugggaacgcuuagcucugacgaucugcucacccuggcugccgaccuugagaaacugaaguccaaagucacaagaaccgaacggccccucagcucuggcguguauauggggaaucuguccagccagcaacuggaucagcgcagagcccuccugaaccuuauuggaaugacaaauggcucucaggggucccaggcuggacgggacggcguugugcgcgucugggaugugaagaacgccgagcugcucaauaaccaauucggcaccaugccuagccugacacuugcuugucugaccaaacagggacagguggaccucaaugaugucguucaagcccugacggaccuggggcucaucuacaccgcgaaguauccgaacacauccgaccuggauagacuuacccagucucaucccauucugaauaugaucgacacaaagaaaagcucccucaacauuagcggcuacaauuuuucucugggggccgcugugaaggccggagcuugcaugcuugauggcgggaacaugcuggagaccaucaaaguguccccucagagcauggacggaauccucaagucuauucugaaagucaagcgggcccugggcauguucgugagcgauacgcccggcgaacgcaacccuuaugagaauauccucuacaaaauuugucuguccggggacggauggcccuauaucgcgucuagaacaagcauuguuggccgggccugggaaaacaccguggucgaucuugagacagacgggaagccucagaagaucggauccggcaauagcaacaaaucucugcaauccgcuggguuuagcgccggacucaccuacucucagcugaugacccugaaggaugcuaugcuucagcucgacccgaaugccaaaacauggauggauauugagggcagacccgaagacccuguggagguugcccuguaccagcccaucuccggcugcuauauccacuucuuucgcgaaccuacggaccugaagcaauucaaacaggaugcuaaguacagccaugggauugacaucgcggaucucuuugccgcucagcccggacugaccuccgccgugauugaggcccuuccgcggaacauggucaucacaugucagggcucugaagacauuaagaaacugcucgagagccaagggagaaaggauaucaaacugaucgacauugcucuguccaagaucgauucucgcaaauucgagaaugccgugugggaccaguauaaggaucuuugccacaugcauaccggagucgugguugaaaagaaaaagcggggcgggaaagaggaaauuacaccucacugugcgcucauggacugcaucauguuugaugcugccgugagcggcggacugaacacccugguccucagagccgugcugccccgcgacaugguuuuccggacguccacaccuagagugguccuuugaggacuagucccuguucccagagcccacuuuuuuuucuuuuuuugaaauaaaauagccugucuuucagaucucaaaggcucuuuucagagccaccaaaaaaaaaaaaaaaaaaaaaaaaaaaaaaaaaaaaaaaaaaaaaaaaaaaaaaaaaaaaaaaaaaaaaaaaaaaaaaaaaaaaaaaaaaaaaaaaaaaaa

SEQ ID NO: 18279 - RNA, 2045 nt, Artificial Sequence
  mRNA product Design a-1 (hSL-A100) comprising derived and/or modified sequence from LASV(Togo/2016/7082;Clade VI)__AMR44578__SP-HsPLAT_NP(2-569) (opt5)
aggagagucccgcagucggcguccagcggcucugcuuguucgugugugugucguugcaggccuuauucaagcuuaccauggacgccaugaagagaggccugugcugugugcuccugcuuugcggggcugucuucguuagccccagcaacuccaaggaggugaaaucuuuccuguggacccagagccucagacgggaacuguccggcuacugcucuaauaucaaacuucaagucguuaaagacgcccaggcucugcuccacgggcuggauuuuagcgagguguccaacgugcagcgccuuaugagaaagcagaaacgggacgauggagaccugaagcgccucagagaucugaaucaagccgucaacaaucugguggaacucaagucuguucagcagaaaagcauucugcgggugggcacacuuacguccgacgaucugcucacccuggcggcugaccuugagaagcugaaaagcaaggucacacgcaccgaaagaccccucucuuccgggguguauaugggaaaccugagcucucagcaacuggaucagcggcgcgcccuccuguccaugaucggcaugagcgggggaaaucagaacucucagccuaaaggcgacggcguugugagagucugggaugugaagaaugccgaccuucugaacaaucaauucgggacaaugccgucccucacccuggcuugucuuacaaagcagggacagguggaucugaacgacgccguccaagcucucaccgaccugggccugauuuacacggccaaauaucccaauagcuccgaucucgaccggcugucucagagccauccuauccuuaacaugauugauaccaagaaauccagccugaauaucucuggguacaacuuuucccucggagcggccaucaagacaggcgcuugcaugcuggacgggggaaacaugcuugagaccauuaaaguuacaccccagaccauggauggcauccucaagagcauucugaaagugaagcgcucucugggcauguucaucagcgacacgccuggggagagaaaucccuaugaaaacauucuguacaagaucugucucuccggagauggcuggccuuauauugccucucggacagcuaucaucgggcgcgccugggagaauaccguggucgaccuggaaagcgauuccaaaccgcagaagauuggaagcaacggcucuaauaaaucccuucaaagcgcgggguuugcccccggacugacauacucucagcucaugacccugaaggacuccaugcugcagcuugauccuaacgcuaaaaccuggaucgacauugagggcagacccgaggacccuguggaaguugcccucuuccagcccaucagcggcugcuacauucacuuuuuccgggagccgacagaucugaagcaauuuaagcaggacgcuaaauauucccaugggaucgaugugacggaccuguucgccgcccagccuggacucaccucugcugucaucgaagcgcugcccagaaauauggugcuuacaugucagggcagcgaugacauuaagaaacugcucgauucccaagggcgccgggacaucaagcugauugauguuucucugaacaaaaucgacagcagaaaguuugagaaugccgugugggaucaguacaaggaccuuugccacaugcauaccggagucguggucgaaaagaagaaaaagggcgggaaagaggagauuacaccucacugugcucuccuggauugcaucauguucgacgccgccguguccggcggacugaacgcuaccguucuccgcgccgugcugccccgggacauggucuuuagaacgagcucucccaaggugguucuuugaggacuagucccuguucccagagcccacuuuuuuuucuuuuuuugaaauaaaauagccugucuuucagaucucaaaggcucuuuucagagccaccaaaaaaaaaaaaaaaaaaaaaaaaaaaaaaaaaaaaaaaaaaaaaaaaaaaaaaaaaaaaaaaaaaaaaaaaaaaaaaaaaaaaaaaaaaaaaaaaaaaaa

SEQ ID NO: 18280 - RNA, 2045 nt, Artificial Sequence
  mRNA product Design a-1 (hSL-A100) comprising derived and/or modified sequence from LASV(KAK-428;Clade n.d. (VII))__ANH09741__SP-HsPLAT_NP(2-569) (opt5)
aggagagucccgcagucggcguccagcggcucugcuuguucgugugugugucguugcaggccuuauucaagcuuaccauggacgccaugaagagaggccugugcugugugcuccugcuuugcggggcugucuucguuagccccagcaacuccaaggaggugaaaucuuuccuguggacccagagccucagacgggaacuguccggcuacugcacaaauaucaaacuucaagucguuaaggacgcccaggcucugcuccacgggcuggauuuuucugaggugagcaacgugcagcgccuuaugagaaagcagaaacgggacgauaaugaccugaagcgccucagagaucugaaccaagccgucaauaaccugguggaacucaaguccguucagcagaaaucugugcugaaggucggaacgcuuaauagcgacgaucugcucacccuggcggcugaccuugagaaacugaaguccaaagugguucggacagaacgcccccucagcucuggcguguauauggggaaccuguccagccagcaacuggaucagagacgggcccuccugaauaugauuggaauggccggcgggucucagggaaaccagccuucccgcgacggcgucgugagagugugggaugucaagaaugcugaccuucugaacaaucaauucggcaccaugccgagccucacacuggccugucuuaccaagcaggggcagguugaucugaacgacguggugcucgcucugacagaccugggacucaucuacaccgccaaauaucccaauucuuccgaucuggaccggcuuagccaaaaccauccuguccugaacaugauugaugugaauaaguccucucucaacaucagcggcuacaauuuuucccugggggcggccguuaaagcuggagccugcaugcuugacggcgggaacaugcuggagacgauuaagaucagcccccagaccguggauggaauccucaaaucuauucugaaggucaaacgcgcucugggcauguucguguccgacacaccuggcgagagaaaucccuaugaaaacauccucuacaagguuugucugagcgggaauggauggccuuauauugccucucggaccagcaucgugggccgcgcgugggagaacacagucguggaucuugaauccaauaagaaccagccgaaagucgggaauaacggaucuaauaagaugcugcagagcuccggcuuugccaccgggcucacguacagccaacugaugacacugagagacucuaugcuucagcucgaucccaccgcuaaaacauggauugacaucgagggacggccugaggaucccguggaacuggcccuguuccagccuuccagcggcugcuacauucacuuuuucagagagcccaccgaccucaagcaguuuaaacaagacgcuaaguauucucauggcaucgauguuaacgaccuguucuccgcccagccggggcuuaccagcgccgugcuggaagcucucccucgcaauaugguccugacaugucagggauccgaugacauccggaagcugcuugauucucaggacagaaaagauauuaagcucaucgacauuagccuguccaaagcggaugcccgcaaguuugagaacgacgugugggaucaauucaaagaccugugccacaugcauacgggcaucguuguggaaaagaagaaaaagggagggaaacaggagaugacaccccacugugcucuccuggauugcauuauguuugacgccgccgucucuggcgggcuuaacgugccuacccugcgggcugugcuccccaccgacaugguuuucagaacaaucaccacgaaggucgugcugugaggacuagucccuguucccagagcccacuuuuuuuucuuuuuuugaaauaaaauagccugucuuucagaucucaaaggcucuuuucagagccaccaaaaaaaaaaaaaaaaaaaaaaaaaaaaaaaaaaaaaaaaaaaaaaaaaaaaaaaaaaaaaaaaaaaaaaaaaaaaaaaaaaaaaaaaaaaaaaaaaaaaa

SEQ ID NO: 18281 - RNA, 2045 nt, Artificial Sequence; identical to SEQ ID NO: 18275
  mRNA product Design a-1 (hSL-A100) comprising derived and/or modified sequence from LASV(Pinneo-NIG-1969;Clade I)__AIT17837__SP-HsPLAT_NP(2-569) (opt5)

SEQ ID NO: 18282 - RNA, 2045 nt, Artificial Sequence
  mRNA product Design a-1 (hSL-A100) comprising derived and/or modified sequence from LASV(ISTH0009-NIG-2011;Clade II)__AIT17405__SP-HsPLAT_NP(2-569) (opt5)
aggagagucccgcagucggcguccagcggcucugcuuguucgugugugugucguugcaggccuuauucaagcuuaccauggacgccaugaagagaggccugugcugugugcuccugcuuugcggggcugucuucguuagccccagcguguccaaggaggucaaaucuuuccuguggacccagagccucagacgggaacuguccggcuacugcucuaacaucaaacuucaaguugugaaggacgcccaggcucugcuccacgggcuggauuuuagcgagguguccaauguccagcgccuuaugagaaagcagaaacgggacgauucugaccugaagcgccucagagaucugaaccaagccgugaauaaccugguugaacucaagagcacacagcagaaauccauucugcgggugggaacgcuuaccagcgacgaucugcucacacuggcggcugaccuugagaagcugaaaucuaaggucauccgcaccgaaagaccccucuccagcggcguguauauggggaaucugucuacacagcaacuggagcagcggcgcgcccuccugaacaugauuggaaugguuggcggggcccagggaacccagccuggcagagauggcgugguccgggugugggacgugaaaaauccggaucuucugaacaaucaauucgggacaaugcccucccucacccuggcuugucuuacgaagcagggacaggucgaccugaacgaugccguucucgcucugaccgaccugggccucaucuacacagccaaguauccuaauagcucugaccuggaucgccuuucccaaagccaucccauucugaacaugguggacaucaaaaaguccucucucaauaucagcggguacaacuuuucccugggagcggccgugaaagcuggcgccugcaugcuugaugggggaaauaugcuggagaccauuaaggucacaccucagaccauggacggcauccucaaaagcauucugaaggugaaaagaucucugggcauguucguuuccgauacgcccggggaacggaacccuuaugagaacauccucuacaagauuugucugagcggagacggcuggccguauaucgcuucucgcacaagcauuguggggagagccugggaaaauaccacagucgaucuugaguccgacggaaagccccagaaagugggcucugcggggagcaacaagucccugcagagcgccggauuuccuaccggccucaccuacucucaacugaugacacugaaagauuccaugaugcagcuugaccccagcgcuaagacguggaucgauaucgagggccggccugaagaccccguugagauugcccucuaccagccgaugucugggugcuauauccacuucuuuagagaaccuaccgaccugaaacaguucaagcaagaugcuaaguacucccauggaauugacguggccgaucuguuucccgcccagccuggccucacaagcgcugucaucgaggcgcugccccgcaauauggugcuuaccugucagggguccgacgauauuaaacggcugcucgacucucagggaagacgcgauaucaagcugaucgacauugcccugagcaaagcugauucccggagauucgaaaacgccgucugggaccaaugcaaggaucuuugucacaugcauacaggcgugguuguggagaaaaagaagcgcgggggcaaagaggaaaucacgccccacugcgcccucauggacuguauuauguaugaugcugccgucucuggaggccugaauaucccugugcugcgggcgguucucccgagagacaugguguuucgcaccagcucccccaaggucgugcugugaggacuagucccuguucccagagcccacuuuuuuuucuuuuuuugaaauaaaauagccugucuuucagaucucaaaggcucuuuucagagccaccaaaaaaaaaaaaaaaaaaaaaaaaaaaaaaaaaaaaaaaaaaaaaaaaaaaaaaaaaaaaaaaaaaaaaaaaaaaaaaaaaaaaaaaaaaaaaaaaaaaaa

SEQ ID NO: 18283 - RNA, 2045 nt, Artificial Sequence
  mRNA product Design a-1 (hSL-A100) comprising derived and/or modified sequence from LASV(ISTH2010-NIG-2012;Clade II)__AIT17483__SP-HsPLAT_NP(2-569) (opt5)
aggagagucccgcagucggcguccagcggcucugcuuguucgugugugugucguugcaggccuuauucaagcuuaccauggacgccaugaagagaggccugugcugugugcuccugcuuugcggggcugucuucguuagccccagcgccuccaaggaggugaaaucuuuccuguggacccagagccucagacgggaacuguccggcuacugcucuaacaucaaacuucaagucguuaaggacgcucaggcccugcuccacgggcuggauuuuagcgagguguccaaugugcagcgccuuaugagaaagcagaaacgggacgauucugaccugaagcgccucagagaucugaaccaagcggucaauaaccugguggaacucaagagcacacagcagaaauccauucugcggguuggaacgcuuaccagcgacgaucugcucacacuggcugccgaccuugagaagcugaaaucuaaggugauccgcaccgaaagaccccucuccagcggcgucuauauggggaaucugucuacacagcaacuggagcagcggcgcgcccuccugaaccuuauuggaauggugggcggggcucagggaacccagccuggcagagauggcguugugcgggucugggacgugaaaaauccggaucugcucaacaaucaauucgggacaaugcccucccugacccuugccugucugacgaagcagggacagguggaccucaacgaugcuguccuggcccugaccgaccucggccugaucuacacagcgaaguauccuaauagcucugaccuugaucgccugucccaaagccaucccauucucaacaugguugacaccaaaaaguccucucugaauaucagcggguuuaacuucucccuuggagccgcugugaaagccggcgcuugcaugcuggaugggggaaauaugcucgagacaaucaaggugaccccucagacgauggacggcauucugaaaagcauccugaaggucaaaaagucucucggcauguuuguguccgauacacccggggaaagaaacccuuacgagaacauucuguauaagaucugucuuagcggagacggcuggccguacauugccucucggaccagcaucguugggcgcgcgugggaaaauacaaccguggaucuggaguccgacggaaaaccccacaaggucggcaccgccgggucuaacaaaagccuccaguccgcuggauucccuacaggccugacguauagccagcugaugacccuuaaggauucuaugaugcaacucgaccccuccgccaaaacauggauugauaucgagggcagaccugaagaccccguggagaucgcucuguaccagccgaugagcgggugcuacauucacuuuuuccgggaaccuaccgaccugaagcaguuuaagcaggaugccaaauauucucauggaaucgacguugccgaucucuuccccgcucaaccuggccugacauccgcggugauugaggcccuucccagaaauaugguccugaccugucaggggagcgacgauaucaagcgccuccuggacucccagggacggagagauauuaaacugaucgacaucgcucuuucuaaggccgauagccgccgguuugaaaacgccgugugggaccagugcaaagaucucugucauaugcacacgggcgucgugguugagaagaagaaaagagggggcaaggaggaaauuacaccccacugcgcucugauggacuguaucauguacgaugccgcgguguccggaggccugaauauuccuguccuccgcgcugugcugccgcgggacaugguuuucagaaccucuagccccaaagugguccuuugaggacuagucccuguucccagagcccacuuuuuuuucuuuuuuugaaauaaaauagccugucuuucagaucucaaaggcucuuuucagagccaccaaaaaaaaaaaaaaaaaaaaaaaaaaaaaaaaaaaaaaaaaaaaaaaaaaaaaaaaaaaaaaaaaaaaaaaaaaaaaaaaaaaaaaaaaaaaaaaaaaaaa

SEQ ID NO: 18284 - RNA, 2045 nt, Artificial Sequence
  mRNA product Design a-1 (hSL-A100) comprising derived and/or modified sequence from LASV(Lassa virus/H.sapiens-wt/NGA/2015/ISTH_0543;Clade II)__AVO03640__SP-HsPLAT_NP(2-569) (opt5)
aggagagucccgcagucggcguccagcggcucugcuuguucgugugugugucguugcaggccuuauucaagcuuaccauggacgccaugaagagaggccugugcugugugcuccugcuuugcggggcugucuucguuagccccagcgccuccaaggaggugaaaucuuuccuguggacccagagccucagacgggaacuguccggcuacugcucuaacaucaaacuucaagucguuaaggacgcucaggcccugcuccacgggcuggauuuuagcgagguguccaaugugcagcgccuuaugagaaagcagaaacgggacgauucugaccugaagcgccucagagaucugaaccaagcggucaauaaccugguggaacucaagagcacacagcagaaauccauucugcggguuggaacgcuuaccagcgacgaucugcucacacuggcugccgaccuugagaagcugaaaucuaaggugauccgcaccgaaagaccccucuccagcggcgucuauauggggaaucugucuacacagcaacuggagcagcggcgcgcccuccugaacaugauuggaauggugggcggggcucagggaacccagccuggcagagauggcguugugcgggucugggacgugaaaaauccggaucuucugaacaaucaauucgggacaaugcccucccucacccuggccugucuuacgaagcagggacagguggaccugaacgaugcuguccucgcccugaccgaccugggccucaucuacacagcgaaguauccuaauagcucugaccuggaucgccuuucccaaagccaucccauucugaacaugguugacaccaaaaaguccucucucaauaucagcggguacaacuuuucccugggagccgcugugaaagccggcgcuugcaugcuugaugggggaaauaugcuggagacaaucaaggugaccccucagacgauggacggcauucucaaaagcauccugaaggucaaaaagucucugggcauguucguguccgauacacccggggaaagaaacccuuaugagaacauucucuacaagaucugucugagcggagacggcuggccguauauugccucucggaccagcaucguugggcgcgcgugggaaaauacaaccguggaucuugaguccgacggaaaaccccagaaggucggcucugccgggagcaacaaaucccugcagagcgcuggauuuccuaccggccucacauacucucaacugaugacgcugaaggauuccaugaugcagcuugaccccagcgccaaaaccuggauugauaucgagggcagaccugaagaccccguggagaucgcucucuaccagccgaugucugggugcuauauucacuucuuucgggaaccuacagaccugaagcaguucaagcaagaugccaaauacucccauggaaucgacguugccgaucuguuucccgcucagccuggccucaccagcgcggugauugaggcccugcccagaaauaugguccuuacaugucagggguccgacgauaucaagcgccugcucgacucucagggacggaaagauauuaagcugaucgacaucgcucugagcaaagccgauuccagacgcuucgaaaacgccgugugggaccaaugcaaggaucuuugucacaugcauaccggcgucgugguugagaagaaaaagagagggggcaaagaggaaauuacgccccacugcgcucucauggacuguaucauguaugaugccgcggugucuggaggccugaauauuccuguccugcgggcugugcucccgcgcgacaugguuuuucggacaagcucccccaaggugguccugugaggacuagucccuguucccagagcccacuuuuuuuucuuuuuuugaaauaaaauagccugucuuucagaucucaaaggcucuuuucagagccaccaaaaaaaaaaaaaaaaaaaaaaaaaaaaaaaaaaaaaaaaaaaaaaaaaaaaaaaaaaaaaaaaaaaaaaaaaaaaaaaaaaaaaaaaaaaaaaaaaaaaa

SEQ ID NO: 18285 - RNA, 2045 nt, Artificial Sequence
  mRNA product Design a-1 (hSL-A100) comprising derived and/or modified sequence from LASV(Lassa virus/H.sapiens-wt/NGA/2016/ISTH_0009;Clade II)__AVO03572__SP-HsPLAT_NP(2-569) (opt5)
aggagagucccgcagucggcguccagcggcucugcuuguucgugugugugucguugcaggccuuauucaagcuuaccauggacgccaugaagagaggccugugcugugugcuccugcuuugcggggcugucuucguuagccccagcgccuccaaggaggugaaaucuuuccuguggacccagagccucagacgggaacuguccggcuacugcucuaacaucaaacuucaagucguuaaggacgcucaggcccugcuccacgggcuggauuuuagcgagguguccaaugugcagcgccuuaugagaaagcagaaacgggacgauucugaccugaagcgccucagagaucugaaccaagcggucaauaaccugguggaacucaagagcacacagcagaaauccauucugcggguuggaacgcuuaccagcgacgaucugcucacacuggcugccgaccuugagaagcugaaaucuaaggugauccgcaccgaaagaccccucuccagcggcgucuauauggggaaucugucuacacagcaacuggagcagcggcgcgcccuccugaacaugauuggaauggugggcggggcucagggaacccagccuggcagagauggcguugugcgggucugggacgugaaaaauccggaucuucugaacaaucaauucgggacaaugcccucccucacccuggccugucuuacgaagcagggacagguggaccugaacgaugcuguccucgcccugaccgaccugggccucaucuacacagcgaaguauccuaauagcucugaccuggaucgccuuucccaaagccaucccauucugaacaugguugacaccaaaaaguccucucucaauaucagcggguacaacuuuucccugggagccgcugugaaagccggcgcuugcaugcuugaugggggaaauaugcuggagacaaucaaggugaccccucagacgauggacggcauucucaaaagcauccugaaggucaaaaagucucugggcauguucguguccgauacacccggggaaagaaacccuuaugagaacauucucuacaagaucugucugagcggagacggcuggccguauauugccucucggaccagcaucguugggcgcgcgugggaaaauacaaccguggaucuugaguccgacggaaaaccccagaaggucggcucugccgggagcaacaaaucccugcagagcgcuggauuuccuaccggccucacauacucucaacugaugacgcugaaggauuccaugaugcagcuugaccccagcgccaaaaccuggauugauaucgagggcagaccugaagaccccguggagaucgcucucuaccagccgaugucugggugcuauauucacuucuuucgggaaccuacagaccugaagcaguucaagcaagaugccaaauacucccauggaaucgacguugccgaucuguuucccgcucagccuggccucaccagcgcggugauugaggcccugcccagaaauaugguccuuacaugucagggguccgacgauaucaagcgccugcucgacucucagggacggagagauauuaaacugaucgacaucgcucugagcaaggccgauucccgccgguucgaaaacgccgugugggaccaaugcaaagaucuuugucacaugcauaccggcgucgugguugagaagaagaaaagagggggcaaggaggaaauuacgccccacugcgcucucauggacuguaucauguaugaugccgcggugucuggaggccugaauauuccuguccugcgcgcugugcucccgcgggacaugguuuuuagaacaagcucccccaaagugguccugugaggacuagucccuguucccagagcccacuuuuuuuucuuuuuuugaaauaaaauagccugucuuucagaucucaaaggcucuuuucagagccaccaaaaaaaaaaaaaaaaaaaaaaaaaaaaaaaaaaaaaaaaaaaaaaaaaaaaaaaaaaaaaaaaaaaaaaaaaaaaaaaaaaaaaaaaaaaaaaaaaaaaa

SEQ ID NO: 18286 - RNA, 2045 nt, Artificial Sequence
  mRNA product Design a-1 (hSL-A100) comprising derived and/or modified sequence from LASV(Lassa virus/H.sapiens-wt/NGA/2016/ISTH_0017;Clade II)__AVO03568__SP-HsPLAT_NP(2-569) (opt5)
aggagagucccgcagucggcguccagcggcucugcuuguucgugugugugucguugcaggccuuauucaagcuuaccauggacgccaugaagagaggccugugcugugugcuccugcuuugcggggcugucuucguuagccccagcgccuccaaggaggugaaaucuuuccuguggacccagagccucagacgggaacuguccggcuacugcucuagcaucaaacuucaagucguuaaggacgcucaggcccugcuccacgggcuggauuuuuccgaggugucuaacgugcagcgccuuaugagaaagcagaaacgggacgauagcgaccugaagcgccucagagaucugaaucaagcggucaacaaucugguggaacucaaguccacacagcagaaaagcauucugcggguuggaacgcuuaccucugacgaucugcucacacuggcugccgaccuugagaagcugaaauccaaggugauccgcaccgaaagaccccucagcucuggcgucuauauggggaaccuguccacacagcaacuggagcagcggcgcgcccuccugaauaugauuggaauggcuggcggggcccagggaacccagccuggcagagauggcgugguucgggugugggacgucaaaaacccggaucuucugaauaaccaauucgggacaaugcccagccucacccuggcuugucuuacgaagcagggacagguggaccugaaugaugccgugcucgcgcugaccgaccugggccucaucuacacagccaaguauccuaacucuuccgaccuggaucgccuuagccaaucccaucccauucugaauauggucgacaccaaaaagucuagccucaacaucuccggguacaauuuuagccugggagcugccguuaaagcuggcgccugcaugcuugaugggggaaacaugcuggagacaaucaaggugaccccucagacgauggacggcauucucaaaucuauccugaaggugaaaagaucccugggcauguucgucagcgaugcgcccggggaacggaauccuuaugagaacauucucuacaagaucugucugucuggagacggcuggccguauauugccagccgcacauccaucguggggagagcuugggaaaacaccacaguugaucuugagucugacggaaagccccagaaagugggcgccaccgggagcaauaagucccugcagagcgcuggauuuccuaccggccucacauacucucaacugaugacgcugaaagauuccaugaugcagcuugaccccagcgccaagaccuggauugauaucgagggccggccugaagaccccgucgagguggcccucuaccagccgguuucugggugcuauauccacuucuuuagagaaccuacagaccugaaacaguucaagcaagaugcuaaguacucccauggaauugacguggcggaucuguuucccgcccagccuggccucaccagcgcugucaucgaggcccugccccgcaacauggugcuuacaugucagggguccgacgauauuaaaaagcugcucgacucucagggacggaaagauaucaagcugauugacaucgcccugagcaaagcugauuccagacgcuucgaaaaugccgucugggaccaaugcaaggaucuuugucacaugcauaccggcgugguuguggagaagaaaaagagagggggcaaagaggaaaucacgccccacugcgcgcucauggacuguauuauguaugaugcugccgucucuggaggccugaacaucccugugcugcgggccguucucccgcgcgacaugguguuucggacaagcucccccaaggucgugcugugaggacuagucccuguucccagagcccacuuuuuuuucuuuuuuugaaauaaaauagccugucuuucagaucucaaaggcucuuuucagagccaccaaaaaaaaaaaaaaaaaaaaaaaaaaaaaaaaaaaaaaaaaaaaaaaaaaaaaaaaaaaaaaaaaaaaaaaaaaaaaaaaaaaaaaaaaaaaaaaaaaaaa

SEQ ID NO: 18287 - RNA, 2045 nt, Artificial Sequence
  mRNA product Design a-1 (hSL-A100) comprising derived and/or modified sequence from LASV(Lassa virus/H.sapiens-wt/NGA/2018/ISTH_0959;Clade II)__AVV65100__SP-HsPLAT_NP(2-569) (opt5)
aggagagucccgcagucggcguccagcggcucugcuuguucgugugugugucguugcaggccuuauucaagcuuaccauggacgccaugaagagaggccugugcugugugcuccugcuuugcggggcugucuucguuagccccagcgccuccaaggaggugaaaucuuuccuguggacccagagccucagacgggaacuguccggcuacugcucuaacaucaaacuucaagucguuaaggacgcucaggcccugcuccacgggcuggauuuuagcgagguguccaaugugcagcgccuuaugagaaagcagaaacgggacgauucugaccugaagcgccucagagaucugaaccaagcggucaauaaccugguggaacucaagagcacccagcagaaauccauucugcggguuggaacgcuuaccagcgacgaucugcucacacuggcugccgaccuugagaagcugaaaucuaaggugauccgcaccgaaagaccccucuccagcggcgucuauauggggaaucugucuacacagcaacuggagcagcggcgcgcccuccugaaccuuauuggaauggugggcggggcucagggaacccagccuggcagagauggcguugugcgggucugggacgugaaaaauccggaucugcucaacaaucaauucgggacaaugcccucccugacccuugccugucugacgaagcagggacagguggaccucaacgaugucguucuggcucugaccgaccucggccugaucuacacagccaaguauccuaauagcucugaccuugaucgccugucccaaagccaucccauucucaacaugguggacaccaaaaaguccucucugaauaucagcggguuuaacuucucccuuggagcggccgugaaagcuggcgccugcaugcuggaugggggaaauaugcucgagacaaucaaggucaccccucagacgauggacggcauucugaaaagcauccugaaggugaaaaagucucucggcauguuuguuuccgauacacccggggaaagaaacccuuacgagaacauucuguauaagaucugucuuagcggagacggcuggccguacauugcuucucggaccagcaucguggggcgcgccugggaaaauacaaccgucgaucuggaguccgacggaaaaccccacaaggugggcaccgcggggucuaacaaaagccuccaguccgccggauucccuacaggccugacguauagccagcugaugacccuuaaggauucuaugaugcaacucgaccccuccgcuaaaacauggauugauaucgagggcagaccugaagaccccguugagaucgcccuguaccagccgaugagcgggugcuacauucacuuuuuccgggaaccuaccgaccugaagcaguuuaagcaggaugcuaaauauucucauggaaucgacguggccgaucucuuccccgcccaaccuggccugacauccgcugucauugaggcgcuucccagaaauauggugcugaccugucaggggagcgacgauaucaagcgccuccuggacucccagggacggaaagauauuaagcugaucgacaucgcccuuucuaaaacggauagcagacgcuuugaaaacgcugucugggaccagugcaaggaucucugucauaugcacacaggcgugguuguggagaagaaaaagagagggggcaaagaggaaauuacaccccacugcgcccugauggacuguaucauguacgaugccgcugucuccggaggccugaauauuccugugcuccgggccguucugccgcgcgacaugguguuccggaccucuagccccaaggucgugcuuugaggacuagucccuguucccagagcccacuuuuuuuucuuuuuuugaaauaaaauagccugucuuucagaucucaaaggcucuuuucagagccaccaaaaaaaaaaaaaaaaaaaaaaaaaaaaaaaaaaaaaaaaaaaaaaaaaaaaaaaaaaaaaaaaaaaaaaaaaaaaaaaaaaaaaaaaaaaaaaaaaaaaa

SEQ ID NO: 18288 - RNA, 2045 nt, Artificial Sequence
  mRNA product Design a-1 (hSL-A100) comprising derived and/or modified sequence from LASV(LASV003-NIG-2008;Clade II)__AIT17581__SP-HsPLAT_NP(2-569) (opt5)
aggagagucccgcagucggcguccagcggcucugcuuguucgugugugugucguugcaggccuuauucaagcuuaccauggacgccaugaagagaggccugugcugugugcuccugcuuugcggggcugucuucguuagccccagcgccuccaaggaggugaaaucuuuccuguggacccagagccucagacgggaacuguccggcuacugcucuagcaucaaacuucaagucguuaaggacgcucaggcccugcuccacgggcuggauuuuuccgaggugucuaacgugcagcgccuuaugagaaagcagaaacgggacgauagcgaccugaagcgccucagagaucugaaucaagcggucaacaaucugguggaacucaaguccacccagcagaaaagcguucugcgggugggaacgcuuaccucugacgaucugcucacacuggcugccgaccuugagaagcugaaauccaaggucauucgcaccgaaagaccccucagcucuggcguguauauggggaaccuguccgcccagcaacuggagcagcggcgcacacuccugaauaugaucggaaugguuggcggggcucagggaacccagccuggcagagauggcgugguccgggugugggacgugaaaaacccggaucuucugaauaaccaauucgggacaaugcccagccucacccuggccugucuuacgaagcagggacaggucgaccugaaugauguugugcucgcucugaccgaccugggccucauuuacacagccaaguauccuaacucuuccgaccuggaucgccuuagccaaucccaucccauccugucuaugguggacaccaaaaagagcucccucaauauuagcggguacaacuuuucucugggagcggccgucaaagcuggcgccugcaugcuugaugggggaaauaugcuggagacaaucaaggugaccccucagacgauggacggcauccucaaauccauucugaagguuaaaaagagccugggcauguucgugucugauacacccggggaaagaaacccuuaugagaauauccucuacaagauuugucugagcggagacggcuggccguauaucgcuucccggaccucuauugucgggcgcgccugggaaaacacaaccguggaucuugagagcgacggaaaaccccagaagguuggcaccgcgggguccaacaaaagccugcagucugccggauuuccuacaggccucacguacucccaacugaugacccugaaggauagcaugaugcagcuugaccccucugcuaaaacauggaucgauauugagggcagaccugaagaccccguggagaucgcccucuaccagccgauguccgggugcuauauccacuucuuucgggaaccuaccgaccugaagcaguucaagcaagaugcuaaauacagccauggaauugacgucacagaucuguuucccgcccagccuggccucaccuccgccgugaucgaggcucugcccagaaauaugguccuuacgugucaggggucugacgauauuaagcgccugcucgacagccagggacggagagauaucaaacugauugacaucgcgcuguccaaggccgauucucgccgguucgaaaacgcugugugggaccaaugcaaagaucuuugucacaugcauacaggcguuguggucgagaagaagaaaagagggggcaaggaggaaaucacaccccacugcgcccucauggacuguauuauguaugaugccgcugugagcggaggccugaauaucccuguucugcgcgccgugcucccgcgggacauggucuuuagaaccuccagccccaaaguggugcugugaggacuagucccuguucccagagcccacuuuuuuuucuuuuuuugaaauaaaauagccugucuuucagaucucaaaggcucuuuucagagccaccaaaaaaaaaaaaaaaaaaaaaaaaaaaaaaaaaaaaaaaaaaaaaaaaaaaaaaaaaaaaaaaaaaaaaaaaaaaaaaaaaaaaaaaaaaaaaaaaaaaaa

SEQ ID NO: 18289 - RNA, 2045 nt, Artificial Sequence
  mRNA product Design a-1 (hSL-A100) comprising derived and/or modified sequence from LASV(LASV035-NIG-2009;Clade II)__AIT17589__SP-HsPLAT_NP(2-569) (opt5)
aggagagucccgcagucggcguccagcggcucugcuuguucgugugugugucguugcaggccuuauucaagcuuaccauggacgccaugaagagaggccugugcugugugcuccugcuuugcggggcugucuucguuagccccagcgccuccaaggaggugaaaucuuuccuguggacccagagccucagacgggaacuguccggcuacugcucuagcaucaaacuucaagucguuaaagacgcucaggcccugcuccacgggcuggauuuuuccgaggugucuaacgugcagcgccuuaugagaaagcagaaacgggacgauagcgaccugaagcgccucagagaucugaaucaagcggucaacaaucugguggaacucaaguccacacagcagaaaagcauucugcggguuggaacgcuuaccucugacgaucugcucacacuggcugccgaccuugagaagcugaaauccaaggugauccgcaccgaaagaccccucagcucuggcgucuauauggggaaccuguccgcccagcaacuggagcagcggcgcgcucuccugaauaugauuggaauggugggcggggcccagggaacacagccuggcagagauggcguugugcgggucugggacgugaaaaacccggaucuucugaauaaccaauucgggaccaugcccagccucacacuggcuugucuuaccaagcagggacagguggaccugaaugaugccguccucgcgcugacggaccugggccucaucuacaccgccaaguauccuaacucuuccgaccuggaucgccuuagccaaucccaucccauucugaauaugguugacacaaagaagucuagccucaacaucuccggguacaauuuuagccugggagcugccgugaaagcuggcgccugcaugcuugaugggggaaacaugcuggagaccaucaaggugacaccucagaccauggacggcauucucaaaucuauccugaaggucaaaagaucccugggcauguucgugagcgauacgcccggggaacggaauccuuaugagaacauucucuacaagaucugucugucuggagacggcuggccguauauugcgagccgcacauccaucguugggagagccugggaaaacaccacaguggaucuugagucugacggaaagccccagaaagucggcaccaccgggagcaauaagucccugcagagcgcuggauuuccuacaggccucacguacucucaacugaugacccugaaagauuccaugaugcagcuugaccccagcgccaagacauggauugauaucgagggccggccugaagaccccguggagaucgcucucuaccagccgaugucugggugcuauauucacuucuuuagagaaccuaccgaccugaaacaguucaagcaagaugccaaguacucccauggaaucgacguugccgaucuguuucccgcucagccuggccucacaagcgcggugauugaggcccugccccgcaacaugguccuuaccugucagggguccgacgauaucaaaaagcugcucgacucucagggacggagagauauuaaacugaucgacaucgcucugagcaaggccgauucccgcaaauucgaaaaugccgugugggaccaaugcaaggaucuuugucacaugcauacgggcgucgugguugagaagaaaaagagagggggcaaagaggaaauuacaccccacugcgcucucauggacuguaucauguaugaugccgcggugucuggaggccugaacauuccuguccugcgggcugugcucccgcgcgacaugguuuuucggaccagcucccccaaggugguccugugaggacuagucccuguucccagagcccacuuuuuuuucuuuuuuugaaauaaaauagccugucuuucagaucucaaaggcucuuuucagagccaccaaaaaaaaaaaaaaaaaaaaaaaaaaaaaaaaaaaaaaaaaaaaaaaaaaaaaaaaaaaaaaaaaaaaaaaaaaaaaaaaaaaaaaaaaaaaaaaaaaaaa

SEQ ID NO: 18290 - RNA, 2045 nt, Artificial Sequence
  mRNA product Design a-1 (hSL-A100) comprising derived and/or modified sequence from LASV(LASV1000-NIG-2009;Clade II)__AIT17783__SP-HsPLAT_NP(2-569) (opt5)
aggagagucccgcagucggcguccagcggcucugcuuguucgugugugugucguugcaggccuuauucaagcuuaccauggacgccaugaagagaggccugugcugugugcuccugcuuugcggggcugucuucguuagccccagcgccuccaaggaggugaaaucuuuccuguggacccagagccucagacgggaacuguccggcuacugcucuaacaucaaacuucaagucguuaaggacgcucaggcccugcuccacgggcuggauuuuagcgagguguccaaugugcagcgccuuaugagaaagcagaaacgggacgauucugaccugaagcgccucagagaucugaaccaagcggucaauaaccugguggaacucaagagcacacagcagaaauccauucugcggguuggaacgcuuaccagcgacgaucugcucacacuggcugccgaccuugagaagcugaaaucuaaggugauccgcaccgaaagaccccucuccagcggcgucuauauggggaaucugucuacacagcaacuggagcagcggcgcgcccuccugaacaugauuggaauggugggcggggcucagggaacccagccuggcagagauggcguugugcgggucugggacgugaaaaauccggaucuucugaacaaucaauucgggacaaugcccucccucacccuggccugucuuacgaagcagggacagguggaccugaacgaugucguucucgcucugaccgaccugggccucaucuacacagccaaguauccuaauagcucugaccuggaucgccuuucccaaagccaucccauucugaacaugguggacaccaaaaaguccucucucaauaucagcggguacaacuuuucccugggagcggccgugaaagcuggcgccugcaugcuugaugggggaaauaugcuggagacaaucaaggucaccccucagacgauggacggcauucucaaaagcauccugaaggugaaaaagucucugggcauguucguuuccgauacacccggggaaagaaacccuuaugagaacauucucuacaagaucugucugagcggagacggcuggccguauauugcuucucggaccagcaucguggggcgcgccugggaaaauacaaccgucgaucuugaguccgacggaaaaccccagaaggugggcaccgcggggucuaacaaaagccugcaguccgccggauuuccuacaggccucacguacagccaacugaugacccugaaggauucuaugaugcagcuugaccccuccgcuaaaacauggauugauaucgagggcagaccugaagaccccguugagaucgcccucuaccagccggugagcgggugcuauauucacuucuuucgggaaccuaccgaccugaagcaguucaagcaagaugcuaaauacucucauggaaucgacgucgccgaucuguuucccgcccagccuggccucacauccgcugugauugaggcgcugcccagaaauaugguccuuaccugucaggggagcgacgauaucaagcgccugcucgacucccagggacggagagauauuaaacugaucgacaucgcccugucuaaggcugauagccgccgguucgaaaacgccgugugggaccaaugcaaagaucuuugucacaugcauacgggcguuguggucgagaagaagaaaagagggggcaaggaggaaauuacaccccacugcgcccucauggacuguaucauguaugaugcugccguguccggaggccugaauauuccuguucugcgcgcggugcucccgcgggacauggucuuuagaaccucuagccccaaaguggugcugugaggacuagucccuguucccagagcccacuuuuuuuucuuuuuuugaaauaaaauagccugucuuucagaucucaaaggcucuuuucagagccaccaaaaaaaaaaaaaaaaaaaaaaaaaaaaaaaaaaaaaaaaaaaaaaaaaaaaaaaaaaaaaaaaaaaaaaaaaaaaaaaaaaaaaaaaaaaaaaaaaaaaa

SEQ ID NO: 18291 - RNA, 2045 nt, Artificial Sequence
  mRNA product Design a-1 (hSL-A100) comprising derived and/or modified sequence from LASV(LASV221-NIG-2010;Clade II)__AIT17625__SP-HsPLAT_NP(2-569) (opt5)
aggagagucccgcagucggcguccagcggcucugcuuguucgugugugugucguugcaggccuuauucaagcuuaccauggacgccaugaagagaggccugugcugugugcuccugcuuugcggggcugucuucguuagccccagcgccuccaaggaggugaaaucuuuccuguggacccagagccucagacgggaacuguccggcuacugcucuagcaucaaacuucaagucguuaaggacgcucaggcccugcuccacgggcuggauuuuuccgaggugucuaacgugcagcgccuuaugagaaagcagcggcgcgacgauagcgaccugaaaagacuccgggaucugaaucaagcggucaacaaucugguggaacucaaguccacacagcaaaagagcauucugcgcguuggaacgcuuaccucugacgaucugcucacacuggcugccgaccuugagaaacugaaguccaaagugaucagaaccgaacggccccucagcucuggcgucuauauggggaaccuguccacacagcagcuggagcagcgcagagcccuccugaauaugauuggaauggugggcggggcucagggaacccagccuggccgggauggcguugugcgcgucugggacgugaagaacccggaucuucugaauaaccaauucgggacaaugcccagccucacccuggccugucuuacgaaacagggacagguggaccugaaugaugcuguccucgcccugaccgaccugggccucaucuacacagcgaaguauccuaacucuuccgaccuggauagacuuagccaaucccaucccauucugaauaugguugacaccaagaaaucuagccucaacaucuccggguacaauuuuagccugggagccgcugugaaggccggcgcuugcaugcuugaugggggaaacaugcuggagacaaucaaagugaccccucagacggucgacggcauucucaagucuauccugaaagugaagcggucccugggcauguucguuagcgauacacccggggaacgcaauccuuaugagaacauucucuacaaaaucugucugucuggagacggcuggccguauauugccagcagaaccuccaucguggggcgggcgugggaaaacacaaccgucgaucuugagucugacggaaagccccagaaggugggcaccgccgggagcaauaaaucccugcagagcgcuggauuuccuacaggccucacguacucucaacugaugacccugaaggauuccaugaugcagcuugaccccagcgccaaaacauggauugauaucgagggcagaccugaagaccccguugagaucgcucucuaccagccgaugucugggugcuauauucacuucuuucgcgaaccuaccgaccugaagcaguucaaacaagaugccaaguacucccauggaaucgacguggccgaucuguuucccgcucagccuggccucacaagcgcggucauugaggcccugccccggaacauggugcuuaccugucagggguccgacgauaucaagagacugcucgacucucagggacgccgggauauuaaacugaucgacaucgcucugagcaaggccgauuccagaaaauucgaaaaugccgucugggaccaaugcaaggaucuuugucacaugcauacgggcgugguuguggagaaaaagaagcgcgggggcaaagaggaaauuacaccccacugcgcucucauggacuguaucauguaugaugccgcggucucuggaggccugaacauuccugugcugcgggcuguucucccgagagacaugguguuucgcaccagcucccccaaggucgugcugugaggacuagucccuguucccagagcccacuuuuuuuucuuuuuuugaaauaaaauagccugucuuucagaucucaaaggcucuuuucagagccaccaaaaaaaaaaaaaaaaaaaaaaaaaaaaaaaaaaaaaaaaaaaaaaaaaaaaaaaaaaaaaaaaaaaaaaaaaaaaaaaaaaaaaaaaaaaaaaaaaaaaa

SEQ ID NO: 18292 - RNA, 2045 nt, Artificial Sequence
  mRNA product Design a-1 (hSL-A100) comprising derived and/or modified sequence from LASV(LASV237-NIG-2010;Clade II)__AIT17639__SP-HsPLAT_NP(2-569) (opt5)
aggagagucccgcagucggcguccagcggcucugcuuguucgugugugugucguugcaggccuuauucaagcuuaccauggacgccaugaagagaggccugugcugugugcuccugcuuugcggggcugucuucguuagccccagcgccuccaaggaggugaaaucuuuccuguggacccagagccucagacgggaacuguccggcuacugcucuaacaucaaacuucaagucguuaaggacgcucaggcccugcuccacgggcuggauuuuagcgagguguccaaugugcagcgccuuaugagaaagcagaaacgggacgauucugaccugaagcgccucagagaucugaaccaagcggucaauaaccugguggaacucaagagcacacagcagaaauccauucugcggguuggaacgcuuaccagcgacgaucugcucacacuggcugccgaccuugagaagcugaaaucuaaggugauccgcaccgaaagaccccucuccagcggcgucuauauggggaaucugucuacacagcaacuggagcagcggcgcgcccuccugaacaugauuggaauggugggcggggcucagggaacccagccuggcagagauggcguugugcgggucugggacgugaaaaauccggaucuucugaacaaucaauucgggacaaugcccucccucacccuggccugucuuacgaagcagggacagguggaccugaacgaugcuguccucgcccugaccgaccugggccucaucuacacagcgaaguauccuaauagcucugaccuggaucgccuuucccaaagccaucccauucugaacaugguugacaucaaaaaguccucucucaauaucagcggguacaacuuuucccugggagccgcugugaaagccggcgcuugcaugcuugaugggggaaauaugcuggagaccauuaaggugacaccucagaccauggacggcauccucaaaagcauucugaaggucaaaagaucucugggcauguucguguccgauacgcccggggaacggaacccuuaugagaacauccucuacaagauuugucugagcggagacggcuggccguauaucgccucucgcacaagcauuguugggagagcgugggaaaauaccacaguggaucuugaguccgacggaaagccccagaaagucggcucugccgggagcaacaagucccugcagagcgcuggauuuccuaccggccucaccuacucucaacugaugacacugaaagauuccaugaugcagcuugaccccagcgccaagacguggaucgauaucgagggccggccugaagaccccguggagauugcucucuaccagccgaugucugggugcuauauccacuucuuuagagaaccuaccgaccugaaacaguucaagcaagaugccaaguacucccauggaauugacguugccgaucuguuucccgcucagccuggccucacaagcgcggugaucgaggcccugccccgcaauaugguccuuaccugucagggguccgacgauauuaaacggcugcucgacucucagggaagacgcgauaucaagcugaucgacauugcucugagcaaagccgauucccggagauucgaaaacgccgugugggaccaaugcaaggaucuuugucacaugcauacaggcgucgugguugagaaaaagaagcgcgggggcaaagaggaaaucacgccccacugcgcucucauggacuguauuauguaugaugccgcggugucuggaggccugaauaucccuguccugcgggcugugcucccgagagacaugguuuuucgcaccagcucccccaaggugguccugugaggacuagucccuguucccagagcccacuuuuuuuucuuuuuuugaaauaaaauagccugucuuucagaucucaaaggcucuuuucagagccaccaaaaaaaaaaaaaaaaaaaaaaaaaaaaaaaaaaaaaaaaaaaaaaaaaaaaaaaaaaaaaaaaaaaaaaaaaaaaaaaaaaaaaaaaaaaaaaaaaaaaa

SEQ ID NO: 18293 - RNA, 2045 nt, Artificial Sequence
  mRNA product Design a-1 (hSL-A100) comprising derived and/or modified sequence from LASV(LASV253-NIG-2011;Clade II)__AIT17671__SP-HsPLAT_NP(2-569) (opt5)
aggagagucccgcagucggcguccagcggcucugcuuguucgugugugugucguugcaggccuuauucaagcuuaccauggacgccaugaagagaggccugugcugugugcuccugcuuugcggggcugucuucguuagccccagcgccuccaaggaggugaaaucuuuccuguggacccagagccucagacgggaacuguccggcuacugcucuagcaucaaacuucaagucguuaaggacgcucaggcccugcuccacgggcuggauuuuuccgaggugucuaacgugcagcgccuuaugagaaagcagaaacgggacgauagcgaccugaagcgccucagagaucugaaucaagcggucaacaaucugguggaacucaaguccacccagcagaaaagcguucugcgggugggaacgcuuaccucugacgaucugcucacacuggcugccgaccuugagaagcugaaauccaaggucauucgcaccgaaagaccccucagcucuggcguguauauggggaaccuguccacacagcaacuggagcagcggcgcgcccuccugaauaugaucggaaugguuggcggggcucagggaacccagccuggcagagauggcgugguccgggugugggacgugaaaaacccggaucuucugaauaaccaauucgggacaaugcccagccucacccuggccugucuuacgaagcagggacaggucgaccugaaugauguugugcucgcucugaccgaccugggccucauuuacacagccaaguauccuaacucuuccgaccuggaucgccuuagccaaucccaucccauccugaauaugguggacaccaaaaagucuagccucaacauuuccggguacaauuuuagccugggagcggccgucaaagcuggcgccugcaugcuugaugggggaaacaugcuggagacaaucaaggugaccccucagacgauggacggcauccucaaaucuauucugaagguuaaaaagucccugggcauguucgugagcgauacacccggggaaagaaauccuuaugagaacauccucuacaagauuugucugucuggagacggcuggccguauaucgcuagccggaccuccauugucgggcgcgccugggaaaacacaaccguggaucuugagucugacggaaaaccccagaagguuggcaccgcggggagcaauaaaucccugcagagcgccggauuuccuacaggccucacguacucucaacugaugacccugaaggauuccaugaugcagcuugaccccagcgcuaaaacauggaucgauauugagggcagaccugaagaccccguggagaucgcccucuaccagccgaugucugggugcuauauccacuucuuucgggaaccuaccgaccugaagcaguucaagcaagaugcuaaauacucccauggaauugacgucacagaucuguuucccgcccagccuggccucaccagcgccgugaucgaggcucugcccagaaacaugguccuuacgugucagggguccgacgauauuaagcgccugcucgacucucagggacggagagauaucaaacugauugacaucgcgcugagcaaggccgauucccgccgguucgaaaaugcugugugggaccaaugcaaagaucuuugucacaugcauacaggcguuguggucgagaagaagaaaagagggggcaaggaggaaaucacaccccacugcgcccucauggacuguauuauguaugaugccgcugugucuggaggccugaacaucccuguucugcgcgccgugcucccgcgggacauggucuuuagaaccagcucccccaaaguggugcugugaggacuagucccuguucccagagcccacuuuuuuuucuuuuuuugaaauaaaauagccugucuuucagaucucaaaggcucuuuucagagccaccaaaaaaaaaaaaaaaaaaaaaaaaaaaaaaaaaaaaaaaaaaaaaaaaaaaaaaaaaaaaaaaaaaaaaaaaaaaaaaaaaaaaaaaaaaaaaaaaaaaaa

SEQ ID NO: 18294 - RNA, 2045 nt, Artificial Sequence
  mRNA product Design a-1 (hSL-A100) comprising derived and/or modified sequence from LASV(LASV254-NIG-2011;Clade II)__AIT17675__SP-HsPLAT_NP(2-569) (opt5)
aggagagucccgcagucggcguccagcggcucugcuuguucgugugugugucguugcaggccuuauucaagcuuaccauggacgccaugaagagaggccugugcugugugcuccugcuuugcggggcugucuucguuagccccagcgccuccaaggaggugaaaucuuuccuguggacccagagccucagacgggaacuguccggcuacugcucuagcaucaaacuucaagucguuaaggacgcucaggcccugcuccacgggcuggauuuuuccgaggugucuaacgugcagcgccuuaugagaaagcagaaacgggacgauagcgaccugaagcgccucagagaucugaaucaagcggucaacaaucugguggaacucaaguccacacagcagaaaagcguucugcgggugggaacgcuuaccucugacgaucugcucacacuggcugccgaccuugagaagcugaaauccaaggucauucgcaccgaaagaccccucagcucuggcguguauauggggaaccuguccacacagcaacuggagcagcggcgcgcccuccugaauaugaucggaaugguuggcggggcucagggaacccagccuggcagagauggcgugguccgggugugggacgugaaaaacccggaucuucugaauaaccaauucgggacaaugcccagccucacccuggccugucuuacgaagcagggacaggucgaccugaaugaugcuguucucgcccugaccgaccugggccucauuuacacagcgaaguauccuaacucuuccgaccuggaucgccuuagccaaucccaucccauccugaauaugguggacaccaaaaagucuagccucaacauuuccggguacaauuuuagccugggagccgcugugaaagccggcgcuugcaugcuugaugggggaaacaugcuggagacaaucaaggucaccccucagacgauggacggcauccucaaaucuauucugaaggugaaaaagucccugggcauguucguuagcgauacacccggggaaagaaauccuuaugagaacauccucuacaagauuugucugucuggagacggcuggccguauaucgccagccggaccuccauuguggggcgcgcgugggaaaacacaaucgucgaucuugagucugacggaaaaccccagaaggugggcaccgccgggagcaauaaaucccugcagagcgcuggauuuccuaccggccucacauacucucaacugaugacgcugaaggauuccaugaugcagcuugaccccagcgccaaaaccuggauugauaucgagggcagaccugaagaccccguugagaucgcucucuaccagccgaugucugggugcuauauucacuucuuucgggaaccuacagaccugaagcaguucaagcaagaugccaaauacucccauggaaucgacguggccgaucuguuucccgcucagccuggccucaccagcgcggucauugaggcccugcccagaaacauggugcuuacaugucagggguccgacgauaucaagcgccugcucgacucucagggacggagagauauuaaacugaucgacaucgcucugagcaaggccgauucccgccgguucgaaaaugccgucugggaccaaugcaaagaucuuugucacaugcauaccggcgugguuguggagaagaagaaaagagggggcaaggaggaaauuacgccccacugcgcucucauggacuguaucauguaugaugccgcggucucuggaggccugaacauuccugugcugcgcgcuguucucccgcgggacaugguguuuagaacaagcucccccaaagucgugcugugaggacuagucccuguucccagagcccacuuuuuuuucuuuuuuugaaauaaaauagccugucuuucagaucucaaaggcucuuuucagagccaccaaaaaaaaaaaaaaaaaaaaaaaaaaaaaaaaaaaaaaaaaaaaaaaaaaaaaaaaaaaaaaaaaaaaaaaaaaaaaaaaaaaaaaaaaaaaaaaaaaaaa

SEQ ID NO: 18295 - RNA, 2045 nt, Artificial Sequence
  mRNA product Design a-1 (hSL-A100) comprising derived and/or modified sequence from LASV(Nig08-04;Clade II)__ADU56611__SP-HsPLAT_NP(2-569) (opt5)
aggagagucccgcagucggcguccagcggcucugcuuguucgugugugugucguugcaggccuuauucaagcuuaccauggacgccaugaagagaggccugugcugugugcuccugcuuugcggggcugucuucguuagccccagcgccuccaaggaggugaaaucuuuccuguggacccagagccucagacgggaacuguccggcuacugcucuaacaucaaacuucaagucguuaaggacgcucaggcccugcuccacgggcuggauuuuagcgagguguccaaugugcagcgccuuaugagaaagcagaaacgggacgauggagaccugaagcgccucagagaucugaaccaagcggucaauaaccugguggaacucaagucuacccagcagaaaagcguucugcgggugggcacgcuuaccuccgacgaucugcucacacuggcugccgaccuugagaagcugaaaagcaaggucauucgcaccgaaagaccccucucuuccgggguguauaugggaaaucugagcacacagcaacuggagcagcggaaagcccuccugucuaugaucggcaugguugggggagcucagggcacccagccuggccgcgaugggguggucagagugugggacgugaagaacccggaucuucugaauaaccaauucggaacaaugcccucccucacccuggccugucuuacgaagcagggccaggucgaccugaaugaugcuguucucgcccugaccgaccuggggcucauuuacacagcgaaauauccuaacagcucugaccuggaucggcuuucccaaagccaucccauccugaauaugguggacaccaagaaauccucucucaacauuagcggauacaauuuuucccugggcgccgcugugaaggccggggcuugcaugcuugauggaggcaacaugcuggagacaaucaaagucaccccucagacgauggacggcauccucaagagcauucugaaagugaagcgcucucuggggauguucguuuccgauacacccggagaaagaaauccuuaugagaacauccucuacaagauuugucugagcggcgacggguggccguauaucgccucucggaccagcauugugggacgcgcgugggaaaacacaaccgucgaucuugaguccgacggcaaaccccagaagguggggaccgccggaucuaauaaaagccugcaguccgcuggcuuuccuacaggccucacguacagccaacugaugacccugaaggauucuaugaugcagcuugaccccuccgccaaaacauggaucgauauugaggggagaccugaagaccccguugagaucgcucucuaccagccgaugagcggaugcuauauccacuucuuucgggaaccuaccgaccugaagcaguucaagcaagaugccaaauacucucauggcauugacgugacagaucuguuuuccgcccagcccgggcucaccagcgcugucaucgaggcgcugccuagaaacauggugcuuacgugucagggauccgacgauauuaagaaacugcucgacucucagggccgccgggauaucaagcugauugacaucagccugaauaaagccgauuccagacgcuucgaaaacgcugucugggaccaaugcaaggaucuuugucacaugcauacaggggugguuguggagaagaaaaagcggggcggaaaagaggaaaucacaccccacugcgcccucauggacuguauuauguuugaugccgcugucucuggcgggcugaauauccccauucugagagccgugcucccucgcgacaugguuuuccggaccagcuccccgaaggugguccugugaggacuagucccuguucccagagcccacuuuuuuuucuuuuuuugaaauaaaauagccugucuuucagaucucaaaggcucuuuucagagccaccaaaaaaaaaaaaaaaaaaaaaaaaaaaaaaaaaaaaaaaaaaaaaaaaaaaaaaaaaaaaaaaaaaaaaaaaaaaaaaaaaaaaaaaaaaaaaaaaaaaaa

SEQ ID NO: 18296 - RNA, 2048 nt, Artificial Sequence
  mRNA product Design a-1 (hSL-A100) comprising derived and/or modified sequence from LASV(GA391;Clade III)__AAA46284__SP-HsPLAT_NP(2-570) (opt5)
aggagagucccgcagucggcguccagcggcucugcuuguucgugugugugucguugcaggccuuauucaagcuuaccauggacgccaugaagagaggccugugcugugugcuccugcuuugcggggcugucuucguuagccccagcgccuccaaggaggugagaucuugccuguggacccagagccuccggcgcgaacuguccggcuacuguucuaacaucaaacuucaagucguuaaggacgcucaggcccugcuccacgggcuggauuucagcgagguguccaaugugcagagacuuaugcggaaacagaagcgcgacgauggagaccugaaaagacuccgggaucugaaccaagcggucaauaaccugguggaacucaagucuacacagcagaaaagcguucugcgcgugggcacgcuuuccagcgacgaucugcucauucuggcugccgaccuugagaaacugaagucuaaagucaccagaacagaacggccccucuccagcgggguguauaugggaaaucugucuucccagcaacuggaucagcgcagagcccuccugaacaugaucggcaugaccgggguuagcggaggcggcaagggggcuucuaauggaauugugcgggucugggacgugaaaaacgccgagcuucugaauaaccaguuuggcacaaugccuucccucacccuggcuugccuuacaaagcaggggcaaguggaucugaaugacgccguccaggcgcucaccgaucugggacugaucuacacggccaaguauccgaacagcuccgaccucgaccgccugucucagagccaucccauucuuaauaugaucgauaccaaaaaguccagccugaacaucucuggcuacaauuucucccucggggcugccguuaaagcuggagccuguaugcuggacggcggcaacaugcuugagacaauuaaggugagcccucaaaccauggaugggauccugaaaucuauucucaaggugaaaaagagccugggaauguuugucuccgacacacccggcgaaagaaacccuuaugagaauauccuguacaagauuugccucucuggggauggauggagcuauaucgcgucccggaccagcauugugggccgcgccugggaaaacacgguuguggaccuggagcaggauaauaaaccccagaagaucgggaacggaggcucuaauaaaucccuucagagcgcuggcuucgccgcugggcugaucuacucucaacucaugacacugaaggacuuuaaauguuucaaccugauuccuaaugccaagaccuggauggauaucgagggaagaccggaagaccccgucgagauugcccuuuaccagccuuccagcggcugcuaugugcacuuuuuccgggaacccacagaucucaagcaguuuaaacaggacgcuaaguacucccaugggagagacguuaccgaucuguucgcggcccaaccuggacugaccucugcugugaucgaggcccucccccgcaacauggucauuacaugucagggcagcgaagacauccggaaacugcuugagucccaggggagacgcgauaucaagcugauugacaucacgcucucuaaagccgauagccggaaguuugagaaugcugugugggaccaguucaaggaucugugccacaugcauaccggcgucgugguugaaaagaagaaaagaggaggcaaggaggaaauuacaccgcacugugcccugauggacugcaucauguuugaugcggcuguguccgggggacuugacgccaaaguccuccgcgugguucugccucgggauaugguguucagaaccagcacacccaaggucgugcugugaggacuagucccuguucccagagcccacuuuuuuuucuuuuuuugaaauaaaauagccugucuuucagaucucaaaggcucuuuucagagccaccaaaaaaaaaaaaaaaaaaaaaaaaaaaaaaaaaaaaaaaaaaaaaaaaaaaaaaaaaaaaaaaaaaaaaaaaaaaaaaaaaaaaaaaaaaaaaaaaaaaaa

SEQ ID NO: 18297 - RNA, 2045 nt, Artificial Sequence
  mRNA product Design a-1 (hSL-A100) comprising derived and/or modified sequence from LASV(Nig08-A19;Clade III)__ADU56619__SP-HsPLAT_NP(2-569) (opt5)
aggagagucccgcagucggcguccagcggcucugcuuguucgugugugugucguugcaggccuuauucaagcuuaccauggacgccaugaagagaggccugugcugugugcuccugcuuugcggggcugucuucguuagccccagcgccuccaaggaggugaaaucuuuccuguggacccagagccucagacgggaacuguccggcuacugcucuaacaucaaacuucaagucguuaaggacgcucaggcccugcuccacgggcuggauuuuagcgagguguccaaugugcagcgccuuaugagaaagcagaaacgggacgauggagaccugaagcgccucagagaucugaaccaagcggucaauaaccugguggaacucaagucuacacagcagaaaagcguucugcgggugggcacgcuuuccagcgacgaucugcucguccuggcugccgaccuugagaagcugaaaucuaaggugguucgcaccgaaagaccccucuccagcgggauuuauaugggaaaucugucuucccagcaacuggaucagcggaaagcccuccugaacaugaucggcaugacagggggaaauggcggccgcaacaccacaagcgacgggauugugagagucugggaugugaagaaugcugagcuucugaacaaucaguucggaaccaugccuucucucacacuggccugucuuaccaagcagggccaaguggaccugaacgaugcuguccaggcccucacggaccuggggcugaucuacaccgcgaaauaucccaauuccagcgaccucgaucggcuggcccagucccauccgauucuuaacaugaucgacacaaagaaaucuagccugaauaucuccggauacaacuuuagccucggcgcugccguuaaggcuggggccugcaugcuggauggaggcaacaugcuugagaccauuaaagugucuccucaaacaauggacggcauccugaaguccauucucaaagugaagcgcagccuggggauguucaucucugauacccccggagaaagaaauccuuaugagaacauucuguacaagaucugucucagcggcgacggguggcccuauauugcgucccggacgucuaucgucggacgcgccugggaaaauacagugguugaucuggagagcgacaacaaaccucagaagaccggcaaugggggauccaacaaaagccuucagucugcuggcuuugccgcuggccugacauacucccagcucaugacccugaaggauagcaugcugcaacuugacccgaaugccaaaaccuggauggauaucgaggggagacccgaagacccuguggagauugcccucuaccagcccucuuccggaugcuauauccacuucuuucgggaaccuacagaccugaagcaguucaagcaggaugcuaaauacagccauggcauugacgucacggaucuguuugcggcccaacccgggcucaccuccgcugugaucgaggcccugccgagaaacaugguuauuacaugucagggaucugaagacauccgcaaacuucuggagagccagggccggagagauaucaagcucauugacaucucccugucuaagguggauagccgcaaauucgagaaugccgucugggaccaguuuaaggaucugugccacaugcauaccgggauuguggucgaaaagaaaaagcggggcggaaaagaggaaaucacaccucacugugcucuuauggacugcauuauguucgaugccgcgguguccggcgggguugacgcuaaggugcucagagccguccugccccgcgauaugguguuucggaccagcacgccuaaaguugugcugugaggacuagucccuguucccagagcccacuuuuuuuucuuuuuuugaaauaaaauagccugucuuucagaucucaaaggcucuuuucagagccaccaaaaaaaaaaaaaaaaaaaaaaaaaaaaaaaaaaaaaaaaaaaaaaaaaaaaaaaaaaaaaaaaaaaaaaaaaaaaaaaaaaaaaaaaaaaaaaaaaaaaa

SEQ ID NO: 18298 - RNA, 2045 nt, Artificial Sequence
  mRNA product Design a-1 (hSL-A100) comprising derived and/or modified sequence from LASV(G1180-SLE-2010;Clade IV)__AIT17169__SP-HsPLAT_NP(2-569) (opt5)
aggagagucccgcagucggcguccagcggcucugcuuguucgugugugugucguugcaggccuuauucaagcuuaccauggacgccaugaagagaggccugugcugugugcuccugcuuugcggggcugucuucguuagccccagcgccuccaaggagaucaaaucuuuccuguggacccagagccucagacgggaacuguccggcuacugcucuaacauuaagcugcaaguggucaaagacgcucaggcccugcuccacgggcuggauuuuagcgagguuuccaaugugcagcgccuuaugagaaaggaacggcgcgacgauaacgaccugaaaagacuccgggaucugaaucaggcggugaacaaucuggucgagcucaagucuacacaacaaaagagcauccugcgcgugggaacgcuuaccuccgacgaucugcucauucuggcugccgaccuugaaaaacuuaagagcaaaguuaucagaacagagcggccccucucugccggcguguauauggggaaccuguccagccagcagcuggaucagcgcagagcucuccugucuaugauuggaauguccagcggcaaucagcgggcccaggcugggcgcgacggagucgugagaguuugggaugugaagaacgucgagcuucugaauaaccaguucggcaccaugccuucucucacacuggccugucuuaccaaacaaggccagguggaccugaaugaugcggugcaggcccucacagaccuggggcugaucuacaccgcuaaguauccgaacacguccgaccucgaucggcugacccaaagccaucccauccuuaauaugauugacacaaagaaauccucucugaacaucagcggauacaauuuuucccucggcgccgcugucaaggccggggcgugcaugcuggauggaggcaacaugcuugaaaccauuaaaguuagcccucagacaauggacgggauccugaagucuauucucaaagugaagaaagcccugggaauguucaucuccgauacccccggcgagcgcaacccuuaugaaaauauucuguacaagaucugucucagcggcgacggguggcccuauaucgcuucuagaacgagcauuacaggacgggccugggagaacaccguggucgaucuggaguccgacggcaagccucagaaagcugggucuaauaacagcaauaagucccuucagagcgugggauuuacagccggccugaccuacucucaacucaugacccugaaagaugccaugcugcagcuugacccgaacgcuaagacauggauggauaucgaagggagacccgaggacccuguugaaauugcgcucuaccagcccuccagcggaugcuauauccacuucuuucgcgagccuacggaccugaaacaguucaagcaagaugccaaguacucucauggcauugacgugaccgaucuguuugcugcccagcccggccucacauccgccgucaucgacgcucugccgcggaauauggugaucaccugucaggggagcgaugacauuagaaaacuucuggaaucccagggacgcaaggauaucaaacucauugacaucgcccugucuaagacagauagccggaaauaugagaacgcgguuugggaccaauacaaggaucugugccacaugcauaccggcguggucguggagaagaaaaagagagggggaaaagaagagauuacgccucacugugcucuuauggacugcaucauguucgaugccgccgucuccggcgggcucaauacaucugugcugcgcgcuguucugccccgggacaugguguuuagaaccagcaccccucgcgucgugcucugaggacuagucccuguucccagagcccacuuuuuuuucuuuuuuugaaauaaaauagccugucuuucagaucucaaaggcucuuuucagagccaccaaaaaaaaaaaaaaaaaaaaaaaaaaaaaaaaaaaaaaaaaaaaaaaaaaaaaaaaaaaaaaaaaaaaaaaaaaaaaaaaaaaaaaaaaaaaaaaaaaaaa

SEQ ID NO: 18299 - RNA, 2045 nt, Artificial Sequence
  mRNA product Design a-1 (hSL-A100) comprising derived and/or modified sequence from LASV(G1442-SLE-2011;Clade IV)__AIT17181__SP-HsPLAT_NP(2-569) (opt5)
aggagagucccgcagucggcguccagcggcucugcuuguucgugugugugucguugcaggccuuauucaagcuuaccauggacgccaugaagagaggccugugcugugugcuccugcuuugcggggcugucuucguuagccccagcgccuccaaggaggugaaaucuuuccuguggacccagagccucagacgggaacuguccggcuacugcucuaacaucaaacuucaagucguuaaggacgcucaggcccugcuccacgggcuggauuuuagcgagguguccaaugugcagcgccuuaugagaaagcagcggcgcgacgauaacgaccugaaaagacuccgggaucugaaucaagcggucaacaaucugguggaacucaagucuacacagcaaaagagcguucugcgcgugggaacgcuuaccuccgacgaucugcucguccuggcugccgaccuugagaaacuuaagagcaaagugauuagaacagaacggccccucucugccggcguuuauauggggaaccuguccagccagcagcuggaucagcgcagagcucuccugaauaugaucggaaugucuggcgggauucagggaacccggacaggccgcgacggcguggucagagugugggaugugaagaacgccgaccuucugaauaaccaguucgggaccaugccuucccucacacuggcuugucuuaccaaacaaggacaggucgaucugaaugacguugugcaggcccucacggaccugggccugaucuacaccgcgaaguauccgaacgccagcgaucucgaccggcugacacaaucucaucccauucuuaauaugaucgauaccaagaaauccagccugaacaucuccggguacaauuuuucucucggagcugccgugaaggcuggcgccugcaugcuggacgggggaaacaugcuugagacaauuaaagucagcccucagaccauggauggcauccugaaguccauucucaaagugaagaaaacgcugggcauguucaucagcgacacacccggggagcgcaacccuuaugaaaauauucuguacaagaucugucucucuggagauggcuggcccuauauugcguccagaaccagcaucacagggcgggccugggagaacaccguuguggaccuggaaucugauggaaagccucagaaagcuggcagcaauaacuccaauaagucucuucagagcgccggguuugcugccggacugaccuacucccaacucaugacacugaaagacgccaugcugcagcuugauccgaacgcuaagacguggauggacaucgagggcagacccgaggacccugucgaaauugcgcucuaccagcccagcucuggcugcuauauccacuucuuucgcgagccuaccgaucugaaacaguucaagcaagacgccaaguacucccaugggauugaugugacagaccuguuugcugcccagcccggacucaccagcgccguuaucgaagcucugccgcggaauauggugauuacaugucagggcucugaugacaucaaaaagcugcuggagucccaggggagaaaagauaucaagcucauugacaucgcccugagcaaaaccgauucccgcaaguaugaaaacgcggucugggaccaauacaaggaucugugccacaugcauacgggaguggucguggagaaaaagaaacggggcgggaaggaggaaauuacaccucacugugcucuuauggacugcaucauguucgaugccgccguuucuggcggacucaauacccuggugcugagagcuguccucccccgcgacaugguguuucggaccagcacaccuagaguugugcugugaggacuagucccuguucccagagcccacuuuuuuuucuuuuuuugaaauaaaauagccugucuuucagaucucaaaggcucuuuucagagccaccaaaaaaaaaaaaaaaaaaaaaaaaaaaaaaaaaaaaaaaaaaaaaaaaaaaaaaaaaaaaaaaaaaaaaaaaaaaaaaaaaaaaaaaaaaaaaaaaaaaaa

SEQ ID NO: 18300 - RNA, 2045 nt, Artificial Sequence
  mRNA product Design a-1 (hSL-A100) comprising derived and/or modified sequence from LASV(G3010-SLE-2013;Clade IV)__AIT17345__SP-HsPLAT_NP(2-569) (opt5)
aggagagucccgcagucggcguccagcggcucugcuuguucgugugugugucguugcaggccuuauucaagcuuaccauggacgccaugaagagaggccugugcugugugcuccugcuuugcggggcugucuucguuagccccagcgccuccaaggagaucaaaucuuuccuguggacccagagccucagacgggaacuguccggcuacugcucuaacauuaaacuucaaguggucaaagacgcucaggcccugcuccacgggcuggauuuuagcgagguuuccaaugugcagcgccuuaugagaaaggaacggcgcgacgauaacgaccugaaaagacuccgggaucugaaucaggcggugaacaaucuggucgagcucaagucuacacaacaaaagagcauccugcgcgugggaacgcuuaccuccgacgaucugcucauucuggcugccgaccuugaaaaacuuaagagcaaaguuacaagaaccgagcggccccucucugccggcguguauauggggaaccuguccagccagcagcuggaucagcgcagagcucuccugucuaugaucggaauguccagcggcguccagggggcccgggcuggacgcgacggcgugguuagagugugggaugucaagaaugccgagcuucugaacaaucaguucggcacaaugccuucucucacccuggcgugucuuacaaaacaggggcaaguggaccugaacgaugugguccaggcccucaccgaccugggacugauuuacacggcuaaguauccgaauaccuccgaccucgaucggcugacacagagccaucccauccuuaacaugaucgacaccaagaaauccucucugaauauuagcggcuacaacuuuucccucggggccgcuguuaaggccggagcgugcaugcuggauggcgggaauaugcuugaaacaaucaaagugagcccucaaaccauggacggcauucugaagucuauccucaaagugaagaaagcccugggaauguucauuuccgagacgcccggcgaacgcaacccuuaugagaacauccuguacaagauuugucucagcggggauggauggcccuauaucgcuucuagaacaagcaucaccggccgggccugggagaauacagucguggaccuggaauccgaugggaagccucagaaagcuggaucuaacaauagcaacaagucccuucagagcgccggcuuuaccgccgggcugaccuacucucagcucaugacacugaaagacgcuaugcugcaacuugauccgaaugcgaagacguggauggacauugagggaagacccgaagauccuguugagguggcccucuaccagcccuccagcggcugcuauauccacuucuuucgcgaaccuaccgaccugaaacaguucaagcaggacgcuaaguacucucauggcauugaugucacagaccuguuugccgcccaacccgggcucaccuccgcugugaucgaugcccugccgcggaacaugguuauuacaugucagggaagcgacgauaucaaaaagcugcuggagucccagggcagaaaagacaucaagcucauugauaucgcgcugucuaaaaccgacagccgcaaguaugagaaugcugugugggaucaguacaaggaccugugccacaugcauacgggggucguggucgaaaagaagaaacggggaggcaaggaggaaauuacaccucacugugcccuuauggauugcaucauguucgacgccgcuguguccgggggccucaacaccucuguucugagagccgugcugccccgcgauauggucuuucggaccagcacaccuagagugguucucugaggacuagucccuguucccagagcccacuuuuuuuucuuuuuuugaaauaaaauagccugucuuucagaucucaaaggcucuuuucagagccaccaaaaaaaaaaaaaaaaaaaaaaaaaaaaaaaaaaaaaaaaaaaaaaaaaaaaaaaaaaaaaaaaaaaaaaaaaaaaaaaaaaaaaaaaaaaaaaaaaaaaa

SEQ ID NO: 18301 - RNA, 2045 nt, Artificial Sequence
  mRNA product Design a-1 (hSL-A100) comprising derived and/or modified sequence from LASV(G502-SLE-2009;Clade IV)__AIT17127__SP-HsPLAT_NP(2-569) (opt5)
aggagagucccgcagucggcguccagcggcucugcuuguucgugugugugucguugcaggccuuauucaagcuuaccauggacgccaugaagagaggccugugcugugugcuccugcuuugcggggcugucuucguuagccccagcgccuccaaggagaucaaaucuuuccuguggacccagagccucagacgggaacuguccggcuacugcucuaacauuaagcugcaaguggucaaagacgcucaggcccugcuccacgggcuggauuuuagcgagguuuccaaugugcagcgccuuaugagaaaggaacggcgcgacgauaacgaccugaaaagacuccgggaucugaaucaggcggugaacaaucuggucgagcucaagucuacacaacaaaagagcauccugcgcgugggaacgcuuaccuccgacgaucugcucauucuggcugccgaccuugaaaaacuuaagagcaaaguuaucagaacagagcggccccucucugccggcguguauauggggaaccuguccagccagcagcuggaucagcgcagagcucuccugucuaugauuggaauguccggcgggaaucagggaguccgggccggcaaggacggcgugguucgcgugugggaugucaaaaacgcugagcuucugaauaaccaguucgggaccaugccuagccucacacuggccugucuuaccaagcagggacaaguggaccugaaugaugcggugcaggcccucacagaccugggccugaucuacaccgcuaaguauccgaacacgucugaccucgauagacugacccagucccaucccauccuuaauaugauugacaccaaaaagagcucccugaacaucucuggguacaauuuuagccucggagccgcugucaaagccggcgcgugcaugcuggaugggggaaacaugcuugaaacaauuaagguuuccccucaaacaauggacggcauccugaaaagcauucucaaggugaaaaaggcccugggcauguucaucucugauacccccggggagcggaacccuuaugaaaauauucuguacaagaucugucucuccggagacggcuggcccuauaucgcuagccgcacgucuauuacagggagagccugggagaacaccguggucgaucuggagagcgacggaaaaccucagaaggcuggcuccaauaacucuaauaaaagccuucaguccgccggguuuacagccggacugaccuacagccagcucaugacccugaaggaugcuaugcugcaacuugacccgaacacaaaaacguggauggauaucgaaggccggcccgaggacccuguggaaauugcgcucuaccagcccucuuccggcugcuauauccacuucuuuagagagccuaccgaccugaagcaguucaagcaggaugccaaauacagccaugggauugacguuacagaucuguuugcugcccaacccggacucaccucugccgugaucgacgcucugccgcgcaauauggucaucacaugucagggcuccgaugacauucggaaacuucuggaaagccaggggagaaaggauaucaagcucauugacaucgcccugaacaaaaccgauucccgcaaguaugagaaugcggugugggaccaguacaaggaucugugccacaugcauacgggaguuguggucgagaaaaagaaacggggcgggaaggaagagauuacaccucacugugcucuuauggacugcaucauguucgaugccgccgugucuggcggacucaacaccagcguccugagagcugugcugccccgcgacaugguuuuucggaccuccacaccuagagugguccucugaggacuagucccuguucccagagcccacuuuuuuuucuuuuuuugaaauaaaauagccugucuuucagaucucaaaggcucuuuucagagccaccaaaaaaaaaaaaaaaaaaaaaaaaaaaaaaaaaaaaaaaaaaaaaaaaaaaaaaaaaaaaaaaaaaaaaaaaaaaaaaaaaaaaaaaaaaaaaaaaaaaaa

SEQ ID NO: 18302 - RNA, 2045 nt, Artificial Sequence
  mRNA product Design a-1 (hSL-A100) comprising derived and/or modified sequence from LASV(G733-SLE-2010;Clade IV)__AIT17155__SP-HsPLAT_NP(2-569) (opt5)
aggagagucccgcagucggcguccagcggcucugcuuguucgugugugugucguugcaggccuuauucaagcuuaccauggacgccaugaagagaggccugugcugugugcuccugcuuugcggggcugucuucguuagccccagcgccuccaaggagaucaaaucuuuccuguggacccagagccucagacgggaacuguccggcuacugcucuaacauuaagcugcaaguggucaaagacgcucaggcccugcuccacgggcuggauuuuagcgagguuuccaaugugcagcgccuuaugagaaaggaacggcgcgacgauaacgaccugaaaagacuccgggaucugaaucaggcggugaacaaucuggucgagcucaagucuacacaacaaaagagcgugcugcgcguuggaacgcuuaccuccgacgaacugcucgugcuggcugccgaucuugagaaacuuaagagcaaagucaucagaacagagcggccccucucugccggcguguauauggggaaccuguccagccagcagcuggaccagcgcagagcucuccugucuaugauuggaauguccggcgggaaucagggagcccggaccggccgcgauggcguugugagagucugggacgugaagaacgcugaacuucugaauaaccaguucgggacaaugccuagccucacccuggccugucuuacaaaacagggacaaguggaucugaaugacgcgguccaggcccucaccgaucugggccugaucuacacggcuaaguauccgaacaccucugaccucgaccggcugacacagucccaucccauucuuaauaugaucgauaccaagaaaagcucccugaacaucucuggguacaauuuuagccucggagccgcuguuaaggccggcgcgugcaugcuggacgggggaaacaugcuugagacaauuaaaguguccccucaaaccauggauggcauccucaagagcauucugaaagugaagaaagcccugggcauguucaucucugacacgcccggggaacgcaacccuuaugagaauauucuguacaagaucugucucuccggagauggcuggcccuauauugcuagcagaacaucuaucaccgggcgggccugggagaacacagucguggaccuggaaagcgauggaaagccucagaaagcuggcuccaauaacucuaauaagagccuucaguccgccggguuuaccgccggacugaccuacagccagcucaugacacugaaagacgcuaugcugcaacuugauccgaacgcgaagacguggauggacaucgagggcagacccgaagauccuguugagauugcccucuaccagcccucuuccggcugcuauauccacuucuuucgcgaaccuaccgaccugaaacaguucaagcaggacgcuaaguacagccaugggauugaugugacagaccuguuugccgcccaacccggacucaccucugcugucaucgaugcccugccgcggaauauggugauuacaugucagggcuccgacgauaucagaaaacuucuggagagccaggggcgcaaggacaucaaacucauugauaucgcgcuguccaagauugacucucggaaauaugagaacgcuguuugggaucaguacaaggaccugugccacaugcauaccggaguggucguggaaaagaaaaagagaggcgggaaagaggaaaucacgccucacugugcccuuauggauugcauuauguucgacgccgcugucagcggcggacucaauucccuggugcugcgcgccguucucccccgggauaugguguuuagaacaucuaccccucgcgucgugcugugaggacuagucccuguucccagagcccacuuuuuuuucuuuuuuugaaauaaaauagccugucuuucagaucucaaaggcucuuuucagagccaccaaaaaaaaaaaaaaaaaaaaaaaaaaaaaaaaaaaaaaaaaaaaaaaaaaaaaaaaaaaaaaaaaaaaaaaaaaaaaaaaaaaaaaaaaaaaaaaaaaaaa

SEQ ID NO: 18303 - RNA, 2045 nt, Artificial Sequence
  mRNA product Design a-1 (hSL-A100) comprising derived and/or modified sequence from MOPV/LASV reassortant(IGS-1;Clade IV)__AFY05578__SP-HsPLAT_NP(2-569) (opt5)
aggagagucccgcagucggcguccagcggcucugcuuguucgugugugugucguugcaggccuuauucaagcuuaccauggacgccaugaagagaggccugugcugugugcuccugcuuugcggggcugucuucguuagccccagcgccuccaaggagaucaaaucuuuccuguggacccagagccucagacgggaacuguccggcuacugcucuaacauuaaacuucaaguggucaaggacgcucaggcccugcuccacgggcuggauuuuagcgagguuuccaaugugcagcgccuuaugagaaaggaacggcgcgacgauaacgaccugaaaagacuccgggaucugaaucaggcggugaacaaucuggucgagcucaagucuacacaacaaaagagcauccugcgcgugggaacgcuuaccuccgacgaucugcucauucuggcugccgaccuugaaaaacugagaagcaagguuauccggacagagcgcccccucucugccggcguguauauggggaaccuguccagccagcagcuggaucagagacgggcucuccugaauaugauuggaaugucuggcgggaaccagggagcccgcgcuggcagagacggcgucgugcggguuugggaugugaaaaaugccgagcuucuguccaaccaguucgggaccaugccuagccucacacuggcgugucuuaccaagcagggacaagucgaccugaaugaugccgugcaggcucucacagaccugggccugaucuacaccgccaaauauccgaacacgucugaccucgaucgccugacccagucccaucccauccuuaauaugauugacacaaagaaaagcucccugaacaucucuggguacaauuuuagccucggagcugccgugaaggcgggcgccugcaugcuggaugggggaaacaugcuugaaaccauuaaggucuccccucaaacaauggacggcauccugaaaagcauucucaagguuaaaaaggcucugggcauguucaucucugauacccccggggagagaaacccuuaugaaaauauucuguacaaaaucugucucuccggagacggcuggcccuauaucgccagccggacgucuauuacagggagagcuugggagaacaccgugguggaucuggagagcgacggaaagccucagaaggccgauuccaauaacucuagcaaaucccuucagagcgccggcuuuacagcugggcugaccuacucucagcucaugacccugaaggacgcgaugcugcaacuugauccgaaugccaaaacauggauggacaucgaaggacgccccgaggacccugucgaaauugcucucuaccagcccuccagcggcugcuauauccacuucuuucgggagccuacggaucugaagcaguucaaacaggacgccaaguacucucauggcauugaugugaccgaccuguuugccacacaacccgggcucaccuccgcuguuaucgaugcccugccgagaaacauggugaucacaugucagggaagcgacgauauucgcaaacuucuggaaucccagggccggaaggacaucaagcucauugauaucgaccugucuaaaaccgauagcagaaaguaugagaaugcggucugggaccaguacaaagaucugugccacaugcauacgggggugguuguggagaagaagaaacgcggaggcaaggaagagauuacaccucacugugcucuuauggacugcaucauguucgacgccgccgucuccgggggccucaacaccucugugcugcgggcuguccugcccagagauaugguguuucgcaccagcacaccucggguugugcucugaggacuagucccuguucccagagcccacuuuuuuuucuuuuuuugaaauaaaauagccugucuuucagaucucaaaggcucuuuucagagccaccaaaaaaaaaaaaaaaaaaaaaaaaaaaaaaaaaaaaaaaaaaaaaaaaaaaaaaaaaaaaaaaaaaaaaaaaaaaaaaaaaaaaaaaaaaaaaaaaaaaaa

SEQ ID NO: 18304 - RNA, 2045 nt, Artificial Sequence
  mRNA product Design a-1 (hSL-A100) comprising derived and/or modified sequence from LASV(LM765-SLE-2012;Clade IV)__AIT17815__SP-HsPLAT_NP(2-569) (opt5)
aggagagucccgcagucggcguccagcggcucugcuuguucgugugugugucguugcaggccuuauucaagcuuaccauggacgccaugaagagaggccugugcugugugcuccugcuuugcggggcugucuucguuagccccagcgccuccaaggagaucaaaucuuuccuguggacccagagccucagacgggaacuguccggcuacugcucuaacauuaagcugcaaguggucaaagacgcucaggcccugcuccacgggcuggauuuuagcgagguuuccaaugugcagcgccuuaugagaaaggaacggcgcgacgauaacgaccugaaaagacuccgggaucugaaucaggcggugaacaaucuggucgagcucaagucuacacaacaaaagagcauccugcgcgugggaacgcuuaccuccgacgaucugcucauucuggcugccgaccuugaaaaacuuaagagcaaaguuacaagaaccgagcggccccucucugccggcguguauauggggaaccuguccagccagcagcuggaucagcgcagagcucuccuggacaugaucggaaugucuggcuccaaucagggggcccgggcuggacgcgauggcgucgugagaguuugggacgugaagaacgccgagcuucugaauaaccaguucggcacaaugccuagccucacccuggcgugucuuacaaaacaggggcaagucgaucugaaugacgccgugcaggcucucaccgaccugggacugauuuacacggccaaguauccgaacaccucugaucucgaccggcugacacagucccaucccauccuuaauaugaucgauaccaagaaaagcucccugaacauuucuggcuacaauuuuagccucggggcugccgugaaggcgggagccugcaugcuggacggcgggaacaugcuugaaacaaucaaagucuccccucaaaccauggauggcauucucaagagcauccugaaaguuaagaaagcucugggaauguucauuucugacgcccccggcgagcgcaacccuuaugaaaauauccuguacaagauuugucucuccggggauggauggcccuauaucgcuagcagaacgucuaucacaggccgggccugggagaacaccgugguggaccuggagagcgaugggaagccucagaaagccggauccaauggcucuaacaagagccuucaguccgcuggguuuacagcgggacugaccuacagccagcucaugacccugaaagacgccaugcugcaacuugauccgaaugcuaagacauggauggacauugaaggcagacccgaggacccugucgaaaucgcccucuaccagcccucuuccggcugcuauauucacuucuuucgcgagccuacggaucugaaacaguucaagcaggacgccaaguacagccaugggaucgaugugaccgaccuguuugcugcccaacccggacucacaucugcgguuauugaugcucugccgcggaacauggugaucaccugucagggcuccgacgauaucagaaaacuuuucgaaagccaggggcgcaaggacauuaaacugaucgauauugcccucuccaagacagacucucggaaauaugagaaugccgucugggaucaguacaaggaccugugccacaugcauaccggaaucgugguugagaagaaaaagagaggcgggaaagaagagauuacgccucacugugcucugauggauugcaucauguuugacgccgcugugagcggcggacuuaacacauccguccuccgcgccgugcugccccgggacauggucuucagaaccucuaccccucgcgugguucugugaggacuagucccuguucccagagcccacuuuuuuuucuuuuuuugaaauaaaauagccugucuuucagaucucaaaggcucuuuucagagccaccaaaaaaaaaaaaaaaaaaaaaaaaaaaaaaaaaaaaaaaaaaaaaaaaaaaaaaaaaaaaaaaaaaaaaaaaaaaaaaaaaaaaaaaaaaaaaaaaaaaaa

SEQ ID NO: 18305 - RNA, 2045 nt, Artificial Sequence
  mRNA product Design a-1 (hSL-A100) comprising derived and/or modified sequence from LASV(LM776-SLE-2012;Clade IV)__AIT17825__SP-HsPLAT_NP(2-569) (opt5)
aggagagucccgcagucggcguccagcggcucugcuuguucgugugugugucguugcaggccuuauucaagcuuaccauggacgccaugaagagaggccugugcugugugcuccugcuuugcggggcugucuucguuagccccagcgccuccaaggagaucaaaucuuuccuguggacccagagccucagacgggaacuguccucuuacugcagcaacauuaaacuucaaguggucaaggacgcucaggcccugcuccacggccuggauuuuuccgagguuucuaaugugcagcgccuuaugagaaaggaacggcgcgacgauaacgaccugaaaagacuccgggaucugaaucaggcggugaacaaucuggucgagcucaagagcacacaacagaaguccauccugcgcguggggacgcuuaccagcgacgaucugcucauucuggcugccgaccuugaaaaacugaagucuaaaguuacaagaaccgagcggccccucuccgccggaguguauaugggcaaccugagcucucagcagcuggaucaacgcagagcucuccuguccaugaucgggaugagcggaucuaaucagggcgcccgggcugggcgcgacggagucgugagaguuugggaugugaagaacgccgagcuucugaauaaccaguucggcacaaugccuucccucacccuggcgugucuuacaaaacagggccaagucgaccugaaugaugccgugcaggcucucaccgaccuggggcugauuuacacggccaaguauccgaacaccagcgaccucgaucggcugacacagucccaucccauccuuaauaugaucgacaccaagaaaucuagccugaacauuuccggauacaauuuuagccucggcgcugccgugaaggcgggggccugcaugcuggauggaggcaacaugcuugaaacaaucaaagucucuccucaaaccauggacgggauucugaaguccauccucaaaguuaagaaagcucugggaauguucauuagcgauacgcccggcgagcgcaacccuuaugaaaauauccuguacaagauuugucucucuggcgacggguggcccuauaucgccagcagaacauccaucaccggacgggcuugggagaacacagugguggaucuggagucugacggcaagccucagaaagccgggagcaauaacuccaauaagagccuucagucugccggauuuaccgcuggccugaccuacucccagcucaugacacugaaagaugcgaugcugcaacuugacccgaacgccaagacguggauggauauugaagggagacccgaggacccugucgaaguggcucucuaccagcccagcucuggaugcuauauccacuucuuucgcgagccuaccgaccugaaacaguucaagcaggaugccaaguacucccauggcauugacguuacagaucuguuugccgcucaacccggccucaccagcgccgugaucgacgcgcugccgcggaauauggucauuacaugucagggguccgaugacaucagaaaacuucuggaaucucagggacgcaaggauaucaaacucauugacaucgcucugagcaagaccgauucccggaaauaugagaacgccgugugggaccaguacaaggaucugugccacaugcauacgggcguuguggucgagaagaaaaagagagggggaaaagaagagauuacaccucacugugcccuuauggacugcaucauguucgaugcugccgugucuggcgggcucaauaccagcguccugcgcgcugugcugccccgggacaugguuuuuagaaccuccacaccucgcgugguccucugaggacuagucccuguucccagagcccacuuuuuuuucuuuuuuugaaauaaaauagccugucuuucagaucucaaaggcucuuuucagagccaccaaaaaaaaaaaaaaaaaaaaaaaaaaaaaaaaaaaaaaaaaaaaaaaaaaaaaaaaaaaaaaaaaaaaaaaaaaaaaaaaaaaaaaaaaaaaaaaaaaaaa

SEQ ID NO: 18306 - RNA, 2045 nt, Artificial Sequence
  mRNA product Design a-1 (hSL-A100) comprising derived and/or modified sequence from LASV(Mad39;Clade IV)__ANH09723__SP-HsPLAT_NP(2-569) (opt5)
aggagagucccgcagucggcguccagcggcucugcuuguucgugugugugucguugcaggccuuauucaagcuuaccauggacgccaugaagagaggccugugcugugugcuccugcuuugcggggcugucuucguuagccccagcgccuccaaggagaucaaaucuuuccuguggacccagagccucagacgggaacuguccggcuacugcucuaacauuaagcugcaaguggucaaagacgcucaggcccugcuccacgggcuggauuuuagcgagguuuccaaugugcagcgccuuaugagaaagcagcggcgcgacgauaacgaccugaaaagacuccgggaucugaaucaagcggugaacaaucuggucgaacucaagucuacacagcaaaagagcgugcugcgcguuggaacgcuuaccuccgacgaucugcucacacuggcugccgaccuugagaaacuuaagagcaaagugaccagaacagaacggccccucaccgccggcgucuauauggggaaccugucuucccagcagcuggaucagcgcagagcucuccugaauaugaucggaaugagcggcgggaaccagggagcccggacaggccgcgacggcgugguuagagugugggaugucaagaaugcugagcuucugaacaaucaguucgggaccaugccuucucucacgcuggccugucuuaccaaacaaggacagguggaccugaacgaugugguccaggcgcucacagaccugggccugauuuacaccgccaaguauccgaauacauccgaccucgaucggcugacccaaagccaucccauccuuaacaugauugacacgaauaagucuucccugaacaucagcggguacaacuuuucccucggagcugccguuaaagcuggcgccugcaugcuggaugggggaaauaugcuugagacaaucaaggugucuccucagaccauggacggcauucugaaaagcauccucaaggugaaaaagucccugggcauguucauuagcgauacacccggggaacgcaacccuuaugagaauauccuguacaaaauuugucucucuggagacggcuggcccuauaucgcguccagaaccagcauuaccgggcgggccugggaaaacacagucguggaucuggagucuggaggcaagccucagaaggcugggagcaauaacuccaauaaaucucuucagagcgccggauuugcugccggccugacguacucccaacucaugacccugaaggacgccaugcugcagcuugauccgaacgcuaaaacauggauggacaucgagggcagacccgaagauccuguugagaucgcgcucuaccagcccauuagcgggugcuauauccacuucuuucgcgaaccuaccgaccugaagcaguucaaacaagacgccaaguacucucauggaauugaugugacagaccuguuugcugcccagcccggccucaccuccgccgucaucgaggcucugccgcggaauauggugauuacgugucaggggagcgaugacaucagaaaacuuuucgaaucucagggacgcaaggauaucaagcugauugacaucgcccucuccaaaacagauagccggaaguaugagaacgcgguuugggaccaauacaaagaucugugccacaugcauaccggcguggucguggagaagaagaaaaagggcgggaaagaagagauuaccccucacugugcucugauggacugcaucauguuugaugccgccgucuccggaggccuuaauacacucgugcugagagcuguucugccccgcgacaugguguuccggaccucuacaccuaaggucgugcucugaggacuagucccuguucccagagcccacuuuuuuuucuuuuuuugaaauaaaauagccugucuuucagaucucaaaggcucuuuucagagccaccaaaaaaaaaaaaaaaaaaaaaaaaaaaaaaaaaaaaaaaaaaaaaaaaaaaaaaaaaaaaaaaaaaaaaaaaaaaaaaaaaaaaaaaaaaaaaaaaaaaaa

SEQ ID NO: 18307 - RNA, 2045 nt, Artificial Sequence
  mRNA product Design a-1 (hSL-A100) comprising derived and/or modified sequence from LASV(Z0947-SLE-2011;Clade IV)__AIT17841__SP-HsPLAT_NP(2-569) (opt5)
aggagagucccgcagucggcguccagcggcucugcuuguucgugugugugucguugcaggccuuauucaagcuuaccauggacgccaugaagagaggccugugcugugugcuccugcuuugcggggcugucuucguuagccccagcgccuccaaggagaucaaaucuuuccuguggacccagagccucagacgggaacuguccggcuacugcucuaacauuaagcugcaaguggucaaagacgcucaggcccugcuccacgggcuggauuuuagcgagguuuccaaugugcagcgccuuaugagaaaggaacggcgcgacgauaacgaccugaaaagacuccgggaucugaaucaggcggugaacaaucuggucgagcucaagucuacacaacaaaagagcauccugcgcgugggaacgcuuaccuccgacgaucugcucauucuggcugccgaccuugaaaaacuuaagagcaaaguuacaagaaccgagcggccccucucugccggcguguauauggggaaccuguccagccagcagcuggaucagcgcagagcucuccugaauaugaucggaaugucuggcuccaaccagggggcccggacaggacgcgacggcgucgugagaguuugggaugugaagaaugcugagcuucugaacaaucaguucggcaccaugccuagccucacacuggccugucuuaccaaacaggggcaagucgaccugaacgaugcggugcaggcccucacggaccugggacugauuuacaccgcuaaguauccgaauacaucugaccucgaucggcugacccagucccaucccauccuuaacaugaucgacacaaagaaaagcucccugaauauuucuggcuacaacuuuagccucggggccgcugugaaggccggagcgugcaugcuggauggcgggaacaugcuugaaaccaucaaagucuccccucaaacgauggacggcauucucaagagcauccugaaaguuaagaaagcccugggaauguucauuucugaugcucccggcgagcgcaauccuuaugaaaacauccuguacaagauuugucucuccggggacggauggcccuauaucgccagcagaacaucuaucaccggccgggcuugggagaauacagugguggaucuggagagcgacgggaagccucagaaagccggauccaacggcucuaauaagagccuucaguccgccggguuuaccgcuggacugaccuacagccagcucaugacacugaaagaugcgaugcugcaacuugacccgaacgccaagacguggauggauauugaaggcagacccgaggacccugucgaaaucgcucucuaccagcccucuuccggcugcuauauucacuucuuucgcgagccuaccgaccugaaacaguucaagcaggaugccaaguacagccaugggaucgacgugacagaucuguuugccgcucaacccggacucaccucugccguuauugacgcgcugccgcggaauauggugaucacaugucagggcuccgaugacaucagaaaacuuuucgaaagccaggggcgcaaggauauuaaacugaucgacauugcucucuccaagaccgauucucggaaauaugagaacgccgucugggaccaguacaaggaucugugccacaugcauacgggaaucgugguugagaagaaaaagagaggcgggaaagaagagauuacaccucacugugcccugauggacugcaucauguuugaugcugccgugagcggcggacuuaauaccuccguccuccgcgcugugcugccccgggacauggucuucagaaccucuacaccucgcgugguucugugaggacuagucccuguucccagagcccacuuuuuuuucuuuuuuugaaauaaaauagccugucuuucagaucucaaaggcucuuuucagagccaccaaaaaaaaaaaaaaaaaaaaaaaaaaaaaaaaaaaaaaaaaaaaaaaaaaaaaaaaaaaaaaaaaaaaaaaaaaaaaaaaaaaaaaaaaaaaaaaaaaaaa

SEQ ID NO: 18308 - RNA, 2021 nt, Artificial Sequence
  mRNA product Design a-1 (A100) comprising derived and/or modified sequence from LASV(Josiah;Clade IV)__NP_694869__SP-HsPLAT_NP(2-569) (opt1)
aggagagucccgcagucggcguccagcggcucugcuuguucgugugugugucguugcaggccuuauucaagcuuaccauggacgccaugaagcgcggccugugcugcgugcuccugcugugcggggccgucuucgugagccccagcgccuccaaggagaucaagagcuuccuguggacccagucccuccgccgggagcugagcggcuacugcuccaacaucaagcuccagguggucaaggacgcccaggcgcugcugcacgggcuggacuucagcgagguguccaacgugcagcgccucaugcggaaggagcgccgggacgacaacgaccugaagcgccugcgggaccucaaccaggccgucaacaaccugguggagcucaagagcacccagcagaaguccauccugcgcgugggcacccugaccagcgacgaccugcucauccuggccgccgaccuggagaagcucaaguccaaggucauccggaccgagcgcccccugagcgccgggguguacaugggcaaccuguccagccagcagcucgaccagcggcgcgcgcugcugaacaugaucgggauguccggcggcaaccagggggcccgggccggccgcgacggggugguccgggugugggacgugaagaacgccgagcuccugaacaaccaguucggcaccaugccgagccugacgcucgcgugccugaccaagcaggggcaggucgaccugaacgacgccgugcaggcccucaccgaccugggccugaucuacaccgccaaguaccccaacacguccgaccucgaccgccugacccagagccaccccauccugaacaugaucgacaccaagaaguccagccucaacaucagcggcuacaacuucucccugggggccgcggugaaggccggcgccugcaugcuggacgggggcaacaugcucgagaccaucaaggucagcccccagacgauggacggcauccugaaguccauccugaaggugaagaaggcccucgggauguucaucagcgacaccccgggcgagcggaaccccuacgagaacauccuguacaagaucugccuguccggggacggcuggcccuacaucgccagccgcaccuccaucaccgggcgggcgugggagaacacgguggucgaccucgagagcgacggcaagccccagaaggccgacuccaacaacagcuccaagagccugcaguccgccggcuucaccgccgggcugaccuacagccagcucaugacccugaaggacgccaugcugcagcuggacccgaacgcgaagacguggauggacaucgagggccgccccgaggaccccguggagaucgcccucuaccagcccuccagcgggugcuacauccacuucuuccgggagccgaccgaccugaagcaguucaagcaggacgccaaguacucccacggcaucgacgugaccgaccuguucgccacccagcccgggcucacgagcgccgucaucgacgcgcugccccgcaacauggugaucacgugccagggcuccgacgacauccgcaagcugcucgagagccagggccggaaggacaucaagcugaucgacaucgcccugagcaagaccgacucccgcaaguacgagaacgccgugugggaccaguacaaggaccucugccacaugcacaccggggucguggucgagaagaagaagcggggcgggaaggaggagaucaccccgcacugcgcccugauggacugcaucauguucgacgcggccgugagcggcgggcugaacaccuccgugcuccgcgccguccugccccgggacaugguguuccgcaccagcacgccccgggugguccugugaggacuagucccuguucccagagcccacuuuuuuuucuuuuuuugaaauaaaauagccugucuuucagaucuaaaaaaaaaaaaaaaaaaaaaaaaaaaaaaaaaaaaaaaaaaaaaaaaaaaaaaaaaaaaaaaaaaaaaaaaaaaaaaaaaaaaaaaaaaaaaaaaaaaa

SEQ ID NO: 18309 - RNA, 2021 nt, Artificial Sequence
  mRNA product Design a-1 (A100) comprising derived and/or modified sequence from LASV(LP;Clade I)__AAF86702__SP-HsPLAT_NP(2-569) (opt1)
aggagagucccgcagucggcguccagcggcucugcuuguucgugugugugucguugcaggccuuauucaagcuuaccauggacgccaugaagcgcggccugugcugcgugcuccugcugugcggggccgucuucgugagccccagcaacuccaaggagaucaagagcuuccuguggacccagucccuccgccgggagcugagcggcuacugcuccaacaucaagcuccagguggucaaggacgcccaggcccugcugcacgggcuggacuucagcgagguguccaacgugcagcgccucaugcggaagcagaagcgcgacgacgcggaccugaagcggcugcgcgaccucaaccaggccgucaacaaccugguggagcucaagagcacccagcagaagaacgugcugcgggucggcacgcuguccagcgacgaccugaucacccucgccgccgaccuggagaagcugaaguccaaggugauccgcaccgagcggccccucagcuccgggguguacaugggcaaccugagcucccagcagcuggaccagcgccgggcccuccugagcaugaucgggauguccggcggcccgcaggggaaccgcaccggcggggacggcgucgugcgggugugggacgucaagaacgcggagcugcucaacaaccaguucgggacgaugcccagccugacccuggccugccucaccaagcagggccagguggaccugaacgacgccgugcaggcccugaccgaccucggccugaucuacacggcgaaguaccccaacuccagcgaccuggacaugcucacccagagccaccccauccuggggauggucgacaccaagaaguccagccugaacaucuccggcuacaacuucagccucggggccgccgugaaggccggcgccugcaugcuggacggcgggaacaugcuggagaccaucaagguguccccgcagacgauggacggcauccucaagagcauccugaaggucaagcgcucccuggggauguucaucagcgacacccccggcgagcggaaccccuacgagaacauccucuacaagaucugccuguccggggagggcuggcccuacaucgcgagccgcaccuccaucaccggccgggccugggagaacacgcugguggaccucgagagcgacaacaagccgcccaagcugaacuccgccgggagcaacaagucccugcaggccgccggccucaacgcggggcugaccuacagccagcugaugacccugaaggacugcaugcuccagcuggaccccuccagcaagaccuggaucgacaucgagggccgccccgaggacccgguggagaucgcccuguuccagcccuccagcgggugcuacauccacuucuuccgggagcccacggaccucaagcaguucaagcaggacgccaaguacagccacggcaucgacgucaccgaccuguucuccacccagcccggccugaccagcgccgugaucgaggcccucccgcgcaacauggugcugacgugccagggguccgacgacaucaagaagcugcucgagagccagggccggcgcgacaucaagcugaucgacaucucccugagcaaggcggacucccgcaaguucgagaacgccgucugggaccaguacaaggaccucugccacaugcacaccgggguggucguggagaagaagaagcggggcgggaaggaggagaucacgccccacugcgcccugcuggacugcaucauguucgacgccgccaccaccggcagccucaacaucaccacccugcgcgcggugcugccccgggacauggucuuccgcaccuccacgcccaagguggugcucugaggacuagucccuguucccagagcccacuuuuuuuucuuuuuuugaaauaaaauagccugucuuucagaucuaaaaaaaaaaaaaaaaaaaaaaaaaaaaaaaaaaaaaaaaaaaaaaaaaaaaaaaaaaaaaaaaaaaaaaaaaaaaaaaaaaaaaaaaaaaaaaaaaaaa

SEQ ID NO: 18310 - RNA, 2021 nt, Artificial Sequence
  mRNA product Design a-1 (A100) comprising derived and/or modified sequence from LASV(803213;Clade II)__AAF86704__SP-HsPLAT_NP(2-569) (opt1)
aggagagucccgcagucggcguccagcggcucugcuuguucgugugugugucguugcaggccuuauucaagcuuaccauggacgccaugaagcgcggccugugcugcgugcuccugcugugcggggccgucuucgugagccccagcgccuccaaggaggugaaguccuuccuguggacccagagccuccgccgggagcugagcggcuacugcuccaacaucaagcugcaggucgugaaggacgcccaggcgcuccugcacgggcuggacuucagcgaggugaacaacguccagcgccucaugcggaagcagaagcgcgacgacggcgaccugaagcggcugcgcgaccucaaccaggccgugaacaaccugguggagcugaaguccacccagcagaaguccauccuccgggucgggacgcugaccagcgacgaccugcucacccuggccgccgaccuggagaagcucaagagcaaggugauccgcaccgagcggccccuguccagcggcguguacauggggaaccuguccacgcagcagcucgagcagcgccgggcccugcugaacaugaucggcauggucggcggggcgcagggcacccagccggggcgcgacggcguggugcgggucugggacgugaagaaccccgaccuccugaacaaccaguucgggaccaugcccagccugacccucgccugccugacgaagcagggccagguggaccugaacgacgccguccucgcccugaccgaccugggccucaucuacaccgcgaaguaccccaacuccagcgaccuggaccgccugucccagagccacccgauccucaacaugguggacaccaagaaguccagccugaacaucagcggguacaacuucucccugggcgccgccgugaaggccggggccugcaugcucgacggcggcaacaugcuggagacgaucaaggucacgccccagaccauggacgggauccucaagagcauccugaaggugaagcggucccugggcauguucgugagcgacacccccggggagcgcaaccccuacgagaacauccuguacaagaucugccucuccggcgacggguggccguacaucgcgagccggaccuccaucgucggccgcgccugggagaacaccaccguggaccuggagagcgacggcaagccccagaagguggggaccgccggcuccaacaagagccugcaguccgccggguuccccacgggccucaccuacagccagcugaugacccugaaggacuccaugaugcagcuggaccccagcgccaagaccuggaucgacaucgaggggcggccggaggaccccgucgagaucgcgcucuaccagcccauguccggcugcuacauccacuucuuccgcgagcccacggaccugaagcaguucaagcaggacgccaaguacagccacggcaucgacguggccgaccuguucccggcccagcccgggcucaccuccgccgucaucgaggcgcugccccggaacauggugcugaccugccagggcagcgacgacaucaagaagcuccuggacucccaggggcgccgcgacaucaagcugaucgacaucagccucagcaagguggacucccggaaguucgagaacgccgucugggaccagugcaaggaccugugccacaugcacaccggcgugguggucgagaagaagaagcgcgggggcaaggaggagaucacgccccacugcgcccugauggacugcaucauguucgacgccgccgugagcggcgggcucaacaucccggugcugcgggcgguccugccccgcgacaugguguuccggaccuccagccccaaggugguccucugaggacuagucccuguucccagagcccacuuuuuuuucuuuuuuugaaauaaaauagccugucuuucagaucuaaaaaaaaaaaaaaaaaaaaaaaaaaaaaaaaaaaaaaaaaaaaaaaaaaaaaaaaaaaaaaaaaaaaaaaaaaaaaaaaaaaaaaaaaaaaaaaaaaaa

SEQ ID NO: 18311 - RNA, 2024 nt, Artificial Sequence
  mRNA product Design a-1 (A100) comprising derived and/or modified sequence from LASV(GA391;Clade III)__CAA36646__SP-HsPLAT_NP(2-570) (opt1)
aggagagucccgcagucggcguccagcggcucugcuuguucgugugugugucguugcaggccuuauucaagcuuaccauggacgccaugaagcgcggccugugcugcgugcuccugcugugcggggccgucuucgugagccccagcgccuccaaggaggugcgcagcuuccuguggacccagucccuccggcgcgagcugagcggcuacugcuccaacaucaagcugcaggucgugaaggacgcccaggcgcuccugcacgggcuggacuucagcgagguguccaacguccagcggcucaugcgcaagcagaagcgggacgacggcgaccugaagcgccugcgggaccucaaccaggccgugaacaaccugguggagcucaagagcacccagcagaaguccguccugcgcguggggacccugagcuccgacgaccugcucauccuggccgccgaccuggagaagcucaagagcaaggugacccggaccgagcgcccccuguccagcggcgucuacauggggaaccuguccagccagcagcucgaccagcggcgcgcccugcugaacaugaucggcaugaccggcguguccgggggcgggaagggcgcgagcgacgggaucgugcgggucugggacgugaagaacgccgagcuccugaacaaccaguucggcacgaugccgucccugacccucgccugccugaccaagcagggccagguggaccugaacgacgccguccaggcgcucaccgaccuggggcugaucuacacggccaaguaccccaacagcagcgaccucgaccgccugucccagagccaccccauccugaacaugaucgacaccaagaaguccagccucaacaucuccggcuacaacuucagccugggggccgccgugaaggccggcgcgugcaugcuggacggcgggaacaugcucgagaccaucaaggugagcccccagaccauggacggcauccucaaguccauccugaaggucaagaagucccuggggauguucgugagcgacacgccgggcgagcggaaccccuacgagaacauccuguacaagaucugccuguccggggacggcuggcccuacaucgccagccgcaccuccaucgugggccgggccugggagaacaccgucguggaccucgagcaggacaacaagccccagaagaucgggaacggcgggagcaacaagucccugcagagcgccggcuucgccgcggggcugaccuacucccagcucaugacgcugaaggacuucaagugcuucaaccugaucccgaacgccaagaccuggauggacaucgagggccgccccgaggaccccguggagaucgcccuguaccagcccagcuccggcugcuacguccacuucuuccgggagccgaccgaccucaagcaguucaagcaggacgccaaguacagccacgggaucgacgugaccgaccuguucgccgcgcagcccggccugacgagcgccgucaucgaggcccucccccgcaacauggugaucacgugccagggguccgaggacauccggaagcugcuggagagccagggccgccgcgacaucaagcucaucgacaucacccuguccaaggccgacagccggaaguucgagaacgccgugugggaccaguucaaggaccugugccacaugcacaccggggucgugguggagaagaagaagcgcggcggcaaggaggagaucacgccccacugcgcgcucauggacugcaucauguucgacgccgccgucuccgggggccuggacgccaaggugcugcgggugguccucccgcgcgacaugguguuccggaccagcacccccaaggugguccugugaggacuagucccuguucccagagcccacuuuuuuuucuuuuuuugaaauaaaauagccugucuuucagaucuaaaaaaaaaaaaaaaaaaaaaaaaaaaaaaaaaaaaaaaaaaaaaaaaaaaaaaaaaaaaaaaaaaaaaaaaaaaaaaaaaaaaaaaaaaaaaaaaaaaa

SEQ ID NO: 18312 - RNA, 2021 nt, Artificial Sequence
  mRNA product Design a-1 (A100) comprising derived and/or modified sequence from LASV(AV;Clade V)__CCA30315__SP-HsPLAT_NP(2-569) (opt1)
aggagagucccgcagucggcguccagcggcucugcuuguucgugugugugucguugcaggccuuauucaagcuuaccauggacgccaugaagcgcggccugugcugcgugcuccugcugugcggggccgucuucgugagccccagcgccuccaaggaggugaaguccuuccuguggacccagagccuccgccgggagcugagcggcuacugcuccaacaucaagcugcaggucgugaaggacgcccaggcgcuccugcacgggcuggacuucagcgagguguccaacguccagcgccucaugcggaagcagcgccgggacgacagcgaccugaagcgccugcgggaccucaaccaggccgugaacaaccugguggagcugaaguccacccagcagaaguccguccuccgcgugggcacgcugagcagcgacgaccugcucacccuggccgccgaccuggagaagcucaaguccaaggugacccggaccgagcgcccccugagcuccggggucuacaugggcaaccugagcucccagcagcucgaccagcggcgcgcccugcugaaccucaucgggaugacgaacggcagccagggcucccaggcggggcgggacggcguggugcgcgucugggacgugaagaacgccgagcugcugaacaaccaguucgggaccaugccgagccucacccuggccugccugaccaagcagggccagguggaccucaacgacgucgugcaggcccugacggaccuggggcucaucuacaccgcgaaguaccccaacaccagcgaccuggaccggcugacccagucccaccccauccucaacaugaucgacacgaagaaguccagccugaacaucagcggcuacaacuucucccugggcgccgccgugaaggccggggccugcaugcucgacggcgggaacaugcuggagaccaucaaggucagcccccaguccauggacggcauccucaagagcauccugaaggugaagcgcgcgcugggcauguucguguccgacaccccgggggagcggaaccccuacgagaacauccuguacaagaucugccucagcggcgacggguggcccuacaucgccucccgcaccagcaucgucggccgggccugggagaacacggugguggaccuggagaccgacgggaagccccagaagaucggcuccggcaacagcaacaagucccugcagagcgccggguucuccgccggccucaccuacagccagcugaugacccugaaggacgcgaugcugcagcucgacccgaacgccaagacguggauggacaucgaggggcgccccgaggaccccgucgagguggcccuguaccagcccaucuccggcugcuacauccacuucuuccgggagccgaccgaccugaagcaguucaagcaggacgccaaguacagccacgggaucgacaucgccgaccucuucgcggcccagcccggccugaccagcgccgucaucgaggcccugccccgcaacauggugaucacgugccagggcuccgaggacaucaagaagcuccuggagagccaggggcgcaaggacaucaagcugaucgacaucgcccucuccaagaucgacagccggaaguucgagaacgcggugugggaccaguacaaggaccugugccacaugcacaccggcgucgugguggagaagaagaagcgcgggggcaaggaggagaucaccccgcacugcgcccugauggacugcaucauguucgacgccgccgucuccgggggccucaacacccuggugcugcgggcggugcucccccgcgacauggucuuccggaccagcacgccccgcguggugcugugaggacuagucccuguucccagagcccacuuuuuuuucuuuuuuugaaauaaaauagccugucuuucagaucuaaaaaaaaaaaaaaaaaaaaaaaaaaaaaaaaaaaaaaaaaaaaaaaaaaaaaaaaaaaaaaaaaaaaaaaaaaaaaaaaaaaaaaaaaaaaaaaaaaaa

SEQ ID NO: 18313 - RNA, 2021 nt, Artificial Sequence
  mRNA product Design a-1 (A100) comprising derived and/or modified sequence from LASV(Togo/2016/7082;Clade VI)__AMR44578__SP-HsPLAT_NP(2-569) (opt1)
aggagagucccgcagucggcguccagcggcucugcuuguucgugugugugucguugcaggccuuauucaagcuuaccauggacgccaugaagcgcggccugugcugcgugcuccugcugugcggggccgucuucgugagccccagcaacuccaaggaggugaaguccuuccuguggacccagagccuccgccgggagcugagcggcuacugcuccaacaucaagcugcaggucgugaaggacgcccaggcccuccugcacgggcuggacuucagcgagguguccaacguccagcgccucaugcggaagcagaagcgcgacgacggcgaccugaagcggcugcgcgaccucaaccaggcggugaacaaccugguggagcucaagagcguccagcagaaguccauccugcggguggggacccugaccagcgacgaccugcucacccuggccgccgaccuggagaagcucaaguccaaggugacccgcaccgagcggccccugagcuccggcgucuacauggggaaccugagcucccagcagcucgaccagcgccgggcccugcugagcaugaucggcauguccggcgggaaccagaacagccagccgaagggcgacgggguggugcgcgucugggacgugaagaacgccgaccuccugaacaaccaguucggcacgaugcccucccugacccucgcgugccugaccaagcagggccagguggaccugaacgacgccguccaggcccucaccgaccuggggcugaucuacacggccaaguaccccaacagcagcgaccucgaccggcugucccagagccaccccauccugaacaugaucgacaccaagaaguccagccucaacaucuccggcuacaacuucagccugggggcggccaucaagaccggcgccugcaugcuggacgggggcaacaugcucgagaccaucaaggugacgccgcagaccauggacggcauccugaaguccauccugaaggugaagcgcagccucgggauguucaucuccgacacccccggcgagcggaaccccuacgagaacauccuguacaagaucugccugagcggggacggcuggcccuacaucgccucccgcaccgccaucaucgggcgggcgugggagaacacggucguggaccucgagagcgacuccaagccgcagaagaucggcagcaacggcuccaacaagagccugcaguccgccggguucgcccccggccugaccuacagccagcucaugacccugaaggacuccaugcugcagcuggaccccaacgccaagaccuggaucgacaucgaggggcgccccgaggacccgguggaggucgcccucuuccagcccaucagcggcugcuacauccacuucuuccgggagcccacggaccugaagcaguucaagcaggacgcgaaguacagccacgggaucgacgugaccgaccuguucgccgcccagcccggccucaccuccgccgugaucgaggcccugccgcgcaacaugguccugaccugccagggcagcgacgacaucaagaagcuccuggacucccaggggcggcgcgacaucaagcugaucgacgugagccucaacaagaucgacucccgcaaguucgagaacgcggucugggaccaguacaaggaccugugccacaugcacacgggcgugguggucgagaagaagaagaagggcgggaaggaggagaucacgccccacugcgcccugcucgacugcaucauguucgacgccgccgugagcgggggccugaacgccaccgugcugcgggcgguccucccccgcgacaugguguuccggaccuccagccccaaggugguccugugaggacuagucccuguucccagagcccacuuuuuuuucuuuuuuugaaauaaaauagccugucuuucagaucuaaaaaaaaaaaaaaaaaaaaaaaaaaaaaaaaaaaaaaaaaaaaaaaaaaaaaaaaaaaaaaaaaaaaaaaaaaaaaaaaaaaaaaaaaaaaaaaaaaaa

SEQ ID NO: 18314 - RNA, 2021 nt, Artificial Sequence
  mRNA product Design a-1 (A100) comprising derived and/or modified sequence from LASV(KAK-428;Clade n.d. (VII))__ANH09741__SP-HsPLAT_NP(2-569) (opt1)
aggagagucccgcagucggcguccagcggcucugcuuguucgugugugugucguugcaggccuuauucaagcuuaccauggacgccaugaagcgcggccugugcugcgugcuccugcugugcggggccgucuucgugagccccagcaacuccaaggaggugaaguccuuccuguggacccagagccuccgccgggagcugagcggcuacugcaccaacaucaagcugcaggucgugaaggacgcccaggcccuccugcacgggcuggacuucuccgaggugagcaacguccagcgccucaugcggaagcagaagcgcgacgacaacgaccugaagcggcugcgcgaccucaaccaggcggugaacaaccugguggagcugaaguccguccagcagaaguccgugcucaaggugggcacgcugaacagcgacgaccugcucacccuggccgccgaccuggagaagcucaagagcaaggucgugcggaccgagcgcccccuguccagcgggguguacaugggcaaccuguccagccagcagcucgaccagcggcgcgcccugcugaacaugaucgggauggccggcggcucccaggggaaccagccgagccgggacggcgucgugcgcgugugggacgucaagaacgcggaccuccugaacaaccaguucgggaccaugcccucccugacgcucgccugccugaccaagcagggccagguggaccugaacgacgugguccucgcccugaccgaccuggggcucaucuacaccgccaaguaccccaacagcuccgaccuggaccggcugagccagaaccaccccgugcucaacaugaucgacgugaacaagagcucccugaacaucagcggcuacaacuucucccugggcgcggccgucaaggccggggccugcaugcucgacggcgggaacaugcuggagacgaucaagaucagcccgcagaccguggacggcauccugaaguccauccucaaggugaagcgcgcccugggcauguucgucagcgacacccccggggagcggaaccccuacgagaacauccuguacaaggugugccucuccggcaacggguggcccuacaucgcgagccgcaccuccaucgucggccgggccugggagaacacggugguggaccuggagagcaacaagaaccagccgaaggucgggaacaacggcuccaacaagaugcugcagagcuccggcuucgccaccgggcucaccuacagccagcugaugacccugcgcgacuccaugcugcagcucgaccccacggccaagaccuggaucgacaucgagggccggcccgaggaccccguggagcuggcccuguuccagccgagcuccgggugcuacauccacuucuuccgcgagcccaccgaccucaagcaguucaagcaggacgcgaaguacagccacggcaucgacgugaacgaccuguucuccgcccagcccgggcugaccagcgccguccucgaggcccugccccggaacauggugcugacgugccagggcagcgacgacauccgcaagcuccuggacucccaggaccgcaaggacaucaagcugaucgacaucagccucuccaaggccgacgcgcggaaguucgagaacgacgugugggaccaguucaaggaccugugccacaugcacaccggcaucgucguggagaagaagaagaagggcgggaagcaggagaugaccccgcacugcgcccugcucgacugcaucauguucgacgccgccgugagcgggggccugaacguccccacccugcgcgccgugcuccccacggacaugguguuccggaccaucaccaccaaggucgugcugugaggacuagucccuguucccagagcccacuuuuuuuucuuuuuuugaaauaaaauagccugucuuucagaucuaaaaaaaaaaaaaaaaaaaaaaaaaaaaaaaaaaaaaaaaaaaaaaaaaaaaaaaaaaaaaaaaaaaaaaaaaaaaaaaaaaaaaaaaaaaaaaaaaaaa

SEQ ID NO: 18315 - RNA, 2021 nt, Artificial Sequence; identical to SEQ ID NO: 18309
  mRNA product Design a-1 (A100) comprising derived and/or modified sequence from LASV(Pinneo-NIG-1969;Clade I)__AIT17837__SP-HsPLAT_NP(2-569) (opt1)

SEQ ID NO: 18316 - RNA, 2021 nt, Artificial Sequence
  mRNA product Design a-1 (A100) comprising derived and/or modified sequence from LASV(ISTH0009-NIG-2011;Clade II)__AIT17405__SP-HsPLAT_NP(2-569) (opt1)
aggagagucccgcagucggcguccagcggcucugcuuguucgugugugugucguugcaggccuuauucaagcuuaccauggacgccaugaagcgcggccugugcugcgugcuccugcugugcggggccgucuucgugagccccagcguguccaaggaggucaagagcuuccuguggacccagucccuccgccgggagcugagcggcuacugcuccaacaucaagcuccagguggugaaggacgcccaggcccugcugcacgggcuggacuucagcgaggucuccaacgugcagcgccucaugcggaagcagaagcgcgacgacagcgaccugaagcggcugcgcgaccucaaccaggcggugaacaaccuggucgagcugaaguccacccagcagaaguccauccuccgggugggcacccugaccagcgacgaccugcucacccuggccgccgaccuggagaagcucaagagcaaggugauccgcaccgagcggccccuguccagcggggucuacaugggcaaccuguccacgcagcagcucgagcagcgccgggcccugcugaacaugaucgggauggugggcggcgcccaggggacccagccgggccgcgacggggugguccgggugugggacgugaagaaccccgaccuccugaacaaccaguucggcaccaugcccagccugacccucgcgugccugacgaagcaggggcaggucgaccugaacgacgccgugcucgcccugaccgaccugggccucaucuacaccgccaaguaccccaacuccagcgaccuggaccgccugucccagagccacccgauccucaacaugguggacaucaagaaguccagccugaacaucagcggcuacaacuucucccugggggcggccgucaaggccggcgccugcaugcucgacgggggcaacaugcuggagaccaucaaggugacgccccagaccauggacggcauccucaagagcauccugaaggugaagcggucccuggggauguucgucagcgacacccccggcgagcgcaaccccuacgagaacauccuguacaagaucugccucuccggggacggcuggccguacaucgccagccggaccuccaucguggggcgcgcgugggagaacacgaccguggaccuggagagcgacggcaagccccagaaggucggcuccgccgggagcaacaagucccugcagagcgccggcuuccccaccgggcucaccuacucccagcugaugacgcugaaggacagcaugaugcagcuggaccccuccgccaagaccuggaucgacaucgagggccggccggaggaccccguggagaucgcccucuaccagcccaugagcgggugcuacauccacuucuuccgcgagcccaccgaccugaagcaguucaagcaggacgcgaaguacucccacggcaucgacgucgccgaccuguucccggcccagcccggccucaccagcgccgugaucgaggcccugccccggaacauggugcugacgugccaggggagcgacgacaucaagcgccuccuggacucccagggccgccgggacaucaagcugaucgacaucgcgcucagcaaggccgacucccgccgguucgagaacgccgucugggaccagugcaaggaccugugccacaugcacaccggggugguggucgagaagaagaagcgcggcgggaaggaggagaucacgccccacugcgcccugauggacugcaucauguacgacgccgcggugagcggcggccucaacaucccggugcugcgggccguccugccccgcgacaugguguuccggaccuccagccccaaggugguccucugaggacuagucccuguucccagagcccacuuuuuuuucuuuuuuugaaauaaaauagccugucuuucagaucuaaaaaaaaaaaaaaaaaaaaaaaaaaaaaaaaaaaaaaaaaaaaaaaaaaaaaaaaaaaaaaaaaaaaaaaaaaaaaaaaaaaaaaaaaaaaaaaaaaaa

SEQ ID NO: 18317 - RNA, 2021 nt, Artificial Sequence
  mRNA product Design a-1 (A100) comprising derived and/or modified sequence from LASV(ISTH2010-NIG-2012;Clade II)__AIT17483__SP-HsPLAT_NP(2-569) (opt1)
aggagagucccgcagucggcguccagcggcucugcuuguucgugugugugucguugcaggccuuauucaagcuuaccauggacgccaugaagcgcggccugugcugcgugcuccugcugugcggggccgucuucgugagccccagcgccuccaaggaggugaaguccuuccuguggacccagagccuccgccgggagcugagcggcuacugcuccaacaucaagcugcaggucgugaaggacgcccaggcgcuccugcacgggcuggacuucagcgagguguccaacguccagcgccucaugcggaagcagaagcgcgacgacagcgaccugaagcggcugcgcgaccucaaccaggccgugaacaaccugguggagcugaaguccacccagcagaaguccauccuccgggucggcacgcugaccagcgacgaccugcucacccuggccgccgaccuggagaagcucaagagcaaggugauccgcaccgagcggccccuguccagcgggguguacaugggcaaccuguccacgcagcagcucgagcagcgccgggcccugcugaaccucaucgggauggucggcggcgcgcaggggacccagccgggccgcgacgggguggugcgggucugggacgugaagaaccccgaccugcugaacaaccaguucggcaccaugcccagccucacccuggccugccugacgaagcagggccagguggaccucaacgacgccguccuggcccugaccgaccucgggcugaucuacaccgcgaaguaccccaacuccagcgaccuggaccgccucucccagagccacccgauccugaacaugguggacaccaagaaguccagccugaacaucagcggcuucaacuucucccucggggccgccgugaaggccggcgccugcaugcuggacgggggcaacaugcuggagacgaucaaggucacgccccagaccauggacggcauccucaagagcauccugaaggugaagaagucccuggggauguucgugagcgacacccccggcgagcggaaccccuacgagaacauccucuacaagaucugccuguccggggacggcuggccguacaucgcgagccgcaccuccaucgucgggcgggccugggagaacaccaccguggaccuggagagcgacggcaagccccacaaggugggcaccgccggguccaacaagagccuccaguccgccggcuuccccacggggcugaccuacagccagcugaugacccugaaggacuccaugaugcagcucgaccccagcgccaagaccuggaucgacaucgagggccgcccggaggaccccgucgagaucgcgcuguaccagcccauguccgggugcuacauccacuucuuccgggagcccacggaccugaagcaguucaagcaggacgccaaguacagccacggcaucgacguggccgaccucuucccggcccagcccggccugaccuccgccgucaucgaggcgcugccccgcaacauggugcugaccugccaggggagcgacgacaucaagcggcuccuggacagccagggccgccgcgacaucaagcucaucgacaucgcccuguccaaggccgacagccggcgcuucgagaacgccgugugggaccagugcaaggaccugugccacaugcacaccggggucgugguggagaagaagaagcggggcgggaaggaggagaucacgccccacugcgcccucauggacugcaucauguacgacgcggccgucuccggcggccugaacaucccggugcugcgcgccgugcucccccgggacauggucuuccgcaccagcucccccaagguggugcugugaggacuagucccuguucccagagcccacuuuuuuuucuuuuuuugaaauaaaauagccugucuuucagaucuaaaaaaaaaaaaaaaaaaaaaaaaaaaaaaaaaaaaaaaaaaaaaaaaaaaaaaaaaaaaaaaaaaaaaaaaaaaaaaaaaaaaaaaaaaaaaaaaaaaa

SEQ ID NO: 18318 - RNA, 2021 nt, Artificial Sequence
  mRNA product Design a-1 (A100) comprising derived and/or modified sequence from LASV(Lassa virus/H.sapiens-wt/NGA/2015/ISTH_0543;Clade II)__AVO03640__SP-HsPLAT_NP(2-569) (opt1)
aggagagucccgcagucggcguccagcggcucugcuuguucgugugugugucguugcaggccuuauucaagcuuaccauggacgccaugaagcgcggccugugcugcgugcuccugcugugcggggccgucuucgugagccccagcgccuccaaggaggugaaguccuuccuguggacccagagccuccgccgggagcugagcggcuacugcuccaacaucaagcugcaggucgugaaggacgcccaggcgcuccugcacgggcuggacuucagcgagguguccaacguccagcgccucaugcggaagcagaagcgcgacgacagcgaccugaagcggcugcgcgaccucaaccaggccgugaacaaccugguggagcugaaguccacccagcagaaguccauccuccgggucggcacgcugaccagcgacgaccugcucacccuggccgccgaccuggagaagcucaagagcaaggugauccgcaccgagcggccccuguccagcgggguguacaugggcaaccuguccacgcagcagcucgagcagcgccgggcccugcugaacaugaucgggauggucggcggcgcgcaggggacccagccgggccgcgacgggguggugcgggucugggacgugaagaaccccgaccuccugaacaaccaguucggcaccaugcccagccugacccucgccugccugacgaagcagggccagguggaccugaacgacgccguccucgcccugaccgaccuggggcucaucuacaccgcgaaguaccccaacuccagcgaccuggaccgccugucccagagccacccgauccucaacaugguggacaccaagaaguccagccugaacaucagcggcuacaacuucucccugggggccgccgugaaggccggcgccugcaugcucgacgggggcaacaugcuggagacgaucaaggucacgccccagaccauggacggcauccucaagagcauccugaaggugaagaagucccuggggauguucgugagcgacacccccggcgagcggaaccccuacgagaacauccuguacaagaucugccucuccggggacggcuggccguacaucgcgagccgcaccuccaucgucgggcgggccugggagaacaccaccguggaccuggagagcgacggcaagccccagaaggugggcuccgccgggagcaacaagucccugcagagcgccggcuuccccaccgggcucacguacucccagcugaugacccugaaggacagcaugaugcagcuggaccccuccgccaagaccuggaucgacaucgagggccgcccggaggaccccgucgagaucgcgcucuaccagcccaugagcgggugcuacauccacuucuuccgggagcccaccgaccugaagcaguucaagcaggacgccaaguacucccacggcaucgacguggccgaccuguucccggcccagcccggccucacgagcgccgucaucgaggcgcugccccgcaacauggugcugaccugccaggggagcgacgacaucaagcggcuccuggacucccagggccgcaaggacaucaagcugaucgacaucgcccucagcaaggccgacucccgccgguucgagaacgccgugugggaccagugcaaggaccugugccacaugcacaccggggucgugguggagaagaagaagcgcggcgggaaggaggagaucacgccccacugcgcccugauggacugcaucauguacgacgcggccgucagcggcggccucaacaucccggugcugcgggccgugcugccccgcgacauggucuuccggaccuccagccccaagguggugcucugaggacuagucccuguucccagagcccacuuuuuuuucuuuuuuugaaauaaaauagccugucuuucagaucuaaaaaaaaaaaaaaaaaaaaaaaaaaaaaaaaaaaaaaaaaaaaaaaaaaaaaaaaaaaaaaaaaaaaaaaaaaaaaaaaaaaaaaaaaaaaaaaaaaaa

SEQ ID NO: 18319 - RNA, 2021 nt, Artificial Sequence
  mRNA product Design a-1 (A100) comprising derived and/or modified sequence from LASV(Lassa virus/H.sapiens-wt/NGA/2016/ISTH_0009;Clade II)__AVO03572__SP-HsPLAT_NP(2-569) (opt1)
aggagagucccgcagucggcguccagcggcucugcuuguucgugugugugucguugcaggccuuauucaagcuuaccauggacgccaugaagcgcggccugugcugcgugcuccugcugugcggggccgucuucgugagccccagcgccuccaaggaggugaaguccuuccuguggacccagagccuccgccgggagcugagcggcuacugcuccaacaucaagcugcaggucgugaaggacgcccaggcgcuccugcacgggcuggacuucagcgagguguccaacguccagcgccucaugcggaagcagaagcgcgacgacagcgaccugaagcggcugcgcgaccucaaccaggccgugaacaaccugguggagcugaaguccacccagcagaaguccauccuccgggucggcacgcugaccagcgacgaccugcucacccuggccgccgaccuggagaagcucaagagcaaggugauccgcaccgagcggccccuguccagcgggguguacaugggcaaccuguccacgcagcagcucgagcagcgccgggcccugcugaacaugaucgggauggucggcggcgcgcaggggacccagccgggccgcgacgggguggugcgggucugggacgugaagaaccccgaccuccugaacaaccaguucggcaccaugcccagccugacccucgccugccugacgaagcagggccagguggaccugaacgacgccguccucgcccugaccgaccuggggcucaucuacaccgcgaaguaccccaacuccagcgaccuggaccgccugucccagagccacccgauccucaacaugguggacaccaagaaguccagccugaacaucagcggcuacaacuucucccugggggccgccgugaaggccggcgccugcaugcucgacgggggcaacaugcuggagacgaucaaggucacgccccagaccauggacggcauccucaagagcauccugaaggugaagaagucccuggggauguucgugagcgacacccccggcgagcggaaccccuacgagaacauccuguacaagaucugccucuccggggacggcuggccguacaucgcgagccgcaccuccaucgucgggcgggccugggagaacaccaccguggaccuggagagcgacggcaagccccagaaggugggcuccgccgggagcaacaagucccugcagagcgccggcuuccccaccgggcucacguacucccagcugaugacccugaaggacagcaugaugcagcuggaccccuccgccaagaccuggaucgacaucgagggccgcccggaggaccccgucgagaucgcgcucuaccagcccaugagcgggugcuacauccacuucuuccgggagcccaccgaccugaagcaguucaagcaggacgccaaguacucccacggcaucgacguggccgaccuguucccggcccagcccggccucacgagcgccgucaucgaggcgcugccccgcaacauggugcugaccugccaggggagcgacgacaucaagcggcuccuggacucccagggccgccgcgacaucaagcugaucgacaucgcccucagcaaggccgacucccggcgcuucgagaacgccgugugggaccagugcaaggaccugugccacaugcacaccggggucgugguggagaagaagaagcggggcgggaaggaggagaucacgccccacugcgcccugauggacugcaucauguacgacgcggccgucagcggcggccucaacaucccggugcugcgcgccgugcugccccgggacauggucuuccgcaccuccagccccaagguggugcucugaggacuagucccuguucccagagcccacuuuuuuuucuuuuuuugaaauaaaauagccugucuuucagaucuaaaaaaaaaaaaaaaaaaaaaaaaaaaaaaaaaaaaaaaaaaaaaaaaaaaaaaaaaaaaaaaaaaaaaaaaaaaaaaaaaaaaaaaaaaaaaaaaaaaa

SEQ ID NO: 18320 - RNA, 2021 nt, Artificial Sequence
  mRNA product Design a-1 (A100) comprising derived and/or modified sequence from LASV(Lassa virus/H.sapiens-wt/NGA/2016/ISTH_0017;Clade II)__AVO03568__SP-HsPLAT_NP(2-569) (opt1)
aggagagucccgcagucggcguccagcggcucugcuuguucgugugugugucguugcaggccuuauucaagcuuaccauggacgccaugaagcgcggccugugcugcgugcuccugcugugcggggccgucuucgugagccccagcgccuccaaggaggugaaguccuuccuguggacccagagccuccgccgggagcugagcggcuacugcuccagcaucaagcugcaggucgugaaggacgcccaggcgcuccugcacgggcuggacuucuccgaggugagcaacguccagcgccucaugcggaagcagaagcgcgacgacuccgaccugaagcggcugcgcgaccucaaccaggccgugaacaaccugguggagcucaagagcacccagcagaaguccauccugcgggucggcacgcugaccagcgacgaccugcucacccuggccgccgaccuggagaagcucaaguccaaggugauccgcaccgagcggccccugagcuccgggguguacaugggcaaccugagcacgcagcagcucgagcagcgccgggcccugcugaacaugaucgggauggcgggcggcgcccaggggacccagccgggccgcgacggggucgugcgggugugggacgucaagaaccccgaccuccugaacaaccaguucggcaccaugcccucccugacccucgccugccugacgaagcagggccagguggaccugaacgacgccgugcucgcgcugaccgaccuggggcucaucuacaccgccaaguaccccaacagcuccgaccuggaccgccugagccagagccacccgauccucaacauggucgacaccaagaaguccagccugaacaucuccggcuacaacuucagccugggggccgccgugaaggccggcgcgugcaugcucgacgggggcaacaugcuggagacgaucaaggugacgccccagaccauggacggcauccugaaguccauccucaaggucaagcggagccuggggauguucguguccgacgcccccggcgagcgcaaccccuacgagaacauccuguacaagaucugccucagcggggacggcuggccguacaucgccucccggaccagcaucguggggcgcgccugggagaacaccaccgucgaccuggaguccgacggcaagccccagaaggugggcgccaccgggagcaacaagucccugcagagcgcgggcuuccccaccgggcucacguacucccagcugaugacccugaaggacagcaugaugcagcuggaccccuccgccaagaccuggaucgacaucgagggccggccggaggaccccguggaggucgcccucuaccagcccgugagcgggugcuacauccacuucuuccgcgagcccaccgaccugaagcaguucaagcaggacgccaaguacucccacggcaucgacgucgccgaccuguucccggcgcagcccggccucacgagcgccgugaucgaggcccugccccggaacauggugcugaccugccaggggagcgacgacaucaagaagcuccuggacucccagggccgcaaggacaucaagcugaucgacaucgcccucagcaaggccgacucccgccgguucgagaacgcggucugggaccagugcaaggaccugugccacaugcacaccggggugguggucgagaagaagaagcgcggcgggaaggaggagaucacgccccacugcgcccugauggacugcaucauguacgacgccgccgugagcggcggccucaacaucccggugcugcgggcgguccugccccgcgacaugguguuccggaccuccagccccaaggugguccucugaggacuagucccuguucccagagcccacuuuuuuuucuuuuuuugaaauaaaauagccugucuuucagaucuaaaaaaaaaaaaaaaaaaaaaaaaaaaaaaaaaaaaaaaaaaaaaaaaaaaaaaaaaaaaaaaaaaaaaaaaaaaaaaaaaaaaaaaaaaaaaaaaaaaa

SEQ ID NO: 18321 - RNA, 2021 nt, Artificial Sequence
  mRNA product Design a-1 (A100) comprising derived and/or modified sequence from LASV(Lassa virus/H.sapiens-wt/NGA/2018/ISTH_0959;Clade II)__AVV65100__SP-HsPLAT_NP(2-569) (opt1)
aggagagucccgcagucggcguccagcggcucugcuuguucgugugugugucguugcaggccuuauucaagcuuaccauggacgccaugaagcgcggccugugcugcgugcuccugcugugcggggccgucuucgugagccccagcgccuccaaggaggugaaguccuuccuguggacccagagccuccgccgggagcugagcggcuacugcuccaacaucaagcugcaggucgugaaggacgcccaggcgcuccugcacgggcuggacuucagcgagguguccaacguccagcgccucaugcggaagcagaagcgcgacgacagcgaccugaagcggcugcgcgaccucaaccaggccgugaacaaccugguggagcugaaguccacccagcagaaguccauccuccgggucggcacccugaccagcgacgaccugcucacccuggccgccgaccuggagaagcucaagagcaaggugauccgcaccgagcggccccuguccagcgggguguacaugggcaaccuguccacgcagcagcucgagcagcgccgggcccugcugaaccucaucgggauggucggcggcgcgcaggggacccagccgggccgcgacgggguggugcgggucugggacgugaagaaccccgaccugcugaacaaccaguucggcaccaugcccagccucacccuggccugccugacgaagcagggccagguggaccucaacgacgucgugcuggcccugaccgaccucgggcugaucuacaccgccaaguaccccaacuccagcgaccuggaccgccucucccagagccacccgauccugaacaugguggacaccaagaaguccagccugaacaucagcggcuucaacuucucccucggggcggccgucaaggccggcgccugcaugcuggacgggggcaacaugcuggagacgaucaaggugacgccccagaccauggacggcauccucaagagcauccugaaggugaagaagucccuggggauguucgucagcgacacccccggcgagcggaaccccuacgagaacauccucuacaagaucugccuguccggggacggcuggccguacaucgccagccgcaccuccaucguggggcgggcgugggagaacaccaccguggaccuggagagcgacggcaagccccacaaggucggcaccgccggguccaacaagagccuccaguccgccggcuuccccacggggcugaccuacagccagcugaugacccugaaggacuccaugaugcagcucgaccccagcgccaagaccuggaucgacaucgagggccgcccggaggaccccguggagaucgcccuguaccagcccauguccgggugcuacauccacuucuuccgggagcccacggaccugaagcaguucaagcaggacgcgaaguacagccacggcaucgacgucgccgaccucuucccggcccagcccggccugaccuccgccgugaucgaggcccugccccgcaacauggugcugaccugccaggggagcgacgacaucaagcggcuccuggacagccagggccgcaaggacaucaagcucaucgacaucgcgcuguccaagaccgacagccgccgguucgagaacgccgucugggaccagugcaaggaccugugccacaugcacacgggggugguggucgagaagaagaagcgcggcgggaaggaggagaucacgccccacugcgcccucauggacugcaucauguacgacgccgccguguccggcggccugaacaucccggugcugcgggcgguccucccccgcgacaugguguuccggaccagcucccccaaggugguccugugaggacuagucccuguucccagagcccacuuuuuuuucuuuuuuugaaauaaaauagccugucuuucagaucuaaaaaaaaaaaaaaaaaaaaaaaaaaaaaaaaaaaaaaaaaaaaaaaaaaaaaaaaaaaaaaaaaaaaaaaaaaaaaaaaaaaaaaaaaaaaaaaaaaaa

SEQ ID NO: 18322 - RNA, 2021 nt, Artificial Sequence
  mRNA product Design a-1 (A100) comprising derived and/or modified sequence from LASV(LASV003-NIG-2008;Clade II)__AIT17581__SP-HsPLAT_NP(2-569) (opt1)
aggagagucccgcagucggcguccagcggcucugcuuguucgugugugugucguugcaggccuuauucaagcuuaccauggacgccaugaagcgcggccugugcugcgugcuccugcugugcggggccgucuucgugagccccagcgccuccaaggaggugaaguccuuccuguggacccagagccuccgccgggagcugagcggcuacugcuccagcaucaagcugcaggucgugaaggacgcccaggcgcuccugcacgggcuggacuucuccgaggugagcaacguccagcgccucaugcggaagcagaagcgcgacgacuccgaccugaagcggcugcgcgaccucaaccaggccgugaacaaccugguggagcucaagagcacccagcagaaguccguccugcgggugggcacccugaccagcgacgaccugcucacccuggccgccgaccuggagaagcucaaguccaaggugauccgcaccgagcggccccugagcuccggggucuacaugggcaaccugagcgcccagcagcucgagcagcgccggacgcugcugaacaugaucgggauggugggcggcgcgcaggggacccagccgggccgcgacggggugguccgggugugggacgugaagaaccccgaccuccugaacaaccaguucggcaccaugcccucccugacccucgccugccugacgaagcaggggcaggucgaccugaacgacguggugcucgcccugaccgaccugggccucaucuacaccgccaaguaccccaacagcuccgaccuggaccgccugagccagagccacccgauccucuccauggucgacaccaagaaguccagccugaacaucagcggcuacaacuucucccugggggcggccgugaaggccggcgccugcaugcucgacgggggcaacaugcuggagacgaucaaggugacgccccagaccauggacggcauccucaagagcauccugaaggucaagaagucccuggggauguucgugagcgacacccccggcgagcggaaccccuacgagaacauccuguacaagaucugccucuccggggacggcuggccguacaucgccagccgcaccuccaucguggggcgggcgugggagaacaccaccgucgaccuggagagcgacggcaagccccagaaggugggcaccgccggguccaacaagagccugcaguccgccggcuuccccacggggcucaccuacagccagcugaugacccugaaggacuccaugaugcagcuggaccccagcgccaagaccuggaucgacaucgagggccgcccggaggaccccgucgagaucgcccucuaccagcccauguccgggugcuacauccacuucuuccgggagcccacggaccugaagcaguucaagcaggacgcgaaguacagccacggcaucgacgugaccgaccuguucccggcccagcccggccucaccagcgccgugaucgaggcccugccccgcaacaugguccugaccugccagggguccgacgacaucaagcggcuccuggacagccagggccgccgcgacaucaagcugaucgacaucgcccucuccaaggcggacagccggcgcuucgagaacgccgugugggaccagugcaaggaccugugccacaugcacacggggguggucguggagaagaagaagcggggcgggaaggaggagaucacgccccacugcgcccugauggacugcaucauguacgacgccgccguguccggcggccucaacaucccgguccugcgcgcggugcugccccgggacaugguguuccgcaccagcucccccaaggucgugcucugaggacuagucccuguucccagagcccacuuuuuuuucuuuuuuugaaauaaaauagccugucuuucagaucuaaaaaaaaaaaaaaaaaaaaaaaaaaaaaaaaaaaaaaaaaaaaaaaaaaaaaaaaaaaaaaaaaaaaaaaaaaaaaaaaaaaaaaaaaaaaaaaaaaaa

SEQ ID NO: 18323 - RNA, 2021 nt, Artificial Sequence
  mRNA product Design a-1 (A100) comprising derived and/or modified sequence from LASV(LASV035-NIG-2009;Clade II)__AIT17589__SP-HsPLAT_NP(2-569) (opt1)
aggagagucccgcagucggcguccagcggcucugcuuguucgugugugugucguugcaggccuuauucaagcuuaccauggacgccaugaagcgcggccugugcugcgugcuccugcugugcggggccgucuucgugagccccagcgccuccaaggaggugaaguccuuccuguggacccagagccuccgccgggagcugagcggcuacugcuccagcaucaagcugcaggucgugaaggacgcccaggcgcuccugcacgggcuggacuucuccgaggugagcaacguccagcgccucaugcggaagcagaagcgcgacgacuccgaccugaagcggcugcgcgaccucaaccaggccgugaacaaccugguggagcucaagagcacccagcagaaguccauccugcgggucggcacgcugaccagcgacgaccugcucacccuggccgccgaccuggagaagcucaaguccaaggugauccgcaccgagcggccccugagcuccgggguguacaugggcaaccugagcgcccagcagcucgagcagcgccgggcgcugcugaacaugaucgggauggucggcggcgcccaggggacgcagccgggccgcgacgggguggugcgggucugggacgugaagaaccccgaccuccugaacaaccaguucggcaccaugcccucccugacccucgccugccugaccaagcagggccagguggaccugaacgacgccguccucgcgcugacggaccuggggcucaucuacaccgccaaguaccccaacagcuccgaccuggaccgccugagccagagccacccgauccucaacaugguggacaccaagaaguccagccugaacaucuccggcuacaacuucagccugggggccgccgugaaggccggcgcgugcaugcucgacgggggcaacaugcuggagaccaucaaggucacgccccagaccauggacggcauccugaaguccauccucaaggugaagcggagccuggggauguucguguccgacacccccggcgagcgcaaccccuacgagaacauccuguacaagaucugccucagcggggacggcuggccguacaucgccucccggaccagcaucgucgggcgcgccugggagaacacgaccguggaccuggaguccgacggcaagccccagaaggugggcaccaccgggagcaacaagucccugcagagcgccggcuuccccacggggcucaccuacucccagcugaugacccugaaggacagcaugaugcagcuggaccccuccgccaagaccuggaucgacaucgagggccggccggaggaccccgucgagaucgcgcucuaccagcccaugagcgggugcuacauccacuucuuccgcgagcccacggaccugaagcaguucaagcaggacgccaaguacucccacggcaucgacguggccgaccuguucccggcccagcccggccucaccagcgccgucaucgaggcgcugccccggaacauggugcugaccugccaggggagcgacgacaucaagaagcuccuggacucccagggccgccgcgacaucaagcugaucgacaucgcccucagcaaggccgacucccggaaguucgagaacgccgugugggaccagugcaaggaccugugccacaugcacaccggggucgugguggagaagaagaagcgcggcgggaaggaggagaucacgccccacugcgcccugauggacugcaucauguacgacgcggccgucagcggcggccucaacaucccggugcugcgggccgugcugccccgcgacauggucuuccggaccuccagccccaagguggugcucugaggacuagucccuguucccagagcccacuuuuuuuucuuuuuuugaaauaaaauagccugucuuucagaucuaaaaaaaaaaaaaaaaaaaaaaaaaaaaaaaaaaaaaaaaaaaaaaaaaaaaaaaaaaaaaaaaaaaaaaaaaaaaaaaaaaaaaaaaaaaaaaaaaaaa

SEQ ID NO: 18324 - RNA, 2021 nt, Artificial Sequence
  mRNA product Design a-1 (A100) comprising derived and/or modified sequence from LASV(LASV1000-NIG-2009;Clade II)__AIT17783__SP-HsPLAT_NP(2-569) (opt1)
aggagagucccgcagucggcguccagcggcucugcuuguucgugugugugucguugcaggccuuauucaagcuuaccauggacgccaugaagcgcggccugugcugcgugcuccugcugugcggggccgucuucgugagccccagcgccuccaaggaggugaaguccuuccuguggacccagagccuccgccgggagcugagcggcuacugcuccaacaucaagcugcaggucgugaaggacgcccaggcgcuccugcacgggcuggacuucagcgagguguccaacguccagcgccucaugcggaagcagaagcgcgacgacagcgaccugaagcggcugcgcgaccucaaccaggccgugaacaaccugguggagcugaaguccacccagcagaaguccauccuccgggucggcacgcugaccagcgacgaccugcucacccuggccgccgaccuggagaagcucaagagcaaggugauccgcaccgagcggccccuguccagcgggguguacaugggcaaccuguccacgcagcagcucgagcagcgccgggcccugcugaacaugaucgggauggucggcggcgcgcaggggacccagccgggccgcgacgggguggugcgggucugggacgugaagaaccccgaccuccugaacaaccaguucggcaccaugcccagccugacccucgccugccugacgaagcagggccagguggaccugaacgacgucgugcucgcccugaccgaccuggggcucaucuacaccgccaaguaccccaacuccagcgaccuggaccgccugucccagagccacccgauccucaacaugguggacaccaagaaguccagccugaacaucagcggcuacaacuucucccugggggcggccgucaaggccggcgccugcaugcucgacgggggcaacaugcuggagacgaucaaggugacgccccagaccauggacggcauccucaagagcauccugaaggugaagaagucccuggggauguucgucagcgacacccccggcgagcggaaccccuacgagaacauccuguacaagaucugccucuccggggacggcuggccguacaucgccagccgcaccuccaucguggggcgggcgugggagaacaccaccguggaccuggagagcgacggcaagccccagaaggucggcaccgccggguccaacaagagccugcaguccgccggcuuccccacggggcucaccuacagccagcugaugacccugaaggacuccaugaugcagcuggaccccagcgccaagaccuggaucgacaucgagggccgcccggaggaccccguggagaucgcccucuaccagcccgucuccgggugcuacauccacuucuuccgggagcccacggaccugaagcaguucaagcaggacgcgaaguacagccacggcaucgacguggccgaccuguucccggcccagcccggccucaccuccgccgugaucgaggcccugccccgcaacaugguccugaccugccaggggagcgacgacaucaagcggcuccuggacagccagggccgccgcgacaucaagcugaucgacaucgcgcucuccaaggccgacagccggcgcuucgagaacgccgugugggaccagugcaaggaccugugccacaugcacaccgggguggucguggagaagaagaagcggggcgggaaggaggagaucacgccccacugcgcccugauggacugcaucauguacgacgccgcgguguccggcggccucaacaucccgguccugcgcgccgugcugccccgggacaugguguuccgcaccagcucccccaaggucgugcucugaggacuagucccuguucccagagcccacuuuuuuuucuuuuuuugaaauaaaauagccugucuuucagaucuaaaaaaaaaaaaaaaaaaaaaaaaaaaaaaaaaaaaaaaaaaaaaaaaaaaaaaaaaaaaaaaaaaaaaaaaaaaaaaaaaaaaaaaaaaaaaaaaaaaa

SEQ ID NO: 18325 - RNA, 2021 nt, Artificial Sequence
  mRNA product Design a-1 (A100) comprising derived and/or modified sequence from LASV(LASV221-NIG-2010;Clade II)__AIT17625__SP-HsPLAT_NP(2-569) (opt1)
aggagagucccgcagucggcguccagcggcucugcuuguucgugugugugucguugcaggccuuauucaagcuuaccauggacgccaugaagcgcggccugugcugcgugcuccugcugugcggggccgucuucgugagccccagcgccuccaaggaggugaaguccuuccuguggacccagagccuccgccgggagcugagcggcuacugcuccagcaucaagcugcaggucgugaaggacgcccaggcgcuccugcacgggcuggacuucuccgaggugagcaacguccagcgccucaugcggaagcagcgccgggacgacuccgaccugaagcgccugcgggaccucaaccaggccgugaacaaccugguggagcucaagagcacccagcagaaguccauccugcgcgucggcacgcugaccagcgacgaccugcucacccuggccgccgaccuggagaagcucaaguccaaggugauccggaccgagcgcccccugagcuccgggguguacaugggcaaccugagcacgcagcagcucgagcagcggcgcgcccugcugaacaugaucgggauggucggcggcgcgcaggggacccagccgggccgggacgggguggugcgcgucugggacgugaagaaccccgaccuccugaacaaccaguucggcaccaugcccucccugacccucgccugccugacgaagcagggccagguggaccugaacgacgccguccucgcccugaccgaccuggggcucaucuacaccgcgaaguaccccaacagcuccgaccuggaccggcugagccagagccacccgauccucaacaugguggacaccaagaaguccagccugaacaucuccggcuacaacuucagccugggggccgccgugaaggccggcgccugcaugcucgacgggggcaacaugcuggagacgaucaaggucacgccccagaccguggacggcauccugaaguccauccucaaggugaagcgcagccuggggauguucgucuccgacacccccggcgagcggaaccccuacgagaacauccuguacaagaucugccucagcggggacggcuggccguacaucgcgucccgcaccagcaucguggggcgggccugggagaacaccaccguggaccuggaguccgacggcaagccccagaaggucggcaccgccgggagcaacaagucccugcagagcgccggcuuccccacggggcucaccuacucccagcugaugacccugaaggacagcaugaugcagcuggaccccuccgccaagaccuggaucgacaucgagggccgcccggaggaccccguggagaucgcgcucuaccagcccaugagcgggugcuacauccacuucuuccgggagcccacggaccugaagcaguucaagcaggacgccaaguacucccacggcaucgacgucgccgaccuguucccggcccagcccggccucaccagcgccgugaucgaggcgcugccccgcaacauggugcugaccugccaggggagcgacgacaucaagcgccuccuggacucccagggccggcgcgacaucaagcugaucgacaucgcccucagcaaggccgacucccggaaguucgagaacgccgucugggaccagugcaaggaccugugccacaugcacaccggggugguggucgagaagaagaagcgcggcgggaaggaggagaucacgccccacugcgcccugauggacugcaucauguacgacgcggccgugagcggcggccucaacaucccggugcugcgggccguccugccccgcgacaugguguuccggaccuccagccccaaggugguccucugaggacuagucccuguucccagagcccacuuuuuuuucuuuuuuugaaauaaaauagccugucuuucagaucuaaaaaaaaaaaaaaaaaaaaaaaaaaaaaaaaaaaaaaaaaaaaaaaaaaaaaaaaaaaaaaaaaaaaaaaaaaaaaaaaaaaaaaaaaaaaaaaaaaaa

SEQ ID NO: 18326 - RNA, 2021 nt, Artificial Sequence
  mRNA product Design a-1 (A100) comprising derived and/or modified sequence from LASV(LASV237-NIG-2010;Clade II)__AIT17639__SP-HsPLAT_NP(2-569) (opt1)
aggagagucccgcagucggcguccagcggcucugcuuguucgugugugugucguugcaggccuuauucaagcuuaccauggacgccaugaagcgcggccugugcugcgugcuccugcugugcggggccgucuucgugagccccagcgccuccaaggaggugaaguccuuccuguggacccagagccuccgccgggagcugagcggcuacugcuccaacaucaagcugcaggucgugaaggacgcccaggcgcuccugcacgggcuggacuucagcgagguguccaacguccagcgccucaugcggaagcagaagcgcgacgacagcgaccugaagcggcugcgcgaccucaaccaggccgugaacaaccugguggagcugaaguccacccagcagaaguccauccuccgggucggcacccugaccagcgacgaccugcucacccuggccgccgaccuggagaagcucaagagcaaggugauccgcaccgagcggccccuguccagcgggguguacaugggcaaccuguccacgcagcagcucgagcagcgccgggcccugcugaacaugaucgggauggucggcggcgcgcaggggacccagccgggccgcgacgggguggugcgggucugggacgugaagaaccccgaccuccugaacaaccaguucggcaccaugcccagccugacccucgccugccugacgaagcagggccagguggaccugaacgacgccguccucgcccugaccgaccuggggcucaucuacaccgcgaaguaccccaacuccagcgaccuggaccgccugucccagagccacccgauccucaacaugguggacaucaagaaguccagccugaacaucagcggcuacaacuucucccugggggccgccgugaaggccggcgccugcaugcucgacgggggcaacaugcuggagaccaucaaggucacgccccagaccauggacggcauccucaagagcauccugaaggugaagcggucccuggggauguucgugagcgacacccccggcgagcgcaaccccuacgagaacauccuguacaagaucugccucuccggggacggcuggccguacaucgcgagccggaccuccaucgucgggcgcgccugggagaacacgaccguggaccuggagagcgacggcaagccccagaaggugggcuccgccgggagcaacaagucccugcagagcgccggcuuccccaccgggcucaccuacucccagcugaugacgcugaaggacagcaugaugcagcuggaccccuccgccaagaccuggaucgacaucgagggccggccggaggaccccgucgagaucgcgcucuaccagcccaugagcgggugcuacauccacuucuuccgcgagcccaccgaccugaagcaguucaagcaggacgccaaguacucccacggcaucgacguggccgaccuguucccggcccagcccggccucaccagcgccgucaucgaggcgcugccccggaacauggugcugacgugccaggggagcgacgacaucaagcgccuccuggacucccagggccgccgggacaucaagcugaucgacaucgcccucagcaaggccgacucccgccgguucgagaacgccgugugggaccagugcaaggaccugugccacaugcacaccggggucgugguggagaagaagaagcgcggcgggaaggaggagaucacgccccacugcgcccugauggacugcaucauguacgacgcggccgucagcggcggccucaacaucccggugcugcgggccgugcugccccgcgacauggucuuccggaccuccagccccaagguggugcucugaggacuagucccuguucccagagcccacuuuuuuuucuuuuuuugaaauaaaauagccugucuuucagaucuaaaaaaaaaaaaaaaaaaaaaaaaaaaaaaaaaaaaaaaaaaaaaaaaaaaaaaaaaaaaaaaaaaaaaaaaaaaaaaaaaaaaaaaaaaaaaaaaaaaa

SEQ ID NO: 18327 - RNA, 2021 nt, Artificial Sequence
  mRNA product Design a-1 (A100) comprising derived and/or modified sequence from LASV(LASV253-NIG-2011;Clade II)__AIT17671__SP-HsPLAT_NP(2-569) (opt1)
aggagagucccgcagucggcguccagcggcucugcuuguucgugugugugucguugcaggccuuauucaagcuuaccauggacgccaugaagcgcggccugugcugcgugcuccugcugugcggggccgucuucgugagccccagcgccuccaaggaggugaaguccuuccuguggacccagagccuccgccgggagcugagcggcuacugcuccagcaucaagcugcaggucgugaaggacgcccaggcgcuccugcacgggcuggacuucuccgaggugagcaacguccagcgccucaugcggaagcagaagcgcgacgacuccgaccugaagcggcugcgcgaccucaaccaggccgugaacaaccugguggagcucaagagcacccagcagaaguccguccugcgggugggcacccugaccagcgacgaccugcucacccuggccgccgaccuggagaagcucaaguccaaggugauccgcaccgagcggccccugagcuccggggucuacaugggcaaccugagcacgcagcagcucgagcagcgccgggcccugcugaacaugaucgggauggugggcggcgcgcaggggacccagccgggccgcgacggggugguccgggugugggacgugaagaaccccgaccuccugaacaaccaguucggcaccaugcccucccugacccucgccugccugacgaagcaggggcaggucgaccugaacgacguggugcucgcccugaccgaccugggccucaucuacaccgccaaguaccccaacagcuccgaccuggaccgccugagccagagccacccgauccucaacauggucgacaccaagaaguccagccugaacaucuccggcuacaacuucagccugggggcggccgugaaggccggcgccugcaugcucgacgggggcaacaugcuggagacgaucaaggugacgccccagaccauggacggcauccugaaguccauccucaaggucaagaagucccuggggauguucgugagcgacacccccggcgagcggaaccccuacgagaacauccuguacaagaucugccucagcggggacggcuggccguacaucgccucccgcaccagcaucguggggcgggcgugggagaacaccaccgucgaccuggaguccgacggcaagccccagaaggugggcaccgccgggagcaacaagucccugcagagcgccggcuuccccacggggcucaccuacucccagcugaugacccugaaggacagcaugaugcagcuggaccccuccgccaagaccuggaucgacaucgagggccgcccggaggaccccgucgagaucgcccucuaccagcccaugagcgggugcuacauccacuucuuccgggagcccacggaccugaagcaguucaagcaggacgcgaaguacucccacggcaucgacgugaccgaccuguucccggcccagcccggccucaccagcgccgugaucgaggcccugccccgcaacaugguccugaccugccaggggagcgacgacaucaagcggcuccuggacucccagggccgccgcgacaucaagcugaucgacaucgcccucagcaaggcggacucccggcgcuucgagaacgccgugugggaccagugcaaggaccugugccacaugcacacggggguggucguggagaagaagaagcggggcgggaaggaggagaucacgccccacugcgcccugauggacugcaucauguacgacgccgccgugagcggcggccucaacaucccgguccugcgcgcggugcugccccgggacaugguguuccgcaccuccagccccaaggucgugcucugaggacuagucccuguucccagagcccacuuuuuuuucuuuuuuugaaauaaaauagccugucuuucagaucuaaaaaaaaaaaaaaaaaaaaaaaaaaaaaaaaaaaaaaaaaaaaaaaaaaaaaaaaaaaaaaaaaaaaaaaaaaaaaaaaaaaaaaaaaaaaaaaaaaaa

SEQ ID NO: 18328 - RNA, 2021 nt, Artificial Sequence
  mRNA product Design a-1 (A100) comprising derived and/or modified sequence from LASV(LASV254-NIG-2011;Clade II)__AIT17675__SP-HsPLAT_NP(2-569) (opt1)
aggagagucccgcagucggcguccagcggcucugcuuguucgugugugugucguugcaggccuuauucaagcuuaccauggacgccaugaagcgcggccugugcugcgugcuccugcugugcggggccgucuucgugagccccagcgccuccaaggaggugaaguccuuccuguggacccagagccuccgccgggagcugagcggcuacugcuccagcaucaagcugcaggucgugaaggacgcccaggcgcuccugcacgggcuggacuucuccgaggugagcaacguccagcgccucaugcggaagcagaagcgcgacgacuccgaccugaagcggcugcgcgaccucaaccaggccgugaacaaccugguggagcucaagagcacccagcagaaguccguccugcgggugggcacgcugaccagcgacgaccugcucacccuggccgccgaccuggagaagcucaaguccaaggugauccgcaccgagcggccccugagcuccggggucuacaugggcaaccugagcacgcagcagcucgagcagcgccgggcccugcugaacaugaucgggauggugggcggcgcgcaggggacccagccgggccgcgacggggugguccgggugugggacgugaagaaccccgaccuccugaacaaccaguucggcaccaugcccucccugacccucgccugccugacgaagcaggggcaggucgaccugaacgacgccgugcucgcccugaccgaccugggccucaucuacaccgcgaaguaccccaacagcuccgaccuggaccgccugagccagagccacccgauccucaacaugguggacaccaagaaguccagccugaacaucuccggcuacaacuucagccugggggccgccgucaaggccggcgccugcaugcucgacgggggcaacaugcuggagacgaucaaggugacgccccagaccauggacggcauccugaaguccauccucaaggugaagaagucccuggggauguucgucagcgacacccccggcgagcggaaccccuacgagaacauccuguacaagaucugccucagcggggacggcuggccguacaucgcgucccgcaccagcaucguggggcgggccugggagaacaccaucguggaccuggaguccgacggcaagccccagaaggucggcaccgccgggagcaacaagucccugcagagcgccggcuuccccaccgggcucacguacucccagcugaugacccugaaggacagcaugaugcagcuggaccccuccgccaagaccuggaucgacaucgagggccgcccggaggaccccguggagaucgcgcucuaccagcccaugagcgggugcuacauccacuucuuccgggagcccaccgaccugaagcaguucaagcaggacgccaaguacucccacggcaucgacgucgccgaccuguucccggcccagcccggccucacgagcgccgugaucgaggcgcugccccgcaacauggugcugaccugccaggggagcgacgacaucaagcggcuccuggacucccagggccgccgcgacaucaagcugaucgacaucgcccucagcaaggccgacucccggcgcuucgagaacgccgucugggaccagugcaaggaccugugccacaugcacaccggggugguggucgagaagaagaagcggggcgggaaggaggagaucacgccccacugcgcccugauggacugcaucauguacgacgcggccgugagcggcggccucaacaucccggugcugcgcgccguccugccccgggacaugguguuccgcaccuccagccccaaggugguccucugaggacuagucccuguucccagagcccacuuuuuuuucuuuuuuugaaauaaaauagccugucuuucagaucuaaaaaaaaaaaaaaaaaaaaaaaaaaaaaaaaaaaaaaaaaaaaaaaaaaaaaaaaaaaaaaaaaaaaaaaaaaaaaaaaaaaaaaaaaaaaaaaaaaaa

SEQ ID NO: 18329 - RNA, 2021 nt, Artificial Sequence
  mRNA product Design a-1 (A100) comprising derived and/or modified sequence from LASV(Nig08-04;Clade II)__ADU56611__SP-HsPLAT_NP(2-569) (opt1)
aggagagucccgcagucggcguccagcggcucugcuuguucgugugugugucguugcaggccuuauucaagcuuaccauggacgccaugaagcgcggccugugcugcgugcuccugcugugcggggccgucuucgugagccccagcgccuccaaggaggugaaguccuuccuguggacccagagccuccgccgggagcugagcggcuacugcuccaacaucaagcugcaggucgugaaggacgcccaggcgcuccugcacgggcuggacuucagcgagguguccaacguccagcgccucaugcggaagcagaagcgcgacgacggcgaccugaagcggcugcgcgaccucaaccaggccgugaacaaccugguggagcucaagagcacccagcagaaguccguccugcggguggggacccugaccagcgacgaccugcucacccuggccgccgaccuggagaagcucaaguccaaggugauccgcaccgagcggccccugagcuccggcgucuacauggggaaccugagcacgcagcagcucgagcagcgcaaggcccugcuguccaugaucggcauggugggcggggcgcagggcacccagccggggcgggacggcgugguccgcgugugggacgugaagaaccccgaccuccugaacaaccaguucgggaccaugcccagccugacccucgccugccugacgaagcagggccaggucgaccugaacgacgccgugcucgcccugaccgaccugggccucaucuacaccgcgaaguaccccaacuccagcgaccuggaccggcugucccagagccacccgauccucaacaugguggacaccaagaaguccagccugaacaucagcggguacaacuucucccugggcgccgccgucaaggccggggccugcaugcucgacggcggcaacaugcuggagacgaucaaggugacgccccagaccauggacgggauccucaagagcauccugaaggugaagcgcucccugggcauguucgucagcgacacccccggggagcggaaccccuacgagaacauccuguacaagaucugccucuccggcgacggguggccguacaucgcgagccgcaccuccaucgugggccgggccugggagaacaccaccguggaccuggagagcgacggcaagccccagaaggucgggaccgccggcuccaacaagagccugcaguccgccggguuccccacgggccucaccuacagccagcugaugacccugaaggacuccaugaugcagcuggaccccagcgccaagaccuggaucgacaucgaggggcgcccggaggaccccguggagaucgcgcucuaccagcccauguccggcugcuacauccacuucuuccgggagcccacggaccugaagcaguucaagcaggacgccaaguacagccacggcaucgacgucaccgaccuguucuccgcccagccggggcucaccagcgccgugaucgaggcccugccccgcaacauggugcugaccugccagggcagcgacgacaucaagaagcuccuggacucccaggggcggcgcgacaucaagcugaucgacaucagccucaacaaggcggacucccgccgguucgagaacgccgucugggaccagugcaaggaccugugccacaugcacacgggcgugguggucgagaagaagaagcgcgggggcaaggaggagaucacgccccacugcgcccugauggacugcaucauguucgacgccgccgugagcggcgggcucaacauccccauccugcgggcggugcugccgcgcgacauggucuuccggaccuccagccccaagguggugcucugaggacuagucccuguucccagagcccacuuuuuuuucuuuuuuugaaauaaaauagccugucuuucagaucuaaaaaaaaaaaaaaaaaaaaaaaaaaaaaaaaaaaaaaaaaaaaaaaaaaaaaaaaaaaaaaaaaaaaaaaaaaaaaaaaaaaaaaaaaaaaaaaaaaaa

SEQ ID NO: 18330 - RNA, 2024 nt, Artificial Sequence
  mRNA product Design a-1 (A100) comprising derived and/or modified sequence from LASV(GA391;Clade III)__AAA46284__SP-HsPLAT_NP(2-570) (opt1)
aggagagucccgcagucggcguccagcggcucugcuuguucgugugugugucguugcaggccuuauucaagcuuaccauggacgccaugaagcgcggccugugcugcgugcuccugcugugcggggccgucuucgugagccccagcgccuccaaggaggugcgcagcugccuguggacccagucccuccggcgcgagcugagcggcuacugcuccaacaucaagcugcaggucgugaaggacgcccaggcgcuccugcacgggcuggacuucagcgagguguccaacguccagcggcucaugcgcaagcagaagcgggacgacggcgaccugaagcgccugcgggaccucaaccaggccgugaacaaccugguggagcugaaguccacccagcagaaguccguccuccgcguggggacgcugagcuccgacgaccugcucauccuggccgccgaccuggagaagcucaagagcaaggugacccggaccgagcgcccccuguccagcggcgucuacauggggaaccuguccagccagcagcucgaccagcggcgcgcccugcugaacaugaucggcaugaccggcguguccgggggcgggaagggcgcgagcaacgggaucgugcgggucugggacgugaagaacgccgagcuccugaacaaccaguucggcacgaugccgucccugacccucgccugccugaccaagcagggccagguggaccugaacgacgccguccaggcgcucaccgaccuggggcugaucuacacggccaaguaccccaacagcagcgaccucgaccgccugucccagagccaccccauccugaacaugaucgacaccaagaaguccagccucaacaucuccggcuacaacuucagccugggggccgccgugaaggccggcgcgugcaugcuggacggcgggaacaugcucgagaccaucaaggugagcccccagaccauggacggcauccucaagagcauccugaaggucaagaagucccuggggauguucgugagcgacacgccgggcgagcggaaccccuacgagaacauccuguacaagaucugccuguccggggacggcuggagcuacaucgccucccgcaccagcaucgugggccgggccugggagaacaccgucguggaccucgagcaggacaacaagccccagaagaucgggaacggcggguccaacaagagccugcaguccgccggcuucgccgcggggcugaucuacagccagcucaugacccugaaggacuucaagugcuucaaccugauccccaacgccaagacguggauggacaucgagggccgcccggaggaccccguggagaucgcccuguaccagcccuccagcggcugcuacguccacuucuuccgggagcccaccgaccucaagcaguucaagcaggacgccaaguacagccacgggcgcgacgugaccgaccuguucgccgcgcagccgggccugaccuccgccgucaucgaggcccucccccggaacauggugaucacgugccaggggagcgaggacauccgcaagcugcuggagucccagggccgccgggacaucaagcucaucgacaucacccugagcaaggccgacucccgcaaguucgagaacgccgugugggaccaguucaaggaccugugccacaugcacaccggggucgugguggagaagaagaagcggggcggcaaggaggagaucacgccccacugcgcgcucauggacugcaucauguucgacgccgccgucagcgggggccuggacgccaaggugcugcgcgugguccucccccgggacaugguguuccgcaccuccaccccgaaggugguccugugaggacuagucccuguucccagagcccacuuuuuuuucuuuuuuugaaauaaaauagccugucuuucagaucuaaaaaaaaaaaaaaaaaaaaaaaaaaaaaaaaaaaaaaaaaaaaaaaaaaaaaaaaaaaaaaaaaaaaaaaaaaaaaaaaaaaaaaaaaaaaaaaaaaaa

SEQ ID NO: 18331 - RNA, 2021 nt, Artificial Sequence
  mRNA product Design a-1 (A100) comprising derived and/or modified sequence from LASV(Nig08-A19;Clade III)__ADU56619__SP-HsPLAT_NP(2-569) (opt1)
aggagagucccgcagucggcguccagcggcucugcuuguucgugugugugucguugcaggccuuauucaagcuuaccauggacgccaugaagcgcggccugugcugcgugcuccugcugugcggggccgucuucgugagccccagcgccuccaaggaggugaaguccuuccuguggacccagucccuccgccgggagcugagcggcuacugcuccaacaucaagcugcaggucgugaaggacgcccaggcgcuccugcacgggcuggacuucagcgagguguccaacguccagcgccucaugcggaagcagaagcgcgacgacggcgaccugaagcggcugcgcgaccucaaccaggccgugaacaaccugguggagcucaagagcacccagcagaaguccguccugcggguggggacccugagcuccgacgaccugcucgugcuggccgccgaccuggagaagcucaagagcaaggucgugcgcaccgagcggccccuguccagcggcaucuacauggggaaccuguccagccagcagcucgaccagcgcaaggcccugcugaacaugaucggcaugaccggcgggaacggcgggcggaacaccacguccgacggcaucgugcgcgucugggacgugaagaacgcggagcuccugaacaaccaguucgggaccaugccgagccugacccucgccugccugaccaagcagggccagguggaccugaacgacgccguccaggcccucacggaccugggccugaucuacaccgcgaaguaccccaacuccagcgaccucgaccggcuggcccagagccaccccauccugaacaugaucgacaccaagaaguccagccucaacaucuccggguacaacuucagccugggcgccgccgugaaggccggggcgugcaugcuggacggcggcaacaugcucgagaccaucaaggugagcccccagacgauggacgggauccucaagagcauccugaaggucaagcgcucccugggcauguucaucagcgacaccccgggggagcggaaccccuacgagaacauccuguacaagaucugccuguccggcgacggguggcccuacaucgccagccgcaccuccaucgugggccgggccugggagaacaccguggucgaccucgagagcgacaacaagccccagaagacgggcaacgggggcuccaacaagagccugcaguccgccggguucgccgcgggccugaccuacagccagcucaugacccugaaggacuccaugcugcagcuggacccgaacgccaagaccuggauggacaucgaggggcgccccgaggaccccguggagaucgcccucuaccagcccagcuccggcugcuacauccacuucuuccgggagccgacggaccugaagcaguucaagcaggacgccaaguacagccacggcaucgacgugaccgaccuguucgccgcgcagcccgggcucaccagcgccgucaucgaggcccugccccgcaacauggugaucacgugccagggcuccgaggacauccggaagcugcucgagagccaggggcgccgcgacaucaagcugaucgacaucucccugagcaaggucgacucccggaaguucgagaacgccgugugggaccaguucaaggaccucugccacaugcacaccggcaucguggucgagaagaagaagcgcgggggcaaggaggagaucacgccccacugcgcccugauggacugcaucauguucgacgcggccgugagcggcgggguggacgccaagguccugcgggccgugcucccgcgcgacaugguguuccggaccuccacccccaaggucgugcugugaggacuagucccuguucccagagcccacuuuuuuuucuuuuuuugaaauaaaauagccugucuuucagaucuaaaaaaaaaaaaaaaaaaaaaaaaaaaaaaaaaaaaaaaaaaaaaaaaaaaaaaaaaaaaaaaaaaaaaaaaaaaaaaaaaaaaaaaaaaaaaaaaaaaa

SEQ ID NO: 18332 - RNA, 2021 nt, Artificial Sequence
  mRNA product Design a-1 (A100) comprising derived and/or modified sequence from LASV(G1180-SLE-2010;Clade IV)__AIT17169__SP-HsPLAT_NP(2-569) (opt1)
aggagagucccgcagucggcguccagcggcucugcuuguucgugugugugucguugcaggccuuauucaagcuuaccauggacgccaugaagcgcggccugugcugcgugcuccugcugugcggggccgucuucgugagccccagcgccuccaaggagaucaagagcuuccuguggacccagucccuccgccgggagcugagcggcuacugcuccaacaucaagcuccagguggucaaggacgcccaggcgcugcugcacgggcuggacuucagcgagguguccaacgugcagcgccucaugcggaaggagcgccgggacgacaacgaccugaagcgccugcgggaccucaaccaggccgucaacaaccugguggagcucaagagcacccagcagaaguccauccugcgcgugggcacccugaccagcgacgaccugcucauccuggccgccgaccuggagaagcucaaguccaaggucauccggaccgagcgcccccugagcgccgggguguacaugggcaaccuguccagccagcagcucgaccagcggcgcgcgcugcuguccaugaucgggaugagcuccggcaaccagcgggcccaggccggccgcgacggggugguccgggugugggacgugaagaacgucgagcuccugaacaaccaguucggcaccaugccgagccugacgcucgccugccugaccaagcagggccagguggaccugaacgacgcggugcaggcccucaccgaccuggggcugaucuacaccgccaaguaccccaacacguccgaccucgaccgccugacccagagccaccccauccugaacaugaucgacaccaagaaguccagccucaacaucagcggguacaacuucucccugggcgccgccgucaaggcgggcgccugcaugcuggacgggggcaacaugcucgagaccaucaaggugagcccccagacgauggacgggauccugaaguccauccugaaggugaagaaggcccucggcauguucaucagcgacaccccgggcgagcggaaccccuacgagaacauccuguacaagaucugccuguccggggacggcuggcccuacaucgccagccgcaccuccaucaccgggcgggccugggagaacacggucguggaccucgagagcgacggcaagccccagaaggcgggguccaacaacagcaacaagucccugcagagcgugggcuucaccgccggccugaccuacucccagcucaugacccugaaggacgccaugcugcagcuggacccgaacgccaagacguggauggacaucgaggggcgccccgaggaccccgucgagaucgcccucuaccagcccagcuccggcugcuacauccacuucuuccgggagccgaccgaccugaagcaguucaagcaggacgcgaaguacagccacgggaucgacgugaccgaccuguucgccgcccagcccggccucaccuccgccgugaucgacgcccugccccgcaacauggucaucacgugccaggggagcgacgacauccgcaagcugcucgagagccagggccggaaggacaucaagcugaucgacaucgcgcuguccaagaccgacagccgcaaguacgagaacgccgugugggaccaguacaaggaccucugccacaugcacaccggcgucgugguggagaagaagaagcgcgggggcaaggaggagaucacgccccacugcgcccugauggacugcaucauguucgacgccgcggucuccgggggccugaacaccagcgugcuccgggccgugcugccgcgggacauggucuuccgcaccuccacgccccggguggugcugugaggacuagucccuguucccagagcccacuuuuuuuucuuuuuuugaaauaaaauagccugucuuucagaucuaaaaaaaaaaaaaaaaaaaaaaaaaaaaaaaaaaaaaaaaaaaaaaaaaaaaaaaaaaaaaaaaaaaaaaaaaaaaaaaaaaaaaaaaaaaaaaaaaaaa

SEQ ID NO: 18333 - RNA, 2021 nt, Artificial Sequence
  mRNA product Design a-1 (A100) comprising derived and/or modified sequence from LASV(G1442-SLE-2011;Clade IV)__AIT17181__SP-HsPLAT_NP(2-569) (opt1)
aggagagucccgcagucggcguccagcggcucugcuuguucgugugugugucguugcaggccuuauucaagcuuaccauggacgccaugaagcgcggccugugcugcgugcuccugcugugcggggccgucuucgugagccccagcgccuccaaggaggugaaguccuuccuguggacccagagccuccgccgggagcugagcggcuacugcuccaacaucaagcugcaggucgugaaggacgcccaggcgcuccugcacgggcuggacuucagcgagguguccaacguccagcgccucaugcggaagcagcgccgggacgacaacgaccugaagcgccugcgggaccucaaccaggccgugaacaaccugguggagcucaagagcacccagcagaaguccguccugcgcgugggcacccugaccagcgacgaccugcucgugcuggccgccgaccuggagaagcucaaguccaaggucauccggaccgagcgcccccugagcgccgggguguacaugggcaaccuguccagccagcagcucgaccagcggcgcgcgcugcugaacaugaucgggauguccggcggcauccaggggacccggacgggccgcgacggggugguccgggugugggacgugaagaacgccgaccuccugaacaaccaguucggcaccaugccgagccugacccucgccugccugaccaagcaggggcaggucgaccugaacgacguggugcaggcccucacggaccugggccugaucuacaccgcgaaguaccccaacgccuccgaccucgaccgccugacccagagccaccccauccugaacaugaucgacaccaagaaguccagccucaacaucagcggcuacaacuucucccugggggccgccgucaaggccggcgcgugcaugcuggacgggggcaacaugcucgagacgaucaaggugagcccccagaccauggacggcauccugaaguccauccugaaggugaagaagacccucgggauguucaucagcgacaccccgggcgagcggaaccccuacgagaacauccuguacaagaucugccuguccggggacggcuggcccuacaucgccagccgcacguccaucaccgggcgggccugggagaacaccgucguggaccucgagagcgacggcaagccccagaaggccggcuccaacaacagcaacaagucccugcagagcgccggguucgcggccggccugaccuacucccagcucaugacgcugaaggacgccaugcugcagcuggacccgaacgccaagaccuggauggacaucgaggggcgccccgaggaccccguggagaucgcccucuaccagcccagcuccggcugcuacauccacuucuuccgggagccgaccgaccugaagcaguucaagcaggacgcgaaguacagccacgggaucgacgucaccgaccuguucgccgcccagcccggccucacguccgccgugaucgaggcccugccccgcaacauggucaucacgugccagggcagcgacgacaucaagaagcugcucgagucccaggggcgcaaggacaucaagcugaucgacaucgcgcugagcaagaccgacagccggaaguacgagaacgccgugugggaccaguacaaggaccucugccacaugcacaccggcguggucguggagaagaagaagcgcgggggcaaggaggagaucaccccgcacugcgcccugauggacugcaucauguucgacgccgcgguguccgggggccugaacacccucguccugcgggccgugcugccccgcgacaugguguuccggaccagcacgccccgcgucgugcucugaggacuagucccuguucccagagcccacuuuuuuuucuuuuuuugaaauaaaauagccugucuuucagaucuaaaaaaaaaaaaaaaaaaaaaaaaaaaaaaaaaaaaaaaaaaaaaaaaaaaaaaaaaaaaaaaaaaaaaaaaaaaaaaaaaaaaaaaaaaaaaaaaaaaa

SEQ ID NO: 18334 - RNA, 2021 nt, Artificial Sequence
  mRNA product Design a-1 (A100) comprising derived and/or modified sequence from LASV(G3010-SLE-2013;Clade IV)__AIT17345__SP-HsPLAT_NP(2-569) (opt1)
aggagagucccgcagucggcguccagcggcucugcuuguucgugugugugucguugcaggccuuauucaagcuuaccauggacgccaugaagcgcggccugugcugcgugcuccugcugugcggggccgucuucgugagccccagcgccuccaaggagaucaagagcuuccuguggacccagucccuccgccgggagcugagcggcuacugcuccaacaucaagcuccagguggucaaggacgcccaggcgcugcugcacgggcuggacuucagcgagguguccaacgugcagcgccucaugcggaaggagcgccgggacgacaacgaccugaagcgccugcgggaccucaaccaggccgucaacaaccugguggagcucaagagcacccagcagaaguccauccugcgcgugggcacccugaccagcgacgaccugcucauccuggccgccgaccuggagaagcucaaguccaaggucacccggaccgagcgcccccugagcgccgggguguacaugggcaaccuguccagccagcagcucgaccagcggcgcgcgcugcuguccaugaucgggaugagcuccggcgugcagggcgcccgggccgggcgcgacggcgucgugcgggugugggacgucaagaacgccgagcuccugaacaaccaguucgggacgaugccgagccugacccucgcgugccugaccaagcagggccagguggaccugaacgacgugguccaggcccucaccgaccuggggcugaucuacacggccaaguaccccaacaccuccgaccucgaccgccugacccagagccaccccauccugaacaugaucgacaccaagaaguccagccucaacaucagcggcuacaacuucucccugggcgccgccgugaaggcgggggccugcaugcuggacggcgggaacaugcucgagacgaucaaggugagcccccagaccauggacggcauccugaaguccauccugaaggucaagaaggcccucggcauguucaucagcgagaccccgggggagcggaaccccuacgagaacauccuguacaagaucugccuguccggcgacggguggcccuacaucgccagccgcaccuccaucacgggccgggccugggagaacaccgugguggaccucgagagcgacgggaagccccagaaggcgggcuccaacaacagcaacaagucccugcagagcgccggcuucaccgccgggcugaccuacucccagcucaugacgcugaaggacgccaugcugcagcuggacccgaacgccaagaccuggauggacaucgagggccgccccgaggaccccgucgagguggcgcucuaccagcccagcuccgggugcuacauccacuucuuccgggagccgaccgaccugaagcaguucaagcaggacgccaaguacagccacggcaucgacgugaccgaccuguucgccgcccagcccgggcucacguccgccgucaucgacgcgcugccccgcaacauggugaucacgugccagggcagcgacgacaucaagaagcugcucgagagccagggccgcaaggacaucaagcugaucgacaucgcccuguccaagaccgacagccggaaguacgagaacgccgucugggaccaguacaaggaccucugccacaugcacaccggggugguggucgagaagaagaagcgcggcgggaaggaggagaucaccccgcacugcgcccugauggacugcaucauguucgacgcggccguguccggcgggcugaacaccagcgugcuccgggccguccugccccgcgacaugguguuccggaccuccacgccccgcgugguccugugaggacuagucccuguucccagagcccacuuuuuuuucuuuuuuugaaauaaaauagccugucuuucagaucuaaaaaaaaaaaaaaaaaaaaaaaaaaaaaaaaaaaaaaaaaaaaaaaaaaaaaaaaaaaaaaaaaaaaaaaaaaaaaaaaaaaaaaaaaaaaaaaaaaaa

SEQ ID NO: 18335 - RNA, 2021 nt, Artificial Sequence
  mRNA product Design a-1 (A100) comprising derived and/or modified sequence from LASV(G502-SLE-2009;Clade IV)__AIT17127__SP-HsPLAT_NP(2-569) (opt1)
aggagagucccgcagucggcguccagcggcucugcuuguucgugugugugucguugcaggccuuauucaagcuuaccauggacgccaugaagcgcggccugugcugcgugcuccugcugugcggggccgucuucgugagccccagcgccuccaaggagaucaagagcuuccuguggacccagucccuccgccgggagcugagcggcuacugcuccaacaucaagcuccagguggucaaggacgcccaggcgcugcugcacgggcuggacuucagcgagguguccaacgugcagcgccucaugcggaaggagcgccgggacgacaacgaccugaagcgccugcgggaccucaaccaggccgucaacaaccugguggagcucaagagcacccagcagaaguccauccugcgcgugggcacccugaccagcgacgaccugcucauccuggccgccgaccuggagaagcucaaguccaaggucauccggaccgagcgcccccugagcgccgggguguacaugggcaaccuguccagccagcagcucgaccagcggcgcgcgcugcuguccaugaucgggaugagcggcggcaaccagggggugcgggccggcaaggacggggucgugcgcgugugggacgucaagaacgccgagcuccugaacaaccaguucggcaccaugccgucccugacgcucgccugccugaccaagcagggccagguggaccugaacgacgcggugcaggcccucaccgaccuggggcugaucuacaccgccaaguaccccaacacgagcgaccucgaccggcugacccagucccaccccauccugaacaugaucgacaccaagaaguccagccucaacaucuccggcuacaacuucagccugggggccgccgucaaggcgggcgccugcaugcuggacgggggcaacaugcucgagaccaucaaggugagcccccagacgauggacggcauccucaagagcauccugaaggugaagaaggcccuggggauguucaucuccgacaccccgggcgagcgcaaccccuacgagaacauccuguacaagaucugccugagcggggacggcuggcccuacaucgccucccggaccagcaucaccgggcgcgccugggagaacacggucguggaccucgaguccgacggcaagccccagaaggcgggcagcaacaacuccaacaagagccugcaguccgccggguucaccgccggccugaccuacagccagcucaugacccugaaggacgccaugcugcagcuggacccgaacacgaagaccuggauggacaucgaggggcggcccgaggaccccguggagaucgcccucuaccagcccuccagcggcugcuacauccacuucuuccgcgagccgaccgaccugaagcaguucaagcaggacgcgaaguacucccacgggaucgacgucaccgaccuguucgccgcccagcccggccucacgagcgccgugaucgacgcccugccccggaacauggugaucacgugccagggcuccgacgacauccgcaagcugcucgagagccaggggcgcaaggacaucaagcugaucgacaucgcgcugaacaagaccgacagccggaaguacgagaacgccgucugggaccaguacaaggaccucugccacaugcacaccggcguggucguggagaagaagaagcgcgggggcaaggaggagaucaccccgcacugcgcccugauggacugcaucauguucgacgccgcgguguccgggggccugaacaccagcguccuccgggccgugcugccccgcgacaugguguuccggaccuccacgccccgcgucgugcugugaggacuagucccuguucccagagcccacuuuuuuuucuuuuuuugaaauaaaauagccugucuuucagaucuaaaaaaaaaaaaaaaaaaaaaaaaaaaaaaaaaaaaaaaaaaaaaaaaaaaaaaaaaaaaaaaaaaaaaaaaaaaaaaaaaaaaaaaaaaaaaaaaaaaa

SEQ ID NO: 18336 - RNA, 2021 nt, Artificial Sequence
  mRNA product Design a-1 (A100) comprising derived and/or modified sequence from LASV(G733-SLE-2010;Clade IV)__AIT17155__SP-HsPLAT_NP(2-569) (opt1)
aggagagucccgcagucggcguccagcggcucugcuuguucgugugugugucguugcaggccuuauucaagcuuaccauggacgccaugaagcgcggccugugcugcgugcuccugcugugcggggccgucuucgugagccccagcgccuccaaggagaucaagagcuuccuguggacccagucccuccgccgggagcugagcggcuacugcuccaacaucaagcuccagguggucaaggacgcccaggcgcugcugcacgggcuggacuucagcgagguguccaacgugcagcgccucaugcggaaggagcgccgggacgacaacgaccugaagcgccugcgggaccucaaccaggccgucaacaaccugguggagcucaagagcacccagcagaaguccgugcugcgcgucggcacccugaccagcgacgagcugcucgugcuggccgccgaccuggagaagcucaaguccaaggugauccggaccgagcgcccccugagcgccggggucuacaugggcaaccuguccagccagcagcucgaccagcggcgcgcgcugcuguccaugaucgggaugagcggcggcaaccagggggcccggaccggccgcgacgggguggugcgggucugggacgugaagaacgccgagcuccugaacaaccaguucggcaccaugccgucccugacccucgccugccugaccaagcagggccagguggaccugaacgacgcgguccaggcccucaccgaccuggggcugaucuacacggccaaguaccccaacaccagcgaccucgaccgccugacccagucccaccccauccugaacaugaucgacaccaagaaguccagccucaacaucuccggcuacaacuucagccugggggccgccgugaaggcgggcgccugcaugcuggacgggggcaacaugcucgagacgaucaaggugagcccccagaccauggacggcauccucaagagcauccugaaggucaagaaggcccuggggauguucaucuccgacaccccgggcgagcggaaccccuacgagaacauccuguacaagaucugccugagcggggacggcuggcccuacaucgccucccgcaccagcaucacggggcgggccugggagaacaccgugguggaccucgaguccgacggcaagccccagaaggcgggcagcaacaacuccaacaagagccugcaguccgccggguucaccgccggccugaccuacagccagcucaugacgcugaaggacgccaugcugcagcuggacccgaacgccaagaccuggauggacaucgaggggcgccccgaggaccccgucgagaucgcgcucuaccagcccuccagcggcugcuacauccacuucuuccgggagccgaccgaccugaagcaguucaagcaggacgccaaguacucccacgggaucgacgugaccgaccuguucgccgcccagcccggccucacgagcgccgugaucgacgcgcugccccgcaacauggucaucacgugccagggcuccgacgacauccgcaagcugcucgagagccaggggcggaaggacaucaagcugaucgacaucgcccugagcaagaucgacucccgcaaguacgagaacgccgugugggaccaguacaaggaccucugccacaugcacaccggcgucgugguggagaagaagaagcgcgggggcaaggaggagaucacgccccacugcgcccugauggacugcaucauguucgacgcggccgucagcgggggccugaacucccucgugcugcgggccgugcugccgcgggacauggucuuccgcaccagcacgccccggguggugcucugaggacuagucccuguucccagagcccacuuuuuuuucuuuuuuugaaauaaaauagccugucuuucagaucuaaaaaaaaaaaaaaaaaaaaaaaaaaaaaaaaaaaaaaaaaaaaaaaaaaaaaaaaaaaaaaaaaaaaaaaaaaaaaaaaaaaaaaaaaaaaaaaaaaaa

SEQ ID NO: 18337 - RNA, 2021 nt, Artificial Sequence
  mRNA product Design a-1 (A100) comprising derived and/or modified sequence from MOPV/LASV reassortant(IGS-1;Clade IV)__AFY05578__SP-HsPLAT_NP(2-569) (opt1)
aggagagucccgcagucggcguccagcggcucugcuuguucgugugugugucguugcaggccuuauucaagcuuaccauggacgccaugaagcgcggccugugcugcgugcuccugcugugcggggccgucuucgugagccccagcgccuccaaggagaucaagagcuuccuguggacccagucccuccgccgggagcugagcggcuacugcuccaacaucaagcuccagguggucaaggacgcccaggcgcugcugcacgggcuggacuucagcgagguguccaacgugcagcgccucaugcggaaggagcgccgggacgacaacgaccugaagcgccugcgggaccucaaccaggccgucaacaaccugguggagcucaagagcacccagcagaaguccauccugcgcgugggcacccugaccagcgacgaccugcucauccuggccgccgaccuggagaagcuccgguccaaggucauccgcaccgagcggccccugagcgccgggguguacaugggcaaccuguccagccagcagcucgaccagcgccgggcgcugcugaacaugaucgggauguccggcggcaaccagggggcccgcgccggccgggacggggugguccgcgugugggacgugaagaacgccgagcuccugagcaaccaguucggcaccaugccgucccugacgcucgcgugccugaccaagcaggggcaggucgaccugaacgacgccgugcaggcccucaccgaccugggccugaucuacaccgccaaguaccccaacacgagcgaccucgaccggcugacccagucccaccccauccugaacaugaucgacaccaagaaguccagccucaacaucuccggcuacaacuucagccugggggccgcggugaaggccggcgccugcaugcuggacgggggcaacaugcucgagaccaucaaggucagcccccagacgauggacggcauccucaagagcauccugaaggugaagaaggcccuggggauguucaucuccgacaccccgggcgagcgcaaccccuacgagaacauccuguacaagaucugccugagcggggacggcuggcccuacaucgccucccggaccagcaucaccgggcgcgcgugggagaacacgguggucgaccucgaguccgacggcaagccccagaaggccgacagcaacaacuccagcaagucccugcagagcgccggcuucaccgccgggcugaccuacucccagcucaugacccugaaggacgccaugcugcagcuggacccgaacgcgaagacguggauggacaucgagggccggcccgaggaccccguggagaucgcccucuaccagcccagcuccgggugcuacauccacuucuuccgcgagccgaccgaccugaagcaguucaagcaggacgccaaguacagccacggcaucgacgugaccgaccuguucgccacccagcccgggcucacguccgccgucaucgacgcgcugccccgcaacauggugaucacgugccagggcagcgacgacauccggaagcugcucgagagccagggccgcaaggacaucaagcugaucgacaucgaccuguccaagaccgacagccggaaguacgagaacgccgugugggaccaguacaaggaccucugccacaugcacaccggggucguggucgagaagaagaagcgcggcgggaaggaggagaucaccccgcacugcgcccugauggacugcaucauguucgacgccgcgguguccggcgggcugaacaccagcgugcuccgggccguccugccccgcgacaugguguuccggaccuccacgccccgcgugguccugugaggacuagucccuguucccagagcccacuuuuuuuucuuuuuuugaaauaaaauagccugucuuucagaucuaaaaaaaaaaaaaaaaaaaaaaaaaaaaaaaaaaaaaaaaaaaaaaaaaaaaaaaaaaaaaaaaaaaaaaaaaaaaaaaaaaaaaaaaaaaaaaaaaaaa

SEQ ID NO: 18338 - RNA, 2021 nt, Artificial Sequence
  mRNA product Design a-1 (A100) comprising derived and/or modified sequence from LASV(LM765-SLE-2012;Clade IV)__AIT17815__SP-HsPLAT_NP(2-569) (opt1)
aggagagucccgcagucggcguccagcggcucugcuuguucgugugugugucguugcaggccuuauucaagcuuaccauggacgccaugaagcgcggccugugcugcgugcuccugcugugcggggccgucuucgugagccccagcgccuccaaggagaucaagagcuuccuguggacccagucccuccgccgggagcugagcggcuacugcuccaacaucaagcuccagguggucaaggacgcccaggcgcugcugcacgggcuggacuucagcgagguguccaacgugcagcgccucaugcggaaggagcgccgggacgacaacgaccugaagcgccugcgggaccucaaccaggccgucaacaaccugguggagcucaagagcacccagcagaaguccauccugcgcgugggcacccugaccagcgacgaccugcucauccuggccgccgaccuggagaagcucaaguccaaggucacccggaccgagcgcccccugagcgccgggguguacaugggcaaccuguccagccagcagcucgaccagcggcgcgcgcugcuggacaugaucgggauguccggcagcaaccagggcgcccgggccgggcgcgacggcgugguccgggugugggacgugaagaacgccgagcuccugaacaaccaguucgggacgaugccgucccugacccucgcgugccugaccaagcagggccaggucgaccugaacgacgccgugcaggcccucaccgaccuggggcugaucuacacggccaaguaccccaacaccagcgaccucgaccgccugacccagucccaccccauccugaacaugaucgacaccaagaaguccagccucaacaucuccggcuacaacuucagccugggcgccgcggugaaggccggggccugcaugcuggacggcgggaacaugcucgagacgaucaaggucagcccccagaccauggacggcauccucaagagcauccugaaggugaagaaggcccugggcauguucaucuccgacgccccgggggagcggaaccccuacgagaacauccuguacaagaucugccugagcggcgacggguggcccuacaucgcgucccgcaccagcaucaccggccgggccugggagaacacgguggucgaccucgaguccgacgggaagccccagaaggccggcagcaacggcuccaacaagagccugcaguccgccggguucaccgccggccugaccuacagccagcucaugacccugaaggacgcgaugcugcagcuggacccgaacgccaagacguggauggacaucgaggggcgccccgaggaccccguggagaucgcccucuaccagcccuccagcggcugcuacauccacuucuuccgggagccgaccgaccugaagcaguucaagcaggacgccaaguacucccacgggaucgacgugaccgaccuguucgccgcgcagcccggccucaccagcgccgucaucgacgcccugccccgcaacauggugaucacgugccagggcuccgacgacauccgcaagcuguucgagagccaggggcggaaggacaucaagcucaucgacaucgcccugagcaagaccgacucccgcaaguacgagaacgcggugugggaccaguacaaggaccugugccacaugcacaccggcaucgucguggagaagaagaagcgcgggggcaaggaggagaucacgccccacugcgcccucauggacugcaucauguucgacgccgccgucagcgggggccugaacaccuccgugcugcgggccgugcucccgcgggacauggucuuccgcaccagcacgccccggguggugcugugaggacuagucccuguucccagagcccacuuuuuuuucuuuuuuugaaauaaaauagccugucuuucagaucuaaaaaaaaaaaaaaaaaaaaaaaaaaaaaaaaaaaaaaaaaaaaaaaaaaaaaaaaaaaaaaaaaaaaaaaaaaaaaaaaaaaaaaaaaaaaaaaaaaaa

SEQ ID NO: 18339 - RNA, 2021 nt, Artificial Sequence
  mRNA product Design a-1 (A100) comprising derived and/or modified sequence from LASV(LM776-SLE-2012;Clade IV)__AIT17825__SP-HsPLAT_NP(2-569) (opt1)
aggagagucccgcagucggcguccagcggcucugcuuguucgugugugugucguugcaggccuuauucaagcuuaccauggacgccaugaagcgcggccugugcugcgugcuccugcugugcggggccgucuucgugagccccagcgccuccaaggagaucaagagcuuccuguggacccagucccuccgccgggagcugagcuccuacugcagcaacaucaagcuccagguggucaaggacgcccaggcgcugcugcacggccuggacuucuccgaggugagcaacgugcagcgccucaugcggaaggagcgccgggacgacaacgaccugaagcgccugcgggaccucaaccaggccgucaacaaccugguggagcugaaguccacccagcagaaguccauccuccgcguggggacccugaccuccgacgaccugcucauccuggccgccgaccuggagaagcucaagagcaaggucacccggaccgagcgcccccuguccgccggcguguacauggggaaccugagcucccagcagcucgaccagcggcgcgcgcugcugagcaugaucggcauguccgggagcaaccagggcgcccgggccggccgcgacggggugguccgggugugggacgugaagaacgccgagcuccugaacaaccaguucggcacgaugccgucccugacccucgcgugccugaccaagcaggggcaggucgaccugaacgacgccgugcaggcccucaccgaccugggccugaucuacacggccaaguaccccaacaccagcgaccucgaccgccugacccagagccaccccauccugaacaugaucgacaccaagaaguccagccucaacaucuccggguacaacuucagccugggcgccgcggugaaggccggcgccugcaugcuggacgggggcaacaugcucgagacgaucaaggucagcccccagaccauggacgggauccucaagagcauccugaaggugaagaaggcccugggcauguucaucuccgacaccccgggcgagcggaaccccuacgagaacauccuguacaagaucugccugagcggggacggcuggcccuacaucgccucccgcaccagcaucacggggcgggcgugggagaacaccguggucgaccucgaguccgacggcaagccccagaaggccgggagcaacaacuccaacaagagccugcaguccgccggcuucaccgccggccugaccuacagccagcucaugacgcugaaggacgccaugcugcagcuggacccgaacgcgaagaccuggauggacaucgaggggcgccccgaggaccccguggagguggcccucuaccagcccuccagcggcugcuacauccacuucuuccgggagccgaccgaccugaagcaguucaagcaggacgccaaguacucccacgggaucgacgucaccgaccuguucgccgcccagcccggccucacgagcgcggugaucgacgcccugccccgcaacauggugaucacgugccaggggagcgacgacauccgcaagcugcucgagucccagggccggaaggacaucaagcugaucgacaucgcccugagcaagaccgacucccgcaaguacgagaacgccgucugggaccaguacaaggaccucugccacaugcacaccggcguggucguggagaagaagaagcgcgggggcaaggaggagaucaccccgcacugcgcgcugauggacugcaucauguucgacgccgccgugagcgggggccugaacaccuccguccuccgggccgugcugccccgggacaugguguuccgcaccagcacgccccgggucgugcugugaggacuagucccuguucccagagcccacuuuuuuuucuuuuuuugaaauaaaauagccugucuuucagaucuaaaaaaaaaaaaaaaaaaaaaaaaaaaaaaaaaaaaaaaaaaaaaaaaaaaaaaaaaaaaaaaaaaaaaaaaaaaaaaaaaaaaaaaaaaaaaaaaaaaa

SEQ ID NO: 18340 - RNA, 2021 nt, Artificial Sequence
  mRNA product Design a-1 (A100) comprising derived and/or modified sequence from LASV(Mad39;Clade IV)__ANH09723__SP-HsPLAT_NP(2-569) (opt1)
aggagagucccgcagucggcguccagcggcucugcuuguucgugugugugucguugcaggccuuauucaagcuuaccauggacgccaugaagcgcggccugugcugcgugcuccugcugugcggggccgucuucgugagccccagcgccuccaaggagaucaagagcuuccuguggacccagucccuccgccgggagcugagcggcuacugcuccaacaucaagcuccagguggucaaggacgcccaggcgcugcugcacgggcuggacuucagcgagguguccaacgugcagcgccucaugcggaagcagcgccgggacgacaacgaccugaagcgccugcgggaccucaaccaggccgucaacaaccugguggagcugaaguccacccagcagaaguccgugcuccgcgucggcacgcugaccagcgacgaccugcucacccuggccgccgaccuggagaagcucaaguccaaggugacccggacggagcgcccccugaccgccgggguguacaugggcaaccugagcucccagcagcucgaccagcggcgcgcgcugcugaacaugaucgggaugagcggcggcaaccagggggcccggaccggccgcgacggggucgugcgggugugggacgucaagaacgccgagcuccugaacaaccaguucggcaccaugccgucccugacgcucgccugccugaccaagcagggccagguggaccugaacgacgugguccaggcgcucaccgaccuggggcugaucuacaccgccaaguaccccaacacgagcgaccucgaccgccugacccagucccaccccauccugaacaugaucgacaccaacaagagcucccucaacaucagcggcuacaacuucagccugggggccgccgugaaggccggcgcgugcaugcuggacgggggcaacaugcucgagaccaucaaggugagcccccagacgauggacggcauccucaagagcauccugaaggucaagaagucccuggggauguucaucagcgacaccccgggcgagcggaaccccuacgagaacauccuguacaagaucugccuguccggggacggcuggcccuacaucgccagccgcaccuccaucaccgggcgggccugggagaacacggugguggaccucgagagcggcggcaagccccagaaggccggguccaacaacagcaacaagucccugcagagcgccggcuucgcggccgggcugaccuacucccagcucaugacccugaaggacgccaugcugcagcuggacccgaacgccaagaccuggauggacaucgagggccgccccgaggaccccgucgagaucgcccucuaccagcccaucagcgggugcuacauccacuucuuccgggagccgacggaccugaagcaguucaagcaggacgcgaaguacucccacggcaucgacgugaccgaccuguucgccgcccagcccggccucaccagcgccgugaucgaggcccugccccgcaacauggucaucacgugccagggguccgacgacauccgcaagcuguucgagagccagggccggaaggacaucaagcucaucgacaucgcgcuguccaagaccgacagccgcaaguacgagaacgccgugugggaccaguacaaggaccugugccacaugcacaccggggucgugguggagaagaagaagaagggcgggaaggaggagaucacgccccacugcgcccucauggacugcaucauguucgacgccgcggucagcggcggccugaacacccuggugcuccgggccgugcugccgcgcgacauggucuuccggaccuccacccccaagguggugcugugaggacuagucccuguucccagagcccacuuuuuuuucuuuuuuugaaauaaaauagccugucuuucagaucuaaaaaaaaaaaaaaaaaaaaaaaaaaaaaaaaaaaaaaaaaaaaaaaaaaaaaaaaaaaaaaaaaaaaaaaaaaaaaaaaaaaaaaaaaaaaaaaaaaaa

SEQ ID NO: 18341 - RNA, 2021 nt, Artificial Sequence
  mRNA product Design a-1 (A100) comprising derived and/or modified sequence from LASV(Z0947-SLE-2011;Clade IV)__AIT17841__SP-HsPLAT_NP(2-569) (opt1)
aggagagucccgcagucggcguccagcggcucugcuuguucgugugugugucguugcaggccuuauucaagcuuaccauggacgccaugaagcgcggccugugcugcgugcuccugcugugcggggccgucuucgugagccccagcgccuccaaggagaucaagagcuuccuguggacccagucccuccgccgggagcugagcggcuacugcuccaacaucaagcuccagguggucaaggacgcccaggcgcugcugcacgggcuggacuucagcgagguguccaacgugcagcgccucaugcggaaggagcgccgggacgacaacgaccugaagcgccugcgggaccucaaccaggccgucaacaaccugguggagcucaagagcacccagcagaaguccauccugcgcgugggcacccugaccagcgacgaccugcucauccuggccgccgaccuggagaagcucaaguccaaggucacccggaccgagcgcccccugagcgccgggguguacaugggcaaccuguccagccagcagcucgaccagcggcgcgcgcugcugaacaugaucgggauguccggcagcaaccagggcgcccggacggggcgcgacggcgugguccgggugugggacgugaagaacgccgagcuccugaacaaccaguucgggaccaugccgucccugacccucgccugccugaccaagcagggccaggucgaccugaacgacgcggugcaggcccucacggaccuggggcugaucuacaccgccaaguaccccaacaccagcgaccucgaccgccugacccagucccaccccauccugaacaugaucgacacgaagaaguccagccucaacaucuccggcuacaacuucagccugggcgccgccgugaaggcgggggccugcaugcuggacggcgggaacaugcucgagaccaucaaggucagcccccagaccauggacggcauccucaagagcauccugaaggugaagaaggcccugggcauguucaucuccgacgccccgggggagcggaaccccuacgagaacauccuguacaagaucugccugagcggcgacggguggcccuacaucgccucccgcaccagcaucacgggccgggcgugggagaacaccguggucgaccucgaguccgacgggaagccccagaaggccggcagcaacggcuccaacaagagccugcaguccgccggguucaccgccggccugaccuacagccagcucaugacgcugaaggacgccaugcugcagcuggacccgaacgcgaagaccuggauggacaucgaggggcgccccgaggaccccguggagaucgcccucuaccagcccuccagcggcugcuacauccacuucuuccgggagccgaccgaccugaagcaguucaagcaggacgccaaguacucccacgggaucgacgugaccgaccuguucgccgcccagcccggccucacgagcgcggucaucgacgcccugccccgcaacauggugaucacgugccagggcuccgacgacauccgcaagcuguucgagagccaggggcggaaggacaucaagcucaucgacaucgcccugagcaagaccgacucccgcaaguacgagaacgccgugugggaccaguacaaggaccugugccacaugcacaccggcaucgucguggagaagaagaagcgcgggggcaaggaggagaucaccccgcacugcgcgcucauggacugcaucauguucgacgccgccgucagcgggggccugaacaccuccgugcugcgggccgugcucccccgggacauggucuuccgcaccagcacgccccggguggugcugugaggacuagucccuguucccagagcccacuuuuuuuucuuuuuuugaaauaaaauagccugucuuucagaucuaaaaaaaaaaaaaaaaaaaaaaaaaaaaaaaaaaaaaaaaaaaaaaaaaaaaaaaaaaaaaaaaaaaaaaaaaaaaaaaaaaaaaaaaaaaaaaaaaaaa

SEQ ID NO: 18342 - RNA, 2021 nt, Artificial Sequence
  mRNA product Design a-1 (A100) comprising derived and/or modified sequence from LASV(Josiah;Clade IV)__NP_694869__SP-HsPLAT_NP(2-569) (opt4)
aggagagucccgcagucggcguccagcggcucugcuuguucgugugugugucguugcaggccuuauucaagcuuaccauggacgccaugaagagaggccugugcugcgugcugcugcugugcggcgccguguucgugagccccagcgccagcaaggagaucaagagcuuccuguggacccagagccugagaagagagcugagcggcuacugcagcaacaucaagcugcagguggugaaggacgcccaggcccugcugcacggccuggacuucagcgaggugagcaacgugcagagacugaugagaaaggagagaagagacgacaacgaccugaagagacugagagaccugaaccaggccgugaacaaccugguggagcugaagagcacccagcagaagagcauccugagagugggcacccugaccagcgacgaccugcugauccuggccgccgaccuggagaagcugaagagcaaggugaucagaaccgagagaccccugagcgccggcguguacaugggcaaccugagcagccagcagcuggaccagagaagagcccugcugaacaugaucggcaugagcggcggcaaccagggcgccagagccggcagagacggcguggugagagugugggacgugaagaacgccgagcugcugaacaaccaguucggcaccaugcccagccugacccuggccugccugaccaagcagggccagguggaccugaacgacgccgugcaggcccugaccgaccugggccugaucuacaccgccaaguaccccaacaccagcgaccuggacagacugacccagagccaccccauccugaacaugaucgacaccaagaagagcagccugaacaucagcggcuacaacuucagccugggcgccgccgugaaggccggcgccugcaugcuggacggcggcaacaugcuggagaccaucaaggugagcccccagaccauggacggcauccugaagagcauccugaaggugaagaaggcccugggcauguucaucagcgacacccccggcgagagaaaccccuacgagaacauccuguacaagaucugccugagcggcgacggcuggcccuacaucgccagcagaaccagcaucaccggcagagccugggagaacaccgugguggaccuggagagcgacggcaagccccagaaggccgacagcaacaacagcagcaagagccugcagagcgccggcuucaccgccggccugaccuacagccagcugaugacccugaaggacgccaugcugcagcuggaccccaacgccaagaccuggauggacaucgagggcagacccgaggaccccguggagaucgcccuguaccagcccagcagcggcugcuacauccacuucuucagagagcccaccgaccugaagcaguucaagcaggacgccaaguacagccacggcaucgacgugaccgaccuguucgccacccagcccggccugaccagcgccgugaucgacgcccugcccagaaacauggugaucaccugccagggcagcgacgacaucagaaagcugcuggagagccagggcagaaaggacaucaagcugaucgacaucgcccugagcaagaccgacagcagaaaguacgagaacgccgugugggaccaguacaaggaccugugccacaugcacaccggcguggugguggagaagaagaagagaggcggcaaggaggagaucaccccccacugcgcccugauggacugcaucauguucgacgccgccgugagcggcggccugaacaccagcgugcugagagccgugcugcccagagacaugguguucagaaccagcacccccagaguggugcugugaggacuagucccuguucccagagcccacuuuuuuuucuuuuuuugaaauaaaauagccugucuuucagaucuaaaaaaaaaaaaaaaaaaaaaaaaaaaaaaaaaaaaaaaaaaaaaaaaaaaaaaaaaaaaaaaaaaaaaaaaaaaaaaaaaaaaaaaaaaaaaaaaaaaa

SEQ ID NO: 18343 - RNA, 2021 nt, Artificial Sequence
  mRNA product Design a-1 (A100) comprising derived and/or modified sequence from LASV(LP;Clade I)__AAF86702__SP-HsPLAT_NP(2-569) (opt4)
aggagagucccgcagucggcguccagcggcucugcuuguucgugugugugucguugcaggccuuauucaagcuuaccauggacgccaugaagagaggccugugcugcgugcugcugcugugcggcgccguguucgugagccccagcaacagcaaggagaucaagagcuuccuguggacccagagccugagaagagagcugagcggcuacugcagcaacaucaagcugcagguggugaaggacgcccaggcccugcugcacggccuggacuucagcgaggugagcaacgugcagagacugaugagaaagcagaagagagacgacgccgaccugaagagacugagagaccugaaccaggccgugaacaaccugguggagcugaagagcacccagcagaagaacgugcugagagugggcacccugagcagcgacgaccugaucacccuggccgccgaccuggagaagcugaagagcaaggugaucagaaccgagagaccccugagcagcggcguguacaugggcaaccugagcagccagcagcuggaccagagaagagcccugcugagcaugaucggcaugagcggcggcccccagggcaacagaaccggcggcgacggcguggugagagugugggacgugaagaacgccgagcugcugaacaaccaguucggcaccaugcccagccugacccuggccugccugaccaagcagggccagguggaccugaacgacgccgugcaggcccugaccgaccugggccugaucuacaccgccaaguaccccaacagcagcgaccuggacaugcugacccagagccaccccauccugggcaugguggacaccaagaagagcagccugaacaucagcggcuacaacuucagccugggcgccgccgugaaggccggcgccugcaugcuggacggcggcaacaugcuggagaccaucaaggugagcccccagaccauggacggcauccugaagagcauccugaaggugaagagaagccugggcauguucaucagcgacacccccggcgagagaaaccccuacgagaacauccuguacaagaucugccugagcggcgagggcuggcccuacaucgccagcagaaccagcaucaccggcagagccugggagaacacccugguggaccuggagagcgacaacaagccccccaagcugaacagcgccggcagcaacaagagccugcaggccgccggccugaacgccggccugaccuacagccagcugaugacccugaaggacugcaugcugcagcuggaccccagcagcaagaccuggaucgacaucgagggcagacccgaggaccccguggagaucgcccuguuccagcccagcagcggcugcuacauccacuucuucagagagcccaccgaccugaagcaguucaagcaggacgccaaguacagccacggcaucgacgugaccgaccuguucagcacccagcccggccugaccagcgccgugaucgaggcccugcccagaaacauggugcugaccugccagggcagcgacgacaucaagaagcugcuggagagccagggcagaagagacaucaagcugaucgacaucagccugagcaaggccgacagcagaaaguucgagaacgccgugugggaccaguacaaggaccugugccacaugcacaccggcguggugguggagaagaagaagagaggcggcaaggaggagaucaccccccacugcgcccugcuggacugcaucauguucgacgccgccaccaccggcagccugaacaucaccacccugagagccgugcugcccagagacaugguguucagaaccagcacccccaagguggugcugugaggacuagucccuguucccagagcccacuuuuuuuucuuuuuuugaaauaaaauagccugucuuucagaucuaaaaaaaaaaaaaaaaaaaaaaaaaaaaaaaaaaaaaaaaaaaaaaaaaaaaaaaaaaaaaaaaaaaaaaaaaaaaaaaaaaaaaaaaaaaaaaaaaaaa

SEQ ID NO: 18344 - RNA, 2021 nt, Artificial Sequence
  mRNA product Design a-1 (A100) comprising derived and/or modified sequence from LASV(803213;Clade II)__AAF86704__SP-HsPLAT_NP(2-569) (opt4)
aggagagucccgcagucggcguccagcggcucugcuuguucgugugugugucguugcaggccuuauucaagcuuaccauggacgccaugaagagaggccugugcugcgugcugcugcugugcggcgccguguucgugagccccagcgccagcaaggaggugaagagcuuccuguggacccagagccugagaagagagcugagcggcuacugcagcaacaucaagcugcagguggugaaggacgcccaggcccugcugcacggccuggacuucagcgaggugaacaacgugcagagacugaugagaaagcagaagagagacgacggcgaccugaagagacugagagaccugaaccaggccgugaacaaccugguggagcugaagagcacccagcagaagagcauccugagagugggcacccugaccagcgacgaccugcugacccuggccgccgaccuggagaagcugaagagcaaggugaucagaaccgagagaccccugagcagcggcguguacaugggcaaccugagcacccagcagcuggagcagagaagagcccugcugaacaugaucggcauggugggcggcgcccagggcacccagcccggcagagacggcguggugagagugugggacgugaagaaccccgaccugcugaacaaccaguucggcaccaugcccagccugacccuggccugccugaccaagcagggccagguggaccugaacgacgccgugcuggcccugaccgaccugggccugaucuacaccgccaaguaccccaacagcagcgaccuggacagacugagccagagccaccccauccugaacaugguggacaccaagaagagcagccugaacaucagcggcuacaacuucagccugggcgccgccgugaaggccggcgccugcaugcuggacggcggcaacaugcuggagaccaucaaggugaccccccagaccauggacggcauccugaagagcauccugaaggugaagagaagccugggcauguucgugagcgacacccccggcgagagaaaccccuacgagaacauccuguacaagaucugccugagcggcgacggcuggcccuacaucgccagcagaaccagcaucgugggcagagccugggagaacaccaccguggaccuggagagcgacggcaagccccagaaggugggcaccgccggcagcaacaagagccugcagagcgccggcuuccccaccggccugaccuacagccagcugaugacccugaaggacagcaugaugcagcuggaccccagcgccaagaccuggaucgacaucgagggcagacccgaggaccccguggagaucgcccuguaccagcccaugagcggcugcuacauccacuucuucagagagcccaccgaccugaagcaguucaagcaggacgccaaguacagccacggcaucgacguggccgaccuguuccccgcccagcccggccugaccagcgccgugaucgaggcccugcccagaaacauggugcugaccugccagggcagcgacgacaucaagaagcugcuggacagccagggcagaagagacaucaagcugaucgacaucagccugagcaagguggacagcagaaaguucgagaacgccgugugggaccagugcaaggaccugugccacaugcacaccggcguggugguggagaagaagaagagaggcggcaaggaggagaucaccccccacugcgcccugauggacugcaucauguucgacgccgccgugagcggcggccugaacauccccgugcugagagccgugcugcccagagacaugguguucagaaccagcagccccaagguggugcugugaggacuagucccuguucccagagcccacuuuuuuuucuuuuuuugaaauaaaauagccugucuuucagaucuaaaaaaaaaaaaaaaaaaaaaaaaaaaaaaaaaaaaaaaaaaaaaaaaaaaaaaaaaaaaaaaaaaaaaaaaaaaaaaaaaaaaaaaaaaaaaaaaaaaa

SEQ ID NO: 18345 - RNA, 2024 nt, Artificial Sequence
  mRNA product Design a-1 (A100) comprising derived and/or modified sequence from LASV(GA391;Clade III)__CAA36646__SP-HsPLAT_NP(2-570) (opt4)
aggagagucccgcagucggcguccagcggcucugcuuguucgugugugugucguugcaggccuuauucaagcuuaccauggacgccaugaagagaggccugugcugcgugcugcugcugugcggcgccguguucgugagccccagcgccagcaaggaggugagaagcuuccuguggacccagagccugagaagagagcugagcggcuacugcagcaacaucaagcugcagguggugaaggacgcccaggcccugcugcacggccuggacuucagcgaggugagcaacgugcagagacugaugagaaagcagaagagagacgacggcgaccugaagagacugagagaccugaaccaggccgugaacaaccugguggagcugaagagcacccagcagaagagcgugcugagagugggcacccugagcagcgacgaccugcugauccuggccgccgaccuggagaagcugaagagcaaggugaccagaaccgagagaccccugagcagcggcguguacaugggcaaccugagcagccagcagcuggaccagagaagagcccugcugaacaugaucggcaugaccggcgugagcggcggcggcaagggcgccagcgacggcaucgugagagugugggacgugaagaacgccgagcugcugaacaaccaguucggcaccaugcccagccugacccuggccugccugaccaagcagggccagguggaccugaacgacgccgugcaggcccugaccgaccugggccugaucuacaccgccaaguaccccaacagcagcgaccuggacagacugagccagagccaccccauccugaacaugaucgacaccaagaagagcagccugaacaucagcggcuacaacuucagccugggcgccgccgugaaggccggcgccugcaugcuggacggcggcaacaugcuggagaccaucaaggugagcccccagaccauggacggcauccugaagagcauccugaaggugaagaagagccugggcauguucgugagcgacacccccggcgagagaaaccccuacgagaacauccuguacaagaucugccugagcggcgacggcuggcccuacaucgccagcagaaccagcaucgugggcagagccugggagaacaccgugguggaccuggagcaggacaacaagccccagaagaucggcaacggcggcagcaacaagagccugcagagcgccggcuucgccgccggccugaccuacagccagcugaugacccugaaggacuucaagugcuucaaccugauccccaacgccaagaccuggauggacaucgagggcagacccgaggaccccguggagaucgcccuguaccagcccagcagcggcugcuacgugcacuucuucagagagcccaccgaccugaagcaguucaagcaggacgccaaguacagccacggcaucgacgugaccgaccuguucgccgcccagcccggccugaccagcgccgugaucgaggcccugcccagaaacauggugaucaccugccagggcagcgaggacaucagaaagcugcuggagagccagggcagaagagacaucaagcugaucgacaucacccugagcaaggccgacagcagaaaguucgagaacgccgugugggaccaguucaaggaccugugccacaugcacaccggcguggugguggagaagaagaagagaggcggcaaggaggagaucaccccccacugcgcccugauggacugcaucauguucgacgccgccgugagcggcggccuggacgccaaggugcugagaguggugcugcccagagacaugguguucagaaccagcacccccaagguggugcugugaggacuagucccuguucccagagcccacuuuuuuuucuuuuuuugaaauaaaauagccugucuuucagaucuaaaaaaaaaaaaaaaaaaaaaaaaaaaaaaaaaaaaaaaaaaaaaaaaaaaaaaaaaaaaaaaaaaaaaaaaaaaaaaaaaaaaaaaaaaaaaaaaaaaa

SEQ ID NO: 18346 - RNA, 2021 nt, Artificial Sequence
  mRNA product Design a-1 (A100) comprising derived and/or modified sequence from LASV(AV;Clade V)__CCA30315__SP-HsPLAT_NP(2-569) (opt4)
aggagagucccgcagucggcguccagcggcucugcuuguucgugugugugucguugcaggccuuauucaagcuuaccauggacgccaugaagagaggccugugcugcgugcugcugcugugcggcgccguguucgugagccccagcgccagcaaggaggugaagagcuuccuguggacccagagccugagaagagagcugagcggcuacugcagcaacaucaagcugcagguggugaaggacgcccaggcccugcugcacggccuggacuucagcgaggugagcaacgugcagagacugaugagaaagcagagaagagacgacagcgaccugaagagacugagagaccugaaccaggccgugaacaaccugguggagcugaagagcacccagcagaagagcgugcugagagugggcacccugagcagcgacgaccugcugacccuggccgccgaccuggagaagcugaagagcaaggugaccagaaccgagagaccccugagcagcggcguguacaugggcaaccugagcagccagcagcuggaccagagaagagcccugcugaaccugaucggcaugaccaacggcagccagggcagccaggccggcagagacggcguggugagagugugggacgugaagaacgccgagcugcugaacaaccaguucggcaccaugcccagccugacccuggccugccugaccaagcagggccagguggaccugaacgacguggugcaggcccugaccgaccugggccugaucuacaccgccaaguaccccaacaccagcgaccuggacagacugacccagagccaccccauccugaacaugaucgacaccaagaagagcagccugaacaucagcggcuacaacuucagccugggcgccgccgugaaggccggcgccugcaugcuggacggcggcaacaugcuggagaccaucaaggugagcccccagagcauggacggcauccugaagagcauccugaaggugaagagagcccugggcauguucgugagcgacacccccggcgagagaaaccccuacgagaacauccuguacaagaucugccugagcggcgacggcuggcccuacaucgccagcagaaccagcaucgugggcagagccugggagaacaccgugguggaccuggagaccgacggcaagccccagaagaucggcagcggcaacagcaacaagagccugcagagcgccggcuucagcgccggccugaccuacagccagcugaugacccugaaggacgccaugcugcagcuggaccccaacgccaagaccuggauggacaucgagggcagacccgaggaccccguggagguggcccuguaccagcccaucagcggcugcuacauccacuucuucagagagcccaccgaccugaagcaguucaagcaggacgccaaguacagccacggcaucgacaucgccgaccuguucgccgcccagcccggccugaccagcgccgugaucgaggcccugcccagaaacauggugaucaccugccagggcagcgaggacaucaagaagcugcuggagagccagggcagaaaggacaucaagcugaucgacaucgcccugagcaagaucgacagcagaaaguucgagaacgccgugugggaccaguacaaggaccugugccacaugcacaccggcguggugguggagaagaagaagagaggcggcaaggaggagaucaccccccacugcgcccugauggacugcaucauguucgacgccgccgugagcggcggccugaacacccuggugcugagagccgugcugcccagagacaugguguucagaaccagcacccccagaguggugcugugaggacuagucccuguucccagagcccacuuuuuuuucuuuuuuugaaauaaaauagccugucuuucagaucuaaaaaaaaaaaaaaaaaaaaaaaaaaaaaaaaaaaaaaaaaaaaaaaaaaaaaaaaaaaaaaaaaaaaaaaaaaaaaaaaaaaaaaaaaaaaaaaaaaaa

SEQ ID NO: 18347 - RNA, 2021 nt, Artificial Sequence
  mRNA product Design a-1 (A100) comprising derived and/or modified sequence from LASV(Togo/2016/7082;Clade VI)__AMR44578__SP-HsPLAT_NP(2-569) (opt4)
aggagagucccgcagucggcguccagcggcucugcuuguucgugugugugucguugcaggccuuauucaagcuuaccauggacgccaugaagagaggccugugcugcgugcugcugcugugcggcgccguguucgugagccccagcaacagcaaggaggugaagagcuuccuguggacccagagccugagaagagagcugagcggcuacugcagcaacaucaagcugcagguggugaaggacgcccaggcccugcugcacggccuggacuucagcgaggugagcaacgugcagagacugaugagaaagcagaagagagacgacggcgaccugaagagacugagagaccugaaccaggccgugaacaaccugguggagcugaagagcgugcagcagaagagcauccugagagugggcacccugaccagcgacgaccugcugacccuggccgccgaccuggagaagcugaagagcaaggugaccagaaccgagagaccccugagcagcggcguguacaugggcaaccugagcagccagcagcuggaccagagaagagcccugcugagcaugaucggcaugagcggcggcaaccagaacagccagcccaagggcgacggcguggugagagugugggacgugaagaacgccgaccugcugaacaaccaguucggcaccaugcccagccugacccuggccugccugaccaagcagggccagguggaccugaacgacgccgugcaggcccugaccgaccugggccugaucuacaccgccaaguaccccaacagcagcgaccuggacagacugagccagagccaccccauccugaacaugaucgacaccaagaagagcagccugaacaucagcggcuacaacuucagccugggcgccgccaucaagaccggcgccugcaugcuggacggcggcaacaugcuggagaccaucaaggugaccccccagaccauggacggcauccugaagagcauccugaaggugaagagaagccugggcauguucaucagcgacacccccggcgagagaaaccccuacgagaacauccuguacaagaucugccugagcggcgacggcuggcccuacaucgccagcagaaccgccaucaucggcagagccugggagaacaccgugguggaccuggagagcgacagcaagccccagaagaucggcagcaacggcagcaacaagagccugcagagcgccggcuucgcccccggccugaccuacagccagcugaugacccugaaggacagcaugcugcagcuggaccccaacgccaagaccuggaucgacaucgagggcagacccgaggaccccguggagguggcccuguuccagcccaucagcggcugcuacauccacuucuucagagagcccaccgaccugaagcaguucaagcaggacgccaaguacagccacggcaucgacgugaccgaccuguucgccgcccagcccggccugaccagcgccgugaucgaggcccugcccagaaacauggugcugaccugccagggcagcgacgacaucaagaagcugcuggacagccagggcagaagagacaucaagcugaucgacgugagccugaacaagaucgacagcagaaaguucgagaacgccgugugggaccaguacaaggaccugugccacaugcacaccggcguggugguggagaagaagaagaagggcggcaaggaggagaucaccccccacugcgcccugcuggacugcaucauguucgacgccgccgugagcggcggccugaacgccaccgugcugagagccgugcugcccagagacaugguguucagaaccagcagccccaagguggugcugugaggacuagucccuguucccagagcccacuuuuuuuucuuuuuuugaaauaaaauagccugucuuucagaucuaaaaaaaaaaaaaaaaaaaaaaaaaaaaaaaaaaaaaaaaaaaaaaaaaaaaaaaaaaaaaaaaaaaaaaaaaaaaaaaaaaaaaaaaaaaaaaaaaaaa

SEQ ID NO: 18348 - RNA, 2021 nt, Artificial Sequence
  mRNA product Design a-1 (A100) comprising derived and/or modified sequence from LASV(KAK-428;Clade n.d. (VII))__ANH09741__SP-HsPLAT_NP(2-569) (opt4)
aggagagucccgcagucggcguccagcggcucugcuuguucgugugugugucguugcaggccuuauucaagcuuaccauggacgccaugaagagaggccugugcugcgugcugcugcugugcggcgccguguucgugagccccagcaacagcaaggaggugaagagcuuccuguggacccagagccugagaagagagcugagcggcuacugcaccaacaucaagcugcagguggugaaggacgcccaggcccugcugcacggccuggacuucagcgaggugagcaacgugcagagacugaugagaaagcagaagagagacgacaacgaccugaagagacugagagaccugaaccaggccgugaacaaccugguggagcugaagagcgugcagcagaagagcgugcugaaggugggcacccugaacagcgacgaccugcugacccuggccgccgaccuggagaagcugaagagcaagguggugagaaccgagagaccccugagcagcggcguguacaugggcaaccugagcagccagcagcuggaccagagaagagcccugcugaacaugaucggcauggccggcggcagccagggcaaccagcccagcagagacggcguggugagagugugggacgugaagaacgccgaccugcugaacaaccaguucggcaccaugcccagccugacccuggccugccugaccaagcagggccagguggaccugaacgacguggugcuggcccugaccgaccugggccugaucuacaccgccaaguaccccaacagcagcgaccuggacagacugagccagaaccaccccgugcugaacaugaucgacgugaacaagagcagccugaacaucagcggcuacaacuucagccugggcgccgccgugaaggccggcgccugcaugcuggacggcggcaacaugcuggagaccaucaagaucagcccccagaccguggacggcauccugaagagcauccugaaggugaagagagcccugggcauguucgugagcgacacccccggcgagagaaaccccuacgagaacauccuguacaaggugugccugagcggcaacggcuggcccuacaucgccagcagaaccagcaucgugggcagagccugggagaacaccgugguggaccuggagagcaacaagaaccagcccaaggugggcaacaacggcagcaacaagaugcugcagagcagcggcuucgccaccggccugaccuacagccagcugaugacccugagagacagcaugcugcagcuggaccccaccgccaagaccuggaucgacaucgagggcagacccgaggaccccguggagcuggcccuguuccagcccagcagcggcugcuacauccacuucuucagagagcccaccgaccugaagcaguucaagcaggacgccaaguacagccacggcaucgacgugaacgaccuguucagcgcccagcccggccugaccagcgccgugcuggaggcccugcccagaaacauggugcugaccugccagggcagcgacgacaucagaaagcugcuggacagccaggacagaaaggacaucaagcugaucgacaucagccugagcaaggccgacgccagaaaguucgagaacgacgugugggaccaguucaaggaccugugccacaugcacaccggcaucgugguggagaagaagaagaagggcggcaagcaggagaugaccccccacugcgcccugcuggacugcaucauguucgacgccgccgugagcggcggccugaacgugcccacccugagagccgugcugcccaccgacaugguguucagaaccaucaccaccaagguggugcugugaggacuagucccuguucccagagcccacuuuuuuuucuuuuuuugaaauaaaauagccugucuuucagaucuaaaaaaaaaaaaaaaaaaaaaaaaaaaaaaaaaaaaaaaaaaaaaaaaaaaaaaaaaaaaaaaaaaaaaaaaaaaaaaaaaaaaaaaaaaaaaaaaaaaa

SEQ ID NO: 18349 - RNA, 2021 nt, Artificial Sequence; identical to SEQ ID NO: 18343
  mRNA product Design a-1 (A100) comprising derived and/or modified sequence from LASV(Pinneo-NIG-1969;Clade I)__AIT17837__SP-HsPLAT_NP(2-569) (opt4)

SEQ ID NO: 18350 - RNA, 2021 nt, Artificial Sequence
  mRNA product Design a-1 (A100) comprising derived and/or modified sequence from LASV(ISTH0009-NIG-2011;Clade II)__AIT17405__SP-HsPLAT_NP(2-569) (opt4)
aggagagucccgcagucggcguccagcggcucugcuuguucgugugugugucguugcaggccuuauucaagcuuaccauggacgccaugaagagaggccugugcugcgugcugcugcugugcggcgccguguucgugagccccagcgugagcaaggaggugaagagcuuccuguggacccagagccugagaagagagcugagcggcuacugcagcaacaucaagcugcagguggugaaggacgcccaggcccugcugcacggccuggacuucagcgaggugagcaacgugcagagacugaugagaaagcagaagagagacgacagcgaccugaagagacugagagaccugaaccaggccgugaacaaccugguggagcugaagagcacccagcagaagagcauccugagagugggcacccugaccagcgacgaccugcugacccuggccgccgaccuggagaagcugaagagcaaggugaucagaaccgagagaccccugagcagcggcguguacaugggcaaccugagcacccagcagcuggagcagagaagagcccugcugaacaugaucggcauggugggcggcgcccagggcacccagcccggcagagacggcguggugagagugugggacgugaagaaccccgaccugcugaacaaccaguucggcaccaugcccagccugacccuggccugccugaccaagcagggccagguggaccugaacgacgccgugcuggcccugaccgaccugggccugaucuacaccgccaaguaccccaacagcagcgaccuggacagacugagccagagccaccccauccugaacaugguggacaucaagaagagcagccugaacaucagcggcuacaacuucagccugggcgccgccgugaaggccggcgccugcaugcuggacggcggcaacaugcuggagaccaucaaggugaccccccagaccauggacggcauccugaagagcauccugaaggugaagagaagccugggcauguucgugagcgacacccccggcgagagaaaccccuacgagaacauccuguacaagaucugccugagcggcgacggcuggcccuacaucgccagcagaaccagcaucgugggcagagccugggagaacaccaccguggaccuggagagcgacggcaagccccagaaggugggcagcgccggcagcaacaagagccugcagagcgccggcuuccccaccggccugaccuacagccagcugaugacccugaaggacagcaugaugcagcuggaccccagcgccaagaccuggaucgacaucgagggcagacccgaggaccccguggagaucgcccuguaccagcccaugagcggcugcuacauccacuucuucagagagcccaccgaccugaagcaguucaagcaggacgccaaguacagccacggcaucgacguggccgaccuguuccccgcccagcccggccugaccagcgccgugaucgaggcccugcccagaaacauggugcugaccugccagggcagcgacgacaucaagagacugcuggacagccagggcagaagagacaucaagcugaucgacaucgcccugagcaaggccgacagcagaagauucgagaacgccgugugggaccagugcaaggaccugugccacaugcacaccggcguggugguggagaagaagaagagaggcggcaaggaggagaucaccccccacugcgcccugauggacugcaucauguacgacgccgccgugagcggcggccugaacauccccgugcugagagccgugcugcccagagacaugguguucagaaccagcagccccaagguggugcugugaggacuagucccuguucccagagcccacuuuuuuuucuuuuuuugaaauaaaauagccugucuuucagaucuaaaaaaaaaaaaaaaaaaaaaaaaaaaaaaaaaaaaaaaaaaaaaaaaaaaaaaaaaaaaaaaaaaaaaaaaaaaaaaaaaaaaaaaaaaaaaaaaaaaa

SEQ ID NO: 18351 - RNA, 2021 nt, Artificial Sequence
  mRNA product Design a-1 (A100) comprising derived and/or modified sequence from LASV(ISTH2010-NIG-2012;Clade II)__AIT17483__SP-HsPLAT_NP(2-569) (opt4)
aggagagucccgcagucggcguccagcggcucugcuuguucgugugugugucguugcaggccuuauucaagcuuaccauggacgccaugaagagaggccugugcugcgugcugcugcugugcggcgccguguucgugagccccagcgccagcaaggaggugaagagcuuccuguggacccagagccugagaagagagcugagcggcuacugcagcaacaucaagcugcagguggugaaggacgcccaggcccugcugcacggccuggacuucagcgaggugagcaacgugcagagacugaugagaaagcagaagagagacgacagcgaccugaagagacugagagaccugaaccaggccgugaacaaccugguggagcugaagagcacccagcagaagagcauccugagagugggcacccugaccagcgacgaccugcugacccuggccgccgaccuggagaagcugaagagcaaggugaucagaaccgagagaccccugagcagcggcguguacaugggcaaccugagcacccagcagcuggagcagagaagagcccugcugaaccugaucggcauggugggcggcgcccagggcacccagcccggcagagacggcguggugagagugugggacgugaagaaccccgaccugcugaacaaccaguucggcaccaugcccagccugacccuggccugccugaccaagcagggccagguggaccugaacgacgccgugcuggcccugaccgaccugggccugaucuacaccgccaaguaccccaacagcagcgaccuggacagacugagccagagccaccccauccugaacaugguggacaccaagaagagcagccugaacaucagcggcuucaacuucagccugggcgccgccgugaaggccggcgccugcaugcuggacggcggcaacaugcuggagaccaucaaggugaccccccagaccauggacggcauccugaagagcauccugaaggugaagaagagccugggcauguucgugagcgacacccccggcgagagaaaccccuacgagaacauccuguacaagaucugccugagcggcgacggcuggcccuacaucgccagcagaaccagcaucgugggcagagccugggagaacaccaccguggaccuggagagcgacggcaagccccacaaggugggcaccgccggcagcaacaagagccugcagagcgccggcuuccccaccggccugaccuacagccagcugaugacccugaaggacagcaugaugcagcuggaccccagcgccaagaccuggaucgacaucgagggcagacccgaggaccccguggagaucgcccuguaccagcccaugagcggcugcuacauccacuucuucagagagcccaccgaccugaagcaguucaagcaggacgccaaguacagccacggcaucgacguggccgaccuguuccccgcccagcccggccugaccagcgccgugaucgaggcccugcccagaaacauggugcugaccugccagggcagcgacgacaucaagagacugcuggacagccagggcagaagagacaucaagcugaucgacaucgcccugagcaaggccgacagcagaagauucgagaacgccgugugggaccagugcaaggaccugugccacaugcacaccggcguggugguggagaagaagaagagaggcggcaaggaggagaucaccccccacugcgcccugauggacugcaucauguacgacgccgccgugagcggcggccugaacauccccgugcugagagccgugcugcccagagacaugguguucagaaccagcagccccaagguggugcugugaggacuagucccuguucccagagcccacuuuuuuuucuuuuuuugaaauaaaauagccugucuuucagaucuaaaaaaaaaaaaaaaaaaaaaaaaaaaaaaaaaaaaaaaaaaaaaaaaaaaaaaaaaaaaaaaaaaaaaaaaaaaaaaaaaaaaaaaaaaaaaaaaaaaa

SEQ ID NO: 18352 - RNA, 2021 nt, Artificial Sequence
  mRNA product Design a-1 (A100) comprising derived and/or modified sequence from LASV(Lassa virus/H.sapiens-wt/NGA/2015/ISTH_0543;Clade II)__AVO03640__SP-HsPLAT_NP(2-569) (opt4)
aggagagucccgcagucggcguccagcggcucugcuuguucgugugugugucguugcaggccuuauucaagcuuaccauggacgccaugaagagaggccugugcugcgugcugcugcugugcggcgccguguucgugagccccagcgccagcaaggaggugaagagcuuccuguggacccagagccugagaagagagcugagcggcuacugcagcaacaucaagcugcagguggugaaggacgcccaggcccugcugcacggccuggacuucagcgaggugagcaacgugcagagacugaugagaaagcagaagagagacgacagcgaccugaagagacugagagaccugaaccaggccgugaacaaccugguggagcugaagagcacccagcagaagagcauccugagagugggcacccugaccagcgacgaccugcugacccuggccgccgaccuggagaagcugaagagcaaggugaucagaaccgagagaccccugagcagcggcguguacaugggcaaccugagcacccagcagcuggagcagagaagagcccugcugaacaugaucggcauggugggcggcgcccagggcacccagcccggcagagacggcguggugagagugugggacgugaagaaccccgaccugcugaacaaccaguucggcaccaugcccagccugacccuggccugccugaccaagcagggccagguggaccugaacgacgccgugcuggcccugaccgaccugggccugaucuacaccgccaaguaccccaacagcagcgaccuggacagacugagccagagccaccccauccugaacaugguggacaccaagaagagcagccugaacaucagcggcuacaacuucagccugggcgccgccgugaaggccggcgccugcaugcuggacggcggcaacaugcuggagaccaucaaggugaccccccagaccauggacggcauccugaagagcauccugaaggugaagaagagccugggcauguucgugagcgacacccccggcgagagaaaccccuacgagaacauccuguacaagaucugccugagcggcgacggcuggcccuacaucgccagcagaaccagcaucgugggcagagccugggagaacaccaccguggaccuggagagcgacggcaagccccagaaggugggcagcgccggcagcaacaagagccugcagagcgccggcuuccccaccggccugaccuacagccagcugaugacccugaaggacagcaugaugcagcuggaccccagcgccaagaccuggaucgacaucgagggcagacccgaggaccccguggagaucgcccuguaccagcccaugagcggcugcuacauccacuucuucagagagcccaccgaccugaagcaguucaagcaggacgccaaguacagccacggcaucgacguggccgaccuguuccccgcccagcccggccugaccagcgccgugaucgaggcccugcccagaaacauggugcugaccugccagggcagcgacgacaucaagagacugcuggacagccagggcagaaaggacaucaagcugaucgacaucgcccugagcaaggccgacagcagaagauucgagaacgccgugugggaccagugcaaggaccugugccacaugcacaccggcguggugguggagaagaagaagagaggcggcaaggaggagaucaccccccacugcgcccugauggacugcaucauguacgacgccgccgugagcggcggccugaacauccccgugcugagagccgugcugcccagagacaugguguucagaaccagcagccccaagguggugcugugaggacuagucccuguucccagagcccacuuuuuuuucuuuuuuugaaauaaaauagccugucuuucagaucuaaaaaaaaaaaaaaaaaaaaaaaaaaaaaaaaaaaaaaaaaaaaaaaaaaaaaaaaaaaaaaaaaaaaaaaaaaaaaaaaaaaaaaaaaaaaaaaaaaaa

SEQ ID NO: 18353 - RNA, 2021 nt, Artificial Sequence
  mRNA product Design a-1 (A100) comprising derived and/or modified sequence from LASV(Lassa virus/H.sapiens-wt/NGA/2016/ISTH_0009;Clade II)__AVO03572__SP-HsPLAT_NP(2-569) (opt4)
aggagagucccgcagucggcguccagcggcucugcuuguucgugugugugucguugcaggccuuauucaagcuuaccauggacgccaugaagagaggccugugcugcgugcugcugcugugcggcgccguguucgugagccccagcgccagcaaggaggugaagagcuuccuguggacccagagccugagaagagagcugagcggcuacugcagcaacaucaagcugcagguggugaaggacgcccaggcccugcugcacggccuggacuucagcgaggugagcaacgugcagagacugaugagaaagcagaagagagacgacagcgaccugaagagacugagagaccugaaccaggccgugaacaaccugguggagcugaagagcacccagcagaagagcauccugagagugggcacccugaccagcgacgaccugcugacccuggccgccgaccuggagaagcugaagagcaaggugaucagaaccgagagaccccugagcagcggcguguacaugggcaaccugagcacccagcagcuggagcagagaagagcccugcugaacaugaucggcauggugggcggcgcccagggcacccagcccggcagagacggcguggugagagugugggacgugaagaaccccgaccugcugaacaaccaguucggcaccaugcccagccugacccuggccugccugaccaagcagggccagguggaccugaacgacgccgugcuggcccugaccgaccugggccugaucuacaccgccaaguaccccaacagcagcgaccuggacagacugagccagagccaccccauccugaacaugguggacaccaagaagagcagccugaacaucagcggcuacaacuucagccugggcgccgccgugaaggccggcgccugcaugcuggacggcggcaacaugcuggagaccaucaaggugaccccccagaccauggacggcauccugaagagcauccugaaggugaagaagagccugggcauguucgugagcgacacccccggcgagagaaaccccuacgagaacauccuguacaagaucugccugagcggcgacggcuggcccuacaucgccagcagaaccagcaucgugggcagagccugggagaacaccaccguggaccuggagagcgacggcaagccccagaaggugggcagcgccggcagcaacaagagccugcagagcgccggcuuccccaccggccugaccuacagccagcugaugacccugaaggacagcaugaugcagcuggaccccagcgccaagaccuggaucgacaucgagggcagacccgaggaccccguggagaucgcccuguaccagcccaugagcggcugcuacauccacuucuucagagagcccaccgaccugaagcaguucaagcaggacgccaaguacagccacggcaucgacguggccgaccuguuccccgcccagcccggccugaccagcgccgugaucgaggcccugcccagaaacauggugcugaccugccagggcagcgacgacaucaagagacugcuggacagccagggcagaagagacaucaagcugaucgacaucgcccugagcaaggccgacagcagaagauucgagaacgccgugugggaccagugcaaggaccugugccacaugcacaccggcguggugguggagaagaagaagagaggcggcaaggaggagaucaccccccacugcgcccugauggacugcaucauguacgacgccgccgugagcggcggccugaacauccccgugcugagagccgugcugcccagagacaugguguucagaaccagcagccccaagguggugcugugaggacuagucccuguucccagagcccacuuuuuuuucuuuuuuugaaauaaaauagccugucuuucagaucuaaaaaaaaaaaaaaaaaaaaaaaaaaaaaaaaaaaaaaaaaaaaaaaaaaaaaaaaaaaaaaaaaaaaaaaaaaaaaaaaaaaaaaaaaaaaaaaaaaaa

SEQ ID NO: 18354 - RNA, 2021 nt, Artificial Sequence
  mRNA product Design a-1 (A100) comprising derived and/or modified sequence from LASV(Lassa virus/H.sapiens-wt/NGA/2016/ISTH_0017;Clade II)__AVO03568__SP-HsPLAT_NP(2-569) (opt4)
aggagagucccgcagucggcguccagcggcucugcuuguucgugugugugucguugcaggccuuauucaagcuuaccauggacgccaugaagagaggccugugcugcgugcugcugcugugcggcgccguguucgugagccccagcgccagcaaggaggugaagagcuuccuguggacccagagccugagaagagagcugagcggcuacugcagcagcaucaagcugcagguggugaaggacgcccaggcccugcugcacggccuggacuucagcgaggugagcaacgugcagagacugaugagaaagcagaagagagacgacagcgaccugaagagacugagagaccugaaccaggccgugaacaaccugguggagcugaagagcacccagcagaagagcauccugagagugggcacccugaccagcgacgaccugcugacccuggccgccgaccuggagaagcugaagagcaaggugaucagaaccgagagaccccugagcagcggcguguacaugggcaaccugagcacccagcagcuggagcagagaagagcccugcugaacaugaucggcauggccggcggcgcccagggcacccagcccggcagagacggcguggugagagugugggacgugaagaaccccgaccugcugaacaaccaguucggcaccaugcccagccugacccuggccugccugaccaagcagggccagguggaccugaacgacgccgugcuggcccugaccgaccugggccugaucuacaccgccaaguaccccaacagcagcgaccuggacagacugagccagagccaccccauccugaacaugguggacaccaagaagagcagccugaacaucagcggcuacaacuucagccugggcgccgccgugaaggccggcgccugcaugcuggacggcggcaacaugcuggagaccaucaaggugaccccccagaccauggacggcauccugaagagcauccugaaggugaagagaagccugggcauguucgugagcgacgcccccggcgagagaaaccccuacgagaacauccuguacaagaucugccugagcggcgacggcuggcccuacaucgccagcagaaccagcaucgugggcagagccugggagaacaccaccguggaccuggagagcgacggcaagccccagaaggugggcgccaccggcagcaacaagagccugcagagcgccggcuuccccaccggccugaccuacagccagcugaugacccugaaggacagcaugaugcagcuggaccccagcgccaagaccuggaucgacaucgagggcagacccgaggaccccguggagguggcccuguaccagcccgugagcggcugcuacauccacuucuucagagagcccaccgaccugaagcaguucaagcaggacgccaaguacagccacggcaucgacguggccgaccuguuccccgcccagcccggccugaccagcgccgugaucgaggcccugcccagaaacauggugcugaccugccagggcagcgacgacaucaagaagcugcuggacagccagggcagaaaggacaucaagcugaucgacaucgcccugagcaaggccgacagcagaagauucgagaacgccgugugggaccagugcaaggaccugugccacaugcacaccggcguggugguggagaagaagaagagaggcggcaaggaggagaucaccccccacugcgcccugauggacugcaucauguacgacgccgccgugagcggcggccugaacauccccgugcugagagccgugcugcccagagacaugguguucagaaccagcagccccaagguggugcugugaggacuagucccuguucccagagcccacuuuuuuuucuuuuuuugaaauaaaauagccugucuuucagaucuaaaaaaaaaaaaaaaaaaaaaaaaaaaaaaaaaaaaaaaaaaaaaaaaaaaaaaaaaaaaaaaaaaaaaaaaaaaaaaaaaaaaaaaaaaaaaaaaaaaa

SEQ ID NO: 18355 - RNA, 2021 nt, Artificial Sequence
  mRNA product Design a-1 (A100) comprising derived and/or modified sequence from LASV(Lassa virus/H.sapiens-wt/NGA/2018/ISTH_0959;Clade II)__AVV65100__SP-HsPLAT_NP(2-569) (opt4)
aggagagucccgcagucggcguccagcggcucugcuuguucgugugugugucguugcaggccuuauucaagcuuaccauggacgccaugaagagaggccugugcugcgugcugcugcugugcggcgccguguucgugagccccagcgccagcaaggaggugaagagcuuccuguggacccagagccugagaagagagcugagcggcuacugcagcaacaucaagcugcagguggugaaggacgcccaggcccugcugcacggccuggacuucagcgaggugagcaacgugcagagacugaugagaaagcagaagagagacgacagcgaccugaagagacugagagaccugaaccaggccgugaacaaccugguggagcugaagagcacccagcagaagagcauccugagagugggcacccugaccagcgacgaccugcugacccuggccgccgaccuggagaagcugaagagcaaggugaucagaaccgagagaccccugagcagcggcguguacaugggcaaccugagcacccagcagcuggagcagagaagagcccugcugaaccugaucggcauggugggcggcgcccagggcacccagcccggcagagacggcguggugagagugugggacgugaagaaccccgaccugcugaacaaccaguucggcaccaugcccagccugacccuggccugccugaccaagcagggccagguggaccugaacgacguggugcuggcccugaccgaccugggccugaucuacaccgccaaguaccccaacagcagcgaccuggacagacugagccagagccaccccauccugaacaugguggacaccaagaagagcagccugaacaucagcggcuucaacuucagccugggcgccgccgugaaggccggcgccugcaugcuggacggcggcaacaugcuggagaccaucaaggugaccccccagaccauggacggcauccugaagagcauccugaaggugaagaagagccugggcauguucgugagcgacacccccggcgagagaaaccccuacgagaacauccuguacaagaucugccugagcggcgacggcuggcccuacaucgccagcagaaccagcaucgugggcagagccugggagaacaccaccguggaccuggagagcgacggcaagccccacaaggugggcaccgccggcagcaacaagagccugcagagcgccggcuuccccaccggccugaccuacagccagcugaugacccugaaggacagcaugaugcagcuggaccccagcgccaagaccuggaucgacaucgagggcagacccgaggaccccguggagaucgcccuguaccagcccaugagcggcugcuacauccacuucuucagagagcccaccgaccugaagcaguucaagcaggacgccaaguacagccacggcaucgacguggccgaccuguuccccgcccagcccggccugaccagcgccgugaucgaggcccugcccagaaacauggugcugaccugccagggcagcgacgacaucaagagacugcuggacagccagggcagaaaggacaucaagcugaucgacaucgcccugagcaagaccgacagcagaagauucgagaacgccgugugggaccagugcaaggaccugugccacaugcacaccggcguggugguggagaagaagaagagaggcggcaaggaggagaucaccccccacugcgcccugauggacugcaucauguacgacgccgccgugagcggcggccugaacauccccgugcugagagccgugcugcccagagacaugguguucagaaccagcagccccaagguggugcugugaggacuagucccuguucccagagcccacuuuuuuuucuuuuuuugaaauaaaauagccugucuuucagaucuaaaaaaaaaaaaaaaaaaaaaaaaaaaaaaaaaaaaaaaaaaaaaaaaaaaaaaaaaaaaaaaaaaaaaaaaaaaaaaaaaaaaaaaaaaaaaaaaaaaa

SEQ ID NO: 18356 - RNA, 2021 nt, Artificial Sequence
  mRNA product Design a-1 (A100) comprising derived and/or modified sequence from LASV(LASV003-NIG-2008;Clade II)__AIT17581__SP-HsPLAT_NP(2-569) (opt4)
aggagagucccgcagucggcguccagcggcucugcuuguucgugugugugucguugcaggccuuauucaagcuuaccauggacgccaugaagagaggccugugcugcgugcugcugcugugcggcgccguguucgugagccccagcgccagcaaggaggugaagagcuuccuguggacccagagccugagaagagagcugagcggcuacugcagcagcaucaagcugcagguggugaaggacgcccaggcccugcugcacggccuggacuucagcgaggugagcaacgugcagagacugaugagaaagcagaagagagacgacagcgaccugaagagacugagagaccugaaccaggccgugaacaaccugguggagcugaagagcacccagcagaagagcgugcugagagugggcacccugaccagcgacgaccugcugacccuggccgccgaccuggagaagcugaagagcaaggugaucagaaccgagagaccccugagcagcggcguguacaugggcaaccugagcgcccagcagcuggagcagagaagaacccugcugaacaugaucggcauggugggcggcgcccagggcacccagcccggcagagacggcguggugagagugugggacgugaagaaccccgaccugcugaacaaccaguucggcaccaugcccagccugacccuggccugccugaccaagcagggccagguggaccugaacgacguggugcuggcccugaccgaccugggccugaucuacaccgccaaguaccccaacagcagcgaccuggacagacugagccagagccaccccauccugagcaugguggacaccaagaagagcagccugaacaucagcggcuacaacuucagccugggcgccgccgugaaggccggcgccugcaugcuggacggcggcaacaugcuggagaccaucaaggugaccccccagaccauggacggcauccugaagagcauccugaaggugaagaagagccugggcauguucgugagcgacacccccggcgagagaaaccccuacgagaacauccuguacaagaucugccugagcggcgacggcuggcccuacaucgccagcagaaccagcaucgugggcagagccugggagaacaccaccguggaccuggagagcgacggcaagccccagaaggugggcaccgccggcagcaacaagagccugcagagcgccggcuuccccaccggccugaccuacagccagcugaugacccugaaggacagcaugaugcagcuggaccccagcgccaagaccuggaucgacaucgagggcagacccgaggaccccguggagaucgcccuguaccagcccaugagcggcugcuacauccacuucuucagagagcccaccgaccugaagcaguucaagcaggacgccaaguacagccacggcaucgacgugaccgaccuguuccccgcccagcccggccugaccagcgccgugaucgaggcccugcccagaaacauggugcugaccugccagggcagcgacgacaucaagagacugcuggacagccagggcagaagagacaucaagcugaucgacaucgcccugagcaaggccgacagcagaagauucgagaacgccgugugggaccagugcaaggaccugugccacaugcacaccggcguggugguggagaagaagaagagaggcggcaaggaggagaucaccccccacugcgcccugauggacugcaucauguacgacgccgccgugagcggcggccugaacauccccgugcugagagccgugcugcccagagacaugguguucagaaccagcagccccaagguggugcugugaggacuagucccuguucccagagcccacuuuuuuuucuuuuuuugaaauaaaauagccugucuuucagaucuaaaaaaaaaaaaaaaaaaaaaaaaaaaaaaaaaaaaaaaaaaaaaaaaaaaaaaaaaaaaaaaaaaaaaaaaaaaaaaaaaaaaaaaaaaaaaaaaaaaa

SEQ ID NO: 18357 - RNA, 2021 nt, Artificial Sequence
  mRNA product Design a-1 (A100) comprising derived and/or modified sequence from LASV(LASV035-NIG-2009;Clade II)__AIT17589__SP-HsPLAT_NP(2-569) (opt4)
aggagagucccgcagucggcguccagcggcucugcuuguucgugugugugucguugcaggccuuauucaagcuuaccauggacgccaugaagagaggccugugcugcgugcugcugcugugcggcgccguguucgugagccccagcgccagcaaggaggugaagagcuuccuguggacccagagccugagaagagagcugagcggcuacugcagcagcaucaagcugcagguggugaaggacgcccaggcccugcugcacggccuggacuucagcgaggugagcaacgugcagagacugaugagaaagcagaagagagacgacagcgaccugaagagacugagagaccugaaccaggccgugaacaaccugguggagcugaagagcacccagcagaagagcauccugagagugggcacccugaccagcgacgaccugcugacccuggccgccgaccuggagaagcugaagagcaaggugaucagaaccgagagaccccugagcagcggcguguacaugggcaaccugagcgcccagcagcuggagcagagaagagcccugcugaacaugaucggcauggugggcggcgcccagggcacccagcccggcagagacggcguggugagagugugggacgugaagaaccccgaccugcugaacaaccaguucggcaccaugcccagccugacccuggccugccugaccaagcagggccagguggaccugaacgacgccgugcuggcccugaccgaccugggccugaucuacaccgccaaguaccccaacagcagcgaccuggacagacugagccagagccaccccauccugaacaugguggacaccaagaagagcagccugaacaucagcggcuacaacuucagccugggcgccgccgugaaggccggcgccugcaugcuggacggcggcaacaugcuggagaccaucaaggugaccccccagaccauggacggcauccugaagagcauccugaaggugaagagaagccugggcauguucgugagcgacacccccggcgagagaaaccccuacgagaacauccuguacaagaucugccugagcggcgacggcuggcccuacaucgccagcagaaccagcaucgugggcagagccugggagaacaccaccguggaccuggagagcgacggcaagccccagaaggugggcaccaccggcagcaacaagagccugcagagcgccggcuuccccaccggccugaccuacagccagcugaugacccugaaggacagcaugaugcagcuggaccccagcgccaagaccuggaucgacaucgagggcagacccgaggaccccguggagaucgcccuguaccagcccaugagcggcugcuacauccacuucuucagagagcccaccgaccugaagcaguucaagcaggacgccaaguacagccacggcaucgacguggccgaccuguuccccgcccagcccggccugaccagcgccgugaucgaggcccugcccagaaacauggugcugaccugccagggcagcgacgacaucaagaagcugcuggacagccagggcagaagagacaucaagcugaucgacaucgcccugagcaaggccgacagcagaaaguucgagaacgccgugugggaccagugcaaggaccugugccacaugcacaccggcguggugguggagaagaagaagagaggcggcaaggaggagaucaccccccacugcgcccugauggacugcaucauguacgacgccgccgugagcggcggccugaacauccccgugcugagagccgugcugcccagagacaugguguucagaaccagcagccccaagguggugcugugaggacuagucccuguucccagagcccacuuuuuuuucuuuuuuugaaauaaaauagccugucuuucagaucuaaaaaaaaaaaaaaaaaaaaaaaaaaaaaaaaaaaaaaaaaaaaaaaaaaaaaaaaaaaaaaaaaaaaaaaaaaaaaaaaaaaaaaaaaaaaaaaaaaaa

SEQ ID NO: 18358 - RNA, 2021 nt, Artificial Sequence
  mRNA product Design a-1 (A100) comprising derived and/or modified sequence from LASV(LASV1000-NIG-2009;Clade II)__AIT17783__SP-HsPLAT_NP(2-569) (opt4)
aggagagucccgcagucggcguccagcggcucugcuuguucgugugugugucguugcaggccuuauucaagcuuaccauggacgccaugaagagaggccugugcugcgugcugcugcugugcggcgccguguucgugagccccagcgccagcaaggaggugaagagcuuccuguggacccagagccugagaagagagcugagcggcuacugcagcaacaucaagcugcagguggugaaggacgcccaggcccugcugcacggccuggacuucagcgaggugagcaacgugcagagacugaugagaaagcagaagagagacgacagcgaccugaagagacugagagaccugaaccaggccgugaacaaccugguggagcugaagagcacccagcagaagagcauccugagagugggcacccugaccagcgacgaccugcugacccuggccgccgaccuggagaagcugaagagcaaggugaucagaaccgagagaccccugagcagcggcguguacaugggcaaccugagcacccagcagcuggagcagagaagagcccugcugaacaugaucggcauggugggcggcgcccagggcacccagcccggcagagacggcguggugagagugugggacgugaagaaccccgaccugcugaacaaccaguucggcaccaugcccagccugacccuggccugccugaccaagcagggccagguggaccugaacgacguggugcuggcccugaccgaccugggccugaucuacaccgccaaguaccccaacagcagcgaccuggacagacugagccagagccaccccauccugaacaugguggacaccaagaagagcagccugaacaucagcggcuacaacuucagccugggcgccgccgugaaggccggcgccugcaugcuggacggcggcaacaugcuggagaccaucaaggugaccccccagaccauggacggcauccugaagagcauccugaaggugaagaagagccugggcauguucgugagcgacacccccggcgagagaaaccccuacgagaacauccuguacaagaucugccugagcggcgacggcuggcccuacaucgccagcagaaccagcaucgugggcagagccugggagaacaccaccguggaccuggagagcgacggcaagccccagaaggugggcaccgccggcagcaacaagagccugcagagcgccggcuuccccaccggccugaccuacagccagcugaugacccugaaggacagcaugaugcagcuggaccccagcgccaagaccuggaucgacaucgagggcagacccgaggaccccguggagaucgcccuguaccagcccgugagcggcugcuacauccacuucuucagagagcccaccgaccugaagcaguucaagcaggacgccaaguacagccacggcaucgacguggccgaccuguuccccgcccagcccggccugaccagcgccgugaucgaggcccugcccagaaacauggugcugaccugccagggcagcgacgacaucaagagacugcuggacagccagggcagaagagacaucaagcugaucgacaucgcccugagcaaggccgacagcagaagauucgagaacgccgugugggaccagugcaaggaccugugccacaugcacaccggcguggugguggagaagaagaagagaggcggcaaggaggagaucaccccccacugcgcccugauggacugcaucauguacgacgccgccgugagcggcggccugaacauccccgugcugagagccgugcugcccagagacaugguguucagaaccagcagccccaagguggugcugugaggacuagucccuguucccagagcccacuuuuuuuucuuuuuuugaaauaaaauagccugucuuucagaucuaaaaaaaaaaaaaaaaaaaaaaaaaaaaaaaaaaaaaaaaaaaaaaaaaaaaaaaaaaaaaaaaaaaaaaaaaaaaaaaaaaaaaaaaaaaaaaaaaaaa

SEQ ID NO: 18359 - RNA, 2021 nt, Artificial Sequence
  mRNA product Design a-1 (A100) comprising derived and/or modified sequence from LASV(LASV221-NIG-2010;Clade II)__AIT17625__SP-HsPLAT_NP(2-569) (opt4)
aggagagucccgcagucggcguccagcggcucugcuuguucgugugugugucguugcaggccuuauucaagcuuaccauggacgccaugaagagaggccugugcugcgugcugcugcugugcggcgccguguucgugagccccagcgccagcaaggaggugaagagcuuccuguggacccagagccugagaagagagcugagcggcuacugcagcagcaucaagcugcagguggugaaggacgcccaggcccugcugcacggccuggacuucagcgaggugagcaacgugcagagacugaugagaaagcagagaagagacgacagcgaccugaagagacugagagaccugaaccaggccgugaacaaccugguggagcugaagagcacccagcagaagagcauccugagagugggcacccugaccagcgacgaccugcugacccuggccgccgaccuggagaagcugaagagcaaggugaucagaaccgagagaccccugagcagcggcguguacaugggcaaccugagcacccagcagcuggagcagagaagagcccugcugaacaugaucggcauggugggcggcgcccagggcacccagcccggcagagacggcguggugagagugugggacgugaagaaccccgaccugcugaacaaccaguucggcaccaugcccagccugacccuggccugccugaccaagcagggccagguggaccugaacgacgccgugcuggcccugaccgaccugggccugaucuacaccgccaaguaccccaacagcagcgaccuggacagacugagccagagccaccccauccugaacaugguggacaccaagaagagcagccugaacaucagcggcuacaacuucagccugggcgccgccgugaaggccggcgccugcaugcuggacggcggcaacaugcuggagaccaucaaggugaccccccagaccguggacggcauccugaagagcauccugaaggugaagagaagccugggcauguucgugagcgacacccccggcgagagaaaccccuacgagaacauccuguacaagaucugccugagcggcgacggcuggcccuacaucgccagcagaaccagcaucgugggcagagccugggagaacaccaccguggaccuggagagcgacggcaagccccagaaggugggcaccgccggcagcaacaagagccugcagagcgccggcuuccccaccggccugaccuacagccagcugaugacccugaaggacagcaugaugcagcuggaccccagcgccaagaccuggaucgacaucgagggcagacccgaggaccccguggagaucgcccuguaccagcccaugagcggcugcuacauccacuucuucagagagcccaccgaccugaagcaguucaagcaggacgccaaguacagccacggcaucgacguggccgaccuguuccccgcccagcccggccugaccagcgccgugaucgaggcccugcccagaaacauggugcugaccugccagggcagcgacgacaucaagagacugcuggacagccagggcagaagagacaucaagcugaucgacaucgcccugagcaaggccgacagcagaaaguucgagaacgccgugugggaccagugcaaggaccugugccacaugcacaccggcguggugguggagaagaagaagagaggcggcaaggaggagaucaccccccacugcgcccugauggacugcaucauguacgacgccgccgugagcggcggccugaacauccccgugcugagagccgugcugcccagagacaugguguucagaaccagcagccccaagguggugcugugaggacuagucccuguucccagagcccacuuuuuuuucuuuuuuugaaauaaaauagccugucuuucagaucuaaaaaaaaaaaaaaaaaaaaaaaaaaaaaaaaaaaaaaaaaaaaaaaaaaaaaaaaaaaaaaaaaaaaaaaaaaaaaaaaaaaaaaaaaaaaaaaaaaaa

SEQ ID NO: 18360 - RNA, 2021 nt, Artificial Sequence
  mRNA product Design a-1 (A100) comprising derived and/or modified sequence from LASV(LASV237-NIG-2010;Clade II)__AIT17639__SP-HsPLAT_NP(2-569) (opt4)
aggagagucccgcagucggcguccagcggcucugcuuguucgugugugugucguugcaggccuuauucaagcuuaccauggacgccaugaagagaggccugugcugcgugcugcugcugugcggcgccguguucgugagccccagcgccagcaaggaggugaagagcuuccuguggacccagagccugagaagagagcugagcggcuacugcagcaacaucaagcugcagguggugaaggacgcccaggcccugcugcacggccuggacuucagcgaggugagcaacgugcagagacugaugagaaagcagaagagagacgacagcgaccugaagagacugagagaccugaaccaggccgugaacaaccugguggagcugaagagcacccagcagaagagcauccugagagugggcacccugaccagcgacgaccugcugacccuggccgccgaccuggagaagcugaagagcaaggugaucagaaccgagagaccccugagcagcggcguguacaugggcaaccugagcacccagcagcuggagcagagaagagcccugcugaacaugaucggcauggugggcggcgcccagggcacccagcccggcagagacggcguggugagagugugggacgugaagaaccccgaccugcugaacaaccaguucggcaccaugcccagccugacccuggccugccugaccaagcagggccagguggaccugaacgacgccgugcuggcccugaccgaccugggccugaucuacaccgccaaguaccccaacagcagcgaccuggacagacugagccagagccaccccauccugaacaugguggacaucaagaagagcagccugaacaucagcggcuacaacuucagccugggcgccgccgugaaggccggcgccugcaugcuggacggcggcaacaugcuggagaccaucaaggugaccccccagaccauggacggcauccugaagagcauccugaaggugaagagaagccugggcauguucgugagcgacacccccggcgagagaaaccccuacgagaacauccuguacaagaucugccugagcggcgacggcuggcccuacaucgccagcagaaccagcaucgugggcagagccugggagaacaccaccguggaccuggagagcgacggcaagccccagaaggugggcagcgccggcagcaacaagagccugcagagcgccggcuuccccaccggccugaccuacagccagcugaugacccugaaggacagcaugaugcagcuggaccccagcgccaagaccuggaucgacaucgagggcagacccgaggaccccguggagaucgcccuguaccagcccaugagcggcugcuacauccacuucuucagagagcccaccgaccugaagcaguucaagcaggacgccaaguacagccacggcaucgacguggccgaccuguuccccgcccagcccggccugaccagcgccgugaucgaggcccugcccagaaacauggugcugaccugccagggcagcgacgacaucaagagacugcuggacagccagggcagaagagacaucaagcugaucgacaucgcccugagcaaggccgacagcagaagauucgagaacgccgugugggaccagugcaaggaccugugccacaugcacaccggcguggugguggagaagaagaagagaggcggcaaggaggagaucaccccccacugcgcccugauggacugcaucauguacgacgccgccgugagcggcggccugaacauccccgugcugagagccgugcugcccagagacaugguguucagaaccagcagccccaagguggugcugugaggacuagucccuguucccagagcccacuuuuuuuucuuuuuuugaaauaaaauagccugucuuucagaucuaaaaaaaaaaaaaaaaaaaaaaaaaaaaaaaaaaaaaaaaaaaaaaaaaaaaaaaaaaaaaaaaaaaaaaaaaaaaaaaaaaaaaaaaaaaaaaaaaaaa

SEQ ID NO: 18361 - RNA, 2021 nt, Artificial Sequence
  mRNA product Design a-1 (A100) comprising derived and/or modified sequence from LASV(LASV253-NIG-2011;Clade II)__AIT17671__SP-HsPLAT_NP(2-569) (opt4)
aggagagucccgcagucggcguccagcggcucugcuuguucgugugugugucguugcaggccuuauucaagcuuaccauggacgccaugaagagaggccugugcugcgugcugcugcugugcggcgccguguucgugagccccagcgccagcaaggaggugaagagcuuccuguggacccagagccugagaagagagcugagcggcuacugcagcagcaucaagcugcagguggugaaggacgcccaggcccugcugcacggccuggacuucagcgaggugagcaacgugcagagacugaugagaaagcagaagagagacgacagcgaccugaagagacugagagaccugaaccaggccgugaacaaccugguggagcugaagagcacccagcagaagagcgugcugagagugggcacccugaccagcgacgaccugcugacccuggccgccgaccuggagaagcugaagagcaaggugaucagaaccgagagaccccugagcagcggcguguacaugggcaaccugagcacccagcagcuggagcagagaagagcccugcugaacaugaucggcauggugggcggcgcccagggcacccagcccggcagagacggcguggugagagugugggacgugaagaaccccgaccugcugaacaaccaguucggcaccaugcccagccugacccuggccugccugaccaagcagggccagguggaccugaacgacguggugcuggcccugaccgaccugggccugaucuacaccgccaaguaccccaacagcagcgaccuggacagacugagccagagccaccccauccugaacaugguggacaccaagaagagcagccugaacaucagcggcuacaacuucagccugggcgccgccgugaaggccggcgccugcaugcuggacggcggcaacaugcuggagaccaucaaggugaccccccagaccauggacggcauccugaagagcauccugaaggugaagaagagccugggcauguucgugagcgacacccccggcgagagaaaccccuacgagaacauccuguacaagaucugccugagcggcgacggcuggcccuacaucgccagcagaaccagcaucgugggcagagccugggagaacaccaccguggaccuggagagcgacggcaagccccagaaggugggcaccgccggcagcaacaagagccugcagagcgccggcuuccccaccggccugaccuacagccagcugaugacccugaaggacagcaugaugcagcuggaccccagcgccaagaccuggaucgacaucgagggcagacccgaggaccccguggagaucgcccuguaccagcccaugagcggcugcuacauccacuucuucagagagcccaccgaccugaagcaguucaagcaggacgccaaguacagccacggcaucgacgugaccgaccuguuccccgcccagcccggccugaccagcgccgugaucgaggcccugcccagaaacauggugcugaccugccagggcagcgacgacaucaagagacugcuggacagccagggcagaagagacaucaagcugaucgacaucgcccugagcaaggccgacagcagaagauucgagaacgccgugugggaccagugcaaggaccugugccacaugcacaccggcguggugguggagaagaagaagagaggcggcaaggaggagaucaccccccacugcgcccugauggacugcaucauguacgacgccgccgugagcggcggccugaacauccccgugcugagagccgugcugcccagagacaugguguucagaaccagcagccccaagguggugcugugaggacuagucccuguucccagagcccacuuuuuuuucuuuuuuugaaauaaaauagccugucuuucagaucuaaaaaaaaaaaaaaaaaaaaaaaaaaaaaaaaaaaaaaaaaaaaaaaaaaaaaaaaaaaaaaaaaaaaaaaaaaaaaaaaaaaaaaaaaaaaaaaaaaaa

SEQ ID NO: 18362 - RNA, 2021 nt, Artificial Sequence
  mRNA product Design a-1 (A100) comprising derived and/or modified sequence from LASV(LASV254-NIG-2011;Clade II)__AIT17675__SP-HsPLAT_NP(2-569) (opt4)
aggagagucccgcagucggcguccagcggcucugcuuguucgugugugugucguugcaggccuuauucaagcuuaccauggacgccaugaagagaggccugugcugcgugcugcugcugugcggcgccguguucgugagccccagcgccagcaaggaggugaagagcuuccuguggacccagagccugagaagagagcugagcggcuacugcagcagcaucaagcugcagguggugaaggacgcccaggcccugcugcacggccuggacuucagcgaggugagcaacgugcagagacugaugagaaagcagaagagagacgacagcgaccugaagagacugagagaccugaaccaggccgugaacaaccugguggagcugaagagcacccagcagaagagcgugcugagagugggcacccugaccagcgacgaccugcugacccuggccgccgaccuggagaagcugaagagcaaggugaucagaaccgagagaccccugagcagcggcguguacaugggcaaccugagcacccagcagcuggagcagagaagagcccugcugaacaugaucggcauggugggcggcgcccagggcacccagcccggcagagacggcguggugagagugugggacgugaagaaccccgaccugcugaacaaccaguucggcaccaugcccagccugacccuggccugccugaccaagcagggccagguggaccugaacgacgccgugcuggcccugaccgaccugggccugaucuacaccgccaaguaccccaacagcagcgaccuggacagacugagccagagccaccccauccugaacaugguggacaccaagaagagcagccugaacaucagcggcuacaacuucagccugggcgccgccgugaaggccggcgccugcaugcuggacggcggcaacaugcuggagaccaucaaggugaccccccagaccauggacggcauccugaagagcauccugaaggugaagaagagccugggcauguucgugagcgacacccccggcgagagaaaccccuacgagaacauccuguacaagaucugccugagcggcgacggcuggcccuacaucgccagcagaaccagcaucgugggcagagccugggagaacaccaucguggaccuggagagcgacggcaagccccagaaggugggcaccgccggcagcaacaagagccugcagagcgccggcuuccccaccggccugaccuacagccagcugaugacccugaaggacagcaugaugcagcuggaccccagcgccaagaccuggaucgacaucgagggcagacccgaggaccccguggagaucgcccuguaccagcccaugagcggcugcuacauccacuucuucagagagcccaccgaccugaagcaguucaagcaggacgccaaguacagccacggcaucgacguggccgaccuguuccccgcccagcccggccugaccagcgccgugaucgaggcccugcccagaaacauggugcugaccugccagggcagcgacgacaucaagagacugcuggacagccagggcagaagagacaucaagcugaucgacaucgcccugagcaaggccgacagcagaagauucgagaacgccgugugggaccagugcaaggaccugugccacaugcacaccggcguggugguggagaagaagaagagaggcggcaaggaggagaucaccccccacugcgcccugauggacugcaucauguacgacgccgccgugagcggcggccugaacauccccgugcugagagccgugcugcccagagacaugguguucagaaccagcagccccaagguggugcugugaggacuagucccuguucccagagcccacuuuuuuuucuuuuuuugaaauaaaauagccugucuuucagaucuaaaaaaaaaaaaaaaaaaaaaaaaaaaaaaaaaaaaaaaaaaaaaaaaaaaaaaaaaaaaaaaaaaaaaaaaaaaaaaaaaaaaaaaaaaaaaaaaaaaa

SEQ ID NO: 18363 - RNA, 2021 nt, Artificial Sequence
  mRNA product Design a-1 (A100) comprising derived and/or modified sequence from LASV(Nig08-04;Clade II)__ADU56611__SP-HsPLAT_NP(2-569) (opt4)
aggagagucccgcagucggcguccagcggcucugcuuguucgugugugugucguugcaggccuuauucaagcuuaccauggacgccaugaagagaggccugugcugcgugcugcugcugugcggcgccguguucgugagccccagcgccagcaaggaggugaagagcuuccuguggacccagagccugagaagagagcugagcggcuacugcagcaacaucaagcugcagguggugaaggacgcccaggcccugcugcacggccuggacuucagcgaggugagcaacgugcagagacugaugagaaagcagaagagagacgacggcgaccugaagagacugagagaccugaaccaggccgugaacaaccugguggagcugaagagcacccagcagaagagcgugcugagagugggcacccugaccagcgacgaccugcugacccuggccgccgaccuggagaagcugaagagcaaggugaucagaaccgagagaccccugagcagcggcguguacaugggcaaccugagcacccagcagcuggagcagagaaaggcccugcugagcaugaucggcauggugggcggcgcccagggcacccagcccggcagagacggcguggugagagugugggacgugaagaaccccgaccugcugaacaaccaguucggcaccaugcccagccugacccuggccugccugaccaagcagggccagguggaccugaacgacgccgugcuggcccugaccgaccugggccugaucuacaccgccaaguaccccaacagcagcgaccuggacagacugagccagagccaccccauccugaacaugguggacaccaagaagagcagccugaacaucagcggcuacaacuucagccugggcgccgccgugaaggccggcgccugcaugcuggacggcggcaacaugcuggagaccaucaaggugaccccccagaccauggacggcauccugaagagcauccugaaggugaagagaagccugggcauguucgugagcgacacccccggcgagagaaaccccuacgagaacauccuguacaagaucugccugagcggcgacggcuggcccuacaucgccagcagaaccagcaucgugggcagagccugggagaacaccaccguggaccuggagagcgacggcaagccccagaaggugggcaccgccggcagcaacaagagccugcagagcgccggcuuccccaccggccugaccuacagccagcugaugacccugaaggacagcaugaugcagcuggaccccagcgccaagaccuggaucgacaucgagggcagacccgaggaccccguggagaucgcccuguaccagcccaugagcggcugcuacauccacuucuucagagagcccaccgaccugaagcaguucaagcaggacgccaaguacagccacggcaucgacgugaccgaccuguucagcgcccagcccggccugaccagcgccgugaucgaggcccugcccagaaacauggugcugaccugccagggcagcgacgacaucaagaagcugcuggacagccagggcagaagagacaucaagcugaucgacaucagccugaacaaggccgacagcagaagauucgagaacgccgugugggaccagugcaaggaccugugccacaugcacaccggcguggugguggagaagaagaagagaggcggcaaggaggagaucaccccccacugcgcccugauggacugcaucauguucgacgccgccgugagcggcggccugaacauccccauccugagagccgugcugcccagagacaugguguucagaaccagcagccccaagguggugcugugaggacuagucccuguucccagagcccacuuuuuuuucuuuuuuugaaauaaaauagccugucuuucagaucuaaaaaaaaaaaaaaaaaaaaaaaaaaaaaaaaaaaaaaaaaaaaaaaaaaaaaaaaaaaaaaaaaaaaaaaaaaaaaaaaaaaaaaaaaaaaaaaaaaaa

SEQ ID NO: 18364 - RNA, 2024 nt, Artificial Sequence
  mRNA product Design a-1 (A100) comprising derived and/or modified sequence from LASV(GA391;Clade III)__AAA46284__SP-HsPLAT_NP(2-570) (opt4)
aggagagucccgcagucggcguccagcggcucugcuuguucgugugugugucguugcaggccuuauucaagcuuaccauggacgccaugaagagaggccugugcugcgugcugcugcugugcggcgccguguucgugagccccagcgccagcaaggaggugagaagcugccuguggacccagagccugagaagagagcugagcggcuacugcagcaacaucaagcugcagguggugaaggacgcccaggcccugcugcacggccuggacuucagcgaggugagcaacgugcagagacugaugagaaagcagaagagagacgacggcgaccugaagagacugagagaccugaaccaggccgugaacaaccugguggagcugaagagcacccagcagaagagcgugcugagagugggcacccugagcagcgacgaccugcugauccuggccgccgaccuggagaagcugaagagcaaggugaccagaaccgagagaccccugagcagcggcguguacaugggcaaccugagcagccagcagcuggaccagagaagagcccugcugaacaugaucggcaugaccggcgugagcggcggcggcaagggcgccagcaacggcaucgugagagugugggacgugaagaacgccgagcugcugaacaaccaguucggcaccaugcccagccugacccuggccugccugaccaagcagggccagguggaccugaacgacgccgugcaggcccugaccgaccugggccugaucuacaccgccaaguaccccaacagcagcgaccuggacagacugagccagagccaccccauccugaacaugaucgacaccaagaagagcagccugaacaucagcggcuacaacuucagccugggcgccgccgugaaggccggcgccugcaugcuggacggcggcaacaugcuggagaccaucaaggugagcccccagaccauggacggcauccugaagagcauccugaaggugaagaagagccugggcauguucgugagcgacacccccggcgagagaaaccccuacgagaacauccuguacaagaucugccugagcggcgacggcuggagcuacaucgccagcagaaccagcaucgugggcagagccugggagaacaccgugguggaccuggagcaggacaacaagccccagaagaucggcaacggcggcagcaacaagagccugcagagcgccggcuucgccgccggccugaucuacagccagcugaugacccugaaggacuucaagugcuucaaccugauccccaacgccaagaccuggauggacaucgagggcagacccgaggaccccguggagaucgcccuguaccagcccagcagcggcugcuacgugcacuucuucagagagcccaccgaccugaagcaguucaagcaggacgccaaguacagccacggcagagacgugaccgaccuguucgccgcccagcccggccugaccagcgccgugaucgaggcccugcccagaaacauggugaucaccugccagggcagcgaggacaucagaaagcugcuggagagccagggcagaagagacaucaagcugaucgacaucacccugagcaaggccgacagcagaaaguucgagaacgccgugugggaccaguucaaggaccugugccacaugcacaccggcguggugguggagaagaagaagagaggcggcaaggaggagaucaccccccacugcgcccugauggacugcaucauguucgacgccgccgugagcggcggccuggacgccaaggugcugagaguggugcugcccagagacaugguguucagaaccagcacccccaagguggugcugugaggacuagucccuguucccagagcccacuuuuuuuucuuuuuuugaaauaaaauagccugucuuucagaucuaaaaaaaaaaaaaaaaaaaaaaaaaaaaaaaaaaaaaaaaaaaaaaaaaaaaaaaaaaaaaaaaaaaaaaaaaaaaaaaaaaaaaaaaaaaaaaaaaaaa

SEQ ID NO: 18365 - RNA, 2021 nt, Artificial Sequence
  mRNA product Design a-1 (A100) comprising derived and/or modified sequence from LASV(Nig08-A19;Clade III)__ADU56619__SP-HsPLAT_NP(2-569) (opt4)
aggagagucccgcagucggcguccagcggcucugcuuguucgugugugugucguugcaggccuuauucaagcuuaccauggacgccaugaagagaggccugugcugcgugcugcugcugugcggcgccguguucgugagccccagcgccagcaaggaggugaagagcuuccuguggacccagagccugagaagagagcugagcggcuacugcagcaacaucaagcugcagguggugaaggacgcccaggcccugcugcacggccuggacuucagcgaggugagcaacgugcagagacugaugagaaagcagaagagagacgacggcgaccugaagagacugagagaccugaaccaggccgugaacaaccugguggagcugaagagcacccagcagaagagcgugcugagagugggcacccugagcagcgacgaccugcuggugcuggccgccgaccuggagaagcugaagagcaagguggugagaaccgagagaccccugagcagcggcaucuacaugggcaaccugagcagccagcagcuggaccagagaaaggcccugcugaacaugaucggcaugaccggcggcaacggcggcagaaacaccaccagcgacggcaucgugagagugugggacgugaagaacgccgagcugcugaacaaccaguucggcaccaugcccagccugacccuggccugccugaccaagcagggccagguggaccugaacgacgccgugcaggcccugaccgaccugggccugaucuacaccgccaaguaccccaacagcagcgaccuggacagacuggcccagagccaccccauccugaacaugaucgacaccaagaagagcagccugaacaucagcggcuacaacuucagccugggcgccgccgugaaggccggcgccugcaugcuggacggcggcaacaugcuggagaccaucaaggugagcccccagaccauggacggcauccugaagagcauccugaaggugaagagaagccugggcauguucaucagcgacacccccggcgagagaaaccccuacgagaacauccuguacaagaucugccugagcggcgacggcuggcccuacaucgccagcagaaccagcaucgugggcagagccugggagaacaccgugguggaccuggagagcgacaacaagccccagaagaccggcaacggcggcagcaacaagagccugcagagcgccggcuucgccgccggccugaccuacagccagcugaugacccugaaggacagcaugcugcagcuggaccccaacgccaagaccuggauggacaucgagggcagacccgaggaccccguggagaucgcccuguaccagcccagcagcggcugcuacauccacuucuucagagagcccaccgaccugaagcaguucaagcaggacgccaaguacagccacggcaucgacgugaccgaccuguucgccgcccagcccggccugaccagcgccgugaucgaggcccugcccagaaacauggugaucaccugccagggcagcgaggacaucagaaagcugcuggagagccagggcagaagagacaucaagcugaucgacaucagccugagcaagguggacagcagaaaguucgagaacgccgugugggaccaguucaaggaccugugccacaugcacaccggcaucgugguggagaagaagaagagaggcggcaaggaggagaucaccccccacugcgcccugauggacugcaucauguucgacgccgccgugagcggcggcguggacgccaaggugcugagagccgugcugcccagagacaugguguucagaaccagcacccccaagguggugcugugaggacuagucccuguucccagagcccacuuuuuuuucuuuuuuugaaauaaaauagccugucuuucagaucuaaaaaaaaaaaaaaaaaaaaaaaaaaaaaaaaaaaaaaaaaaaaaaaaaaaaaaaaaaaaaaaaaaaaaaaaaaaaaaaaaaaaaaaaaaaaaaaaaaaa

SEQ ID NO: 18366 - RNA, 2021 nt, Artificial Sequence
  mRNA product Design a-1 (A100) comprising derived and/or modified sequence from LASV(G1180-SLE-2010;Clade IV)__AIT17169__SP-HsPLAT_NP(2-569) (opt4)
aggagagucccgcagucggcguccagcggcucugcuuguucgugugugugucguugcaggccuuauucaagcuuaccauggacgccaugaagagaggccugugcugcgugcugcugcugugcggcgccguguucgugagccccagcgccagcaaggagaucaagagcuuccuguggacccagagccugagaagagagcugagcggcuacugcagcaacaucaagcugcagguggugaaggacgcccaggcccugcugcacggccuggacuucagcgaggugagcaacgugcagagacugaugagaaaggagagaagagacgacaacgaccugaagagacugagagaccugaaccaggccgugaacaaccugguggagcugaagagcacccagcagaagagcauccugagagugggcacccugaccagcgacgaccugcugauccuggccgccgaccuggagaagcugaagagcaaggugaucagaaccgagagaccccugagcgccggcguguacaugggcaaccugagcagccagcagcuggaccagagaagagcccugcugagcaugaucggcaugagcagcggcaaccagagagcccaggccggcagagacggcguggugagagugugggacgugaagaacguggagcugcugaacaaccaguucggcaccaugcccagccugacccuggccugccugaccaagcagggccagguggaccugaacgacgccgugcaggcccugaccgaccugggccugaucuacaccgccaaguaccccaacaccagcgaccuggacagacugacccagagccaccccauccugaacaugaucgacaccaagaagagcagccugaacaucagcggcuacaacuucagccugggcgccgccgugaaggccggcgccugcaugcuggacggcggcaacaugcuggagaccaucaaggugagcccccagaccauggacggcauccugaagagcauccugaaggugaagaaggcccugggcauguucaucagcgacacccccggcgagagaaaccccuacgagaacauccuguacaagaucugccugagcggcgacggcuggcccuacaucgccagcagaaccagcaucaccggcagagccugggagaacaccgugguggaccuggagagcgacggcaagccccagaaggccggcagcaacaacagcaacaagagccugcagagcgugggcuucaccgccggccugaccuacagccagcugaugacccugaaggacgccaugcugcagcuggaccccaacgccaagaccuggauggacaucgagggcagacccgaggaccccguggagaucgcccuguaccagcccagcagcggcugcuacauccacuucuucagagagcccaccgaccugaagcaguucaagcaggacgccaaguacagccacggcaucgacgugaccgaccuguucgccgcccagcccggccugaccagcgccgugaucgacgcccugcccagaaacauggugaucaccugccagggcagcgacgacaucagaaagcugcuggagagccagggcagaaaggacaucaagcugaucgacaucgcccugagcaagaccgacagcagaaaguacgagaacgccgugugggaccaguacaaggaccugugccacaugcacaccggcguggugguggagaagaagaagagaggcggcaaggaggagaucaccccccacugcgcccugauggacugcaucauguucgacgccgccgugagcggcggccugaacaccagcgugcugagagccgugcugcccagagacaugguguucagaaccagcacccccagaguggugcugugaggacuagucccuguucccagagcccacuuuuuuuucuuuuuuugaaauaaaauagccugucuuucagaucuaaaaaaaaaaaaaaaaaaaaaaaaaaaaaaaaaaaaaaaaaaaaaaaaaaaaaaaaaaaaaaaaaaaaaaaaaaaaaaaaaaaaaaaaaaaaaaaaaaaa

SEQ ID NO: 18367 - RNA, 2021 nt, Artificial Sequence
  mRNA product Design a-1 (A100) comprising derived and/or modified sequence from LASV(G1442-SLE-2011;Clade IV)__AIT17181__SP-HsPLAT_NP(2-569) (opt4)
aggagagucccgcagucggcguccagcggcucugcuuguucgugugugugucguugcaggccuuauucaagcuuaccauggacgccaugaagagaggccugugcugcgugcugcugcugugcggcgccguguucgugagccccagcgccagcaaggaggugaagagcuuccuguggacccagagccugagaagagagcugagcggcuacugcagcaacaucaagcugcagguggugaaggacgcccaggcccugcugcacggccuggacuucagcgaggugagcaacgugcagagacugaugagaaagcagagaagagacgacaacgaccugaagagacugagagaccugaaccaggccgugaacaaccugguggagcugaagagcacccagcagaagagcgugcugagagugggcacccugaccagcgacgaccugcuggugcuggccgccgaccuggagaagcugaagagcaaggugaucagaaccgagagaccccugagcgccggcguguacaugggcaaccugagcagccagcagcuggaccagagaagagcccugcugaacaugaucggcaugagcggcggcauccagggcaccagaaccggcagagacggcguggugagagugugggacgugaagaacgccgaccugcugaacaaccaguucggcaccaugcccagccugacccuggccugccugaccaagcagggccagguggaccugaacgacguggugcaggcccugaccgaccugggccugaucuacaccgccaaguaccccaacgccagcgaccuggacagacugacccagagccaccccauccugaacaugaucgacaccaagaagagcagccugaacaucagcggcuacaacuucagccugggcgccgccgugaaggccggcgccugcaugcuggacggcggcaacaugcuggagaccaucaaggugagcccccagaccauggacggcauccugaagagcauccugaaggugaagaagacccugggcauguucaucagcgacacccccggcgagagaaaccccuacgagaacauccuguacaagaucugccugagcggcgacggcuggcccuacaucgccagcagaaccagcaucaccggcagagccugggagaacaccgugguggaccuggagagcgacggcaagccccagaaggccggcagcaacaacagcaacaagagccugcagagcgccggcuucgccgccggccugaccuacagccagcugaugacccugaaggacgccaugcugcagcuggaccccaacgccaagaccuggauggacaucgagggcagacccgaggaccccguggagaucgcccuguaccagcccagcagcggcugcuacauccacuucuucagagagcccaccgaccugaagcaguucaagcaggacgccaaguacagccacggcaucgacgugaccgaccuguucgccgcccagcccggccugaccagcgccgugaucgaggcccugcccagaaacauggugaucaccugccagggcagcgacgacaucaagaagcugcuggagagccagggcagaaaggacaucaagcugaucgacaucgcccugagcaagaccgacagcagaaaguacgagaacgccgugugggaccaguacaaggaccugugccacaugcacaccggcguggugguggagaagaagaagagaggcggcaaggaggagaucaccccccacugcgcccugauggacugcaucauguucgacgccgccgugagcggcggccugaacacccuggugcugagagccgugcugcccagagacaugguguucagaaccagcacccccagaguggugcugugaggacuagucccuguucccagagcccacuuuuuuuucuuuuuuugaaauaaaauagccugucuuucagaucuaaaaaaaaaaaaaaaaaaaaaaaaaaaaaaaaaaaaaaaaaaaaaaaaaaaaaaaaaaaaaaaaaaaaaaaaaaaaaaaaaaaaaaaaaaaaaaaaaaaa

SEQ ID NO: 18368 - RNA, 2021 nt, Artificial Sequence
  mRNA product Design a-1 (A100) comprising derived and/or modified sequence from LASV(G3010-SLE-2013;Clade IV)__AIT17345__SP-HsPLAT_NP(2-569) (opt4)
aggagagucccgcagucggcguccagcggcucugcuuguucgugugugugucguugcaggccuuauucaagcuuaccauggacgccaugaagagaggccugugcugcgugcugcugcugugcggcgccguguucgugagccccagcgccagcaaggagaucaagagcuuccuguggacccagagccugagaagagagcugagcggcuacugcagcaacaucaagcugcagguggugaaggacgcccaggcccugcugcacggccuggacuucagcgaggugagcaacgugcagagacugaugagaaaggagagaagagacgacaacgaccugaagagacugagagaccugaaccaggccgugaacaaccugguggagcugaagagcacccagcagaagagcauccugagagugggcacccugaccagcgacgaccugcugauccuggccgccgaccuggagaagcugaagagcaaggugaccagaaccgagagaccccugagcgccggcguguacaugggcaaccugagcagccagcagcuggaccagagaagagcccugcugagcaugaucggcaugagcagcggcgugcagggcgccagagccggcagagacggcguggugagagugugggacgugaagaacgccgagcugcugaacaaccaguucggcaccaugcccagccugacccuggccugccugaccaagcagggccagguggaccugaacgacguggugcaggcccugaccgaccugggccugaucuacaccgccaaguaccccaacaccagcgaccuggacagacugacccagagccaccccauccugaacaugaucgacaccaagaagagcagccugaacaucagcggcuacaacuucagccugggcgccgccgugaaggccggcgccugcaugcuggacggcggcaacaugcuggagaccaucaaggugagcccccagaccauggacggcauccugaagagcauccugaaggugaagaaggcccugggcauguucaucagcgagacccccggcgagagaaaccccuacgagaacauccuguacaagaucugccugagcggcgacggcuggcccuacaucgccagcagaaccagcaucaccggcagagccugggagaacaccgugguggaccuggagagcgacggcaagccccagaaggccggcagcaacaacagcaacaagagccugcagagcgccggcuucaccgccggccugaccuacagccagcugaugacccugaaggacgccaugcugcagcuggaccccaacgccaagaccuggauggacaucgagggcagacccgaggaccccguggagguggcccuguaccagcccagcagcggcugcuacauccacuucuucagagagcccaccgaccugaagcaguucaagcaggacgccaaguacagccacggcaucgacgugaccgaccuguucgccgcccagcccggccugaccagcgccgugaucgacgcccugcccagaaacauggugaucaccugccagggcagcgacgacaucaagaagcugcuggagagccagggcagaaaggacaucaagcugaucgacaucgcccugagcaagaccgacagcagaaaguacgagaacgccgugugggaccaguacaaggaccugugccacaugcacaccggcguggugguggagaagaagaagagaggcggcaaggaggagaucaccccccacugcgcccugauggacugcaucauguucgacgccgccgugagcggcggccugaacaccagcgugcugagagccgugcugcccagagacaugguguucagaaccagcacccccagaguggugcugugaggacuagucccuguucccagagcccacuuuuuuuucuuuuuuugaaauaaaauagccugucuuucagaucuaaaaaaaaaaaaaaaaaaaaaaaaaaaaaaaaaaaaaaaaaaaaaaaaaaaaaaaaaaaaaaaaaaaaaaaaaaaaaaaaaaaaaaaaaaaaaaaaaaaa

SEQ ID NO: 18369 - RNA, 2021 nt, Artificial Sequence
  mRNA product Design a-1 (A100) comprising derived and/or modified sequence from LASV(G502-SLE-2009;Clade IV)__AIT17127__SP-HsPLAT_NP(2-569) (opt4)
aggagagucccgcagucggcguccagcggcucugcuuguucgugugugugucguugcaggccuuauucaagcuuaccauggacgccaugaagagaggccugugcugcgugcugcugcugugcggcgccguguucgugagccccagcgccagcaaggagaucaagagcuuccuguggacccagagccugagaagagagcugagcggcuacugcagcaacaucaagcugcagguggugaaggacgcccaggcccugcugcacggccuggacuucagcgaggugagcaacgugcagagacugaugagaaaggagagaagagacgacaacgaccugaagagacugagagaccugaaccaggccgugaacaaccugguggagcugaagagcacccagcagaagagcauccugagagugggcacccugaccagcgacgaccugcugauccuggccgccgaccuggagaagcugaagagcaaggugaucagaaccgagagaccccugagcgccggcguguacaugggcaaccugagcagccagcagcuggaccagagaagagcccugcugagcaugaucggcaugagcggcggcaaccagggcgugagagccggcaaggacggcguggugagagugugggacgugaagaacgccgagcugcugaacaaccaguucggcaccaugcccagccugacccuggccugccugaccaagcagggccagguggaccugaacgacgccgugcaggcccugaccgaccugggccugaucuacaccgccaaguaccccaacaccagcgaccuggacagacugacccagagccaccccauccugaacaugaucgacaccaagaagagcagccugaacaucagcggcuacaacuucagccugggcgccgccgugaaggccggcgccugcaugcuggacggcggcaacaugcuggagaccaucaaggugagcccccagaccauggacggcauccugaagagcauccugaaggugaagaaggcccugggcauguucaucagcgacacccccggcgagagaaaccccuacgagaacauccuguacaagaucugccugagcggcgacggcuggcccuacaucgccagcagaaccagcaucaccggcagagccugggagaacaccgugguggaccuggagagcgacggcaagccccagaaggccggcagcaacaacagcaacaagagccugcagagcgccggcuucaccgccggccugaccuacagccagcugaugacccugaaggacgccaugcugcagcuggaccccaacaccaagaccuggauggacaucgagggcagacccgaggaccccguggagaucgcccuguaccagcccagcagcggcugcuacauccacuucuucagagagcccaccgaccugaagcaguucaagcaggacgccaaguacagccacggcaucgacgugaccgaccuguucgccgcccagcccggccugaccagcgccgugaucgacgcccugcccagaaacauggugaucaccugccagggcagcgacgacaucagaaagcugcuggagagccagggcagaaaggacaucaagcugaucgacaucgcccugaacaagaccgacagcagaaaguacgagaacgccgugugggaccaguacaaggaccugugccacaugcacaccggcguggugguggagaagaagaagagaggcggcaaggaggagaucaccccccacugcgcccugauggacugcaucauguucgacgccgccgugagcggcggccugaacaccagcgugcugagagccgugcugcccagagacaugguguucagaaccagcacccccagaguggugcugugaggacuagucccuguucccagagcccacuuuuuuuucuuuuuuugaaauaaaauagccugucuuucagaucuaaaaaaaaaaaaaaaaaaaaaaaaaaaaaaaaaaaaaaaaaaaaaaaaaaaaaaaaaaaaaaaaaaaaaaaaaaaaaaaaaaaaaaaaaaaaaaaaaaaa

SEQ ID NO: 18370 - RNA, 2021 nt, Artificial Sequence
  mRNA product Design a-1 (A100) comprising derived and/or modified sequence from LASV(G733-SLE-2010;Clade IV)__AIT17155__SP-HsPLAT_NP(2-569) (opt4)
aggagagucccgcagucggcguccagcggcucugcuuguucgugugugugucguugcaggccuuauucaagcuuaccauggacgccaugaagagaggccugugcugcgugcugcugcugugcggcgccguguucgugagccccagcgccagcaaggagaucaagagcuuccuguggacccagagccugagaagagagcugagcggcuacugcagcaacaucaagcugcagguggugaaggacgcccaggcccugcugcacggccuggacuucagcgaggugagcaacgugcagagacugaugagaaaggagagaagagacgacaacgaccugaagagacugagagaccugaaccaggccgugaacaaccugguggagcugaagagcacccagcagaagagcgugcugagagugggcacccugaccagcgacgagcugcuggugcuggccgccgaccuggagaagcugaagagcaaggugaucagaaccgagagaccccugagcgccggcguguacaugggcaaccugagcagccagcagcuggaccagagaagagcccugcugagcaugaucggcaugagcggcggcaaccagggcgccagaaccggcagagacggcguggugagagugugggacgugaagaacgccgagcugcugaacaaccaguucggcaccaugcccagccugacccuggccugccugaccaagcagggccagguggaccugaacgacgccgugcaggcccugaccgaccugggccugaucuacaccgccaaguaccccaacaccagcgaccuggacagacugacccagagccaccccauccugaacaugaucgacaccaagaagagcagccugaacaucagcggcuacaacuucagccugggcgccgccgugaaggccggcgccugcaugcuggacggcggcaacaugcuggagaccaucaaggugagcccccagaccauggacggcauccugaagagcauccugaaggugaagaaggcccugggcauguucaucagcgacacccccggcgagagaaaccccuacgagaacauccuguacaagaucugccugagcggcgacggcuggcccuacaucgccagcagaaccagcaucaccggcagagccugggagaacaccgugguggaccuggagagcgacggcaagccccagaaggccggcagcaacaacagcaacaagagccugcagagcgccggcuucaccgccggccugaccuacagccagcugaugacccugaaggacgccaugcugcagcuggaccccaacgccaagaccuggauggacaucgagggcagacccgaggaccccguggagaucgcccuguaccagcccagcagcggcugcuacauccacuucuucagagagcccaccgaccugaagcaguucaagcaggacgccaaguacagccacggcaucgacgugaccgaccuguucgccgcccagcccggccugaccagcgccgugaucgacgcccugcccagaaacauggugaucaccugccagggcagcgacgacaucagaaagcugcuggagagccagggcagaaaggacaucaagcugaucgacaucgcccugagcaagaucgacagcagaaaguacgagaacgccgugugggaccaguacaaggaccugugccacaugcacaccggcguggugguggagaagaagaagagaggcggcaaggaggagaucaccccccacugcgcccugauggacugcaucauguucgacgccgccgugagcggcggccugaacagccuggugcugagagccgugcugcccagagacaugguguucagaaccagcacccccagaguggugcugugaggacuagucccuguucccagagcccacuuuuuuuucuuuuuuugaaauaaaauagccugucuuucagaucuaaaaaaaaaaaaaaaaaaaaaaaaaaaaaaaaaaaaaaaaaaaaaaaaaaaaaaaaaaaaaaaaaaaaaaaaaaaaaaaaaaaaaaaaaaaaaaaaaaaa

SEQ ID NO: 18371 - RNA, 2021 nt, Artificial Sequence
  mRNA product Design a-1 (A100) comprising derived and/or modified sequence from MOPV/LASV reassortant(IGS-1;Clade IV)__AFY05578__SP-HsPLAT_NP(2-569) (opt4)
aggagagucccgcagucggcguccagcggcucugcuuguucgugugugugucguugcaggccuuauucaagcuuaccauggacgccaugaagagaggccugugcugcgugcugcugcugugcggcgccguguucgugagccccagcgccagcaaggagaucaagagcuuccuguggacccagagccugagaagagagcugagcggcuacugcagcaacaucaagcugcagguggugaaggacgcccaggcccugcugcacggccuggacuucagcgaggugagcaacgugcagagacugaugagaaaggagagaagagacgacaacgaccugaagagacugagagaccugaaccaggccgugaacaaccugguggagcugaagagcacccagcagaagagcauccugagagugggcacccugaccagcgacgaccugcugauccuggccgccgaccuggagaagcugagaagcaaggugaucagaaccgagagaccccugagcgccggcguguacaugggcaaccugagcagccagcagcuggaccagagaagagcccugcugaacaugaucggcaugagcggcggcaaccagggcgccagagccggcagagacggcguggugagagugugggacgugaagaacgccgagcugcugagcaaccaguucggcaccaugcccagccugacccuggccugccugaccaagcagggccagguggaccugaacgacgccgugcaggcccugaccgaccugggccugaucuacaccgccaaguaccccaacaccagcgaccuggacagacugacccagagccaccccauccugaacaugaucgacaccaagaagagcagccugaacaucagcggcuacaacuucagccugggcgccgccgugaaggccggcgccugcaugcuggacggcggcaacaugcuggagaccaucaaggugagcccccagaccauggacggcauccugaagagcauccugaaggugaagaaggcccugggcauguucaucagcgacacccccggcgagagaaaccccuacgagaacauccuguacaagaucugccugagcggcgacggcuggcccuacaucgccagcagaaccagcaucaccggcagagccugggagaacaccgugguggaccuggagagcgacggcaagccccagaaggccgacagcaacaacagcagcaagagccugcagagcgccggcuucaccgccggccugaccuacagccagcugaugacccugaaggacgccaugcugcagcuggaccccaacgccaagaccuggauggacaucgagggcagacccgaggaccccguggagaucgcccuguaccagcccagcagcggcugcuacauccacuucuucagagagcccaccgaccugaagcaguucaagcaggacgccaaguacagccacggcaucgacgugaccgaccuguucgccacccagcccggccugaccagcgccgugaucgacgcccugcccagaaacauggugaucaccugccagggcagcgacgacaucagaaagcugcuggagagccagggcagaaaggacaucaagcugaucgacaucgaccugagcaagaccgacagcagaaaguacgagaacgccgugugggaccaguacaaggaccugugccacaugcacaccggcguggugguggagaagaagaagagaggcggcaaggaggagaucaccccccacugcgcccugauggacugcaucauguucgacgccgccgugagcggcggccugaacaccagcgugcugagagccgugcugcccagagacaugguguucagaaccagcacccccagaguggugcugugaggacuagucccuguucccagagcccacuuuuuuuucuuuuuuugaaauaaaauagccugucuuucagaucuaaaaaaaaaaaaaaaaaaaaaaaaaaaaaaaaaaaaaaaaaaaaaaaaaaaaaaaaaaaaaaaaaaaaaaaaaaaaaaaaaaaaaaaaaaaaaaaaaaaa
